United States Patent Application Publication US 2019/0348154 A1 - sequence listing, part 56

SEQ ID NO: 209045 - DNA, 1788 bp, Klebsiella oxytoca
atggatgatattaatatcagcctcgacgaacttaacactattgatttatcccccttaatccagagtaagctgccagttacctgctttgatatcgcaaagtatctttcgagcttaggggatggaagagcggagataagactgctaacccatatttgctgttttcactttcgtcccgaaaatccacaggtaccatttggtccgtgctttcaaagcagccaaggtagatcagcaattccggatgacattaacgggttgtcgctggaggtactttctcaattttgcccgacgatagagctacccgaacttcaagctcgtattgctgatacactttgggttcgtaaaattggtggaatccgttttcctttgctggcggtccgtgcttattatgcgtccagcatggctattatgacatcgcaagggacgtgggttagtgctttagaacgcctagagcgtgctcttcggctgtgttgttttttccgaaagaatactgatttcagggatgaatttgatcagctttcggcatatctactagcagagtatgaacgtaccagagaacaagccgattcaccttatccgctgcgactcctgcaactcgatatcgactgtaaagtgagtgagccatctgttattgcccaagaactcctgtctctgacaaaaaaatatctggctcaaaaatcattttcatttgccgtcgacgcttgtaaaacagcaatcccgattgcgaatcgttgctgtgacagagatacacagtttgagttctggcggcttcttgccgatacacatctggaagagtcaaaattccaagatggcggtatgatttcggcagcctgcatgcagaatgctattgaagcactggctaatattccaggaaccagagtagaacgtcttgcgctgtatgaagaaatgcgtgattaccaaatcgaatcccgtcaccagatgtccatccttcagtctccccctcaagacattagtgagattgtccatcaagccaagagtcgggtagtcggaagagatttgtttgatatggttttcagacttgcgatgctggtctgtcggccaaccggcattgagagacttaaggctcaagcaatagaacaaaaggccaacagcatagcttggatgtttggatcaacacatattgatcatgagggaatgacacttgctcgcatacccgcaggattggggattgatgatgcaaatggggcagttatttggcctatcatgatgacgagaatgcgtatcgaccatgagttggcagtcgccgggcaaattattcctgctacggatgagatcacaatgaaatatccaatctcggaagcgttttttcgcgatatattcatcaatcatcccttcatcccgtttgggcatgaagaatttttcatcaagggtatggtttgcggtttccatggagattttatgacggcatgccacgttctgctcccccagatcgaaaatagtctgagatatgtggcgaaaatcaaaggcgaggagccatcgcagcttcacggggacggttcgcaagagcgaaatggactcaagggattactggataatccactgattattgacgctttcggcgtagacataattggcaatcttcaggccttactggtagataaaatctatggtgatttacgaaaccaactagctcacggatatgtgcctgccggttactacaatcaacctccctgcatttttgcatggtggcttgtattgcacattctaatgaaccctacggcgagatactggcaagccacttacggccaagagagtgagactcagacctaa

SEQ ID NO: 209046 - DNA, 213 bp, Klebsiella oxytoca
atgctcaactgcctgggtgtagccgggattcttcctgagtctggcgttgtactcccacgattcccgcaggatgacagcgcgctcctggtcgcgctcaacgtcccatgccccgaagatggggtcagtttggatatcgaaaattattgtacgttaaggttattttttgtacctctgagctatgtgaagcttgaccactttgacaggcagctttga

SEQ ID NO: 209047 - DNA, 1758 bp, Klebsiella oxytoca
gtgcatgaaatatcattaaaccatgtgcgctttgttgccttttttggtattttagctgtattaaaagcgtggattgaatatcaaatgaaacaggaaagtaagccccttatttatttattaaatacagaattaacggttgaaaatacattaaattcattgggttttaatgctcatcattactggttaaatggtaaagagtattttaatacttcaagaacctttttgaatgtaccttacaattacgactttcctgataatcttcacgaatcagaaattgttatatttgatactcaagcgggcgatcttcaccgcccagcagatgacagctcattaagtgtatattatcagagagcaccctcttctataaattttcttactttagatatgtattttgcgatgtcaaatatatattcttcaaggagaaagcagtgcattattgttttttgtggtgaacacgatgaagttgtatataatttatatgttgatgaagaacaacccacaccaattagagcatcaacttatcaattgatgtctaagtatttaagtattagtgttagaactggttctcgtttagaagctattaatggagccgatgagcgtgaaataaagaattgtttatctaaatatttgtctggatcgcattataatattgtttttagaaatttagtttcgagtatggacactccactattgagcaacgatgctggagaaataacaggttttatccggcgtgatcctgataataagcgtataattttcctgcctcaaatacaaaataaagaaggatttttagctgagcttttagacaaggttttacctgagcatcctgatttttcggatttatttccaaataacggaagtttttcatggatctcaaatcctgcctatatttcagtggaagaaagaaataagattctcgatattgaagatgagattaaaaggcatgaagaaaccattcaaagtttaagacatgaatttaaagatatacataataaagatgaaaacgttaagttaagaaacttgctcaaagagtctggcgatgagcttgtattctcagtaaaatggtttttagaatacattggttttgcaaatattgttaatcctgacgacgatgttgatgaagaagcgggtgaactattcgaagaggatttaaactttgaatatgatggtttaagtttcattctagaagtcaaaggtattggcggaacatccacagatgctcaatgttcgcagatttctaagatagagttgcgcagaagaagacaatatcctgaaaaaaaatttaagtctgtttatattgtcaatcatcaacgctataaagaacctaaagcgagacaactgataccttttacaccagaacagatagaaaatgccgaaatgacatatcgcggcatgacgttcacatatgaactttttcatgtctatcatatgttagaaaagggtattttgcggaaagaagatgtaagagaggcatttaaacaggatggcgttattgattttagacgtagcctcaagccactaaactttaagacctgttttaaaaaatttaatgcttactcatttattcttgacggtacttttagtatcacaaaaacagataaacttgctatacaagataaagacgagcactggcatttgcttagtatcatcaatattcaggttgatagtatcgatgttgatgaagcaagcgaaggtagtgcagctatacaggttgaacagcttgtagcaggggcaaagtcatactatctgataaagtaa

SEQ ID NO: 209048 - DNA, 573 bp, Klebsiella oxytoca
atgagtaaaaacataatgcaaagccgccatgacgaatatcataaattaacgcgcggggaacgtattggttatgggatgggcgacttcgctcaaaacctggtctttggcacaataggcggctttcttgctcttcacatgctgacggtaaataccatcagcacggcaacggctgggtttatatttctttttgtccgaatcatcaatgtcttttgggatccaatggttggtacgtatgtagacaaaagaacgtcaaaagcaggtaaataccgtccctggctgttaagagccggcgtgccgctggtgatcctttccgcgttactttttgctcccattcctggcgtccgaggttcagtcccttttgcttttatcgtctatttggctctggatttagtttattcggtggtgaatattccttatggttctcttaacgcgtccctgaccagggatccggaatcgattgataaactcaccagtacccgcatgatgctggccaatagcgcgaaccttcttgtctataccctgttcccgatgtttgtacaaatggcctcgccaaaagatcgtagccttaagtga

SEQ ID NO: 209049 - DNA, 552 bp, Klebsiella oxytoca
atgcttgggtatgtatttggccggctgattggcgggatgtcatttgttgaaattgtcagggtgatagaagtcgataatccaccatacatggttgactgcgaaggactggtgttaagcacaaacgctaatggagatagcctgaatgatggcggaaagcgattctctattccatacctgagactccagagtgggtcggatggtgtaattatgccgcctaaagtcggagatgtaggccttgtcgtggtttgcgatcaggatatcaccggcgtaaaagacagtaagggcagttccgtgcctcacagcgacagaattcataatagcgctgatggagtgtaccttacatccatagcctgcctgtccgggttgcccacacaatatgttgagttccatgagagcggcatagatatcaaaagcccggaaactgtgaatattaatgggatgaagatattatcagatggacgcctgcagcttgttgatgggtcgattgtcgatgggcataggcatggtggtgtgattcacggtggagatgataccgatcctctcgccccataa

SEQ ID NO: 209050 - DNA, 606 bp, Klebsiella oxytoca
atgcgatacgcaagttttgtttttattccattgatggcaatatccagcgccgcattttgctccaatgtcatcaatgacataagtcaagttgatggaccatttaaggccactctaacttacaaagacgatgagccagcatggcttggacaaataagttttaacatgcttggatcaataaaaatgatttgtaatatcaatagcatgggtggtgatgactcttttttttctgctacttatcgatgccagaatggctacactgtctatctaaggaaaaataatgatgctgactatttatcatttgatgtttcagcaatagatttttcttccggtaatgaagcccctgttgatggtatgaaataccgtgttaaagcctcaaagccaatcagtagaattaaagattttgcttatgcaggcaggttgtttgatagaaatcaagaatacctttcaaaaaagaaagttatcacggttttagatgcctgtacctctacgatttcagctcactccgcagctgccacgatggccttaatgggacagaacgatcactcggctactgagcgagtttcatcttacatatctagggaaggtgcgaacaagttcctgatatga

SEQ ID NO: 209051 - DNA, 654 bp, Klebsiella oxytoca
atgttatcgttaaatttagcgtttgaacgtttggataaaataagtaaatactttgtccttaactcccaaaaagatttgatttttcgagatgcttatacatttataatggagactgtttatcactctgttaaaagcaaaataacaaatttagatgctgttagtaatggcggtcaactcattgaaatgaaagcaccttttaacttcatcctatgtagaacagggcgtttcattgttttggataactattatacaatcttaccaaaaaaagatcgggatgattgggaaaggcatatacataatataagcatagaagaattcatttatagcttcgacaataatacaacaaggtatttattacttgattgtaaatattactttgaccagttcaatattacacgtctggattttaatattatttcaatggtatataacactttttatgaggttttccagttagacagattttatgatccagtagtaaacagaataacagccgatgagattgaaaagcatataaacggcctacagtttgataaatcatcttatgatgaagttatcaggaagaaaacatatacctactttctcaggcttctcaggttcattgaggggcatgaagagacatggtatttaccaatgaagttagaatacaaataa

SEQ ID NO: 209052 - DNA, 363 bp, Klebsiella oxytoca
atgaacaatataagctttaaaaatacattaaaagaaatagtagctaagaagtatgaatatgaaacagaggcaatgcattatcttatcagaaaaatgaagtctcttggttataacatgaatgctaaagaccctgttattgctgcctttatattagatatgaaaaacattgagcttaacagaatcagaacatcagataaaaggtttagagcacatcaaataaaaaatgaacttgggttattatacaatcatataaaaatactaaataaaacattaccaacaagaactattgaaatagatgaagagtatataaatgatactgaacgcaaaagatcaatatcgttatggaatctaaccaaagtataa

SEQ ID NO: 209053 - DNA, 336 bp, Klebsiella oxytoca; identical to SEQ ID NO: 150359

SEQ ID NO: 209054 - DNA, 207 bp, Klebsiella oxytoca
atgcctgtccacgacgctgtacccaaaagaaagcggcttaacggtcagcttcaactttttacacaactcctgccagtgatggcgggggtttttgcttcctatggcaggttgaaacacaggacagatgaatgcctgtccacgacgctgtacccaaaagaaagcggcttaacggtcagcttcaactttttacacaactcctgccagtga

SEQ ID NO: 209055 - DNA, 207 bp, Klebsiella oxytoca; identical to SEQ ID NO: 209054

SEQ ID NO: 209056 - DNA, 432 bp, Klebsiella oxytoca
atgaacgaattttttccattagcaagcgccgccgggatgaccgtcggccttgccgtttgcgccctgatcatcggtctggtgctggcgatgctgtttgccgtcctcgagtcggtgaagctgcgcccggtcgcctggctcgcaaccggcattgtcacccttttacgcggactaccggaaatcctggtagttctgtttatctattttggttcctctcagctgctgctgaccctttctgacggctttactattaatctcggcattgtgcagatcccggtacagatgcagattgaaaattttgacgtcagcccgttcctgtgtggggctatcgcgctttctctgctgtatgccgcttacgcatcgcaaacgctgcgcggggcgcttaaagccgttccgcaggggcaatgggaatccggtcaggcgctgggattataa

SEQ ID NO: 209057 - DNA, 258 bp, Klebsiella oxytoca
atgccgcagatgtggcgccacgcgctgccgggcctcggcaaccagtggctggtgctgctgaaggataccgcactggtgagcctcattagcgtcaacgatctgatgctgcaaaccaaaagtatcgctacccgaacccaggagccgtttaactggtatatcatcgcggcagcaatctatctggtcatcaccctgttgagtcagtacattctgaaacgtattgatcagcgagcgacgcgcttcgaacggagaccaggctga

SEQ ID NO: 209058 - DNA, 519 bp, Klebsiella oxytoca
  misc_feature (231)..(250): n is a, c, g, or t
atggtcccgggcacgatgccggcacagttggtgcaggtgggaccgtggtcccgggcacaatgccggcacagttggtgcaggtgggaccgtggtcccggacagaattcctgcacagttggtgcaggtgggaccgtggtcccgggcacaatgccggtacagttggtgcaggtgggaccgtggtcccgggcacaatgccggcacagttggtgcaggtgggaccgtggtcccggnnnnnnnnnnnnnnnnnnnncggtacagttggtgcaggtgggaccgtggtcccggacagaattcctgcacagttggtgcaggtgggaccatggtcccgggcacaatgccggcacagttggtgcaggtgggaccgtggtcccgggcacaatgccggtacagttggtgcaggtgggaccgtggtcccggacagaattcctgcacagttggtgcaggtgggaccatggtcccgggcacaatgccggtacagatgatgcaggtgggaccgtggtcccgggaagattctcgtag

SEQ ID NO: 209059 - DNA, 228 bp, Klebsiella oxytoca
atggccgacgcaatggattttgcacaacagcgtgagcaggaagaccgcgagcgccacatcagcaccgcgcgcaaccgtatcgctgcgccttctcgttttacctgcgaagagtgtgaagcaccaatcccggaggaacgccgcattgccatcctgggcgttgagctatgcgtcacctgtaaggaaatcgcagagcttaaaggtaaacactataacggaggtgcggtatga

SEQ ID NO: 209060 - DNA, 864 bp, Klebsiella oxytoca
atggaaccaacattgtcattaaccgtgatgttctgtgctgcagtgggtgcttcagtatcagaatcgctgtcggaatccgagtcactgtcggaatccgagtcactatctgaatccgagtcgctgtcagagtcagaatcgctgtcggaatccgagtcactgtctgaatccgagtcgctgtcagagtcagaatcgctgtcggaatccgaatcgctgtcggaatccgagtcactgtcggagtcagaatcgctgtcggagtcagaatcgctgtcagagtccgagtcactgtcggaatccgaatcgctgtctgaatcggagtcgctgtcagagtccgaatcgctgtctgagtccgaatcgctgtccgaatccgagtcgctgtctgaatcggagtcgctgtccgaatccgagtcgctgtcggaatccgaatcgctgtcagagtccgagtcactgtcggaatccgaatcgctgtctgaatcagaatcgctgtctgaatcagaatcgctgtcgctatccgagtcactgtcagaatccgagtcactgtcagaatctgagtcgctgtccgaatcggaatcgctgtctgaatctgaatcgctgtccgaatccgaatcgctgtcagagtcagaatcgctgtcgctatccgagtcactgtcagaatccgaatcgctgtcagaatccgaatcgctgtcagaatccgaatcgctgtcggagtccgtatcgctgtctgaatcggaatcgctgtcggaatcagaatcgctgtcggaatcagaatcgctgtcgctatccgagtcgctgtcagcatccgagtcactatcggagtccgaatcactgtccgcatctgagtcagtttctgaaatcgaagagtgctga

SEQ ID NO: 209061 - DNA, 2298 bp, Klebsiella oxytoca
atgcccggccacatcgtcggtcacctgcagatcgctgaccggagtcacaactgtatccaccgtcagttcaaacgccggggaacgctcgctgacgtttccggccttgtcggtcacggtggtgctcaggctgtggtcgccctcgttcagggtgtccggcgtgtagctccagcgtccgtcctccccggcaaccaccgtacccagtacggtgtcgccgtcgtagatcgtgactgtggcccccgcctcggcggtaccgctcagggccggcgtggcgtcgttggtcagatcgccgctggccagcgggccggtatgcccggccacatcgtcggtcaccagcagatcgctgaccggagtcacgactgtatccaccgtcagctcaaacgccggggaacgctcgctgacgttcccggccttgtcggtcacggtggtgctcaggcggtggtcgccctcgttcagggtatccggcgtgaagctccagcgtccgtcctccccggcaaccaccgtacccagtacggtctcaccgtcatagatggtcaccgtggcacccgcctccgccgtgccgctcagggttggtgtggcgtcgttggtcagatcgccgctggtcagcgggccggtgtgtccggccacatcgtcgatcacctgcagatcgctgaccggagtcacgactgtatccaccgtcagctcaaacgccggagaacgctcgctgacgtttccggccttgtcggtcacggtggtgctcaggctgtggctgccttcgtcaagtgcatcgggggtgtaactccagcgtccgtcctcgccggcaaccaccatacccagcaccgtgtcgccgtcgtagatcgtgaccgtggcccccgcctcggcggtaccgctcagggccggcgtggcgtcgttggtcagatcgccgctggccagcgggcctgtatgcccggccacgtcgtcggtcacctgcagaccgctgaccggagtcaccgtcgtgtccactgtaatttcaaacgccggagagcgctcgctgacgttcccggccttgtcggttacggtggtgctcaggctgtggctgccttcatccagtgcatcaggggtgtagctccagcgtccgtcctccccggcaaccaccgtacccagtaccgtgtcgccgtcatagatcgtgaccgtggcccccgcctcggcggtaccgctcagggtcggtgtggcgtcgttggtcagatcgccgctggtcagcgggccggtatgcccggccacgtcgtcggtcacctccggcgcactggcagacggcgcggtggtatcaatcgtcagctcaaacgccggggaacgctcgctgacgttcccggccttgtcggttacggtggtgctcaggctgtggctgccttcgtcaagtgcatcaggggtgtaactccagcgtccgtcctccccggcaaccaccgtacccagtacggtctcaccgtcatagatggtcaccgtggcacccgcctctgccgtgccgctcagggccggcgtggcatcgttggtcagatcgccgctggtcagcgggccggtatgcccggccacgtcgtcggtcacctgcagatcgctgaccggagtcacgactgtgtccaccgtcagctcaaacgccggggaacgatcgctgatgttcccggccttgtcggtcacggtggtgctcaggctgtggctgccttcgtccagcgcatcaggggtgtagctccagcgtccgtcctcgccggcaaccatggtacccagcaccgtgtcgccgtcgtagatcgtgaccgtggcccccgcctccgccgtgccgctcagggttggtgtggcgtcgttggtcagatcgccgctggtcagcgggccggtgtgtccggccacgtcgtcggtcacctccggcgcactggcagacggcgcggtggtatcaattgtcagctcaaacgccggggagcgctcgctgacgttccccgccttatccgtcaccgtggtgctcaggctgtggctgccttcatccagtgcatcaggggtgtagctccagcgtccgtcctcgccggcaaccacggtacccagcaccgtgtcaccgtcatagatcgtgaccgtggcccccgcctcggcggtaccgctcagggttggtgtggcgtcgttggtcagatcgccgctggccagcgggccggtgtgtccggccacgtcgtcggtcacctccggcgcactggcagacggcgcggtggtatcaattgtcagctcaaacaccggagagcgctcgctgacgttcccggccttgtcggtcaccgtagcgctcaggctatgaggaccttcgctaagctccggtaa

SEQ ID NO: 209062 - DNA, 1020 bp, Klebsiella oxytoca
atgagcgccgcgcttcaatacttcgaagaaaatttaccccaccgcccctatcacacggatgatctcgctttcggccttcgcatctccggcaaagtgcgtgcgcttcttgcgcggtacatccagcagaaccagcctcatgcgcagttctggctggtttttgacgttgaccgcgagggggctgcgattgactggagcgaccggaacgcccccgcgccgaacatcaccgttaaaaatcctgtgaacggacacgctcacctgctctacgcactcaacatcgccgtgagaaccgcgcctgatgcctcggttaaggcgctgaaatatgccgcagcggttgaacgttcgctgtgtgagaaactttgtgctgatgtgaactacagcggcctgatttgcaaaaatccgttccacctggaatggcaggtgatggagtggcgcgaggacgcctataccctcgatgaactggcagattatctcgatttgagcgcctcagagcgtcgtagcatcgataaacattacgggatggggcgaaactgccacctgttcgaaatgacgcgcaaatgggcttacagggcgattcgtcagggctggcctgtattctcacaatggcttgatgccgtgatccagcgtgtcgaaatgtacaacgcatcacttcccgttccgctttctccggctgagtgtcgggctattggcaggagcattgcgaaatacacgcacaggaacttcacgccggaaactttcgcacagtatgtggctgatacgcacacgccagaaattcaggcagcacgcggtcgcaagggcgggaaggccaattcgtcagaaaatcagtcggacaaagggaaaaaaagcgccgctgttcggtggaatgctaacgacgacaaacgtcgtagggcgcttgatatgtatatcttgggagcgtcaacggaagatattgcagtggcggttggtgttagcagccggactattcgacgctggatggataattctggagaatggctaaccaagaaacaaataattaaattttag

SEQ ID NO: 209063 - DNA, 1551 bp, Klebsiella oxytoca
atggctagttaccattgcaccgttaaaactggtgcaaaaggcagtgccttaaaacatgctgattacatttcaagaaccggcgaatacgagaactataaatcgcgggaggatctggagttttcgtcatccggtaacatgccatcatgggcgaagaaaaatccctccgagctatggaaagccgcagatgaatttgaacgaaaaaacgggacggcataccgtgaaattgagatcgcgttaccgcgtgaactgacacgcgaacaacggatagaacttgttgaagattttgtgcaaaaggaacttggcgatcgccatgcctaccagtacgcgatccacaatccgccaggtgcaatcgacggaaaggaacaaccacacgcgcatatcatgttttgcgagcggattaatgatggtattgaacgcgatccgcagcagttttttaaacgtgctaacagcaaattaccggagagagggggcgcaaaaaaggcacgctttggtgaaacacaacaagagcgaaaatctgcccttgttgaattacgttcccgctgggcggatgtgcagaatgagcaccttgcgcgtcacggtcacgagtcgcgcgtagatcatcgttcgctgaaagaacagggtatcaatcgcacgccggaagttcatcttggccccgttcaggccgccagtctgaatggtgagcagattgttgcaatccaggaacggaggaatgccgagcgggaactcaagaccgccagagatgccgcaaatgccattcagcaggaacaggagcaaaagcaaaaaatcaaggcagttgagcctgttcgttcagcccgttcaccggagttattgcttcagtaccgcaaggttatgaaaacggtcattcagggagaggcaaggcttgctcgtttaggggatgccaatcccaatgcgctcaaagaacataagctgcttcagaatgcgaaagctaaaaaagactctctttccgaatggagcaggcgaatatatgaaggagcacggtatttagacaaactggggcgtaatgtcgtttccgcacaaagggagctgcgggagctacaggaacaacgcaatgctttgaatgggattcgtggcctgtttcggggggctgacaaaagggagattgatgcgcgtattctggagcaaaaaagtgtgctggaaaccgctgaacatgaaaggaatgaattcaggaacaagctacagcaagctgaatccgagtgggacaaagaaaacgctgcttttaagcgtaccgagggatataagtacgttggggatctggacaggtacagagaacgtgagattctggccgcggcatctttagagaataccaggcaaaaggttgctgaagaagtatccgttgcccgtagccagatgttatctctggagcctgaactcagtatatctggagatgaaaaagctcaaatgcgacatgagttactggcagaaatggcgcaggaacggcagcaacaggaggaaaaggcactgcgtatacagcgctcctgggccagtgaggcatcacgtagtaacgaacgtgatcaagatatggagcgttga

SEQ ID NO: 209064 - DNA, 222 bp, Klebsiella oxytoca
atggcgctgccttctgagacacagacaatcgaaactcattttgtggtgcgaaatgtcattatctctgatgcggagggtatttcacaggcagacctgttcagcagttttgatggggtatcctggcagttttacggctcgtatgagtttgcacccgattacacgtccggtatcggtatgttggaacaggcagaaacacagatccagacactgatggacgcatag

SEQ ID NO: 209065 - DNA, 333 bp, Klebsiella oxytoca
atggtggcccgggcggggcagccttcgggctggccggtacccattgaggccggtattcctacccccgtccgggtcaccacctatgagcgtaggaactccggtggtggcaataaccgctactcaatggaggttgcccttatggctacgatcctcaccccgtctcacccgcaatttgtcttcgtgtttgccgctgttcgtcgcgcagaccgtcagccccgtatctgtatgcttcgtaccgttgccggtgacgagcacgccgcacgcctttccctcgttcgcgattacgtcctctcgtttgccggtcgtctgccggtggcggaggtgcgcgaatga

SEQ ID NO: 209066 - DNA, 699 bp, Klebsiella oxytoca; identical to SEQ ID NO: 205530

SEQ ID NO: 209067 - DNA, 249 bp, Klebsiella oxytoca; identical to SEQ ID NO: 181289

SEQ ID NO: 209068 - DNA, 444 bp, Klebsiella oxytoca
atgaacaacgcattaacggataacaccattccgacagacactctttgtgccacacctgttaaagatgaacagcgccttcgtttctggccccagcattttggctgtatcccgcagtggataaccctcgaaccccatatcttttccgggatggaccggttgtgtgcggattacagcggtggcgtctgggctttttacactctcagcaacggtggcgctttcatggctccggaagagagtgacggtccctggtcgctgttcaatatcctgaatggtaacggcgctgaaatgagtgctgaagctgcgggtattgcggcctgtctgatggcttacagccatcacgcctgccgcacggagtgcgatgccatgacggagcattattaccgtctgcgggattacgcgctgaaccatcctgaacgcaacgccattatgcacatcatcgactga

SEQ ID NO: 209069 - DNA, 480 bp, Klebsiella oxytoca
atggaaaaacagttaccgttgtttgcatatgaactgacggcatcagcacaacagaccatccgcgcggcgctggctctgctggagcgccagttacgtgagcccggcgcatcgtttacctccagcagctcagtacgtgactggttacggcttcagctgaccatggaggaaagagaggcatttgttctgatgctgttggataaccagcaccggctgattacgcacgaaacgctgttcaaaggcaccatcagccataccgaagtccatccacgggaagtggtgaaagccaccctgaaatacaatgcggcagcggtgattgttgctcactgtcatccttcaggtcatgccgaacccagccaggctgacagacgggtgactgagcgtctgaagaatgctctggaccttgtgggggtgcgtctcctggaccacctcgttatcggcgggatggatattatctcgtttgctgaacggggctggttgtag

SEQ ID NO: 209070 - DNA, 222 bp, Klebsiella oxytoca
atgaaaattatcagtaagcgtcaggcaatggcgatataccgccagcatccgcagtcccggttgttccgcttctgtaccggcaaatataaatggtccggcagcatctgccactatgccggtcgcgaggtggaagatatcagcggtgtactggccgtattcgcagagcgccgccaggaccgcaacggcccgtatgtcgtattacgcagcgtaagcctgaattaa

SEQ ID NO: 209071 - DNA, 360 bp, Klebsiella oxytoca
ttgtcgaagaacaccacgataacaacgcatgatatcagcgaaccctggtgggggctcagacgcagtgtctccccgtgtttcggtgcccgtctggtccaggagggaaaccgcctgcattacctggctgaccgggcgaatgttagcgggcagttctgtgatgcggatttacgccatcttgaccaggctttcccggtattgatgaaacagctggagttaatgctcacctgcggtgaactgaatccccgtcatcagcactgcgtcacgttgtatgcaaaaggtctgacctgcgaggctgatacgctgggttcgcacggctatgtttatatcgcgatttatcccactcctgtcgccacggcataa

SEQ ID NO: 209072 - DNA, 390 bp, Klebsiella oxytoca
atgcaaaccaaatcatcccccctcatgcgggcggcatcgtcacgtccgtctccggtgagtgtctggcagaccctgctgaccagcctgctggcacaacactatggcctcacgcttagcgatacgccgttcagtgatgaacaggtcattcagcaacatattgatgccggtatctcgctggttgatgccctgaattttatcgttgagaagtatgaactggtccgcactgaccgcccaggcttcagcatcctgacgcagtctccgtttatcacacccatagatatcctccgggccaggaaagcaacggggctgatgaaccgtgacacgtataaagaggtgacggctattaccagagggcaacatccgcaggtcagcgctccaggcaagcgatga

SEQ ID NO: 209073 - DNA, 222 bp, Klebsiella oxytoca
atgaaaattatcagtaaacgtcaggcaatggcgatataccgacagcattcgcagtccaggctgtttcgcttctgtaccggcaaatataaatggtccggcagcatctgccactatgccggtcgcgaggtggaagatatcagcggtgtactggccgtattcgcagagcgccgccaggaccgcaacggcccgtatgtcgtattacgcagcgtaagcctgaattaa

SEQ ID NO: 209074 - DNA, 444 bp, Klebsiella oxytoca
atgaacaacgcattaacggataacaccattccgacagacactctttgtgccacacctgttaaagatgaacagcgccttcgtttctggccccagcattttggctgtatcccgcagtggataaccctcgaaccccatatcttttccgggatggaccggttgtgtgcggattacagcggtggcgtctgggctttttacactctcagcaacggtggcgctttcatggctccggaagagagtgacggtccctggtcgctgttcaatatcctgaatggtaacggcgctgaaatgagtgctgaagctgcgggtattgcggcctgtctgatggcttacagccaccatgcctgccgcacggagtgcgatgccatgacagagcattattaccgtctgcgcgactatgcgctgaaccaccctgagtgcaacgccattatgcacatcatcgactga

SEQ ID NO: 209075 - DNA, 249 bp, Klebsiella oxytoca
atgcggaggaacatacccgtgaacaccgaaacccatccgcaacttccctccggcccgtttacccgtgagcaggcctcaggcatcgcagcgcaatatgacaacgtcgccattgaagacgaccagggaacgcattttcgtctggttattcgttgcgaaggtgtgatggtctggcgggcatggaactttgaacctgaagccggagtgatgctgaatcgctacatcgcacgttatggcatccgcaggtcctga

SEQ ID NO: 209076 - DNA, 405 bp, Klebsiella oxytoca; identical to SEQ ID NO: 206632

SEQ ID NO: 209077 - DNA, 417 bp, Klebsiella oxytoca
atgattgccctggttattttgttctatatggactggaagctactggataaacatggtaaggcaagtttttcaaaatggtggattcttttttcgccagtttatattgctaaacgttgtaaagccgttggtcaggggaaaatgctgttgctggtctggcttgggatctgggttgtatatggcatcgggaactttgcgttcaatggtagcaaagcgatgctggaacgtacagcatgcgaggtggtaacggatatctatcataaacagttacgtcaatactcacagcaatgtgagaacgtaacgttaactgaaagtgaagggaaacagcactatggatttgctcaacttagtgatggtacaactaaagatattaccgtgaaagaacaattagatggtaagattgttgtatatattgaatag

SEQ ID NO: 209078 - DNA, 390 bp, Klebsiella oxytoca; identical to SEQ ID NO: 209072

SEQ ID NO: 209079 - DNA, 390 bp, Klebsiella oxytoca; identical to SEQ ID NO: 209072

SEQ ID NO: 209080 - DNA, 222 bp, Klebsiella oxytoca
atggatttttcaaccaatcacgacaatagcgatctctttgccgattatggctttcggatttacgaagaaaccgaaactggcagcaactcagcagagattgctgttcgaattgaagagttcatcgactcaaggaaggcgctggacatagaaatccgtaaacgcgccctcgaattcttgaagagagctgtaatccagttagaagaagagctttcagacaagtga

SEQ ID NO: 209081 - DNA, 510 bp, Klebsiella oxytoca
atgaaactgaaagtggcgtttattttggttacctcatgtaccgtgattggtgctgggtatttgggacgccacatttctttttcccagcaatggcccttatttgaagcacttaggactactgcttcaattatttttgctgttgttggcgcttggtttgctattatctaccctgaaagattaaaaaaatcatttaaaggagggagggatgataccaatggtagcggtatacatcgattattcacacctatagttcattcgacagtaatattggcaagcgtcttgataatcggagtatttgcccctttattaaagcaatttgactggatcattcttcataaagtcgtttttcgaggtttatcatatgggattcttgtattcctgacgttatggcagcttctaacagttgtctacagtttgattggtccagatatgattaaaaggtacacttcaaggcaaaatacaactcgccgtgccgctgagtctgttatcgccccgaagaaaaaagaataa

SEQ ID NO: 209082 - DNA, 1044 bp, Klebsiella oxytoca
atggtaactgaacaggccacttttacattttacaaaattaacaaggccggatactaccgaatgggggcaaaggaggctgaatttggtagcgtgacagagatgctggatgatttaaaagcttgggctgagcccaagacactcaaagaaacaaagacttttgaaactgacgaagaacgatatcccgcttaccttgttgattctcgttcctctggcggtgattgggcacttcttctttggaatgaagtgcccagtactggacaaaggatgccttctcttagtgaggattctaggtttggtgaggagcctgcagtgataatgaatccgatacaagaaggtagtattcctgggtatgcgacatatttctggttcattccggaacgaagccttatggcaaccataaggttgcataacaaactcacctcacaaggcactttacaaaagtatttgcaatgtttcctgaagcaatcttcaaggcatgtaaaagccaaagttattgaaactgaagaggggacacatgaagtacaaatcaccggctatatggctaatgttgatgatgttgatgaggaagagaggcgttattacccacgattttcagcctctctaataaagaatcctggtcgccatgaggtcatcaggcaaaaagctaatttcatcaaaaaaattgagcgagtgattgaactcgatcttgcccaaccagagcaactgggtctttggcaaaaaatgctcgacttcattcaactcggtgctcatcaggctcccggtgcatctactaaaattaaatatattgtttcacccgatgtaactttagctgacgtgaaccaaatgattgaagattgggatgaagatgtttctgaggtcaatgattatggattcatttttcagggtgaaccgaataaaacctattggttgagcaattctctttcgcgtactcagttcgagttacgtttagaaagggaaaatgatgagatagttaatcttcaatctctactagaagagcttggaggtaaaaaagaacgaatactgagaggagctggcctgctatga

SEQ ID NO: 209083 - DNA, 240 bp, Klebsiella oxytoca
atgaagattttcttaagaggcgggccactggatggtgagtccacgtctcttcgcactgatgactacggtgtaccaattgaacgagtagaatttcttcggcctatttctgatgtatccccgttgtttgataaaggttttgacgctcacgacctaaagcaagatgtcctgatatacacactcaagaggatagcaatcgacagggaacaccattactacgaataccactatcaaggtcgctaa

SEQ ID NO: 209084 - DNA, 207 bp, Klebsiella oxytoca
atgacaatgaattcaaatggagagggccagaaggcaggtatctctaaacattcaaaatccatcgcagaacatgcaaaacaaattggtaaaatcattgaagatgctggtgacagagacttaacagatgctgaaattgacagaatcaatgagtttaacgatgacattaaaaagcgttctaatgaaataaatcgcgcgtcaaaaggctga

SEQ ID NO: 209085 - DNA, 171 bp, Klebsiella oxytoca
atgtcaaaatacaatattgcagtcaaaagccaggaagagcaggacaaggttaacgttgaccttgccgcgtccggcgtcgcgtacaaagtgcgtctgaatatgccggtagtcccgaggtggtcgccagagagcagcccgagcatctgcgagattactttcttgagcgcctga

SEQ ID NO: 209086 - DNA, 837 bp, Klebsiella oxytoca
atggccgccggttgtcataacgaaacaggctctttgaacccgtttgggtatgaaaaaagccgctggttaagcggccctgagtttgttgacgtaattcatgcacgctgtagggctgcatgttcgccatgtggttttatgctgcatacgcttgcttggcgggtaataagaaacagtcccttgcggtgtacgaaatatgagagtgttttctccctcttcgaactcaactccattacgctgaaaaaatgccttcatcccttcatatgcagagttccgcgctatcctgcgccgctctttaagttctggcttcatgtctcgccaaaactcgcccatcgtataatcgtcgtctgccataaaaccctctgtcgttacccgctgatgcgggagaaatgctttggtcggtgtggtgggctggcactgagtcgccaatctcacttatttcctgaacgccctattgtcgtattggcctttacacaactggcccagctggttctcaggtcttatcgctctgctagcgttgcacctcgcttgaggacaccgccaccacaccccaaaacattccagttacgcaccattgccgctctccctgagcccgccgggcgtccgacgcatggtttactgtcgcgccgttcgactgaccgaatctccacttcgccgctggctaacttcgctcagctgtcgatgtttcgtttcgatggacttattaaaaaccatagttgttttatcgtcaacaacaatagttgtttttatggttgttttggttttatgtggttgttggtaaacggaatttattttttatgtcggtgtggtatgctcaaaaaaacatcaaatagggcttga

SEQ ID NO: 209087 - DNA, 210 bp, Klebsiella oxytoca
atgatgcaccactacggcaccaccccgctcattcgccagtgcgtcacgcccggcatgatggcaatgcatgaaggccgcacctatcgcgtctcagcagtcattcaggagcgtaaatgggtttacctgcacactgatgcagaaataatccgcctcagtgactgcgtgattgacgtccttctggacggtcacggcaaccctatccagcactaa

SEQ ID NO: 209088 - DNA, 972 bp, Klebsiella oxytoca
atgagcgaagtaacggacttagtcgtcattgagaaacagaacgcaatggcggtattcaccaccaaagagcagctcgacccgattattgaggcgatcgagaaagaagctcgcagcctggtaccggatgtgtcgacccgtaaaggccgcgacgctatcgcatccatggcgcacaaggttgcccgttccaaaacctacatcgacaacgccggcaaggatctggttgctgagcttaaggccctgccgaagcagatcgacgaaagccgccgcattgtgcgtgagcggctagacgcgctgaaggatgaagtgcgcaaaccgctcacagaatgggaagcagagcaggaacgaatccgggtggaagaagcctggaacgctatgcacgaagaagcattggtgatgaacaagatgttcgatgaccagcgcgccgcgcagatcgaagcagaccacgaaatggctctgctgatgaatgacaagtttgaccgtgaccgggaagagcagcgccgcctagcggaacaggaacagcgtgagcacgaagaacgcattaagcgcgaagcggcagaacaggcccgccgcgatgccgaagcgaagcacaaagcggagattgaagccgcagcgcgccgtgaagccgaagagaaagcccgcgctgagctggcggaacgccagcgcatcgaagcggaacagcgggcggcgcgtgaaaagcaagaagcggaagcacgggcggaacgcgaaaaggccgcggcggttgaagctgagcgcctcaaggcaaaacaggcagaagaaaaacgtctggccgaagagaagcgcatcgccgatgagcaggcaaaacgtgaagctgatgtgaagcaccgcaagacggtaggcaccaacatcgttaacgcactcaccagccacaccagcttaacccgcgaacaggctatcgaagtgctaactgcactgaaggatgatctgatcccctgcgcgaaaattcactactga

SEQ ID NO: 209089 - DNA, 198 bp, Klebsiella oxytoca
atgaagaccgaaactgttatcagattttttggaactaaaaccgctgttgcgcgtgcattaggtatctctcaagtcgctgtaacccgctggggtgctgttgttcctgaaaagcgagctgcgcgacttgagcatgtaactgcaggcgccttgaaatacgaccctactttttacgaagagcaaaacacgtctaaagcataa

SEQ ID NO: 209090 - DNA, 522 bp, Klebsiella oxytoca
atgaaaaaactaatacctttattgctaatttttccctttattgccttttcctccacagatttagttgaggattcaggatatatcgtaccaatatcaggcccaggaatacaaattactaacccgtacactgactataaggtcattagcggtatcgacaacggtaaaaaaattgtactaaatgtgtcggtattaaacctacgtacctacaaagagaatgcagacctaagcgaaactaataaaaattatgctgaaggaagtaaaactgtatacagttatggcgataacgtttatacaaaggattttataaaattttcctcggaagccgctataaactcgacaaaagaagacttaaaaaaattatattgtacacctgatgatatttaccctatgtcatcacaggagagactattctacgaagcacggaaagaacataagataataatgctcaattactacagtgattcaggaaaaaccctcatatttgggtttggggtttctccagaatcatgtaaatcgaaatag

SEQ ID NO: 209091 - DNA, 4110 bp, Klebsiella oxytoca
atgtcggtaccgaaccagacaccctataacatctatacctctaacgggctgacaactgtctttgcctatgagttttacctgatcagtgccagcgatattcaggtgacaatcaacggcaatgaagttacgtccggctataccgtgacaggagtgggtaatactggcggtggcgaagtcacttttatcaccgccccggcaaatggcgctactgtcattttggaacgtgtaacgccgacataccgactcaccgattaccaggataacggcgacctgctggctgacacggttaacaaagatttcgatcgtctatggatggcgattcagcgtgcatttatctatctcggcgttgcattaagccgccccctctttggtggcggaccatttaatgctgatggttgccgtatatctaatgttggtgcgcctgtagataagaatgacgcggcgaccaaagaatatgtggacgacagttcattaagcgatcgcgtttatattaatgagcaaatagagaaagaagcattagccagaaaaaatgccgatgcaaatttgcaggtaaatatcgataaagaaacagaagccagaattaatggtgataacgagttacgtaatgtaatcgctgcaaatattaataaaactatccgtgttccagagaactacattcccccgcttgccagtatcgtggcccgcagtaatacgcttatgggattcaacgcccagggggcgccgataccagtggcaacacaaacacagacggcagatctggctatcaagctggcatcagagggtggctctcaacttatttttggtcttggtaacattatcaacaccacgtcgttaatttttgcatctgtcgatactccttcggcttaccagtcaaatggtttttatgagcagtgcgatggcggtgaggcaacatggcaatataccgggaacgccatcccggaaaaggccggaactcatgctataactgaagggaaaatttataacgccaatggcgacgaatacgccttagagatacgaggcggagccattaaggttctcgctaacggcgcaaaagcgtatacctacaatgaatgtaccgaccagacaaccgatgattttgtctgtctcgggcaagccagtaatggcattctttcccgcctgacgctcggagtgtccacgggaaataacttagcaacatatgacggcggaacccgcttagatctgatttatccgaccaatatgtaccgcattggtaaagagccaataaaggggtattccggagttaattaccatttcggtgcatcttcccttatggtttatgctggtaagtcttacacctatgcagttacagggaaacgcctggacggctggcgtcatggtgtggatgaaattactgaaaaatgggaagccgttaataagcaggcatactggggatcagtcagccttcagagaacaaatatttacggagggatgtttgacggcgatcataccatccagaaaatgccagaagagtgttcggcaggggttgcgattctggcacttaacccggaagggttcaccaagcatggaacagtcatcaggagtacgttcaactgggcgtgtgtggaaatgcctgccatgctggaagccactgtcttcaatcagaaaggtcatgccttcgacaacaatacactcgactatgagtatattgttcctgcctgggttgccgcaggattaacatccagagtcggtaactttaaccgcgtaacaaattacgattgtaaatttgagggtggacgcagggggacttacagaaacgcctgcgattggtctgcgctttataactgtgaagtgacaaaccgtctggcgtggcgaaatgcagcgaacgtttccggtgctgtgccggaatatatcgccgtctgtactggtaccgcaatgcatgtctctggtggttactgggggccagcagcggccaaagattataatgctcagtatggttctgtgtatggcacggcccagaatcacgtattcactggcgtatataccgagtggacatacaacttttataccgtcagcgcctggggcttcaacggcaaagcatcccgtctgcagggcttccatctggattgtgtcagccagtacaaagataactttaccgaatatgcgtcgatccgttttgaaggcggttgcttcggcaccattgacgacggaggcaattacacctatcccgagggcttctatcattatgatacgcctaacggtgtttccgcatacagctgggggacgccaataagggatcttggcgcattccggcataacggcttcgatttcaaatacggcccttacaatatgtatattccggccggaactgactgggatgctattcgcaaccggccatatgctaaagagatttttaacccttatggtattcagttgaatgccggcccggcattcttgccatggcaggttccggccataaaatcacatatctgcatctggattaaggaccactcaggcaactttaacccgcgaaatatttatgcctggatcactgcggcgagccaggacgggccgaatgcagacgaagctctgtataagtcatttgccgaaccgatgtttgatttcggcaatggctacaagatgctgatgatccccaacaaacgactgagcgcttttgatggccagtacacttatgcccgaaatgccagcatcattgttgatgtgccgactgatggcagtacgcccatcactctgaaggcagtcgaggcatataccggcggtgttccgttattccctaacggttgcggaaactatattccggaaacgaacgggacatcagtaacaagccctgttactaaccccgtaggctttgacagttcacttggcggggggatctttggcaacggtgatattatcgggccatgggtgcatatgcgccgtacacagtcaggctacatcgtctccccgacactgaccagtggctacacgcttgatcagaaaatggtgacaggtggttgctcgctggaagccgcatttaaagtcgcattcagcgcgacggttgaaacagtcaacagcaatgcgacaactatcatcacagtgcctgctgcgtatctgccttacgtagccgtgggtataccgctgtatatcaccggcggctcatcaacaggtgttaccgggcaggtgcggctgattaagcgcctgctgaacagtgacggtacatcgtctaaccgttacctcgtacaaggcaacatcggggcagtgggtgacacgctgactatcgatcaggctcaagtcccggcttatacgttctataacgacagaaatttcaatgctgttactgcaacctcagtgaccgttaacggaacctcagtagccactgctcatcgctccagcgtttcagcaggcgttgggtatggtggcgcgtcaggagctaaagccctggagttctacgtcaacggcggaaccacctacacacagcgtattgtggccacgtctacagccgtgatgagtctggaaaccggcgggaacttgtcagtaaacgggaatacctacccgaatgctgacggaacatattcgcttggcacctcatccggtcgctggtcgcaggtttttgcatcgaatagcgttatcgggacgtcagacgagacacataaaacccgcccccgggcagatactcccgccgaaacagatgccttttatgaaatcgggcagcttcctggcgtctggcagtggctggaaaaatacatggtggaaggggatgacgcccgcctgcattccggaccgactgttcaggcggcgattgccgtgatggacaagtacggcctggactggcgggaatattccgcgttctgctatgacgagtggggcgcacaggatgctgtaattgaggaatgggatgatgaatacaaagtagtaccaggcactcctgctgaactgggcgaggacggtaacgttcttgttgaagcggtcccggaaacgcgaactctcatcagggcggcgggtagcaatgttgtccaggaggcgcgagaagccgggagcgtctacgcatttcgtaaggaagaactgctcttctggataagcagggcaaccatttcaaaacagcaggatatcgaaaaaaggctagcagcgattgaggccagaatgtcatcgtaa

SEQ ID NO: 209092 - DNA, 810 bp, Klebsiella oxytoca
atggaaggtcttgatatgtatttaatgaaaagctgtcaaaaaaaacacaatataattgagagtaactctataagagtgggaactttatttggtttcagaacactggagaatttagagctacaagatgaaagtgaagcatcttatgattacatggtaagaataattgaagctaatatcccatccgaggtcttcgtgtatgttgcagcttgggagatcggtgatgaaaacttcccctataatagcgtaagcaccccactaaacagcaagcaagctaaaggtatttgggaggctgagcgcatcaggagtaatagatatgatgttgacgtgactgatatgaaaatttatttcacaagcttacatcataattgctttgtattctgcatgtctatgtctgaatacttacccacacaacccaaatttaaagggtatgatgattattggtatttcaagcataatgacgccactgctttttctgaagaaataaaggagttaataacaaaaaaaataaaagacagcaataatcctttaggcatagacaacttcaacccagacttaattgaagttaaagcaaaacacggaatggttatgtataacaaaaaaacatcaaccatttctcgtggggatgaagcaaatcttattcagcttataaaaagacttgaaaacatatgcttcacaaaatatgaaagatacaaaaaagatgaagagtatagattttgctttgatgtattttatgacaaaatccccatatcaataaacatgccttacattgacttatctttacccctgaaattatctattaagatacaataa

SEQ ID NO: 209093 - DNA, 528 bp, Klebsiella oxytoca
atgactgattacggaggctcaacgacaccgaaaaatgaaagggattgctggaaaacgccaatcgaaatatttaacgctctcgaccttgagtttggtttctggctggatgccgcagcctctgagactaatgcgctatgcgctcactatctcactgaaatggatgacgcgctgaatagtgagtgggcgtcattcggtgcgatctggtgcaatcctccgtattctgacatcggcccatgggtggtaaaggccgcggagcaatgcaggaagcaagcccaaccggtagtaatgctgttgcccgctgatatttcaacaggctggtttagttctgcgttagaaagcgccgacgagctgcgcatgattaccggtggtcgcattcagtttgtgcccgcgtcgattactggcaagcggcagagcaatcccaaaggctccatcttattcatctggcgaccgttcattaaacctcgccacattatcacgtccgtttcactgactgagttaaagcggatcggcaatcaggaggcagcatga

SEQ ID NO: 209094 - DNA, 912 bp, Klebsiella oxytoca
atgacctcaattgttgaatttgtcagacaacaggagccgctgttctgcggcgcattaacagaccagagcgtaacgtgggccaaggaaagccagtttgcaattcagtacttccagaaaaatgactttctggcaaaaacagcgctgggaaatccaactagcgcgcagaacgccattatcaacgtggcagctattggcatcacgcttaacccggccagcaagctcgcttatctggtacctcgtgacggtatggtgtgcctagatatcagttatatgggccttttacacctggctcagtcagctggcgtcatcaagtgggggcaatgcaagttggttcacgccagcgacgcgtatgaaaatctcggccttgataaagccccggcgcataaatacaacccatatgccacgcctgaagaccgtggttcagttataggtggatattgcacagttaaaactgccgatggtgactacctaacagaagagatgagcctcgcagagattgaggaaatcagaaaagtaagcaaggcgggcacctcaccaaaaggcccttgggtaaatttttggtctgagatggctagaaaaaccatcgtgaagcgagcttataaatactggcctcgttctgaaaggctggacaatgcagtaaatatcctgaatgaaactgaaggcgtattccaggaacccgtcatgccgcataaatcagaggaagatatccgggaggatgagcgccgtcgccagcaggagattatcgatcacgttcagcaactttgtgatgacatggctcaggcagaaaccatggatgacctcaagcggatatttgctgatgcctataagcgcacatcaggaatgaagttgcagcagaacgtgcaagccatttacgcagagtgcaaggcaaaactggaggtaaccagtgagtaa

SEQ ID NO: 209095 - DNA, 312 bp, Klebsiella oxytoca
atggcaaagtatgcgatttttaagctttccatgcccaatagagggtcatggaatggcggctggtctggagagagtgataagtacgttaaaagccgtgagttgccattgaagggcagtgagcatgttaaagatggtgattaccattactacaatttcggagatggatggggtgccggaatttcagtgagaattgtcgatggcgccaaagcaaagaatgcagaaataaaaggcagtaagggtttttgcggctatgactggatgatcgatagcatcatgaaaaatggaaagattatttacgataaggctgcctga

SEQ ID NO: 209096 - DNA, 300 bp, Klebsiella oxytoca
atggaaaactcaattaaccgcaacaaggtcaatgcccggcgcattgagtcctggttgcttaaccgaattgctctgaaaggtggcaataacgtagcaaaagagattggcgtcgataaagcgcagatcaccagatggaaagagagctggctgccgaagatggcaatgctacttgcggtgctggagtggggtgtcgttgatgacgatatcgcaagactggcgaaggaagttgcagcggttcttacaaagaaaaaatccccggcagatagcagttctcaccatcagctgaacattgaattttag

SEQ ID NO: 209097 - DNA, 429 bp, Klebsiella oxytoca
atgactgcttgcttagagttcggcggtttaaaagatgaaaaaggatatggtcgcatatggataaatggtcgctatgtttttgctcaccgattttccttctgtgttgcaaacggaattcaactgtcagagatggacggtcttgttatccgacatgcttgcgacaatccatcatgcatcaatcctggccacttatgtgctggcaccaaccaggaaaatgctaatgacatggtagagaggaagcgtcaagccttcggaaatagaaatggtaaagcgaagctttccgaagaggaggtgcttgaaatattaagtatctacaagcctcaccacccagaatttggcgcaaagccattatcaaagagattcaatgtgactgctggacaaatagcaaaaattggaagaggtgagaaatggtcgcatcttcaaaaataa

SEQ ID NO: 209098 - DNA, 213 bp, Klebsiella oxytoca
atgaccagcaaattaacagcgctcatggcgctatttatcatcccggcagcagtggcggcagataatccccactgcgtaacagcaaagaatggtttcggtgctactaccacgcaatgcgatgacggcacggttactgtcactaccggtctgaaggtaattgtttgcggaaaggctcttaacggaattcatagctgcaaggagattgaactatga

SEQ ID NO: 209099 - DNA, 213 bp, Klebsiella oxytoca
atgaatgattatttaaggtggtttttgtttgagcgctggctgattaagtttgccgtaaaagactggatgactgctgacgccaacaaacttaagcagagaaaggattattacttcgccagaatgcaggagaactattgctcaatcagaagccgaatcttcatcaagaaagacttgcagtccatcttgcaactgagagggaaggttaatggctaa

SEQ ID NO: 209100 - DNA, 600 bp, Klebsiella oxytoca
atgagcctgaggtgtggtggtggaatcatcgctccgctcttggctgccatatctacgcgaacaggctctatccctaaggtgatagcgatgagtaaaacgaagataacgccagaaatggtgctttctgttgtggattactgcccactaactggttacttccactggaagtggaggccaggtaaagaaaggacaaccctggcttggaatgctagattcgcattccagagatgttcatcagtaaatgccgatggatatctgatgatcataattcatggcaagtcatacccagctcacaggcttgcatggttggttgttcatggttctatgccagacggtattgttgatcacataaatagagtcaggctggataacagaatatctaatcttcgcctcgcgacgcattctgaaaacatgcagaacaggaagcttcagaaaaataataagtctgggttcaggggtgtctcatgggatgagaagtatgggaagtggagagccagaataaacgtagctcggagatgtataaatctcggatattatgatagcccagagcttgcgtctttggcttttgagggtgctagattaaaatatcatacagtttga

SEQ ID NO: 209101 - DNA, 498 bp, Klebsiella oxytoca
atgagtcgcctaaccgccatcgccagcgctgtgattatctgcctgatggtaatccttgggtggctggctaatcactactacgacaacgcgaccgagttcaaaagacagcgcgataaagcgactgaggagctcagcctagcgaaagacaccatcgctgacatgcaggtaaggcagcgcgatgtcgctgcgctggatgccaaatacaccggagaactgacagatgctaaagccactatcgatcagcttgaacgtgatgttgcttctggcaagcgtcggttgcacttcaacgcaaaatgtaccgcgagcggagcgtccggcaccggcggcatgggcgatgctaccggcccccgacttacagactccgctgaacggaattatttcaccctcagagagcgaatcttcaccatcaccgggcaggtgagctacctgcaggaatatatccgcactcagtgcctgaaatatggcattacagggccacctctggaagtggcccgataa

SEQ ID NO: 209102 - DNA, 195 bp, Klebsiella oxytoca; identical to SEQ ID NO: 111778

SEQ ID NO: 209103 - DNA, 1419 bp, Klebsiella oxytoca
atgaaacgcaaccgcgttaacgtgctgaccgtcgtcaactccgcttcaaacatcactactgaaaccatcgacggcaagccacatatcgtggttcgcggcatcacgcctgtcgtggacgatatcgtgatgaaccggaagttgtacccggcagcagaaatcgaaaaggcctacaacacgctggagcgtaacccgatgccgctgggccacccgaaagtggacggcaagcatgtgtctgcacgtgatgtccgggcggtgaacgagtaccacgttggagcctggctgcaggacgttaaccacaaaggcgggagggtgacgggagacatgtacgtcaaccgccagtacgccgaatccagcgataagggcaagcgcctaattaaccgcctggatgagatgctggccggtactaactccgagccgatccacatctccaccggcctgctttattccggcatcgccgccaacggtgagtcgaaaggcaaaaagtacaacgagatcgccaccaacatgatgtttgaccatgttgcggtgctgctcgatgagcctggcgcgggaacgccatctgagggagtaggcattttcgtgaactccgaaggcgaagagacggagatagaggtctgcaacttgcaagacgcactcgttaacgacaatcgaaaagatggctggctgaataaaataaagttctttgtcaccaatgatggtggcatgtcttttgacgagatcgccagctcactgcgcgaagctattcgctccaaaacctctgattcatggcgttatgtcgtcagcatttacccagaccatctgattttcgaagaagagaaaaagaacacctctggccggtccctattcaaacagaagtacctcatctctgacggggctgtatcgctcgtcggcgaacctgtagaagtcgtgcgcaaacccattgagtacgagattaaaaccaacggagagaacgatccgatgaaagaactgattatcaatgcgctgcaagccgcgggtaagccgactgaaggcaagtccgacgccgaactgatggacgcttacaaccagttagcggcagagaaggcggcagccaaaaacgaaacgccggaagaaaaggccgctcgtgaaaagaaagagattgacgataagaaagccaaagagcaagccagcaacagcgaagagatgccagcgtgggcgaaggtccttactgagcaggtcaccgcacttaacagccagatcaatgccaactctgacaaagagaagggcgaaaagcgcgcagctgtgaagctggtgatgaacatgagcgatgaagaagttgcagatctggacggtaaggcgctcgacgccatgtatgccaagtgccagacatctttcggcctgaacgctgcattccgcaatcaggcaaccaacacccaatcagtcagcgaaatgccggagtaa

SEQ ID NO: 209104 - DNA, 306 bp, Klebsiella oxytoca
atgtcagaaaaaccagtccgtgaatacgataaattcatgctccgtttcccagatggcatgcgcgatgccatagccgaacgcgcgaaggctaacggcagatcaatgaattcggagatcgtcagtattctcgaggatagattgtattgtggtgatggcgatctcgatgatatggacgtcaatgaaatgctggaagtcataaaaatgcagcgtgatcttttgaagaaatacagtgaattcgttgaaagaggctctaaaacccttcaggagatctcagaaactcttaagaacaacaaaaagtccacctga

SEQ ID NO: 209105 - DNA, 552 bp, Klebsiella oxytoca
atgtggcgtaactatctgaaaataactcaaaacccaaaattgggctttgctattcaaacccgcttaactgcgggttttgtcgtatcacttcccctctgctacgattgccgcatcatttaccgaggggatagggatatgaaaaaaataattttggccattattggaatagctttagtggggtgctcacagcctaagcccgctgaaccagacatgatgtctaccattgattttagcaaggccgactacgggcaaccgccatctgactataagttacaaataaaatcttggttagagcaaaatctcaaagacccagattctgcaaaggtaagtgaaccaacgccacttagaaaagaggtcgctatcgacaatagacagccaatctttggttacaccacatgcatgggcgtcaattcaaaaaatagctatggtggatatactggcactcaaggctattggttcttcttccataacggaaagatagtgagagcgcaaaacatggaaacctttcctggtagaatgatcttcaggaaccattacgttaaatgtgactaa

SEQ ID NO: 209106 - DNA, 3375 bp, Klebsiella oxytoca
atggcagagaacgctggcggaatttactacgaattagacattgagtatcaaaagcttcttgttggtcagcagaaaataaatcagagattagaccaacttgaaaccggctttgataatacaactaaggccgtaaccaacactgatcgttcaatgtcaaagctttctcgcgtggctgtttcattggctgcggcgctttcagttgaaaaggtcgctcaatacgctgatgcttgggctactgtaagtaataaactagccaactcagttaggcctggcgagcaactcgccgaagtaacagaacgtgtattcaatattacgcaacaaactcgtagtagcttagatgcaacagcatcactatatgcccgtttagagagagctacgcgacagtatggaactagcgctaatgatcttgccagacttacaactatcataaataaaggctttgtcgtttccggcgcaacggcgcaagaagcagaaaatgcaatcattcaattatcacagggtcttgcatctggagctcttcgtggggaagagttcaattctgtaaacgaacaaggtaatcgcctgatcgtagcacttgctgactctctgggggtgagcacgggtaaaatgcgcgaactggcagcgcaaggcaagttaacaacagatgttgtggtcaacggacttttgtcacaaggggcgcaaataggtgatgaatttgccaaaaccaccacaacaattagtcaggcgattcaggttgccggtaataacatcactaaattcttcggagaaaatgccagcgtaaaagcaggggtgtcgatattcaatgatgcagttatcggccttagtgaaaatattgatatcctcggcgtagcgctaacggcagtatccgcggtaatgggatcaaggtatgtaggagctttaactcttgccacgcaggcaaaattgtctggcgcatcagccgcaataaaacaacaggtggctgaatataatgctgccaaagcaactattgctagcgcggaagcagaaattaaaaacgctcaggcaatcattgcatctgaacaggccaaggccaggcagttagctactcaggccgctattaataaacaatatggtttagccgtttcctatcaggctgagtatgcagcgatacagcgaaatataacagctgctgataatgctgcaacagcagcaaaggaaaggcttgcggcggcaactcagcaggcatctgtagcaaacagaacttacgctgcatcggcaacccttgccaagaatgctctttcattaattggtggccctgccggcgcagcaatgttggcggctgcagctgtttactacttctaccaaaaagcgcaacaagcgaagcaggaaagcatcgactttgctgattcgcttgatgggctcacagcgaaaatgaaggaaatgagttccgctcagatttccgcggctatagcaaaaacggaacagtcgatcatcgatcagcgcgatgctttagcggacctgcgcaccgaatatgaacaactggagcagaaaaaaacctttattgaacaagcagctcaaatacgcggcgctactgcggttgcaggtgacttgtcggaggttaacagagatttagcgattcaggccggaaaggttgatgaggccgaaacgaagttaagtcggacaacaagttctcttgggttactccgagctcaggcgaacggtcaatttcgggaagggatagatttacttagaagggatggtcaggaagctggcgtagtggctggcttaatgaataatcttggagatgcgataaatttcgcatcacgagcgaaggagaaatttaattcatccagccttaaggttgagcgacccaaaaatgttcaggactacttagataagttacaggagcaggtcactcttcagagtgaacttaacgacaggaagagagcgcaattaaaggctgaacaggacatcagaaaccttggtggttcggaggccgacgttaatcttgccagggatagggcagcagctgagtttgatgctcaacaggcgcagcaaaacaacaagaagtccaccaaggaatcagcatcagaagccaaaaagcttgccacgcaacaggaatcggtaaaccaaaaacttgaaaatctgcgccagcagtctgaacttgcggccagttcaactcaggagttaagccgagacagcgcgatattgcgtgcgcagcagtcactcggtagcgctgcaactcagacgcagattcaggaggctgggcagtacgcagctaaagcatgggatgcggccgcagcggcaaggggcgtaaccgaagcgctcaaggccataccggagcaggcggagaataaatcttacgctgaatccatgcagaacctgaaagccgcgctgaacgcggggaagattgatctgcaggagtacaatgcggctactgagcagatggagcagcagcatctggctaacctcgccaaaatacgctcacagcaggtggtaaacccgacccagcaggcactagctgaggttgacccagtccagcaacttgccaatcagcacgctcaggaattggccctcatccagcagtttgagcagcagggcgttttggcccatcagaacgcgctggccctcaaaaacgcggccgacacacagtacgaacagcagaggaccgcagctcaatgggaattactcagccagcaaagcctcggctataacatgctgacgagtgcagtggacgcctttagcgggaatgcctcaaacgcaattactggactgcttactggcacaatgtcagcacaggaggcgatgcggtcacttggaaataccattctgaacagtgtgatcaacagcatcgtgcaggttggcgtcgaagcgctgaaaaattacattctcggccagacgctcggggctgcatctgtcgcttcttctgttggaatggcggcaacgacggcttcggcatgggcgcctgctgctgcactggcatcactcgcaacgttgggtacaaacgccgcgccggcatctgcaggcatcacatcaacggtaggacttgcgagcggtcttgccctggctggcgcgcgctataatggcgggccggtatcggctggcagcatgtatcaggtcggcgagaaaggtaagccggagatttaccaggccagcactggcaagcagtacatgatacctggcgataatgggaaggtcattagcaataaggatatgcagtcaggaagtggcgtcagcgtacaggtgaacgttatcaaccagtcaaccggcgccaccgttcagagtgctgatggttatatgcaggacggtaatgctgtcgttgagctgctgcttactgatatcgaacgtggcggccctgtatcctcccagatacagcagacctatggactaaatcgcaaagctcaaggtgcctactaa

SEQ ID NO: 209107 - DNA, 1932 bp, Klebsiella oxytoca
atggcacaagtaccactaccaaccccgacagacaatgacgtgcctagcacagacatcagggacgcagtttatgccggcgccatgctggataaggttgtcactagtaccgaactgacatacaaagatcgtctcggcggcgagcactacacagtagacggaattaaggcagaaggggataaggtagttgaagaaacgcgacagaacctgatccccctcagtcgccagtatatgacgctggcggcagcacaggccgatatcgcgaatattcctgatggggcgaccacgtattaccgcagccccgatgacagcgcgcttgctattgaagttattaataacggaggtacgctggaggcgaccggccgtgaaatgccatcaacagcaactattgatgcaaaaataaatgaaaagttaccatctggagattatttaccttcattcttccctgttatgtatgataaaaaaggcaatgtaccgatatggttagatgagtccaggttagatgcggctggtcttggcccgattttacaaaatgttgttaaatcaacatctgacgtattaatccaatcatatctgaatcaaaatgatcttacgccagactattttcctctttatatagacagtaatggaaatgttccaatttggatggaccagtccaggttagatgcggctggtcttggcccgattttacaaaatgttgttaaatcaacatctgacgtattaatccaatcatatctgaatcaaaatgatcttacgccagactattttcctctttatatagacagtaatggaaatgttccaatttggatggaccagtccaggttagatgcggctggtcttggcccggtacttcagcagaaaatttatgattttatatctgataaaattaacatccctgactcttcttttattgagggtgatcaatataaattcacattcaaaaaggggcgtcttgctgcaggacagtcagttagtttgaattttggtgttggcattgactcatggggggaaagaagcactattccacaggcaatcattaatatattgggtggtgtttttaaagaccctggatggataaattgctctacgcgttctgatggggtgatggctggtataacgctaactgttaataatttcactaagtatgatggtgataatgaaaataataatgcccctcctcaatatggtgcagggccagacgggaacgcatactataacgttaacaccattgggactctgacatggtcaaacgtaacggccactgatctgtctttattttactatgacggaacgggaagttttaccataactatagacggaggttcgccatttacaattacaggtgctaatacatctacagccaaaaaatatgatatagcaggattatcagcaacggcgcatacagtagtgattacaagttcaggaagtggggtggtatccattttaggaatgtatggtaaaaatagtgcgaaaagttctggaattacagtctcaagaataggaaatggcggcgccatggcatcggattacctaaattggaaagattggatatctccaattgtagccagttttgatctagacctattttttatgattgtcggtacgaatgactttagaaaaagtgccggtattacggagtatgttaacggcttgcaggtggttattgacaagtataaagaagcaactccaggtatatgtatttgccttgtatctccagcccaatccaatgctgcaggttctcccgccttatccgaatatgataaagcaatgagggaattagccgttaaaaacaatgttaatatgatcagtttatatcaactttttcctaaaacttacgataactctggtggggcttgggtcgattccctacacctaagcagccttggagcctatattctggctcgtaaaattaaagataaattcatgcaggagtaa

SEQ ID NO: 209108 - DNA, 753 bp, Klebsiella oxytoca
atgtctataacctctatttatattgacgctgaattacaagtgattcagggaatgaaaaacatatcagattttttatcattgaattggtttcgtgggcttccagatattggcgcaacccctttcgctggatattacttcggaactcctgcaaccgacatatcattaaattcatatgataactcaaagccactatcgtttgttggtgcagttactaatgaaggaggtgtaattaatgttggaagggataactatgctgtaacggactataagtcgcctacagacatgacaattgctactgtgattaaaaaagggggaacgcgtggagcgaatacatactttatatctgacctgtcaggtactggaacatctctcattggcttcgggttggccatctcaacatctggaaatattgtattagctgctcagaacgcaggacaaaccggacccacttatgcaaatgttaatttctattctgaggcagttgtaggggaattagtgggagtggtggcaaccgttaaaaatggctctctttatgtggcaacatacgaccctaccacgcaaaccatgacatctggaactgcatctcttccaggtacatactccgcgggtgttaacaacataagaattggctgcaaggtcgacaacaacacatcaggtcttacaacggaagttaaatctgcactccttatggcgggggaattaactacatctgagcaggtgtcagtgatgcaatttctactagcgatgtattga

SEQ ID NO: 209109 - DNA, 201 bp, Klebsiella oxytoca
atgagaaagaagcgcataacctatcttattgtatttatgttgttttttatatttgttttgttctctgtatttacctcaaacccatcactagaaggagacagggaaagcatcaaagcctgcatctcaagccatggcgttgatgacaatacgtgtaaaagaatggttaacactttcaaggaaaaatatggaaccaacccttga

SEQ ID NO: 209110 - DNA, 246 bp, Klebsiella oxytoca
atgaaagagtggctttcaaagagaaccatatttgatgttcgttgtcgttcttgtgattttaatgggccagtacctatggttggcgagtatgtatcaatagatgcccctatggagattaactttaatggtgaaaaatgtcctgggtgtggcaatgttgatgtcctctatgcccctactggccactatgagtttgacaatgagcaaaacaaaatgaccagaacaggtgatcccaaggttaagttgtga

SEQ ID NO: 209111 - DNA, 282 bp, Klebsiella oxytoca
atggtgaaaatgggaaaatccgtgagcggaatacttacggtaatgatccttttccaccaaaaggctaacccaacagttaaaatgttgctggcccaaacattagtgcgggcttataaaggcttgagccgtatgcggggaaacttgcatgtacggttcttagggggcggcggcgcagtaatgtgctgctgctacccgacatcgtgcgctataccccttagatataaagaaaccctcgggcagaaatgctcgggggtttttctttttgtcgtctttttagtataa

SEQ ID NO: 209112 - DNA, 678 bp, Klebsiella oxytoca
atgaaaataaaaatatcatcgattattctcggaacacttttcttatctggttgtgcccccagtagtgtcgcaccaaaagtcagtagccaagaatatataactccacctgtaggaacaactaatacagcctatatgggtgatcctatggtcaaatcagctacaggatataaaactgagttattaaaattaggaagtgcatctggagctctttctgaaataaaagagggcacttactgccataccggaaataatgtttatgttaacgccattgataaaaattccgttggattaaaaaatttatatggtgttattgttaataacgtcaattacataacatatgataagactaaaaatacaatttcaccaccaaatggcacatcatataattccaatgaaatatctattcaatatgtacaaaatggattgtgtatggtgagcaattcttttgttaaaacaatagaatataatggaaaatcatctagtacattaaaattcacctatcgagaattttcacatgacatggcaagaccagcatataccactgatttcacagtagatctttcagatggaactcagatcgttgcatataaaggtgcaaagctaaaaataaacaaagcagataactcatccatcaactataccataatcaacggttttgattcaggaagcaacatctaa

SEQ ID NO: 209113 - DNA, 570 bp, Klebsiella oxytoca
atggtttacgttcttacggacaaccaatttctgttcttgggaattgagttacttctaaggaaacatggcttagcagcttcccgaatctcgattaatgagatccgaggtcagatgatgtctagggagcatctatttatcattggacgtcctctccatgaggaggacgttccgtttcttattaagcttcacaattcgggggctcggatccgctttttgcagcagcgggtaattgagtgtatgagagaagatccccccaattttattgacataaattcagtgataaatgattttattccatcagagttcaagaagatcacatacggtatattagatccattaacaataaatagatttaatattacaaatcaggaagttacagtttctcgcctagtcctttgtggactctctggtgaagacattgcttctgtcttgtcgatctcaaaacgcaccgtccaagaccatatttacagcgtgctgaagaagcttggtagcagatctgttgctgatatcttcttacagagaaatgtgatttatgccagtttatcattaagtttggaaaactgtgtttaa

SEQ ID NO: 209114 - DNA, 522 bp, Klebsiella oxytoca
atggacgaaaaacagttgcaggctctggctaacgaactggccaaaaatctcaaaactcctgaagatctcagccagttcgatcgcctgctgaaggaaatcagcgttgaagcggcgctcaatgccgaaatgtcccaccatctgggctacgataaaaatcaacccaaatcggggtccaactcccgcaacggatattccacaaagaccgttaccaccgtcgatggcccactggaactatgtactccgcgcgctcgtggcggctccttcgaacaacaactggtgaagaacaaccagccccggctcaccgggatggataaccaaatcctgtcactgtacgccaaagggatgaccacccgcgagatagcgtcgacgttcaaagagctgtatgacgcggatgtctcaccgacactggtatcgaaggtcaccgacgccgtgatggaacaagttactgaatggcaaaatcgtccactggatgcggtctatcccattgtttaccttgactgtatcgttctgaaggtcaggtag

SEQ ID NO: 209115 - DNA, 297 bp, Klebsiella oxytoca
atgtcaggaatgcaccacaacatggctatgccggagcactgcgaacaaaacgtcacaatggttcatagcatgatggcgggacatgctatgtccccaatggaagaaattgcctgcgggtactgtcagctactgatccatctgccatttgtccagttcgtactgaacgtactgctctggatgatgatactctgcgttcatatccccctccctctgctggcaatcctctctccgattttccgcgcttgggcaccacagcgcgcccgtgcaccgcctgctgcttttcttactgcgaattaa

SEQ ID NO: 209116 - DNA, 261 bp, Klebsiella oxytoca
atgttgaaaattctcaaaaccccggaagggaaaaagtttctgattgccgtagcttgtgtgtttatcgttgcagtaagcgtggtttcaaaggccgcattccagggcgttgaagatcagtacaatctgccaatggaaatctgggacatatccttgttcattattcagggagcatgggttgccgtctatagtcttctgttcaccgttataggatctctcccgtttggcttttatttcctgggacccaaggatgaaaagggttag

SEQ ID NO: 209117 - DNA, 846 bp, Klebsiella oxytoca
atgttatcacataccttaaatggcatgaacagtgacatgaacaacgatcttccttattcaatacctgtgcttgatgttaaaagcgtcagcatttctacgggccattctgccctggtcagcgatgtcagctttcggctccagcaaggcgagcgggtctgtattatcggctcatcggggtcaggtaaatctctgacggcaaaagccattataggtacattatctgccgggctgttattacaaggaagtattcgtatcaacggtgcggatgtcgtaggccttcatcccacacggcgccctcagcatgcgctggcatccgccatctttcaggactcttccaccgcgctgaacccgctgatgccggtggggcgacagcttgctctggcgttgaaaacaggtgataacgcgaggttggcctctttgttggatgcgcttcagctcagcgatatccctcaattgctctctcgctacccggcagagctttccggtgggcagcgtcagcgaatttgcatcgcgctggcgttgctggggaataatcgcctgctgattgccgatgaaccgacgacggcactggatgtgattagccagcagcaggttctgcagatattaggtcagggttctacgctgagtgctccgcctgcgttgctcttcatcacgcatgatattgccgttgccacacagttttgccagcgaggtatcgtgatggaaaaaggcaggattatggagtcaggcacaatggcccagctcctgaacgcgccggagcacccctacacccgcaaactggtacaggccgcgcgagctgctgaacagacgtttttaatacatacccgtgaggcgctcgccggatga

SEQ ID NO: 209118 - DNA, 834 bp, Klebsiella oxytoca
atgagtattcccctgcagatggcatccgaatccttcattcaggtcgacaggatttcccgctaccggagccaacccggactcccctggcagaagactctgcctgtgaatgccattcttaaagatttttcgctcacgctgcgccagcatgagcgcgtaggcctgctgggatgttcgggctgcggaaaatcgacgttactgaaagctatcctggccctagacccggtggatgacggtgaggtgtattacgatggaaaggtggtcaggccgggctctgctcgaacattacgttggtatcgccgccgggttcagtaccttcctcaggagcccgccagcacgttgccgccggcaatgcgtgtcagagagattctcaacgagccgctaaaacatttaggctgcaaccgtgatgcgtcacctgaccttgccactgcacttgaacaggtcgaactcagcgcgaaggttctcgaccagcgtgcaggctcgctttcaggggggcaggctcagcgcgttgcgctggcaagggcgctgatcatacagcccgattttctgttggccgatgaaccggtcagcgggctggatcttcccctgcgtgagcaaatcaaatcgctgcttttgcgtgttacagaagaaaaccgcatggggctgctgatcgtctctcatgacatttctatgctggcagggttgtgcgacaggacgctggtcatggaggccggaaaaatcattgaagatcgcccgacgcttgaaatgctgcatttacctcatcatccgcatacgcgtcagcttctggacgcggtaccggctcttgtaactcatgccccatcacgggcgcgtggctga

SEQ ID NO: 209119 - DNA, 1245 bp, Klebsiella oxytoca
atgactgaattgatttcagggaagaaagcgaacacctccccctcattgctgctggccagccagtttatttttaataccggtttttatgcggtggtgccttttctcgctatttttctgcgcgatgacatgctgttgtccggtgccgcgattggcctggtgctcggtctcagaaccttctcgcagcagggcatgtttctggtgggaggggcgctgactgacaggtttggcgggcgtgccatcattctgtgcggctgcgtggtccgaatcagcggctacctgctgctcgctaccagcgcctcgttatggggcgtcattctgggagcctgcctgacagggattggcggcgcgctcttctcgcctgcaatcgagtcgctgatggcgcaggcggggacgcaaagtgaaagggaaggcaagcgcagccgctcagagtggttcgcgttgttctctgtttgtggcgagctgggctcagttatcggtcctctgctgggggcattgctcacaggctacagcttccagagcgtggcccttggcggggcaggtgttttcctgtttgcgctgattatgctctatttcatgctgccgacaggcaccagccatcatggcacgctgaaaatttccccctggtggacggcattccgccagcgccgctttgttgcctttatcgtcgcttacagcgcgtatttattcagctataaccagctctatctggcgttacccgttgaactacgccgctccggaggaagtgaggcggatctcggcccactgtttatgctggcctcggtcatgatcattttcctgcaattgcctctggcacggtttgcccgaaaacgcggcgcatcacagattttgcctgtgggctttttgctgctggcgttgtcattctttagcgtcgcgctgttcgccactaccccaccgccagactcgctgtggcggctgcttcccgcggtttcactggtcacgctgttgacgctgggccagatgctaattgtgcctgtcggcatggacattatccccgttttcgcccgggataaaaatctgggtgcgcactacggagcactctcctccatgggcggcgtcaccgtgctggtcggcaattttgccctcggcgggctgctggatcgcgcactcactccttcttcgcaggcttttgttccatggctactaatgggctgcattccgttatgcagcacggtcgccatgctgtttattttacgatcgtttaaaacaacctccgggaatcaataa

SEQ ID NO: 209120 - DNA, 1527 bp, Klebsiella oxytoca
atgaatatgggtaaacctttatggcctgtgtatgggctcctgtcagccaccttattactgactggctgctttaatgaacagcaggacgaatcggccagcgccagcgagggcagaattaaagtggcgcaccttcttccaccgcgttctggcctgacgccgctcagtgatgatgcctttaaattatcgcgctggagcacggctgaaaccctggtcgtactcaacagcgccagtgacgcacagcctgcgctggcaacccgctgggaacaaatcaatgacacaacctggcgttttgtattgcgcccgaacgtcaagtttcatgacaacaccgacctgaccgcgcagtcggtggttaatgcgctgagcgttgccgctggcgccaaaccaaaaccccgtattctggatggcgtaacgctcacggccaaagcagacggcgataatgctgtactgattacgactgaaaaacgcgatcctcttctgcctcagcgtctttccagccctcagctggccattttgtcgctgaatgcctacaaagaaaacggcgtggtgaatccggttaatgcgggaaccgggccattcattctgcgcagcgtgaatggcaccagcagtgccgcgctcgatcgctttgatggctactggggcgagaaagcgaaagccagcggtattgacgcaagctttgttccggacggggccgcgcgcgcagccgcattacgtactggcacggcggatatcatcgaggcaattccggtgtctcaggccccgcttctggatcaatcactggttcatgaagtgccgatgccgagaaccaatacgctttatctcaatacggcgcagggcgtgatgaaagatcctgctatgcgagcctcagtccgtgacgtgattaatcgtcagcagattgttgataatgtctatgagaaacgtgccgacgtcgcgcaggggcttctgggcccggccttgccatgggccgcaccacttcgcaaaccggtaagtaatcccgttgcggcggggaaaccagacggagccacaatcaccctggcaacgttcagcgatcgtgcggaattgcctgaagttgcggtttatcttgcgcagcagctcactgccgccgggtttaccgtaaaacaagtggtccgtgagtattcgcagattgaagctgatgcgctggccggaaagtttgatgcctttattctgtcgcgtgcaaccgtgctggattccggcgacccggttgcctacatgtacagcgatttcgcctgtgaagggtcgttcaatatctcccagctgtgccgcccggaaattgatgttgcactgaaaaaagccagtgaaacgccagcgggtgaggcacgtcgccaggccattatggacgctgagaacatgatccttgccagcgatgctgcgatcccaatgctgcatgaacgcgtcattcagggggaaaatgcggctctgaaaaatgcgctccgtgaccctcgggagcgcacgctcatcaatagccagacccagttagttgctggcgaacagacgactgctgcacagtaa

SEQ ID NO: 209121 - DNA, 1776 bp, Klebsiella oxytoca
atgagcgaatcgctgtactgccggacctgcgccaggatccatcgggcaagtaacctgccaaaaggcttagtggcaacgttgctgtcgcggataattacgctgaccggtattgtcgtgctgatcgggatgctgccctggctttcggaccaggaccccgccatggcgctgctgagagcgcgttctgccgaacaggaagcaaccccggaagcgttagcggcgattcgccagtcgctggggctcgatcagggccctgtgcaactcctgctgcactggctcagcggcctcttgcagggtgatgccggtgactcctggatatcaggccgtcccgtgctgccaggaatgatccaggcagcccaggtctcactgacactgatgcttatgtccgccgtggtggcactgctgctggcggcgatgatttgcctgccgacgttccgacgaggtctgcaggggcggtcgtttcgttctacgggctttttcgcgtcagtattcaccgcattacccgaatttcttctggcgtcattcttactggtcgttggggccgtctggctggagtggtttcctccttacggctggaacggcctgcactatgcggtgctgcccgcgctggcaatggggatcccggcaggtggctatctggggcggatattctcggatgctttagcggcaacttttagtgaaaactggataatcacctggaccgtctccgggatatcgcgctggcacattacctgcgcggtagttaagcgaacgctgtccaccgttatgccgttaattggcctgattctggtgtcattgacgggcagtgcggtggccgtggaaaaggtcttcgccattccgggactcggcagggcaacgctgggcgccgtggttgcccaggatcttccggcgctgcaaacgggcgtgctcttcctgctcatcattgcatttatgttcggaatgctgtgtgcggggatcagatacctcattctgggccgggcgttgcgcacatcctctttgccggtcaccaatgaacctgacggaaatcacgggaaattgtcgctggtgcttccggtcgcctgtggcgttgcgttagtcgtgcttctggttattggtctgccccgcgatccttactcgtctgagtttatgcgactggctcatccttccttttcgctgccctttggggccgatgccatggggcgtgatctgctcgccagggtggctcacggcacggtgcatacctgcatgctggcgctgatggtgtcgcttatttgtctgctcctggggctggttattggtcttttccccagggtgtttgtgggaccgacagagatggcaaatgcgctgcctccggttattgcgggcttactggtggtttccatcagtggccccggcagttcaggtgcggccattgcgattgcagcagtaggctgggcacctcttgccacacataccgctgcgctggcgacagaaattcgcgccagaccttatataaacatgcttcctgttctgggtgttggctggctgcgtcagaatctgttttacattttccctgcgctgattggccctctgtttcgccatgcgatgctgcgcttaccggggatcgccctggctttagcttcactgggttttcttggactgggcgcatcaccgccggcgccggaatggggaagagtacttgcggaaggaatgccttatctggagcgcgcctattgggtcgttctggctcctgccgtcgcccttgctgttttgtcggtgatgggcgtgagtctggccggtctgacggggcaaaaaaaataa

SEQ ID NO: 209122 - DNA, 330 bp, Klebsiella oxytoca
atgcacatttatattgtcagaatggaccatccggacggcagcgggtggaatacctttgtgcgcgagcatgtgatttatctgaaaggtctgatagaacagggcaaactgttagcgtccggtccgctcaaaaacacgccactgcgggcgggatttcttattttcagggctgagacgcgcgatgaagtccagtccatgatcggtgcggacccttttgcacgtgaaggccttattgcccaccttgatatccagcaatgggacccgctgttcgggcagctcagcagttactcaagccataatgcaagcggggatttgaaggatttaattgattaa

SEQ ID NO: 209123 - DNA, 894 bp, Klebsiella oxytoca
atgctggataaacttaccggaatgcgggccttcgtggttgtggttcagacaggctcttttgtcgcggccgcagacagactcggtatgtcgcctcagatggtggcccgccatatcgccacacttgagaagcagcttgaaacgcgcctgcttaaccgaacgacgcgcaggcaaagcctgacgccggcaggatcgctgtactacaggcgttgtgaaacaattttacaggccatcgacagcgctgaccgggaagcaagcagtacgagcggagttcttgcaggtacgctgcggctgaatgcgccggtaacgttcggccgttatgtcctggtagattttttgagcacatttcttgagcgctacccgaaaatgcgtattgaacttgttcttactgatgacgttattaatcctgcttcagaggattttgacctggtgatacgaatcggcgagcttgataagaaactccggcttgcggcaaaaccgttgcctgcataccgatttattgcatgtgctgctcctcaatacctgacaaagtacggtcatccagaacaaccttctgatctgaaacatcatgagtgtctggtttttgcaccctggtctgcggggttaacccattactggccttttgccagcactgaaggtcctgctgaagtgatggtaaactctcgcctggcgattaacgactggggagcaatccttgaggcagcattaagaggcacaggtgtgctgattggttatgaaaaagagctcaggcgacttatcaacagggaaaaactcgttcctgtcctggagaacttcactattccctcacgggaaatgcatttgctctacgacccttcacgggtaaatgaaagcaggtatcaggtatttattgacgaaatgattgattatctgagctaa

SEQ ID NO: 209124 - DNA, 906 bp, Klebsiella oxytoca; identical to SEQ ID NO: 110921

SEQ ID NO: 209125 - DNA, 1011 bp, Klebsiella oxytoca
atgacctcaccacgttcgcttatcagtgccaccgtcgattttgataaagagggatttcaaaccggcgtgctgatgcttccttattcgcacaacacctccgcctatgggcgtattcccgttccgatcgccgtcctgaaacaaggggaaggtccaacggtcctgatgaccgggggtaaccatggcgatgagctggaaggacccgtcgcgttgatgaaaattatccaggaaatggcagcctggaaaattaatggcagaattattgtgattccggggcttaatttccccgcatttcagcagggtacacgcacttctcctatcgataatggcaacctgaaccgaatgttccccgggaagcggaacggcagcctgacggaaatgatcgcgcattatgttgatacggaattatttccgctcgccgacattattttagatatgcatgccggcggcgcatcatttaaccatgcgccggtgttattagccgcgctgccgaaaaacgcggcccagcatcgcgactacatcaagctcgttaacgctttcaatgcgccgacgaccatgatcatggatctgctgggagaagatcgtacatacggcgctgctgcggaacgtcacggaaagctttttctctgcggtgagtttgggggcggtgcctcctgtaacccggataatctgcagattgtcgagagtgggctgagacgcgttttacaggcatcaggggtcacgaagcatgcccccgtcgcctcacaaaatgagacgcgactgatgaaggtaggcggcgccggacattatctattctctgccgggcgaggggtgtttgagccctgttttaaacttggcgatcgcgttaaacaggatcagcttgccgggcgactctataacctcgatgccccctgggaaccggcaaaagagcactatttttccgggaccggagagattatggtcacgcgcacgttttctcatgtcgtcgccggtgattgtattgcggtgatcgcttcgcctgccacctggtattaa

SEQ ID NO: 209126 - DNA, 1332 bp, Klebsiella oxytoca
atgaatattcgatccggtgctagtcaagaggggaccacggtgggcgcatgcgcctaccctgttgggttattcctcgcctgctttgccttttcctatctcgatcgtcaaataatgagtatcctggttgagccattaaaagctactttacacatttcagatattcagataggtatacttcaggggttctcttttaccctttgctatgctaccgccggggtgattatttcccgaatggtggacagcgccaatcgggtaagattaattgcggtgtgcgtggccatttgggcatgttcaacgatgttgtgcgctaccgccggtagctatacggagctgttgatctggcgcggtggaacggctatagcggaggccgctctgagtccggccgtgttgtcgctgttcgctgatatgtttattgccagccgtttaactcgcgctaccggaatctttatgctgggcccctatattggcagcggcctggcactcaccgggggcggaatgttgttggggtggttaacccgcgaaatgggccatatgcccggtttggcggcaatgcatccctggcaatgggtctttttaatcgtcgggttacccggcatattactctccatattggtttttttcaccgtaagtgaacccgcccggcggaatcatcaggcgagtcagacatcggtggaaaagggaacgcctgcgttccgcgacgtacttaacgaactgctggtgaagaaccgtttttgcttgcctttttattttgcctacacctgcctcattatgctgttttattcgctgacggcctggttcccgacggtcatgatgcggcactttactctcacggcgggctatgttgggcaaattaccggaccggtatatatgtgtgcgggggttgtcggggttctgctggccgggaaattagtgcgcgcggcgctaccggcaaacctgctacgagactcgctcaaagtgtctgcttgcgcgtgcggattgttgattattttctccgtactcgcctcttgtatgccattttctacggcgattatcttttatgccataacgctgttctgcgccagcatcaccatggcgctggcccccattccgttacaaatagcgatccccaacagaatgcgcggccgcgcgatttccctgctggtttttatgactaacctgttgggcgggggcattgggccgtttctggtcggatatttaagccagaaatttcacggaattgacaatgcgcttggtttggggctggcgatagtgagcgtcagcgcggcaacggctgcgactctgttttatactcttgccatgaagcgcagtgctacagctgtcagccatgattaa

SEQ ID NO: 209127 - DNA, 849 bp, Klebsiella oxytoca; identical to SEQ ID NO: 110924

SEQ ID NO: 209128 - DNA, 939 bp, Klebsiella oxytoca
atgctcccggaacaggcacaaaacgcacttgatggctggatcaccgccgccgcccccgtggtcaagaaactgtatggcgagacggaaaccgaatggccagaggttcgccggcaatatatgcatggcatgcttaatctctttccggccatccgcggcgtttcctacaatacaacaatgttgggatccacccccgctctctgcgcgacgccagatgatgttgagacagagcgtacagtcctttatatccacggcggcggttacgttcacggaggcgtagaagcctaccgcggccttacgggacgtctcgccaaccagctgaaggcaaaagtctacaccccggcctaccgccaggcgcctgacttcccgttcccggtgccaataaacgatgttttttctgcctatcgcgccctcctggcctgcggtagcgatccgcgaaaactcgttctggtcggtgattctgctggcggggcaatggtggtaaccatgatgcgtaaggcacgtgacgcaggtattgcgctgccggtggcgggagtcgccatctccccatgggcaaacctcacgcacagcggtttttccgcaacggtgcgcgatggaatagatccgctctgccgcgtggcgtttctcaatatcctcgcgcgcaccttcctcgcgggtgcgctgcctacgcatcccgatgcgtctcccgtttttgccgatgttcacgatctggcgccgatcctgattcagatcggtgaaaatgaagtcatgctcagcgacgcgatccgtctcgcgtcccatctgggcgaagcgcgggtacgcacgtcgcttgaggtctggccgggaatgtttcatgtctggcatctgttggccgggacgttacccgaagccgaccaggctctgcgtaatgcggtccgtttcctcgacgacgcgctgaggatcgctgaagctagcgggaagtaa

SEQ ID NO: 209129 - DNA, 831 bp, Klebsiella oxytoca
gtgggattgacgcgttctgcggcgggaaaagcgctgtctcgtcttgaagactacctggggacccggttgtttcatcgcacaacaagaaggctttccctcacaacggaaggccatgaattttattcccgctgcttacagataatcgaagatgtgcaggaagccgaagccagtatccggcatgaccatccgcttccccgcggcacgcttcggctaacggtttccgaaggatatggcaaagcgatagtgattccgtttctgggctcgttgctggccgcatcgcccgaactgagcgttgaggccaattttacggaccggattgtcgatcttgtggaagaggggtttgatctggctatcagggtgggcgaaggggtgaccagcactgaatatgtgacgcaggtgatagcgcgcgccaggccgcgtctttatgctgcgccgggctacctggaaaagcagggcgttcctctcagcacctccgggctggaaaaacatcaacgcctcatctacgggcttggcaccactaccaccgcgtggaacttcatcgataaagaaggtcagtcggtcagcgtcaacggcaggattcacgcccggttcgatagtggcgatgccatccgggtcgctgcgacagaaggtatggggatcggacttctgcctccctttgtcgtggcacgggaactgaacgaaggcaagctggttgaagttttgccgtcaataagcgcggcagagcttgccgtccatgtcatatatcccagccgcaggtatctaccggcacgaattcgcacatttattgatgagttccgaaaatacctgaacgctaaggaaagtgaattctaa

SEQ ID NO: 209130 - DNA, 1116 bp, Klebsiella oxytoca
atgttgcagaatccccattcagtttatattggtatggacgttcacaaggaatctctggccatcgctcttgccagcccagaacgcggcggtgagattcgtttttatggcaacatccccaatcatcagcaaagcataaaccacgtatttttaaagcttcaaaaacaatattcgtcagtcatggcctgctatgaagctggtccctgcggatacaatatttatcatcagctaacagcgatgaacattgagtgcattgttgtagcaccatcacggatcccaaaatcccccacagatcgcattaagaacgatcatcgtgacgctgttggtctggcaagattattacgggccggcgaactaataccggtatggatccccgatctgacacatgaggctatgcgggacctgattcgggccagagcggcgtcaaagcaagatagcaggattgcccgacagcggatccagagtattctgttacgtaatggcaggaggtacgataaaaaaccatggggttacaatcatcgcatatggctcgcaaatcagacattccctttaccgtcacaacagatagcgtttcaacattactgtcagagccttgagcagatagaaaaccgaatagcccaattggatcaggaaatcgaccgcctgctaccagaatggtcgttgtacaacctggtctgtcagttgcaggcactgaaaggtgtagggaagacgatcgccacctcactggcatcagaactgggggatttctctcgtttccctaatccaaaacaaatcatggcctatatcgggttaatccctggcgaatactccagtggtaacaaaatccgctcccgggggataacgaaaaccggtaacagtgagctacgaaggctgttgtacgaagcagcatgggcatatcgctcccccgcaaaagtcggtagctggctcattacctaccgaccaactgaagccacacaggaatcaaaagacatagcctggaaagctcagcagcggttatgtggccgttacaaaacgcttttacaaaaagggaaacggtcacaaattgccattactgctgttgcgagggaactgactggatttatgtgggatattgccctgacggctcgccagtcaggttaa

SEQ ID NO: 209131 - DNA, 243 bp, Klebsiella oxytoca
atgacctccaataatacaccgatgttaaagttattatataaaggtcataccatctggctgttcttcggctcagaccacggtggtgagcgtggagcgttgctgtacagtctgatcgggacgtgcaaactgaacggcgtggatccagaaagctatcttcaccatgtccttgacgtcatagctgactggccggtcaaccgggtcagcgagctgctaccctggcgcataacactgccaactgaataa

SEQ ID NO: 209132 - DNA, 579 bp, Klebsiella oxytoca
atgcagagcttccatcaactcaaacgtcagtctgcaccgggctgcgacggagtgacatgggacagctatgcgcagaacgcgcatgacaatctcagagcactccacggcagacttcagcgggggcagtacagacccctgccagcaaggcaggtgttcatccccaaagaagatgggtcagaaagaccgctgagcattgtgtgtctggaggacaaaatcgtacagcaggcgatggtgacggtgctgaaccaaatctacgaggctgattttctggggttttcctatagattcagaccgggaagaggtcagcatgacgcactggatgccctgcattcggcgattatgacgcgaaaggtaaactgggtgctggatctggacatcagtaagttcttcgataccgtggaacatgactggtttctccggcaccggatcggggacgagcgcatactgaggctgatcaaacagtggatcacggttggggtaagggataaacacggacatctatgctgtcgacattatcgcgcccgaagcaataataggaacaggaccaattgttgccggtacaacactggttgtgggtaa

SEQ ID NO: 209133 - DNA, 279 bp, Klebsiella oxytoca
gtggttctgaacgcgttagcgaacgtaacattgggaggaaggctggaggtattgctggaggtgtggctggagcccttagtggagcaagctcgggggctgcaattggttctgttgtgccagttctggggactgctaccggggctgttattggtgctgtgctggggaggtttgtggctggtgcaactgcaggagcagttaccggctcagcccttgatggactcctgtttgacagatatgagtgtggcgattgtggtcatacctttgactagaaggttatga

SEQ ID NO: 209134 - DNA, 372 bp, Klebsiella oxytoca
atgatgaagagcgcccttatctgcttgctgggcatgctttctgccgcgccgctttatgccgggatcatgcctgccgccaccaggatggtctatacggaaggacagcgcgaaaaaacgctgatgctggcaaataccaatgcctatccggtgattattcaaagctggatcgacgatggtgcgggccatcctgattttgaacaggcgccgtttgtcatcctccccgccgtttccgtctggaacccggagagcggcaggggctgcgcattatatataaccaggatcccttgccgacagatcgtgagtcggtgttctggattaatctctatgagatccctccgctggagggaaaaaagtcgcaggatgctcgcctga

SEQ ID NO: 209135 - DNA, 1293 bp, Klebsiella oxytoca
atgatgggagagctaaatcagatgcttgatatacagtcaattccggatggttataagcagactgaagtcggagttatccctgaagattgggatatttgtgaactccaaacagctgtagactttctagatggccaacgccggccaatcaaatcaggggatcgtgcaaaaatcagtggaccttatccttactacggtgcatcgggaatcgttgactacgtaaatgattatatctttgatgataatttgattttacttggtgaagatggtgaaaatatcttgagccggaatttgcctctggcatttatggtttcagggaagatatgggtaaataatcatgctcacgtcatgaaacctaaagattcatttgatattatttacttgacagaatacttggaaagtaaagattattctttgctaaactcaggaactgcacagccgaaattaaataagcaaacctgcctaaaaattaaggttataaaaccaactaaaaaagaacaaacagctatcgcaaaagtgctctccgatacagatgcgttgataatatcacttgagaagctggtcgcaaaaaaacagaccatcaaaaccgcaaccatgcagcaactactgactggtcgcacccgcttgccacaattcgctaaacacccggatggggtactcaagggtaataaacctagtgagctagggctcattcctgaagattggatatgcgtaaaattgggagaaataggtcaatgtatcattggccttacatatagccctcgagatgtttccgatacaggtacattagtattgcgttcatcaaacgttcagaataacaagctagcatatcaagataacgtttttgtaaatatggacttacccgagagagtcatcgtaaggaaaggcgatattttaatttgcgtcagaaatgggagccgcaaactaatcggaaaatgtgctttaatcgatcacacggctgaaggatgcgcttttggtgcctttatggctatatatagaacaaaagctcatgattttattttctaccaatttcaatctaatttaattcacaaccaaatagatgaaaccatgggggcgactattaaccagataacaaataaagacctatctggttttataatatcaatgccatcctgcgatcaagaacaaactgctatcgccaccatcctcttagatatggatgctgaactcgaggcattagagcaaaagctcgccaagttccgcgatataaaacaaggaatgatgcaacagctgctaactggacgaatccgtttaccattggatcaacagccatga

SEQ ID NO: 209136 - DNA, 231 bp, Klebsiella oxytoca
atgttgtcgaccattgctggtgagacccgtttcggtgtgccactacagttcgaaccacgggcattcggtgttgtactcaggatggcattgcagcgcgcaaccgcagagggggcaggtatcgcgatcataggaagcagtctgcgcaactataagatcaatacgtcagatagaaagcatacggatttcaatcaaagcaagtttaactttattctgtgtagtgttgtgccgtaa

SEQ ID NO: 209137 - DNA, 498 bp, Klebsiella oxytoca
atgaagggtattggaactgtacttcaggctggatacctcaaactggatcacagtatgaagacctactcagttctcacagagaatactcttttgtttaccggtcattttgccgatcttgatcctcatggctggggttctctttacgaaaaatttactggtcaggcatttgaggctgagggctatgaagtggaatacagagggctcacggcagggtttaatgatggtggtatcgaccttattctacgaaaaggggatgacactatttttgttcagtgcaaacatgcttttaaatcttcactatctcgcaactccattgagaatatcctgtataaagcaggatattatataagccttaatatgcccacgaatagagtacatctgtggttagttgtacctgatattaaacgaataaaatggaaacggtattttttacggcacaacactacacagaataaagttaaacttgctttgattgaaatccgtatgctttctatctga

SEQ ID NO: 209138 - DNA, 711 bp, Klebsiella oxytoca
atgtcatcgatttctggggttgatattgttacagggttactcatccccgtagttctgtatttgataaagaaagttattgactggacaggaaaaatcgttggtaacccacgacctaaacgaaaataccagtttgataaaattcctgcggataagaaagtagagattttttcgaaaattgatgcgttaaaggaaaaaacaacaacgccgcatgttcttgttcaaatgaaacttttatatgaacaactgggaatgtatttgccggtatggcattgtcaccaactggtttcctgtatggcggctgaaaatattagctcgctggatgtacgtctgcgaggttttctgaaaaacacaattatcggtcactatcctgagaaagggttcagcgttaacaccaaggttgtccgcagatcctacgtgataactaccttgttcgggatatttgcagttgctatgtttatttatgcaggatgggattccatctcttctttctggagaagcaaagagacagggttgtttatcttgtttttattgatttatgcttccgctattattactgttataggttatataatttcccagattgaagatatctacctgggatctaaatttgggcatttattcgagacttggctcaggaaccatccaccgtgtaacgatgtgaaccctgatacttctgcagcaacgccaactgaggagcaagcatcatcctaa

SEQ ID NO: 209139 - DNA, 459 bp, Klebsiella oxytoca
atgttacccgaagatatcgtacactcgcttgcagactggctttcaaaaatgaatgattcacagaaaattgctgcactgaatagcctgcaacgattcatacactatcatggcccgtttcgcaatgaacccgtcggttgcgtccagtggataccagctgagtgcgtgatagcaaacgactataatccggataccataagtccggttgaacgaaaaatactggagttgtcattgctacaggacggctttactcaacctatcgttgtcactgtgggacgggctgaagaacttcattatcacgtgatggatggctatcagcgttattttctcagccagaaaccactattacgtaagaggctgcgtgggcatatcctcgtgacaattatccgccctcaagatgatgctattttctcgctgatggcggcggttactcgtgaacaggtgataatcaataccaaataa

SEQ ID NO: 209140 - DNA, 843 bp, Klebsiella oxytoca
atgactgaaccatcactaaaaatgcccgcaagcaggaacgtcattctttatggtgactgctggcctgtggtcagtgccgtacagagcctgaccacgaccatgctgccggacagtgagtgccgggcgatattcgacctgccatcactgattgagcagctcacggttgagccacgggcggcactgattttatgtcttcgtccacgagagcatgttttccttttttacgccctcagacaggagctgtttgaccatcctgccctggtcatcagcgacgagatattcttcaacgacagactcatgctcagggtatggggcgatcttccatgcatgatgcatgacgagttatccatgatgataaccagccagcaactctgtgaattcctgacagttccttccggttattgtccggaaaaaagccttcttgcggattttctgcaatctccgacgcttcctgtcggattttctgaagtgcctcagatattccacctcgaagcaccactgatggactatatgtcgttactgatatatcgggaaatgctcgacagaaaaatcacaccttttcgtatgcgaatgctccaggcgatctggtctggttttcagacaagggatgagcttattactgaattagatgccccaaaaagcaaaatatggaatgaaaaacaccgtttactgatgcaactggagatgccagcacgtctgcgtgacattctttacggcacccgattttgttctctcctgcaaagaacaaaatttatatcacctgctgaggtggaaaatatacgctctgaggtcagagaacgacggatagccagggttgaaaagaattgcataacaactctctaa

SEQ ID NO: 209141 - DNA, 477 bp, Klebsiella oxytoca
atgtgttcagagaaaaatattaacgaagcagaccacacacatcacccgggtcaggccggatatgatgcctgttatataccggcgtccgtccgtcagtatcgtggagaacctctgtatatcctggtggcgtggtggtgcctgcaacagcacgactgggtcaaccgcaatcagatttcggaggcgttccgtgtacctgtccagcgggccagttacctgatggcctatttgcgtaacaaaacccgacgagtaatcgttgaaagtcgtgaaatgttactggccaataacgtttatcgctacgaaattcaggtcacccgcgtgatgcctcccggttcccgtaaaaaacgtctccccggggagaaaagacgcctgacccgcagaagtattggtaatgcagacacgacacaggccactcttatctggaataacctgagaaaaggtaatccatccccggtaaaaggggggacgaacaatgactga

SEQ ID NO: 209142 - DNA, 1047 bp, Klebsiella oxytoca
atgacagtatggagacgccttctgccggcggtgttgtgcctgctcgccgggtacagcctcacggcagcggcatataatacatcctcctcctgcacaggaacgggcaacacgactttttcgttaccgaacctcacctttaacacgaaccagttgcctgcggtcggatcggttttgtatacctccccggcgtatcccgtgtcgtataagtgtacgaccgaactggacagccaggccaccttcgctcctatgctgcagagactgggggattttgataaagtcgttgaggcacttgagagtgctgggctgggtctggatatcattctgcaggaagcggggcagcccgaagtgacctggtcctggtacgacatgacgaaaaatcgctataaaatcttcggcgccaccatgccatccaacgccactgatattttccgttcggccactttcaggctgagactgtttgtaagaaagcctatcaccagcgcgaagattgttcagttctctgccctgagcgccttcagcatcataccctccctattcaattattcccggggagtactcctgacatccactccgttttccatccgctatatgccggacaactttggctatgtcagcctcagcaccaccacggtcaatctcggtcacatctacacgaattatcagaatccggccaaacgggccagatttgaggttacggcgggtcagcggatgggcgtcgggggacccgagggcgattttaccatccccctgcagaccacgtttaccgccaccggtaagacgctgaccgataacggtcaggcggcccgcatgacaaccgaggatggtcaggcgaacggactgaagctgagcattctggacacgtcttccggcgacaagctgacctttgggcagccctccgacctgggcaaactgaaatccggcggaacaggcatcctcgccacgccggtcagtaaagactatacggcactgctggaacaggatgccggtacgccgctgagaacagggcccttctcagcgaatgtggtggtgactgtgacgtacaactga

SEQ ID NO: 209143 - DNA, 744 bp, Klebsiella oxytoca
gtgaaacacagcagtattacccggggcgtggtgattgccctggcggcgtggagcctgaacgcgcaggccgccgtcaacgcggaccgtacgcgggtcatcatgaacgggaacgaaaaaacggtctccgtcaccctgaccaatgagaacaaaacgatgccctttctggcccagtcctgggtggatgacagcaacggcagacgaagcagcatgctgatggtgctgccgccgctgcagcgaattgatggcggtcagaaaacgcaggtccgcatcatgcaggtacaggggaccgggctggataaactgccggcggaccgggaaacgctgttctggttcaacgtccgcgaaatcccgccagcgccggagacaacgaatgtcctgcagctggccctgcagagcaggctgaagctgttttaccgtccggttgccattaaaaaaggcagcaatgacacctcagagaaaaaactgacggtggagcgggagggagggaagctggtcctgaaaaatccgacgccttaccacatcaccctcgcctggctggggaccacccgtcgtgagcgccttgagggcttcagcgagggggtgatggtctccccgctgagcgcactgccggtgaaggccatcctgccggccgggtccacccggctgtgggtggggtacgtggacgactacggcgggctgcagatgaaccagtacacctgtaacgcgcagcgttgtgccatgtcactgcgggagacaacaccatga

SEQ ID NO: 209144 - DNA, 2502 bp, Klebsiella oxytoca
atgaaactgacccggctcgccatactcatcaccctgacgctttccgcacgcccggtactggccacggaatttaacgtcaatatgctgaacacagaggacagaaaaaacgctgacctctcggccttcagccgggaagggtatattgcaccgggcaactacctgctggatatctggctgaacgagcagtctgtccgggagcaataccctgtcagtgtggtcccggttaatggggccggcaacgaggaagactccgtcatctgcgtgacgcctgagctggtggatatgctgggcctgaacgcggagactctcagtcgtctgaaacccgtttctggtacacagagcaaacgctgtctggacctgcggacaccggacagtcaggtgcgttacagcgcggcgcagcagcggctgacctttgtgataccgcaggcctggatgcagtatcaggacccgaactgggttccccctgcccgctggagtcagggcatcagtggcgcgctgctggactataacctgatggtcagtcgttatatgccgcagcagggtacctccagtaccagctacagtctgtacggcaccggtggactgaatctgggggcctggcgactgcggagtgactggcagtacagccggtatgacgctggtcagggacgcacacagtccgatttttatctgccccagacctacctgttccgtcctctgccgtcggtgcgctccaggctgacgctggggcagacttacctcaattctgccatttttgactccttccgtttcgccggcgtcacgctggccagtgatgagcgtatgctgccaccgtccctgcaggggtatgccccgcaaatcagcggcattgcgaacagtaatgctgaggtcaccgtcagccagaacggtcgcatcctgtaccagacccgagtgtctcccggcccttttgtcctgcctgacctgagtcagaacatcagcggtaatctggatgtcacgctccgggaaagtaacggaaccacacgcacatggcaggtcaacaccgccagcgtcccgttcatggcccgccggggacagttacgttataaggtggcggctggtcgtccgctgtacggcgggtcacacaataaccgggcggtcagcccggactttctactgggggaggccacctggggggcctttaacagcacttcgctttacggcggggtcatcgcctccaccggggattatcagtcccttgcgctgggtgtcggccagaacatggggatactgggagcggtgtccgcggatatcacccgctcggatacccgccttccgcagggactgcgtcagaccggatacagttaccggataaactatgccaaaaccttcgataaaaccggcagcaccctggcgtttgtcggttaccggttttcagaccgacattacctgtccctcccggaatatctggcgcgccgggcggtgaacggcggtgacgtctggcacgaaaagcagagttataccctcacgtacaaccagtatttttccgctcccgccatgagcgcctccctgtccgtcagccggctggcttactggaatgcggaatcaaacaataactggatgctcagtctgaacaaaagcttcagcatcggggccattcgcggaatttctgcctccctgtcactggcccgtaaccagtacgccggcggcggaacgcagaaccaggtttatgtctccgtgaccgttccctggggggaaggacgtcaggtcagctataacgcgcagcgggataaccggggaagcctgcagcagaacgtcagctacagcgatttcagccatcccgacaccacgtggaatatcagtgccgggctgcgtcgtgatgacagtaccggcagcaacagtaacttcagcggcagtctccagagccggatgccctggggacaggtcagcgcggatgccaccctgcagcccggtcagtaccgcagtctgggcctgagctggtatggctcggctaccgccacggcgcatggcgcggccctcagccagtccctgtccggtaatgagccgcggatgatggtggataccggcggcgtggccggcgtcccggtctccggcgacagcggcgtgaccaaccgcttcggaattgcggtggtcagcggcggcggcagctatcagcgcagcgacatcgcggtcgacgtcacccgtctgccggaggatgtggaggtcagtgattcggttatcagccaggtcctgacggaaggggcgattggttaccggcgtatcagcgccagtcggggggcgcaggtcatgggacatatccgcctggcagacggcaaagcaccgccgtttggtgcgcaggtgatttcagagaaaacgggtaaaacaccggggatggtgggcgatgacgggctggcatatctgaccggcatcggtgacgaagaccgcagcgcgctggcggtttcctggaacgggcgcgtgcagtgccggctgaccctgccggcagacctgacgctcagccaggggccgcttctgctgccctgccggtaa

SEQ ID NO: 209145 - DNA, 582 bp, Klebsiella oxytoca
atgttcagaaaaacctgcctgaccgtgttagccaccgcagccatgctgagtggtacaaacgcctttgccgaccctcccacctcgggcccctttggacagggcaccattttcttccacggtacagtgactaactccccctgcaacatcgcaccgggtgatgacgccctgaaagtggagtttggccaggtgtcttaccgcgccctgaaaacagcagatgccaccacggcatcccagccgattgttattcatctgacagattgttcatttgacccggataccgcatcgcctgtaacccgcccggagggtctgatgtctaaagtgaaggtaacctttaccggggacgcaaccagcaataataaagggtatgtgaatacgggcagtgccaccaacgttgctgtccagttgctcaaaaacgataacagcacaccgatcccaccgggttacgttccgaccgatgctgatgcccagcagctgcagcccggtaataatgaactgcgtttctttgcccgactgctggctcttggtgccgccacgccgggtgaggttaaatctcaggtcacctacaccctgacctacctctga

SEQ ID NO: 209146 - DNA, 657 bp, Klebsiella oxytoca
atggttactgatttactactcagaattgcactggctggattattaggtggatttattgggattgaacgtcagctgcgtgcgaaggaagcggggttacgaacgcatattctggttggtattggtagcgccatgtttatgattgtttccaaatatggttttgaagatattctgctggaaagccatgtcgctttagatccaagccgtatcgctgcacaggtggtcagcggtatgggatttctgggggccggaaccataatcattcagaaacaggttgttaagggactgactacagccgcaggtatgtgggttactgcggctattggcctggttatcgggagtggtttgtatgaaattggtatctacggggccgtattaacgcttgttgtactggaagtgtttcgtcagttgagtaatcgcttgttaagcagacactgtggtttgctggttaaactgggtccggatagcgttccttgggtatttactgtgcttcagacgaggtcaatacgttttgcttttcgctctctgaaaaaaagttcctcaggagagaatgtatgggaattgattttggtcctgacattgcgccccgggagttccatcagcgatctgtgcccggaaattttgaaaatagaaggggttaaatcagtcgctatcagataa

SEQ ID NO: 209147 - DNA, 615 bp, Klebsiella oxytoca
atgcgtaaagaaatatcaattacatcaccagataattatttggcgacaatacaatttcgactggatgaaatgactaataataatgttaatcaggaagactcacatgaggaaacgttgcgttatcatactctgacctgggtaaacgcagcctcttcaaatgggaaaaaaattgcattcatcgcaccagtttttctggtgcggtgtctgaatcctgtaaccaggccagcatatgtcctcccgccatcgtgcgaattaccggaaccattcacaactgacatcccatctctttgtcatattttactgaacgagcttcagcgactgggtatgatgaaaaggtatgaagggttaaaaaacacgttagagttaataaaacagaactggctaaaagaaaagctagttttggctaactggtatcttttgatgtcaggggaaaattattggatatacagtaatcagagcacatgcgatgataatgttctggattcagagataacccgctgtcttcaggcacacggacatcttcattcagagatagatgcctgtgtctttttttcacacttcgggtgttggtcaacaacaccatatttctctgacaacttatctgatagcgactga

SEQ ID NO: 209148 - DNA, 534 bp, Klebsiella oxytoca
atggagtttttaaacgatgagctgacagaaatacagcaagtaaagcgggtggttcagcaggccatcgaccaatacccacgtctggctgtatttcggttgacgttggactgccccagccctgagtcaatagggtgttttcaggataccgtctaccgaaaagtaagtgaactggcagcaacccgacaattgagcggcagaccatcgccaccaacaattctcagatggattggaagcaaaacttatccccactcatatcagacactactgctgctcaaccaggacactttttacctttcccgacacgacctacttccggagaagtgtttccagacaatgaaaactttgctccgtcaggcatacaatacaatccgaacaacgaatgaactgtatcagagtaatgaaacaaaaataaccgtcttaagagtggacagaacccaggcaggacactctgacgctgagcataaattattacaggaaaatgccctgtcgtttcgacctgcagcgattacacagagccccagtatctttccctga

SEQ ID NO: 209149 - DNA, 2112 bp, Klebsiella oxytoca
atgaaaaaagatgtaaatggatctgaaattttaaggaagataagagagtctaaaggctctatttacctcgatttagctcatcaacgcagtttttccttgaatgttttccaaatgaatgcattggagttaattgaggcagttcaaaaagtaaaggatccggatcaaggtctgctcttaatgatggaaaataaccgcgaagcaggtctgcaggctcatcgtgaactcaatcgacatgttcataactttgtttcatcctcgttaaccttggtagagcatacgcgggtattcatgagaaaaaattactcagatactcaacttttacaaacatatgaaacgcaagtagttgcgacttttgcaaaatccccagtagcacaattcgttcaggggcttcgtaattacatgcttcacagaggtctgccggcctcaagcatgtttatgaagtttgtatcgaatccaggtgaaatagatggttctggttctatggaaacaggcgtacactatgacactgcttcgcttttggattggagagattggaaagcaccagctcgaacatatcttgagaatgcgggagaacatcttgatattcatgatttcgcaatagagtatcttacactagtaaatcaattccatgaatggctggataatactcttaatattcaccatctttctgatctccaagagctcaagttacttcaatcacaatttcaaatgattaaccagaataatgcagaaggcactccagaaaaaatctttgactcccaagattctgaaccatttagctttcattctgcgcatgtaactgaacttgatagaatatcacttgagattatggggaaggttaggccgatccatttcaaaccaagaatcagtgatttcccaactgatagaccaataatacctattactgacaaagagctgattggccccgttactttttggcagcaagatttgaatggtaaacaagccttaactttcttcacatatgatggaaaacctcatggatttacagaggatgattatgaacatcttgacgctttgattgattctgtaatgaaagctgtctgggctcctatgagtttaagtcgcaaatttgttgaaacagttttctttaattgggtaagacgagaatttcctgtggcacaaaatccattttcattaacactctgcgaaatagctcgagataaggtcaaaaatgttgagatttgggcacctgttgctaatctggaggttgaacagggattcgattttggaactattcgcatcgaaccgattaccccatctgctatcgataatatatgtaatagagcaccaaaagcaccggctggccaagaactagaggttagccaatattttgaaaaattaaggaatgacttccaaggttatgctgcggtagtagtatcaataaatgctgagcctgagtttgctagtgagcgagcttttcagattgctcgggacgctgtaggcttactaacattcttttcgccatcggcccctacttcttatcttttcaatccagttgcattatctggcgctgaatatattccgtcatctaagttaatcactttgtttgaagggggatatggtcattatgaaggcattttgcccaaaaaaatagcttattggcgcctttcagctcagcagattaaagctctaaatacagatatatttgaaactgctggttctcttattatagatgatgaactgagtgagttcgccgctgcagtgcgaggaagtatcttaacttacacaaaaggtacaaatttattagcatcaaaggagcgtctgagaagttgtttatctgctctggaaatgcttttattaagacatgatatggaaccaagagctcattgtatagccaaaagaatgggtgtaattatttcaatgaacgggattgatgatgcaaatgaagttaagagaatagcccaacaaattcactggttacttgaacaaccgcagcagacagagctaagtcatcgtgaaaacgaacttatttccttatttactaattacacatacaatgttctgtacctagctcttggaaatgcaaggacgtttcattcaaaaaaacaatttatcaatgaaattgatagaataggaaacataactgaataa

SEQ ID NO: 209150 - DNA, 126 bp, Klebsiella oxytoca; identical to SEQ ID NO: 196621

SEQ ID NO: 209151 - DNA, 1470 bp, Klebsiella oxytoca
atgaaaatgacacgcttagaagctatcaaggcatggggtagagcaagccgtgaaggtaagcctattcccgatgatgttagaaaggttctgatcagcactcaaaatgatagccgtcatgatttcggtgtagaggctcctacagctagagttagagttagaaaagagcaagtaaaaaggaatatgaacggcaagaagccgttagctacatcaggtactatccgtagtgcgggaggtgctttaactcctgaacaaatggaaatatacaatcaaaaacgcaagttagataaccaaaggcgtaaaaataaccctcaactttattcaaagctaatacaagactttattgtatctggtttatctaaaaaacaagccactaagaaagctaaagcaattattttaagtgcaaccctagataaactcaataacgataaaaaacatcctgcagtcagaacaaaccgaactgttaaatctaatactttacttaatgaggaaaagattaaatctgatccctggcacatagcaaaagttaagcaagatgagatcaatttatctaaagtcgaacaaagacggatagacacggcactgttaagacgtcctatttcatgtattgaatgcaaaattgactttaaatcatttggtggatttgtagatcatactaaagatgttcatcatgctagcgtaagtacacctaagttaattgtaggaaatgaagcacctattgactctgttgatattgtcattgagttgcctgtattgccagctaacgagccagtagagcccgttgtttctattcctgttgccaaaacgccagaagcatttagtgataagtggatcaggttgtttgtagagaaaggttacagtgctgcaatggttgaagcgtttaaacgtgatgcaattaaagagaatatgacagcattacagatacatgattttcttagtgtctgtaagccttataaagcccctgtagaaacgcctttacgtcctcttattacccctgaacatgctagcaccattacagaggccgtagaaacgcttgtagaagcacctatagcatctgttgctaatgattcctcctacgctgttatcctcgctgattctattgagcaagctttgtttgctgatcgcattgttcgtacccgtaccaatcagaacgattttaaagaacgtgtagccgctaactttggttatcgttgcgccattacgaatagcggagaagcgttagaagccgctcatattgagccagtaggaacggggaacaataacacttctaacggggtgcttatgcttgcttgtttgcatcgtctttttgacgctggattgatggctatcaagcctgattctcttacagtgcatttcaaagctaattgcacatactttgctaaaagtacgttggaaggtaaaaaaataaatgatcactcagtttctttgaacaaatcaggattgttagaacgctggcttagctttaatgcttga

SEQ ID NO: 209152 - DNA, 477 bp, Klebsiella oxytoca
atgagtgagatagatatccagggtgatgaagcgctggttcaactgctgttgaacgcagataaaggcgatatagatctgctgatcgattacatcactaacaccggtaagtttagtttttccatgtcagacagcgtaaaggctgtattacaggatgccaaacgccaggaaatacctgatgaagaaactctgcgcctgcttgtacgggagttacagcatttcggtggtaatacgttcgtgaatctgtttcgtcgcaatggcgtcagctacagcgaaattgtagatgacgttgccagccatctgaagatgaaagtcccggctgatgcatcggtagaagaaaaagaagcgctgattattgactgtgtatttacctcgttatggaaaaaatgtcggatgatgagcgccgccagcttctgcgtggtatgggcattagcgcctctgccagtctggacatccctgtctggcagaaagcggcattag

SEQ ID NO: 209153 - DNA, 510 bp, Klebsiella oxytoca
gtgctgtccctggcaattgacaccggatgtaacgttaacatcataaaccaggccggaaaagatattattgaaaacttctgcagtgatgagttttttgaaatcactctctcccatattgataaatttcagaagagaacattacatatcgttttctgtaattatcagactgccttttttctgtttgacctgtacgaactgggattcagcattcaactgaataaaaaccatgtcatcatcaacagttatattgaagattataaagatattttgttgatgcttaactacgtcagttatattcatgatgttaaattttacaacgataaaaggataccgctgtataaaggcattaataaagacattgttaaagggatgattagaaatgtttttcttgttggcctgacaaagacagaaggagataaaaatcataaagaacttgtcgcctataaaacccgacgagaacagaaagaattttcaaaggttctgaaagccgcagaggtaaacctgccataa

SEQ ID NO: 209154 - DNA, 207 bp, Klebsiella oxytoca
atgcgtattctgaaatgttatctggcaaacaatagtaacgggcgttttgttacagcaaaggaagtgagcgccagcatagacacctggacctgcgcatcttgcggtggcaccttgatactatcatcagcaatgcagccagtagatataaacactgccagaaaaaacctttccattaacctctccattacagtcagtttacagaaataa

SEQ ID NO: 209155 - DNA, 1221 bp, Klebsiella oxytoca
atgattaatttcataactactaatacaggggttgtatttaaatatgatccagaaacagcgggtaggtcttgggtttggaatgaattagaaactcattcaactgtaaaaatttctaaagttttttattttgatattagcgatctgctcaaccctccgtcacccaatcaagattttgatagttatatttatgagtttcaatttggaacttttagtggtgattatattgttgtgccaggttatattttaaatattaaaaatgatttgtatataagtaaagatatcaatcttagtaggagtatctttgctgccgagcgtaatgtttctatttttggccgactctcgcgcatattgaatcacagcaatccaatttttattggcgggggtgctgcggaggcaataccttctaatgtttttagtgagttattaagcaaattccctaactcatacgaaatggataaatatgccaatgctagagtacatatgattcttgagcaatatttggaaggcatgaaagatgccagaggactctacgaaacatatctcaataaaatagcgccaaagatagcaagtaatctcgatttaagaattatcaatgaattagaaatagaaaaatacactttgcttagagataccattgagaatgctttaagtacgaaacagcattggtccgaaaaagattggcaaaaattgatggtgcaattccttcttcttttattcccaaagtatattcttgttattgaaaatatcaccatccatgattactacagcatcccaggtaagaaaaaagatcgatacatagatataggattggttgattctagcgggaatttagatattattgaagttaaaaagccatttgatgataagatcttgcgcaggacaaagtatagaggaaatagcataccaacgtccgagctaagtggtggtatcatgcaagctgaaaaatatctcttccatttatcaaaatggggaacaaaaggtgaagacaaccttacaaaaaaatatgcaactaaactaccctctgggatgagtattcatatttcgaaccccaaggctatcatcattgttggacgtgaccaaattggtaatggaaatatgacagaaaatcaaaagctcgatttcgaaattatcaagcgaaagtataccaatatgatggacatcattacctacgacgacctcttgagacggcttaaccgtacaatttcagcacttaaaaactaa

SEQ ID NO: 209156 - DNA, 792 bp, Klebsiella oxytoca
atgacaacaactgcatatgattgcgacaagaacgtagtggcatcagatactcgctggtctgcaaaactctcgcttattgatggcgattacatcctttttgccgacgacactgggtttaataagattgttcatcgtcttggcggtgccatgttttgtgctggggatggtttaacaatacagaagttaaaagagtggtggctagccgacccgtttgaaccagaggcgcttccagatttacagcataatcatcagtttaaggtttctgttatgcttgtgtcacaaactggcgagcgcctttttgatgcaggaccaaagcaggccatggtagatcccgaagacaataatcatatccatgcagttttctctgggtctggaggctcttttgcaggacacactttcatgcagtgtgggtgtgttaaaacagccgtcacagtcgctaaatctttcgacccctactcaggcggggaagttaaattttgtaacatagcgtctggtgatggaaacctccaagacgagaatatggactacaatgcaattatggtcgcgatgcgagaaagggggattctgatgaaatttacagggttttatgccgcaaattcagaagacgtaagcacaattccgcttagagaacaccctcagtatgatcagatttctggtcagctacaatcaggagccataagagcttacgccccaacaggtgcagctgatgtcgagtggaatagtgaacgtattgagagattaaaatcagcagccagaagagttgctgagttagaagagtctttaaagtcataa

SEQ ID NO: 209157 - DNA, 528 bp, Klebsiella oxytoca
atgagtgaagaatatgccagcgagcttgagctgggaaagtgcggagaatattacgcaatttttaagttagccaagcagggttttgtttgtttcccatcagaccagggtttgccatacgacattgtggttgaggccaacggcaggctccttaagggacaggttcgctcgacgctgaaaatgcgcgattacggcaaatcaaaaagtgtttaccggttcggaacgagaacggggaaaggttatggccgcgcagcatcacttagtgcatgtgacttctacgccttcgttgtcatcgatgaagagaagatagccttcatgtctacggaagaactggccagcacaaaaaacccaggaacgcttatccagacgatggagtttagatcttctagcggtatttacccggggagaatttattccaacggcacgcaaaggatgcttgattattcacggaatattgagagctacgaagatttcaaccgcgtcgtttctctgatgggaggaagaagatgccgaatcaaaaatacagcttaa

SEQ ID NO: 209158 - DNA, 678 bp, Klebsiella oxytoca
atgaaagaacgcggaatgatttttaacggggagatggtgcgggccatcctcgacggccggaagacgcagacgcgccggattatggcaccacaaccagcggacgacattgagcgtggcattttccctaacccagaagcaattggctggaaatcctctctgaggcacaagcatggcagcaccacctctcatttttgcccttacggcaagccaggcgatcgcatctgggtgagagagacgtttcaggggccactgttcgactacgacctaatggatagctattgcaaagaccccactccgtttgagaagcccgaattctgcgtttacaaggctgatggagtgccagcgccagagttttacgatgcagatgatgaactgcattgctgctggcgaccatctatccatatgccgcgctgggccagccgcactctactggaaatcaccgacgtgcgcgttgagcgtcttaactcaatacacgatgtcgatgctatgcgagaaggaatacagaacctgacgacatgttcacacgctgatttcggcattcctggcgtcgtaaatgcgcaacatcctgtacgagcgtttcaactgctatgggaatcaatctacggcgctgacaactggaaggctaacccctgggtttgggttatcgagttcaagcgcgttgaaggcggtgcagcatga

SEQ ID NO: 209159 - DNA, 312 bp, Klebsiella oxytoca
atggattttagcgatttcatggcggagattctctgcttcttgtcgcgcatcattgagctgagtatggagttgcataacctcttcagaatccacagtttgactcggctcaacctcgacacactgctgtgcatcggtgataacgtcttgtggcggatactcacgcttttcaagcgtctgaatactctcacccatcatatttatcagggatgtgagttcattgatttgcgactcgagacggacaacccgcgcatccgtattgcgtatttgcgtttgaccttccaacaatacgggctcctgagcccggacccatag

SEQ ID NO: 209160 - DNA, 171 bp, Klebsiella oxytoca
atggataacaatcagtttgatgccaccacatttattcccgtgattggactgctgacaggggggtcacagacgcaggccaaaacgctggaaatcgaatttaaaggcgaaacggtcagcaagtggacgttctctgaaaacaacagcaagatgaaaaccggtcttattcaataa

SEQ ID NO: 209161 - DNA, 171 bp, Klebsiella oxytoca; identical to SEQ ID NO: 151414

SEQ ID NO: 209162 - DNA, 768 bp, Klebsiella oxytoca
atgcccggccacgtcgtcggtcacctccggtgcactggcagacggcgcggtggtatcaatcgtcagttcaaacgccggggaatgctcgctgacgttcccggccttgtccgtcacggtggtgctcaggctgtggctgccttcatccagtgcatcaggggtgtagctccagcgtccgtcctcaccggcaaccaccgtacccagtacggtgtcaccatcgtagatcgtgaccgtggcgcccgcctcggcggtaccgctcagggccggcgtggcgtcgttggtcagatcgccgctggccagcgggccggtatgcccggccacatcgtcggtcacctgcagatcgctgaccggagtcacaactgtatccaccgtcagctcaaacgccggagagcgctcgctgacattccccgccttatccgtcacggtggtgctcaggctgtggtcgccctcgttcagggtgtccggcgtgaaagtccagcgtccgtcctccccggcaaccaccgtacccagtacggtgtcgccgtcgtagatcgtgaccgtggcgcccgcctcggcggtaccgctcagggccggcgtggcgtcgttggtcagatcgccgctggccagcgggccggtgtgtccggccacgtcgtcggtcacctccggcgcactggcagacggcgcggtggtatcaattgtcagctcaaacaccggagagcgctcgctgacgttcccggccttgtcggtcaccgtagcgctcaggctatgaggaccttcgctaagctccggtaa

SEQ ID NO: 209163 - DNA, 126 bp, Klebsiella oxytoca
atgttggtaaatgactacgctgtttccattaccatcacaaaggtggtaaattacggcttttaccgatgtgaggctttgtgttgcaaaatcaaactgtgttgcattcccattgacaccgaaatttag

SEQ ID NO: 209164 - DNA, 873 bp, Klebsiella oxytoca
atggcacatggcaaattaattaatatctgggaaaaaaataccatccctccattaccgtggtgctcactaaacagagcagcaacactattgaagtgcgaattatcagacctctcagcatggatgaatcatctaaatcctatgattgaatttaaacaaagttcagtggaaggtactctgatggttacattgaataactatgataacccatatgagtatggggatatttcaaaagaatatattgaccttattcctgtggcatcacgaggcggattgactccaacttcgccaatgatagataccgcattcaccattgataaaaataaaaaaacactggaatttgtgggctactttgatggcatggcatccgttttagaagggatgtatttaattgaaaatgatgagctaatggtccttccgcaagatttgttctgcgagattcctattgcaaaactaggcgctccatatgttggtgaagactgcccggtactgtcagtagatgatattttaattagacctgtttatgcgtattgctacgatgctcagccaattgttttgagtatgaatgatgtttatctaagcagggaggatatagagctaatttacaattgcggagtccaaggtatagatttaccagaagatagattgaccgtgcctgaatcaattaaggctaagccaaaaattagggaaacggcaaagcaatctagatttattgcttatctaataaatgctctaggcgtgaagcaagacgaactaaaaacactttccatcaaaaatattatggatagattaagccatatggcaaatgagattaaatttcctgatgtaacggatgactctttgcgggattggctggaaaaagccggttataggtaa

SEQ ID NO: 209165 - DNA, 219 bp, Klebsiella oxytoca
atgacagcctctcaaaccgcacaatcagcacttcccactactggatacatccgccgctttcgcatgccggcgttgttaggggtatcaatgccaaccattgatcgatgggttaaaaacggcacattgccacgcccggtgaaactcaccaataacgtgactgcttttgatgcggtagagattaacaactggctggcagagcgtcggggaaaggtggcctga

SEQ ID NO: 209166 - DNA, 897 bp, Klebsiella oxytoca
atgctggatgtgtatctgttacaaaatgccgatgttaagaagattggcacactgtcaaaagataaacgagccgttaccgtgtttctgtcttatctaaaacgctccgacattcagctaagtgacattacccgtactaacgtaagcggatggtgtgactacatgaaagagaatggtagagccatacaaacacaggctaatttcctctcttcaatggctggaatcctcgatcttgccgctgcccgttatcacgatgccccgccgcttgaaaaaaaccctttcagagggcataagctcaacacagcaaagagcagagaaagttatgaagcattcaccgatcaggatgtgatcgcccttctgagaggcttacaggaagccggagagggggaattattcgatgtggcaagcattgccgcttacagcggaatgaggatcggggaaatctgcaatttgaagccagagcacattattgtgatcgacaatgttcacctcttccatgtgcaggaagggaaaacctcaaacgctgccagggttgttcctattgcctctaaaatcctgccgatggtgttggaacgctgtcagatgccctacaacggctttttgttctaccgtgccagcatcactaagagagaggacgggaagcgctcaagctggcatgtaaaccgctttggacggcttaaacgtgacattctgccggatagtgaaaacaaggtgtttcactcgtaccgccacacctggatcagcaagctaaacgccgctggagtggatgaatctcgtattgccttgctcgcgggtcactcgtttggagaaacggagtctttcaagacgtattctaaatccgttcctgagcgtatcgtgaaagaattgcagagttatgttgagctaataagctacaaatga

SEQ ID NO: 209167 - DNA, 159 bp, Klebsiella oxytoca
atggtaacggacgactatggactaaaaaacgttataaatcagatgatttacggaataatacggacggttgaggaacttgaaatggtgccgataataggagtcgaacactcaataaatttcgtgtctggtcatcacctgccgaccttcgcaaccgaatga

SEQ ID NO: 209168 - DNA, 1386 bp, Klebsiella oxytoca
atgagtaaaaacataatgcaaagccgccatgatgaatatcataaattaacgcgtggagaacgtattggttatggtatgggcgacttcgctcaaaacctggtttttggcacaataggcggctttctggctcttcacatgctgacggttaataccatcagcacggcaacggcagggtttatatttctttttgtccgaatcatcaatgtcttttgggatccgatggtcggcacgtatgttgacaaaagaacgtcaaaagcaggtaaataccgcccctggctgttaagagccggcgtaccgctggtgatcctttccgctttactttttgctcccattcctggggtcagaggttcggtaccttttgccttcatcgtttatttggctctggatttagtttattccgtagtgaatattccttatggttcgcttaatgcatccctgacccgggatccggaatcgattgataaactcaccagtacccgaatgatgctggccaatagcgccaatcttcttgtttataccctgttcccgatgtttgtacagatggcttcaccaaaagatcgcagccttaaggacaccggttttttcggcattgagctcaatctgggaaactataccgatccatcagccaactacgcctggttcggcgtctactccgtgtatatgctcatcggcgcggtggcgcttttcatctgctataaatttacgaaagaacgcgttgtcgcgacggcagaacagaccgccaacgtcaaaacgaccgatctgttccttgaactcaaacataaccgcccgctggttattctcgggctgtttttcatgctggccttcacgttcatgtttttcatgaacacggttaacggctttttcaatcagtacgttgtcggtcattcagaatggatgggcgccgtaggccttgtcgcctccataccgggcatcgcattccctattttttggcccaaactcaagaaaatttttggtaaaaaaggcttcttccatatttttctggccatgtttattgtcggtgagctactgacttacgtctggtcacgcgagggcatgcacgatgcgctttggcttgcttacatcgccaccttcattaaacaatggggcttaacgtccgcgaccggctttatgtgggcgctggttcctgaagtgattgcgtatggcgaattaaaatccggcaagcgaaatgcggcgatcattaatgcgattatgggcctctttttcaaaatcggctttaccatcggcggcgcgattcccctgtggttactggccgtctatggctttaatgaaaccggcgcccagcaaagcgccagcgctatcgacgggatcattatgaccgcggtgtggatccctatcgcgttagggaaggtgcgaacaagttcctga

SEQ ID NO: 209169 - DNA, 369 bp, Klebsiella oxytoca
atgtctgtcatctcttctgcgattttccctgaacatctccttactcagcttcagcagtctactgacgcagctgtccggaaattgaaatctttcatttatctgcatcgcaacagtagctggtatgtcaacggctcgggcaattatgccgtccgtgcgcatatctcttctgtcaaagaccagggcgttaacgtctttcttacctttcgtacaggttgccaccgcgccgagtatgtttttcaccgcctgccggtctcctttcctgagggaataacaggtcgtcgaaacgcataccgccatgcctgccgtcaggcacagcatctggcacacctgcgctaccgttttctttccggagggaattctcatgactga

SEQ ID NO: 209170 - DNA, 204 bp, Klebsiella oxytoca
atgacagctgcaatttgcgacgtatgccacggcagtggaggtcctatcgaaatcgaatgcccaaactgtagcggaacagggtatgatccaacggatgataagcccttcgctcaatgccatacctgttacggcgatcagactatcgaaatcgatgagtgcacgaattgcggcggtatcggcgaagtggtcttgaacgatttttga

SEQ ID NO: 209171 - DNA, 1215 bp, Klebsiella oxytoca
atgcaaaaaattaatgtcacccctcgcctttttgactctgaagtacttaacagctctgaaaagcgcttacgtatactcctcgaagcaaaccatacgaaattccgttctctcactgtattcgagcaaaagcttggtgaagctgagcataagcagaggaaggcccaaggcaaagccggaaaaaaagtgctaccagcgaccaaaactatcgtggccgcgatttttggctgcgaatatttcaaagacattcctaaacttgcaatccctgtagatgagcacttgtccgtcattgagcttaatcagcggcgtgcacaacaagcctcacttttgaacacctttattttggaaaagtccccagatctaggcttagcgccaccccaatccctatatcaattgtgtagtgagttcatcgaaatgtggcagcctactacccgtacttacgacgagctggtacagaccatttactatgccttggaagcccagagcgctggcaagcttcctgattggttcaaccgtttgtctcctcagttggaaaaagcaagctggaattctgaggtactgcctaaggccttagtgtatgaggcactcgcactattgaaggtagcagatgaagcctcgctcactccagctatctggaacagcctggcttggcctttaatgcgcgaaaacctgggtattgcagccacctgcttagccaataccgcagagttctcgaaaacgatccgtgcgaccaatatcctggagctgctttgggaaagcgggatcatctacgctggtgtccaactagctcggatgtatcacgacttgcttgcaccgaacaggcttaacctgcagcgagctgaagaggtcatcagccaggttttcaagcaatatgaggcctctagtaatcgttcggggatcttcaccacctctgattcccatgcggaattttttatgacctataacactataaaaattaatgtcctacgcgaagctcaagatccttttcaagttttccaacttactcagcagatccttgccgccggtacctatgccgctaggttaggtttcgaaggctttgcggcatgtgtgatgtccatcttggccccagatcttccagagctccaggggcagggaaacgaggagattttcgcactacgccaaaaaatatctaggtatccgttggcggaagctttctgcaaggcctcggctaaactcgcgttggcgaaccgccaatag

SEQ ID NO: 209172 - DNA, 441 bp, Klebsiella oxytoca
atgactctgaggtgtctgttaaacccgtggcgattcaatgcccctcagctggcgcaggcagacagattgtggctgacggcgagttttcgttttggccctgaggtcgcgcgtgtggccaacattctgctggaccgtgccggagaagaaaaacaggtaacaggcaacgggggtgaagacagtgtggtgccccgtgttccggagggaactgagcactttgctgtactgagccggacggtatccggtgtgattgggagtgctttaacggcaagtctcatggagaaaaaagtcttctgggtcggcgggattgaaggctacaaaacggaggagctggaagacctgtactggttctccgccgatatgcctgaaaagatgcagtctccgcgcctcagccgggactaccgggatttcgatgaattttgctcgatagcaaaggccacctag

SEQ ID NO: 209173 - DNA, 837 bp, Klebsiella oxytoca
atgaaaaccgaaatgactaatgacgctcagcagccaatgatgggtagccggaaaatcgctgaagtaactggcaagcagcataagcacgttgtgcgggatatcaaggtgatgcttgagcagctcggactgtacggtcctgacatggactactctgattttaaaggctttattatccagtatagagaactcaacgggcgagatgttattgatgaaattctcttaaatgaaagcctgtcgatgaccctggtgactggatatgacgtcggacggcggcttgcactcattgagcagtggcgggacatgaagcgcgaattatctcaaccgcgcattgctgctcaacccgtacaaccagagatcgggatcaaccctgattttgcagctctgacccgcaccgtcgcagaggccaccgcggcaggggtaatgaaaagcatcctggaaactactggcattcaggccgtcgtacatatcaacgcgactgtttctgccttgccagcaacccagcctgaagagccggcgcagtatcatatcgaccatgtaacccaggaagaagctgaagaaccggaatacgtgccggtgcacaaagtttcctgggctaccgggttatctgatccaacctgtcgccggctggttactttctctgaccttccgaactgttacatcgatggcgttcgtgggctttgtgtacatcgcgagtttttcatggccgcagtcgaggtcctgattaaggaatccacgccaccagccaaaggccgtaagcgttggcaccacccggggttcggcggatttgagttgcgcaaagatcctaaggagatcgctgggggcaaccacggtgaatag

SEQ ID NO: 209174 - DNA, 651 bp, Klebsiella oxytoca
atgagcaaaattgaaaaccctgtggtgctgatccacaagcgcgataacgacgactcctacgcggtggccatcaccagcggtagccagaatcaccatgatgccgtgctgatggcgtcgatggagccggatatggtcggtgatgacgtcgatacctggagcaaaaccggctactacatggcggcggagatcgagagcctgcgcgagagactgaagcaagcagaggaaaaacatattcaccttcagggtctggtcgatgattacgactggcagcgccagcggctacattctgccgctaaaagaattatcaggtggaatcgtcaggaggcaatagataggactggtgatgctgaaaacgcagaaagctacgcctgcgttcgtgaactgcgcgacgcgctgtcgttctgcgaaaaaagcggctttatccccgccgcggagcctgtgcagagcggcggtgaggtggcagcggtgccggttaacgacatcaccactggtaaaccgtttactatcaccctgcccgacatcagttcaaaggcgttctggagtggtaacggtaaagccgaagtattccatccggagacgtataagcgttgggtcaaagaagcgattgagcggtactgcgctatcgcccgtatcgatgtggaggtgaaatga

SEQ ID NO: 209175 - DNA, 330 bp, Klebsiella oxytoca
atgatggccgaagccaacatgttcgaactggtaaaaattatcaaggctgccaaaggcgatccgtctgcaatgacagacgctatctggggggccggttaccgccaaccggagcgtagcgcagaagaagcagcaaaaatcaccattgataccttcttctactgcgaaagcttcagcatgccttcggatttttggccgcgcagctatgacagtgtgctgcagaacgagctgatgaaagcggtgatcggggaagatggtgaactggacggcgctgatgcgaccaccattgcccgaagcgtttttaacgccggattcagcaaggggatgaattga

SEQ ID NO: 209176 - DNA, 135 bp, Klebsiella oxytoca
atgagcttgctgaaggtaaatcagctgacggtcatgcgcggcgaggatgtcgcgctggtggataacgtctcgttaacgcttgaagccggggagatgcttggctggttggcgaaagcgggtcgggaaaaaccgtga

SEQ ID NO: 209177 - DNA, 1473 bp, Klebsiella oxytoca
atggtaacctctgcaaaaatagtcgggctggttgaggttatggcgcaaaatttatccaaggaaaatcccccgtctttgaaggttgaacataccggagaagacgcgcaggcgctattgcgtcagctaatggcgatatacgatgtcaaaacgctggtcgcgcagttaattgccgtcggcgagcagcactggagcccggctatcctcaagcgcgttgcgacggtagcgcgcgcggcaggtcgtatcacccgccaggagcaggcccacctgcgcacgctcctgccggagccgccggcgcatcatccgcattatgggttccgcttcgtcgatctgtttgctggtatcggcggtattcgccacggttttgaagcgattggcgggcaatgcgtgtttaccagcgaatggaataaacatgcggtgcgcacctataaagccaactggtactgcgatcctgagcagcatcgtttcaatgaagatatccgcgatgtgactttgagtcatctccctgaggtgagcgaggaagaagccgcgcagcatatacgccagactatcccgcagcatgacgttttactggccggcttcccctgccagccgttttctctcgccggcgtgtcgaagaagaatgcccttggtcgcgctcacggctttgcctgcgaaacgcaggggacgctgttttttgacgtggtcaggattatcgccgcccgtcagccgccgatttttgttctggagaacgtcaaaaacctgaagagtcacgatcgggggcggacgtttcgtatcattatgcagacgctggatgagctggggtacgaggttgccgacgcggcgcataccggggcggatgaccctaaagtcatcgacgggcgctattttttaccccagcacagggagcgtattgtgctggtgggtttccggcgcgatctccagctgcatgagggatttaccctgcgcgatatcgccgctctctatcccactcgccggccgacctttggcgagctgctggagcccgcggttgacgacaaatttattctcaccagggtgctgtggaagtatctctatcgctacgcgcgtaagcaccaggagcgggggaacggttttggctacgggctcgtcgacccaacgaatccgcacagcgtggcgcgaacgctctctgcgcgctattacaaagatggcgcggaaatcctcattgaccggggctgggatcggcctctgggcgaaaagcattttgatgaccctgaaaaccagcttcgtcgtccgcgcaggctgacgccccgcgagtgcgcgaggcttatgggttttgagacgccgcagggatatcgcttccgtattccggtctcggatacccaggcctatcgccagtttggcaattccgtcgtcgtgccggtatttgcggcggtggcgaagctgctggcgccgcgtattgaacaagcggttgccaggcgtgagcaagagattaaccatggccgacgttcacgataa

SEQ ID NO: 209178 - DNA, 174 bp, Klebsiella oxytoca
atgaatgcgccagaggtgttcatcgtgccaagtgagattgtaaactccatctccacctggcatcacagcgtaccgttatttaaaatttctaaaggccaggatggagaatttctaaatcgctgggattaccttactgaagcccttacagcaattactcggcgacaatacctgtaa

SEQ ID NO: 209179 - DNA, 507 bp, Klebsiella oxytoca
atgttaatgagtaaagccgagtatgcacgtcatcgcggggtaagccgtcagactgtatatgactgggtggcgaaaggtgaggttgtgttgtcgggtaataaaatcgatgtagaagcgacggaactcagtttgcgtaaggaacagaaaaccccaaacgaatgtgctccgcgcgtgctggaaatgacgtgggggcaattttgggcgggggttaaggcattagacggaaaatcccctgcacctcgtactgaaggcgagataaaacaacgcgtcctgcatgcggcgagcgagttgaactggacagttgagtttatcgaagatggtggaatttacatgtgtgacggcgatactgagttttacctcacaacgtataaccaactcattcaaaatgcagacgtagcaatccggcttatccgctgtgatgtttgttataccgcctctgagtgccctgatgatgaagatgaatggagtaaagaaggaatggcagcgctggccgagtgggcaagctaa

SEQ ID NO: 209180 - DNA, 180 bp, Klebsiella oxytoca
atgtccaggcaaagcgtaaaaccggtattactcagtcatgaacagataaaggcactgagtaacattcaggagcagcaccgcaaggcatcgagcattggcgttgcgccaactatccatgagattgcccgcggactgattgataaagcactcgcgtctctgtccgatagccctgcaacctaa

SEQ ID NO: 209181 - DNA, 1068 bp, Klebsiella oxytoca
atgaagcggctaacagaagaacaaattgaatactctttaaccagggcaaggaagatggctcgacgagagtccaggaagcagtctggtggacagaggatgttccatcctatgcgagtcttttctcgcgtgagaatccctgcaccaagcgccttagatttgtttaattctgagaattataagctttttatagagtttataaccttaatcagagattgtataaatgatggtgaaaaagtattgatcgactttcgaaatacaaaagccatcaaagcatgtgcggttatcgtgctgtatgcttacatcgattttttgcagagacaaacaaaagataaaactgtaattgctataactacttgtggatcagcacgcgttaataattggtttaaaatatgtggcatatggggtattacagggtttcaacgtgttactgctgataagttaaactcaatggaaattgtttcagctgttgccggtaaaactaaaaataataaagaaagctctgaggctagagaaaaaattaaaaatgtattgaaatacattaaaggtacgatctatgaaggtaaaatatcagtgtcagacgggcaaaagctatatgcagccttaacagaatcgattagtaatgtggggttgcatgcatattcaaatgaaacacaattttctgagtttattgctgatatcgggaaaaggtggtggatattagcccataaggttgaagagcaactttacttaatggtttatgatatgggtgaagggattcctgttactcttgtaaaaaaagattttttcacactaattactcagatatttaatccaaaaactgattctgataaaatatatgctgcggttcagtatggggaaactagaatgaatagtcaaaaacatggtaagggattaccagatatgaaaagatatgttgtagataaccctgagggtcaattacatatttttagcggcatggggagatattcctataatgctgaaaataacgtcgaagagcgattcgatctgccatactctataggtggaacacttattcaatggaatgttagtttgagaggtactgaatga

SEQ ID NO: 209182 - DNA, 321 bp, Klebsiella oxytoca
atgagcatcaaagagatacacattgctgaggatttttcagacgtaccttatggacgctacgatgaagatggtcctgataatgggcagcgtttccgtgaagagcatcttctggacgccattcgtgactatgatgaagttcatgtatacctcgatggagcaatggggtacggttcatcgtttcttgatgaagcatttggtggtttatatagaactgatggtattgaaaagtcagttataaaaaagaaattaagagtattcactgagttagacttcctcaaggatagtatttggggatacatagctgatgctaagaaggagtaa

SEQ ID NO: 209183 - DNA, 489 bp, Klebsiella oxytoca
atggaagaacattcacctttagtgatttttttacaataccttgccagttctggcattttagctatcatgacagccataattggttgggtgtttgtatataaaaactcacgtgcattacaaaagagaagtgagacttggtctatagtgaaaaatgtttccgataatttaaaggaaatagaatcctcatcaagaaaattttgggttcctagtgaatcaaaggaaatagatgcgatgtcttttcaaaatgaaattactgctcttctcgctgagactgagcgttggttaaatcatctgaagcaacgtatcgaaattaatagtgatttcaaaccattgattactgacttgtttaaagacgctacggctaatatagaaaaggtccacacttatgataagagccaaagaacaagagtcagtgttttagtttcgcggagaacaaagataattaaggccctcgtagatgagtcatatcaggcaaaatttttaagttga

SEQ ID NO: 209184 - DNA, 327 bp, Klebsiella oxytoca
gtgctccctgactttcgcaacttttttatgtactcgtccaacggtaaaaaggatgggattccgatcatcccgctgtcaggagacgcggcaaaagatgagtttctgaatatcaagaacgtgagccgggatgacatgatggcagcacaccgcgtgccgccgcagatgatggggattatgcccagcaatgttggcgggtttggggatgttgaaaaagcgagtaaagtattcgtaagaaatgaacttaccccactgcaaaaacgcttagaagagttaaatgattggttggatgtggaaataattcggttcaagtcatacagctttgagtga

SEQ ID NO: 209185 - DNA, 459 bp, Klebsiella oxytoca
atgagtggatgggggcaaagtaaagaagaacactggtcagcaactcaatttgataaatatggtttccgtcgttctgacttaaaggctattgctgacaaattaggggttaatcttgatattccaatcgaggatattgttacatcaggagaaaataggaagccagaaacattttcggaagaggatataagcgtcctcagaagcgagatttctctcttaaaagagaaaatcaaaaagttaaatagtgaaagacctactcttttgggcgaatacagaaaagatgatcccctccttctggcgatacagataagaaacactgaatggagcatgtacgatcctgataatgacagagctaccagagggaatcaggtggcaattattcaagagcttgaaggtaaagggttttccaatgcccaagcaaaagcaatagaaatggttgcatgccccatcaagcgtggctaa

SEQ ID NO: 209186 - DNA, 246 bp, Klebsiella oxytoca
atgttattgtctgagggaaaaagcatgcgtatatttccggcatcttttcttattatgggcgctacgcagctcatttctggtcattggataaaaggctccgtttttttattattccagattgtagttattagcaacatcaatttattactcaacgcaacgcagggactcatcactttaggcaccgtggcccaaacacgtagtgggtttgatattgtagctggtgacctgtctcttatacacatctga

SEQ ID NO: 209187 - DNA, 771 bp, Klebsiella oxytoca
atgtgtataagagacagatatgatgcaataggtgggtcattcgaccatgaggtatcttatccatgggtgacgtatcttttttctggcatgtccaaaaaagaagtagctgatttagtgcacgatactattgagtggcaaaataaccagcctatcggaaaggtgacatgggtaagcccggcagatatggcaggccgagctggtatcgtatcagtaacatggaaaaacggattcaggctgatcccagaaatgcagacattatataaaaacctacagcaggcaggtgttgatgtttatgtcatttccgcttcagctttagatgtgataaaaagcatcgttactacaggaaaatatggtttttctgttcctgagtctcatgtctatgcaatgcatcccttatatgataaagaaggtagattgactcacagcctcgatccatactatccccagacgcaaggtaaaggtaaaaccgaaactataaagaaatttatacaacaacattacaaaaatacaggaccaatattagttgctggcgatagcgaaggagatcaaaacatgatgtccgactttaatgacacaaagtgtgttcttattattaaccggctacgctcatctgacaccattatcggtgagctatcagctaaagccgttcgtgactataataaagatgatgcaaaaatattattacaaggaagagatgaaaataaaggggaatttttaccatcacaaagtagcatattgatgggcactaataacgaagtatctttaccatag

SEQ ID NO: 209188 - DNA, 666 bp, Klebsiella oxytoca
atgattacatcagtgccggtcactgcggaagagctggatgcagcaacctggctcaacctgagttgcaccattaaacaggccagctttacagccggtcagaaaaacgatattgacgtgaccacgctatgctccgaagaaacggaaaatatcaacggactaccggcacagtctgagatgtcgctctccggtaacttctaccgcaacccggcgcaggatacgctgcgtactgcttacgataatgacggcgtatacggctttaaggttgtgttcccttccgggaatggcttcctgttccgcgctgaagttcgtcagcatacctgggattcacagaccaacggcgtcgttgccgcgacgttctccctgcgcctgaaaggcaagccagccaacattgacgcctctggcattctgtcttttgccacagacctgcctgcatcgcagacggtagcggccggaagcgccctgacaatgagtgtggtggttcagggcggaacggaaccctatacctacgtctggaaaaaaggttcctcaaccgtcagcgggcagaccagcgcaacgtttaataaggccagcgcagtatcaggcgatgcgggtgtttattcctgcgtggtaactgatgccgatggcactgttatcacctctgctgaccacaccgtcactatcagttaa

SEQ ID NO: 209189 - DNA, 666 bp, Klebsiella oxytoca
atgattacatcagtgccggtcactgcggcagaactggacacggcgacgtggttaaacctgagttgcactatcaaacaggccagctttaccgccggtcagaaaaacgatattgatgtgacgacgctatgctctgacgaaacagaaaatatcaacgggcttccggcaccgtcggaaatgtcactttccggtaacttctaccgcaacccggcgcaggatgcacttcgtgcggcatacgataacgacggcgtttatggatttaaggttattttcccgtctggtaatggattcctgatgcgcaatgaggtgcgtcagcacacctgggattctcaagcaaatggtgtggtagccgcaacgttctcgctgcgtctgaaaggcaagccaaccaatattaatgcccctggcatcctgtctttcgcgacagaccttcctgcatcgcaaacggtagcggccggaagcgccctgactatgggggtggtcgtccagggcggcacagccccttatacctacgtctggaaaaaaggttcgtcaaccgtcagcgggcagaccagcgcaacgtttaataagtccagcgcagtatcaggtgacgccggggtttattcctgcgtggttacagatgccgatggcaccgttatcacctctgctgaccacaccgtcaccatcagttaa

SEQ ID NO: 209190 - DNA, 276 bp, Klebsiella oxytoca
atgttctttcagcgcctccagcgcgtagccgtcgatgaggtcgcggacgcctttcacgccaccagcaatctctacgcgcacaagctcgccacccgcatcaatcatgaagtagtcgccgtggctggtggcggtgatatggttatacagcgccgctgcgtactggttcgccagcgcattaagccggaagttcttagtaatcatctggccccctcagtgcgtcaatggcatttcaggccatccgttttgctgcagatcgctgatgaagtgatcgtgtag

SEQ ID NO: 209191 - DNA, 195 bp, Klebsiella oxytoca
atgttggctactacccctacccaaattccgcaattcatctggattatcgccgctgttcgccgcgatatgccgacaattactgcaaaaattcaccatatcgccgcacctactgagcgcgaagcccgccgttctctggttcgggatcacgtctgctttttcgctggtcgcatccgtctggaggtggctcatgcgtaa

SEQ ID NO: 209192 - DNA, 618 bp, Klebsiella oxytoca
atgaatgtaaaattcttcggcataatcattatatgtattttgatgtttaccttaggtttctttattggtgggtttaaatgggagtgggctgagagtaagcatgcgagtgaagtcgcgctctgggcaatgcttggtgggtggctatctgcctttgcgacgttggccgccgtaatggtttcattacacatggcatatcaagcaattaaaagtgagactgaaaagctcagggtcattcatggaatgagtggtgtggtttcccatggcaaaggggtaaattgctctctcacaattcaaaatatgagaaatctgcgggttaacattacaggtatttatttctctctgggtaagtcctctggtcgttactctttagataaagtaatcaacctaaatgatgtgtccttgacctataaaggggggcgtgcggcattttgttttattattgactcgggggtgacgtggtgggggatgtattcgttatttgatagggatgaaaaaattaatttcaaaaagggcaagcttttcgtaacaaccgacctcaacacttatgagttcaagctaccaaaacattacctcactgcgcttgagggtgcgtattcacaatatcaggctattaaatag

SEQ ID NO: 209193 - DNA, 621 bp, Klebsiella oxytoca; identical to SEQ ID NO: 200768

SEQ ID NO: 209194 - DNA, 180 bp, Klebsiella oxytoca
gtgtccgccggttctgtggtgtggcgggcaaagcgggagagtttctttgtggttggcgcgctgggctatgccctgccctttgcggatgtgatggatttcgggggcggagtacacgccgaagtgtactttgcagacaatacaacctatctcaacgagatcttggaaatattgcttatctga

SEQ ID NO: 209195 - DNA, 363 bp, Klebsiella oxytoca
atgactaaatatcgtacccgcattctgccgcagctgctggcgggccagaagaaagagggggctctcccgacgcgcctgacctttgcgctggcggcgctgatcgccttttatcgcggcgagcgtaacggtgagaactatccggttcaggatgatgccgaatggatggagagctataaggcgctatgggcccagcatcgggatgcgcaaatcaccaccggcgagttggtaaaagccgtactgtccgttgaatcccactgggagcaggacctgacgaaagtgccgggtctggttgatcgggtcacgcaggatctggatgctattctgcgcgacggcatgcgcgccgccgttaagccattatgctga

SEQ ID NO: 209196 - DNA, 174 bp, Klebsiella oxytoca
atgcagtgtttccggcagcagggactttacggtgcggacatcggtgcgcaattcccgttcaagggtggtttttttaacaaggcgtttctttattttatccagttccggcgtgaatacccggcgaagtataatatgaaaaataatcccggtcacagtgaaagcaatccgtgctga

SEQ ID NO: 209197 - DNA, 1368 bp, Klebsiella oxytoca
atgaacgataataccctgtcgaataccgattctttaaacgatatcgtgaaggatggacggcaacaactcgctcgaggcagaaatgattttctgctttttaactctcagaccgtcagcccgggaaccaacctgagcagcctcgatgcgcttaaacgcgattatttggcctacgctgatgtccttgataaagcgttaacgcttacggagcagggaaaactggatgacatcctacggctacgtattcaggattatcaggtatccatgcaggatagctataatcgctggcgcgtcacttatgaagacgtaagtcgacgggggatcagtgaaaatcagaaaacctttacagaaatgctgtggactatgggaacagttattctcttggtgatcatcattatattactcagttgggtcggattacggagaatgctcattgcacctttaaaagataatatgcagcatttgagcactatttcgcagggagatctcacgcattcggtgagggtcgaaggaaataatgagatggcaaaactggcagaaagtattctccatatgcaacagtctctgatcagaacagtcagtgatgtcagactcggttctgactctatatacaccggggcaggtgagatagcctcaggtagtcatgatttgtcatcccggaccgagcagcaagctgcatcactggaagaaactgcagcaagtatggaacaactgacggcaacggttaggttgaatgctgacaatgcccgccaggcttcacagcttgcagttgccgcttccgataaagcattaaaagggggagatgctgtcagcttggttgtaagtacaatggatgatatcgccgatagctctaaggaaattggtgccatcattaatgttatcgatggtattgcgtttcagactaacattctcgcccttaacgcggccgttgaagcagcaagagctggggagcaggggcgcggatttgccgtggtggctggcgaggttcgcaaccttgcccagcgcagtgcgcttgcggctaaagatatcaagatactcattgaggcctcagtcagtcgtattgaaaatggctcaggcttggttaaacgtgctggcgactcgatgtctgatatcgtcaatgcagtgacccgagtgacagatattatggcagaaattgctgctgcatccgatgaacagagccgcggaattgagcaggttggtattgcggttcacgaaatggacagtgtgacgcagcagaacgcatcccttgttgaagagtccgttgcagcggcggcggcacttgaagagcaggccgggttgctgcaacagtctgtatcagtattcaggctccgggacgacaacctggttgtaccagcacagaaagcgatttaa

SEQ ID NO: 209198 - DNA, 189 bp, Klebsiella oxytoca; identical to SEQ ID NO: 145573

SEQ ID NO: 209199 - DNA, 1074 bp, Klebsiella oxytoca
ttgcattggttagttcgtctacgcctgacctggcgccaggtcgtcactggatttccttcacgtgcgaggctggcagcgcgtgatgcacttgctactgcactcgcctgcctgctgtcatggatactggccgtatggctgctgggacatgaacatcctacttttgccatcgtcagtgccgtggtatgtcttgctccgggcgtacccagtcacctgaaacaagcaagaaatctagtgattggttgtacgttcggtattgtgatgggggagttgatgtggcagttacccgatactcacccactgattcggatgtgcgtcggtatgttcttcgctattttgtttggtgccgccattggcccggccccggtggtaccaatccaggctggagtatcggttgctttggttcttgccatggggccagaaagcgcgggtggaacccgtttggtggatgttttgctgggagcctctgtaggattattattcagccaggtgctttttacgtctaatccatttagtgatattgggcgttcaacttctgatttccttcgacaactcggtaatgggatggatcgaatgctcagagcctgcgaggtgcaaagcagtaagggggcagaagccgctttgagtcagctttcagatgctcagtcagctctggcagctcttcgtgccgctgtagctgaagcacaggtcagtaaacgctggtcgctacggggtcggctacatgcagagcggattaacatcgtcacgcaacgttacgaccgccatgcaatacgggtatacgcaacttcccttttattagcggaaagcataagccgagccatgtcgcacacgcatactccgccacccgccgcagttatgacgtattgccaatggctatcagataactgcatggaattagcccggcaatcaaccgtttttgtgctaaaggaaagtgccccccaagcttatatgggcaagcagccacagagcacaatctataagtgcgatatattaccaccagaatggctcattgtagaagataatgctaaacaactggagtatgccttacaggtgctactgtgttcacgagacgcataa

SEQ ID NO: 209200 - DNA, 306 bp, Klebsiella oxytoca
atggaaaaaatagaagatagggtttcatatcatcaaaaacagcttgctcaactaaaagcaaagaaaaaagaagagttgagcaaagaaaaaaaggcagaaaaagcaaaaagagcaagtaaaaatattttgtttggtgcttctatatgtaaagtgttaggtattgattacactaaaatagatgaatatttgccttctgttattggatatttagatttaaaaaaacagaacttaagaaatagtgtgtatgccgatagaggtaatgaacttttagagagctggaaaaatggcggcgacagaaacgagtaa

SEQ ID NO: 209201 - DNA, 177 bp, Klebsiella oxytoca; identical to SEQ ID NO: 5279

SEQ ID NO: 209202 - DNA, 696 bp, Klebsiella oxytoca; identical to SEQ ID NO: 187638

SEQ ID NO: 209203 - DNA, 354 bp, Klebsiella oxytoca; identical to SEQ ID NO: 187637

SEQ ID NO: 209204 - DNA, 813 bp, Klebsiella oxytoca
gtgatctactattccgcgcatctatttagctctacattaagtggaacacaattcctcccaagcctttccaataagaaatggaatgatccagataatgctgataatgaaataggtaaaccccttcaacttgaaataaaaagagccaggttgagagttgaaattttaaggaaaggtagcgatccatatgcaaaatatgaattatttcaacggttaaatactggcggtgcaaacctttcagagcaagaggttaggaattgtattgccgtaatgcttaatcctgaattatataaatggcttaagagatgctccgagtttcctgcctttgtaagcactgtaaatcaaacacaagaagccatcgagcggcaagcaaatatggaactcgcattaaaattcttcgcatataagcacttcccttatacgcctggaatggatgtccatgaacacttagattctgcattagttgaaatgtgcaagtctcaaattgatcttgtagcagaagagcatattttccaaaacatattcacacttcttcatgatgttttagaggaaagagcctttaaaaaatgggacgggcaatcatttaaagggaaatttttaatttctctattcgaaactataacaaatggccttcaaactaattatgatgccataatgtcaatgcagcccaatgcgacaagaaatgacttcatcactcaaaagattaaagatctttggcaaacacatgaatttactaacaactctggtgcaggtgtaagaggtacaactaggttaaccaatctattgcctttcgcatcagaatactttaggccgtaa

SEQ ID NO: 209205 - DNA, 351 bp, Klebsiella oxytoca; identical to SEQ ID NO: 159238

SEQ ID NO: 209206 - DNA, 408 bp, Klebsiella oxytoca; identical to SEQ ID NO: 15278

SEQ ID NO: 209207 - DNA, 276 bp, Klebsiella oxytoca
atgaccatcgaccgctggctgctggttacccaaaacggcaaagcgtttggctggttcgacacccatcagccggcaacagcaattacccacgacaacatcaatctgggggcgacgttccaccagcaagggagcccgttgcgccatttactggacgctgcactgagctcgcccaaccaccgggccgtgatcgtcgatgaacggcaaatcccgcaggggaccatccacctcgatcaagtactcgacatgtgtaaatccacgcgccaggagggagcatga

SEQ ID NO: 209208 - DNA, 360 bp, Klebsiella oxytoca
atgtggctattcgatattataaaggatggtacactggtcgataacaggtcttattttgtaaataacggaatacttactaataaatctcaggggaaatcaattacttttagctccaaaacaaaaggacagtggactaatcataaaaatgatgagtctgccatttggctttttttgaattcagtttcgcgtgatgtagaaaatgaacttagtaacaatcttgcagatgcactcatcctcttcaatgatcgagagtatgaacataataccgatgatggttttattactataactggtactgattccagaaattttacattaaacacaggtaattctgagtttttatctattctcattttttaa

SEQ ID NO: 209209 - DNA, 459 bp, Klebsiella oxytoca
atgcccggtgacgtgatattgcgcattcagaatgcgttcgtgacgcagacgggcgaagtatgccccggtctccgggctatcagcgtcacctgctgtcaggaagggttccgcataatggtacgtttctccggcggtgatcccttctttgctaaaaatgctttcagtgctgccctgaggtttcagcgcttcgcgatagttgtagtcacgggtggccacacttccgctcaccacattgtatgcggtctgaatatcccagatgctttcctgcccgctgtcactcatgcctgccgggttacgaaacggcagggtcacaccaaactgatactgctcctgagagtcctgaaaaatgaccacatcctgctcaaggcggctatccatcgcaaagcgccagtaaataccgacttcagccagcagacgctcaatgaactcaagatcggtttcccgccaccgggtaattag

SEQ ID NO: 209210 - DNA, 228 bp, Klebsiella oxytoca; identical to SEQ ID NO: 129169

SEQ ID NO: 209211 - DNA, 306 bp, Klebsiella oxytoca
atgaatggtgcccagtttcagcgaaccggcggttcgcatcatctcatcccactgatcctcggctttcgacagatcggcacaaccacgtgccagttcgtccagtgcaccgtaatttgccgatttatccactcgccagaataccgcttcaccggcatcggcaagccggggggaaaactggtatcccagcagccagaagaggccaaaaataatgtcgctggtaccggctgtgtctgtcatgatctcaaccggattcagccctgtctgctgctccagaaggccttccagcacaaaaatggaatctcgtaa

SEQ ID NO: 209212 - DNA, 276 bp, Klebsiella oxytoca
gtggcttctgtttctatcagctgtccctcctgttcagctactgagggggtggtgcgtaacggcaaaagcactgccggacatcagcgctatctctgctctcactgccgtaaaacatggcaactgcagttcacttacaccgcttctcaacccggtacgcaccagaaaatcattgatatggccatgaatggtgttggatgccgggcaaccgcccgcattatgggcgttggcctcaacacgattttacgtcacttaaaaaactcaggccgcagtcggtaa

SEQ ID NO: 209213 - DNA, 270 bp, Klebsiella oxytoca
atgagacaactaacagacgcgcagatttttacacttcgccgtattaaaaacggtactcgccacctccttcgcggtgacgagaagaagggtaacaccgtcactagcactcgcgatattgattgcccgtcgcttccagccttgtttcgtaagggacttattaaatggcatagcaacgtgccgaaggacccgggtatgtggtattgggttcgattaacacattccggaaatattgcggtggatgaaatgaagactaaagcggagtgtgagtga

SEQ ID NO: 209214 - DNA, 1209 bp, Klebsiella oxytoca
atgagcgagttaaattatctggaaaaactgctagatgggacagaggtggaatggaaagctcttggagatgtcacgagtgtcttacggggaaaaaggttaactaaaaatctgctttcagcagaagaaaaattcccggtatttcatggcggcttagaaccgttaggatattacaacaagtcgaatcgtccggctaataccgttatgattatcaatgttggtgcttcagcaggcaccgttggctatagcaccgttgacttctggtcttctgatggatgcttttgcttagagcacaatgagctattaaataataggtttttatatttcgcactgattggttatcaaagtttgctgaaatcaaaggtgagagtcgcgggtattccaacacttgatgcaatcgtagttaataaactacttatccccataccttgccccagcaaccctgaaaagtcccttgccatccagtctgaaatagtccggattctggataaatttacagcccttacaactgaacttacagttgaacttaccatgcgtaaaaaacagtacaattactatcgtgaccagttactgagttttgacgagggtgaagttgagtggaagactttaggggacattggtgattttacatatggatatgtagccaaagccatggattcaggagatgcccgtttcgtgagaattactgatataaataaagacgggaagctttcgaaagaaagcccaatgtatgttgaattaaatgaggaaaatgaaaaatatatcttgaccaaaaatgatttgctcatggccaggactggtgccacctttggtaaaacaatgatttttgaagaagaatatccagcagtatatgctggctttttaattaagttgaacctaaatgaaacagtgattaatgccaaatattactggcactttgcacaaagtgattttttttgggggcaggctaataaattagtatctggcggtggacaaccacagtttaacgctaatgcactgaaacaaatcagagtacctattccatatccatctcacccccaaaagtctttagacgaacaggggcgaattgtggatattctggataagtttgatgcaatagcagcgtctatcaccgaaggccttcctcgtgaaatcgagctacgacaaaaacagtacgaatactatcgtgacttactgttcagcttcccgaaaccagaaaccggcagcaactga

SEQ ID NO: 209215 - DNA, 171 bp, Klebsiella oxytoca
atgaaaagcgcacacgccattactccatacacagagaagaactatccccacaacgaagaatacagaccagaggaaaaccacaagacaaccacctctacaacatctgcaaaaccacttaccggcagagagaagaaagtcgccttttctcccatacgaatggtcaccgtatag

SEQ ID NO: 209216 - DNA, 375 bp, Klebsiella oxytoca
atgggacttgatatctatattgagacgcagccaaaaaacgatctgaataacgaggcatccagaaagcaagttggctacttccgtaagttcaatgctctcgttgggtggatgaaccgcaacgtaggtgaagttgtaaattgtgaacttttagaagttacgatgaatgatatttgtgctctcaaggctgatttgattcgtctaaacgaaagcaattgtgaagagtatctgcctacccaggaagggtttttcttcggtagtcaggagtacgatgaagggtactggaatgacgtggaagagctgaaagagcttgtggatgagctgattaaaaatcacgacttctacaataacagactgacattttgcgcctggtggtaa

SEQ ID NO: 209217 - DNA, 759 bp, Klebsiella oxytoca
gtgctgtacaaatacgtagggcatgaagacccaaacgaattaatcaaaattcttaaattcttcatcgaagatggaaccatccgagccacccggccacacgacttcaatgaccctgccgagttcaaagccaaatttagttttgacgccacgatcccggagaagcgtgtccgatatcatgagatgtggcctggcaaaagcgacgaggacggtgagaactggttaagagggcgaaccaaaaacgccgaagagtttgacgcctatatgctgcgcggaaatctgcttttgaataccggtgtgatatgcctcaccagaactgacactaattacctgatgtggtcgcattacgccagctcccactctggattttgcatagggtttgatgacgctattgtggaagcgctggatgaccgacacacagcgttaaacggtgatgtcgagtacgtgaaatcgccgcctgaagtgaacttctataccgctgatgtgtacgacattgtcagagccatctttctgcacaagggtgagagttggaagtacgaagaagagttccggattatctctgagctgccagggcttaagaagttcgacacctcgctaatcaaagagatttctatcggatgcaaaccctatccagagctggaaagttttgcccgtgaactgctggacagcaatctggccgtgtacaaaatgctttgcccgactgactcgtaccaactgaagcgtgtggagctggacaagaacctttcttttcaaggttactag

SEQ ID NO: 209218 - DNA, 726 bp, Klebsiella oxytoca
atgagccagatcttctttaacactattaacaacgaccagtacgacttcatgaccgagtgggacaccacagtcatggacaagtgggtggccgagaatattgggctgtcacgctgcaaggatgaggctgagttgttcgagacaaagtggtttgattaccgcgacatgcacccgcttatggccacatgtcttttcactgaggcatacaaacgccagtactcatacatcatgctgtcgcatggccgcgaacactatgagacggccccattcacaaccggtttgaaacgtgtgccatatcaggagctgtcgacggcgaacaaaacgtctctctggaaagcacgccagtttgccgaccagtactgctgctcttatgactactccatttctaccgttctgtccgcagctgcacgccgtctgtgggacaaattgcctcgcccccagcatctctggcagcccgagctgatcgagatattcgaagagaagttagccaaacgcgctgtaacccgtctggatgactctctggtgagttttaagcatctgggagacatgcagcacgacccgattcaagaacgctattttgagtgggttctggagcgtctgcgtggcattacccgagacaagcgcgtccgcatcatcttctccgctgtctggttgatggaaatcgtgcctgagcgtgtgatttacgcgcacttcccggaagaactggaagaagcacggcgattctgttga

SEQ ID NO: 209219 - DNA, 648 bp, Klebsiella oxytoca
atgtgggatttgttgagcggattaccaaaggaaacatgggccttaataggggctgcgtcagccgttattgctccaccaattatcgttggaataaaagagagcatcttcgaatcaaagaaggcaaataaggaacggctctacatgagcgttcagttaatttttgtgcttgataaatttaccgctgactgtgctcatgtcgcctatgacgatggttatccagatggatgcccaccggtgggacatgcagttgcccaagtccaaactccaaccttcgatttgtcgaacgttaaaggcgaagcgaagcacctcaatgccaattttatttacaaactccacaaaattgaaattaaaaagatacaaatagcaggacgactcagtgatgaggcattgttcgacgaccctccttatatgacagcctacttcgaattgagacgacagttgtatggtgaattagggctttataccgcgaaacttataaaagaaatctgccgagaatataaaatcaagcatgacacctggggtgatggttggaatccagaagaagccattaaacaaaccctcgccgcaatgaagaccagacgttcaaaggcaataatccgcagtaagcagtggaaggcccagatggtcatgaaagaaatcaataagtga

SEQ ID NO: 209220 - DNA, 258 bp, Klebsiella oxytoca; identical to SEQ ID NO: 186099

SEQ ID NO: 209221 - DNA, 1095 bp, Klebsiella oxytoca
gtgggctgggttgatgctatccggtataccaaatatcacttttacggtaagccacggctgtttggccccatagataaggcgattgatacgtggttcgatacgtatatctataaatccgccaactctgcgcgaacctccgcaggcggcaggctgacaaacaatactgccagcggctattcagcgcgttcgtttcccggcattgcgggccgggcattcaccgttctcagtcgctatggacgtgcggtgaacggggtctgccttgacgatgtgaaggtgctgggaacccaccgcgtcccgttctacaccgacgcaggcagttacaacgtgattcacacgtcctacgttgaaaagacctgtctcgttgatacaacgacgacaactattgccggtaatcagttctataccgactatcaggacccgtggaatgcggcactgacaaaagcgcccgcgatggtttgcgagggtggtatcactgtcgacaggactgtcgtttcggctggcgtggctacacatccgttcagccagaaaccaacaaccatcaacggcccgctcattatcaatccgttccgtgataatacagaggactacacggcctcgcagattgcagagtggaacagcgccgaagggaaaacggtatacctctatgactggcgccgtcagtacagcgtccagcgcccgatacggttttttgataacacacaggaagcattccagtattacaagggcgtctggacgccggttgtcaaatgcggctcagaagtcgtgacgctgaataccaccgtgggaacctaccgccgctcagggcgtttagtgcatgcgactttcagaatcgaaaccacgtcaatggcgctggcgacaggaggcgcggtagtgatatcagggcttccgttcacggttgctgcactgagcgatgggggattaacagtttccccgataatttgcagtcgtgccggctcggcaatcatcattgcgcaaacgaacccgaccacaaaagagattctactgttaaccagtagctcaccggctgttttttcaataacaggcggaaccggcttaactatttacggctcagttcagtacgttctgacagaataa

SEQ ID NO: 209222 - DNA, 741 bp, Klebsiella oxytoca
atggcggtgctgcaggttttattttttgggagcgagaaggttatgagttatctgggaagcaaggcggcaagcggtgtttatcaaaaaatcatagccgagatgccgccgcatgacacttacattgagacgcatttaggcagcggagcggttatgttcttcaagccgccagcagggcggacggtaggcattgataagaatgaggacgccttattgttgactagggcgcgttggaaagaaaaggggttaactccgcctgatattcattttcatcatggtgatgcagttagctttctggagggattctttgattttgccagtgctggtcgtgtgttggtttatgctgatccgccgtacctgccagaaacgcgcactagtcgcgcccgctaccggcatgagtacacggttgccgatcataaacgcctgctggcctgccttacagggctaccggaaaacgtcagcgtgatcctgtctggctacccgtcgccgctttatgacgaaacgttagtgggctggcgtagcaaagaatttcaggccatgacgcgaggcggcgcgcgaacggaaaaaatctggatgaactacccggaagggcgcgcgtattcgcataccttcgccggtaaagactacaacgaccgctatcgaattaagcgaaaagcacagcgctggaaggaaaagtttgcggctttgccacccgccgagagactagcgatcatggtggcgctcagcgaggtagatcaggggtaa

SEQ ID NO: 209223 - DNA, 1293 bp, Klebsiella oxytoca
atgagtaatatcttcctccccaaaactatgttgggaacactgctttataaaagagtgtatgaattctttgaagagcctcgtttcttttcagtagaaaatgaagttggctctttatacgtagtgtattggatctctgaagatgaaaattcagatagttggtttatcataccagtatcaccaactaaacttgagctaattgaaagaaagagaatagatattcactcggctattactgcgcatgagcaaagttttttttacaaagtacaggctccttacaatagagatgagactcctgcttgggatgttttgtatgcagaagacttaaataattataagttacctgccagtggattgttcattagttcagttgtacccgttcttggtaatggccgaattggcgcaccgataaaatactccacgcatgaaatacatttggaaaaaagtgctaagaaaagtgaaggtaatcttgttttaggcaatgtttcaagcgtatgcgacagatttagcgatctatacaatagtcttttggattttggtggccttaaagacaaattacgtccagttgatgctcgcccaggatcgttcataatttcatttcaagcagagaaactttctttgtttgaagaattgttaaaatctttaagctctttgatagaagcaagagctaatgtaattgatttcattaatgaaaacaatattgatattcaatcactatcaaatctttttcaggcagttgtttcttccggcacaaacatggagctcagaagcaacgagactggtgaattgatttttgtattgacaaaggctggtgctgatttttatctaaaagatatcaataagttatcaatgctatctgttagcggtcaccagataccgcaagccgataccttagagcgagtttttaatatcgttgaagtaaaatggcgtggcgaaccttgcagtgagttcaatacaggtctgcaggagcgccatatatattattatattcatgctgctaaggtattagggttccttgatactaatagtaaggtaacatcagttggtcagcagttaattcaatccgaagacgatgttaaacttaagattgcggcgagatgttttgaaaccagtcatataggttgggcttggataaattgggcgggtgttgaaaatctctctcagttagaaccggaaactgcagaaggttttcttttagagcagtgccattctttaagtgccgaaaccgtgtctaggagatctagaaccataaggcattggtgtaaggtattaaaggagcactacacccccctttaa

SEQ ID NO: 209224 - DNA, 429 bp, Klebsiella oxytoca
atgactgatatcaccaacttagttaagaatctccgccactgggcaaagatggcctcactgaccagcgaacaagtgtcctgcttaagcgttcagcaactcgaaactattgcgaatgagcttgattcagcccaccagctgatcgccgaacttgagtcatttcgtaccgcctacatggaatggagcgataaaacggattggatgcagggtgataaacgttttgacgttgtgcgtccactgggtaagcaccgtgtggatgtgctcagggaatatatcaagcttctggagtcccgcaccgtgaagttgccgaagcctattagcgttttgcatcgccgagatttcactgatgcgcaccgcgcgatatatgcatatccggaagcagaagttaacgcagcattagccagcgctagcatcaagtgggaggctgagtga

SEQ ID NO: 209225 - DNA, 231 bp, Klebsiella oxytoca
atgaccatatcaagcggatacgcgatagacgcatattgcgagtgtgatatgtgcaggacaaacgtcgaccttgtaggacgttacgtcaggcaaaaaatggccagcgctgccggggaaacttatgcggagtgcgcaagagagttgcgccgcctagggtggtacttgtcacgtgaccgtcgccacgctctcgcgccggggcataagaagccggaaaaatgggagattgattaa

SEQ ID NO: 209226 - DNA, 441 bp, Klebsiella oxytoca
atgagcattaacggttggtattacctccatcaaaacggagagctgatttacaaaccatccccggacgcaatcgtagatatccgtgattcagaccttgcggtctgctcatggcctgtagacgtcagcagccgcaagttagcctgggaaatgctggttgaagctgtagctcttggggcaaacgaatcgcgcatttctgaactagcaaaaaaatggaattgcgacgatgaagatgcggacatgtttgcaagcgtcatcggtgtagatctggaaattgacggtaaccaatggtgtgcgcatcgaactgattttgtgaaccttcaggaatcccctgcgggatttggcgaaagcaagctattggcaatggctgatcttgcccggaatctcggaattcgtggtggccatatgtggcgctcctctttctctgacctggtaaacaactga

SEQ ID NO: 209227 - DNA, 528 bp, Klebsiella oxytoca
atgactgatatcaccgaactggcgcagcgtatgaaggctgcagcagagaaggcgactccgggtcaatgggaacgcggagacggcaagcatggtggtgaattactggtgtattgcgatgatgcgttaggctctgctgtttgcgaagcaaccagtgaatataacgcaatcccaaaatatcagcgcatagataacctggatttcatcgccatggctagccctgccaacgtcctagcgctggtagaagcgctggagaaggcgcagcgtgccaacgcagcacaagacgaccatatcaaccagcagcaggaccgcatcgagtcgctggagaagaaaaacgcagaattgggcaaatatgccggggagctggagtcccgcaccgtgaagatgccagttgcctacacagctagttcaggacatccgtttaacgaagccgaaagaacggtaatgatccctggcggtggggactggttgaatcggtttgatgttgaacacgttctgaccgccgctggtatcaagtgggaggctgagtga

SEQ ID NO: 209228 - DNA, 228 bp, Klebsiella oxytoca
atgggcgtaacaaaaatggtatgcgtcagctcaactgagccagcctggtttactccgggcaccgtttacgactcagaacctcgcggtcccgatatctgcatttgtggtgacaacctcgtttcagacctcaacaaagaggactggtacgaaatgagccagcgcgcagatgggttatggttcttaatcggttttcagcaagcaattttatttcggggagtcaacaaatga

SEQ ID NO: 209229 - DNA, 810 bp, Klebsiella oxytoca
atgaccagtaaattaaccagagagcagcttcacgaacgcgctcgtgaaaacgtcaaagctctgaaactggcatctcgacagacagcattcgaaagcgcgcgcaaagaaatattggcggaccttcagctggctgaaatcgcgctggccgcaatggacagcgagccggtggcgattgtagagccgagtgattatgttacagcggcgcagcttgttgatgaggagccagcccggaaagcggtgcgtgagctttacgaaggagcattgcggattggcgacaagctctatcgccacgcgcagccggtggcggtagtgccgtatgattttgacttcgatcgttttaatgatgtggtgtggctggagtgtgtggcaagcaatccccacatgcattcaccaacaacatctattatcgccagagtggcacttgaacttaataagcgtattttagctggcaactctccggtaattacggatggttggaaaatggtgccgattgatgccacccgcgcgatgattgatgccgccaggcgcgtcgaggaagacggctacgatgctatgcacaaggccatgctcgcagccgccccgcagtcacccggcagtgaacccgctaccgtgccgggtaaatggattccggtaagcgagcggatgcctgaagaccgcatatcggtaatcctatgggatgctgaaattggagaagtaacaagcggtcactacagccataaaacacagactttttatcattgcggcgatgctatcgaaaacgagataacccactggatgccgcctccatgcgccccgcaggaggtgaagtga

SEQ ID NO: 209230 - DNA, 171 bp, Klebsiella oxytoca
atgcacagcccactcgctaaagtcatggagcgttcgatattccgcacctccagccctcgtaagcgcaaggaagaagttaagccctccgatatcccaacgatgctcggctacacagctcgcctggtcgataagaagtggctctgcttgagagcgcggaggccgcatgcgtaa

SEQ ID NO: 209231 - DNA, 174 bp, Klebsiella oxytoca; identical to SEQ ID NO: 185435

SEQ ID NO: 209232 - DNA, 264 bp, Klebsiella oxytoca
atgtcattcaccattacgaaatccattgcatgcagtaaatattatccggactacggcattgcggttgatgatggtacggaagaggtggcgctgaccgtcaccgttgtttccgtcgattccctctccgcgtcggcctgcacggtaaattatgtcgtggagactggcggggttaaatcgccttacgctcagtttacctttgactatgcaggcggtaatccgctgaccgaagcagaaaccgccctgagtctgtccatgaacggctga

SEQ ID NO: 209233 - DNA, 501 bp, Klebsiella oxytoca
atgaaaagcggactcacgatacgttcggacaattacgctggcgttctggatgcgctaaagcagctttcaggcactgatgtgctggtaggtatccctgctggcccacagcgcgaagacgcaccgctgagtaacgctgagctggggtatctccagtccaccggggcaaccgtagagatagacggcgagaccgtcactctgccgccaaggccatttctcgacatgggtatagaggattctagggacaaaactacagagcggttaaagcttgctgcgcaggctgcgcttgaaggtaatgccggtatggcggataaacatcttgaagctgcaggtcagattgctcaaatggcaacaaaggcggtcataggcgccggtgaccgactaacacctctttccgaaaaaacactcgaacgccgtcgagcagaggggttacccggcgataaaccgctttatgctcatggtcacttattggactcgattcagtatgtcgtgaggaaaaaataa

SEQ ID NO: 209234 - DNA, 186 bp, Klebsiella oxytoca
atgcttcttgaatcaacgaaaagtggctggtttccagccacaactataatttataaggactatggtcctgccatatcccatgcaattgagttaagcagcgatatctggggttgggctgattcgttcatgaattctcaggtacgccactttctgatgggaaatatttatatacagtcttctcactga

SEQ ID NO: 209235 - DNA, 693 bp, Klebsiella oxytoca
atgggtttctcagagcgcttagcttatgcaatgtctgcagctggatttacgcagggcaagcttgcaaaagaagtgggcatggcgcagtcaagcgtcaataagctcctgaatggtgccaatggttcacgaaataccgtgaagatcgcctccgtgcttggggtaaggccagaatggctttcagatggcgaaggtgacatgcaggtagtcggtggcgcatccgaaagcaacttaaaacaggtagcaaatccccagagcgattactatcgcgttgatcttcttgatgtgcgggccagtgctggtcctggctcactcgtaacgagtgattttatcgaaacaataaaagcgattgagtacacaaccgatcaagcgagggctctttttggcaacaggcccgctcaaaatgtgaaagtcattacagttagtggagatagtatggatggcaccatatcccctggcgatcagatttttgtggatataggcattactcattttgatagcgatggcgtctatgtgtttgtctttgggaagacgctgcacgtcaaacgcctacagatgcaaagagatagattagcggttatatctgacaacccaatctatgaaaagtggtatgttgaggctggagatgaggaccagttttatatcatagccaaagttcttctccggcaatcgatagactacaaacgatttgcataa

SEQ ID NO: 209236 - DNA, 816 bp, Klebsiella oxytoca
atgactaataaccagttaaccaaagagtggctgcagaaccgcatcgccgacatggaatccacccgcgacgatatcccgtttggatttgacgaagacgggaataacgaactggcagcgttcaagctggcgctggccgcaatggacagcaagccggtggctgaagtggtatcagtgtttggcgattcggaaagcattggcgagcgagaattaaaactgctcgtcggtattcagaacatgccatacgggactaagttttatcgccacgcgcagccagcgcctgtagtcagcgcagacctgcttcattccgcggcttcagcaattgaagacctgcttaccactaaagacaggacaggtgcaggtgtgtggttcgacttgccattcaagctacgctcggcggctaacgcgcagcagccggtagtgccggatgtaatggaaccgaccattgaagcgataaagcgcatcctgccaacgtcaaatcctgacgagtatgcggcatgcattggtgcggatatgtggaacgcctgccgcgccgccatgctcgcagccgccccgcatgacacccccgctctcaactcgctacagagcgtcgatagcgttgctggtaaatggattccggtaagcgagcggatgccggaagaagatacagatgtggttgtttattgctctgatacagaagagcaatttgttgcctatcacaactgcaatggttatttccattatgcaacgtacgagaagaaaggcgaaggttacgtagatattgtatgtaatcccacccactggatgcctctgccggcagcccctcaggaggtgaggtga

SEQ ID NO: 209237 - DNA, 258 bp, Klebsiella oxytoca
atggactcttccctggaatatgcctgcaaacgcctgcaggaactggaaagcctgttgctggtggatgtgcctgaaaccgtctggcccgcagaggtcgcaatggttttttctcaggtagaaaacgccggggatctcccggcgcatcaccagcgccgactgcagcaccatatcaaccgcatgtggcttgaaaaaatgccggtaccgtcaattatcgccgcggctcgttcgctggccagcgccatggagaaatacgcgtga

SEQ ID NO: 209238 - DNA, 474 bp, Klebsiella oxytoca
atggaaaagtttgaccggaaactgcagagagaaatactacaggcttgcgtagatagttatccatcaactccactgcctgaaagatttaacaatacattagttgcggagtgcgctcaggatgatatccaaaaattaatcgctaatatttactatctcttcgagcatgatttaatttacataaacaacaaatcaatgatgcatgacatcctgattattggtgaaatttcagcctctgccaaaggtgtcgatttcatgttaaatgatggagggcttggcgccatcctaaatgtccagactatcaagtttcatcgtgatgctgtcgtagtgctcgaagacctcatcacgatttctaacatggacgatgagcagaaggatcaagctaaatcctctctcggcgaattatcgattaaaacccttgaaagtgtggtgcaggccgggaccacagctgtgctttcaaagctactcggacaatga

SEQ ID NO: 209239 - DNA, 1728 bp, Klebsiella oxytoca
atggccttttatactggcgcgccgcttgagaacaaccccctacccgttgaaggccagcaacctctacttagctctcttggttcatctgtttctgaggggttcaatgaagggcctgtagtctcttggggggaagagtctagacttgcccgtttgaatatggatccgaatgctgaccgatacagtcaggaggatgcaaaacgcttgttcggagagcacaagattgaatccatcaacgttcctgcaactgggttaacgaaatcatacgtagatgctgttattcaggatcatcaggagcatctcaaccgtcagcagatcctgcaaggggcaccttctggcgttattgcaactcctcttaagttcatggcgaacttggcaggaaatatggccgatccggggaatatcgctattgggttaattccctttgttggtgaggctagagccgcaaccctgcttgggcgcgcaggacagcgttttattcagggaagcgtatatggcgctgtgcagacagcggcaacaatgccgttggttgctgatgggcaagcagctcaggggaatgatttcactatgggagattatgcctctaactttctgcttgggacaatcggcggtggcttccttcatgctggcggtggggttgttgctgatgtgctgcgggcccgtgatatgtccacgtcccgggtgaatgaggttcccggttcagccaccgaaaagtcgccctcaccggaaaatggcctccccattgagtcaccagccgccgaaccattaccattcaggacgagtgtcttgccagactcgccaacattcatcgccagagccccggcggatgacctggcgagaagtattgatcagtatcgtgaaaactatacgcagcagactgcctacaacgatgttatgcctgcttatgcagatagcctgatggagttggcatcccggcagataaaaggcgttggtgaacttcaaagccaggccgaaaggctgagcaacgacataggttccattgatgcatcattgcccgaattaaccaggctgtatcaggggcagcggatgaaattcaaggaagcgcgtgcagcggcacaggctgaacttgataaccgccgccagcaattacaggcagaggtagaacaactgaattctcgtattgccgagcaccaggaaggggccagagctgcacaggaactggcttccatctcccgcggggaaatcccccaaccgcttgcacagcaggtttctcgccgagcagatgagatccgcatgtcactccaacaatctccggttgctcaaggtgtcaaaagtgcagctcagaagtttggcgaggccgactggatggtgcgcaatcaagctatgcgatcggcggtcgcgcaaatgcgtaggggggaagatgtaaacattgagccgtttctcaatctggtagacccgaggaaaaagataacggctattgatgatctgtcggttcctcgtcgcataccgtcttcttccgatgatgtggcggccagtgtagcggcggataaccagataaaggccgccaaagactcagggacaacagatgattcgttgaggcaggcagaggaaaacctgagttatgagcgccagattaacgacgctatttcttctgatgatccggagttcgccgcattaatgaaacaggttgaccaggaggcagcagatacctctatggaaaaagcaatcaaagctgcggctatgtgccgtataggtaaactgaatggctga

SEQ ID NO: 209240 - DNA, 2787 bp, Klebsiella oxytoca
atgccacgcttacctaccgctcgcgatctgggcaatgttgccctgcgtccttctactggtgtcacttctgtcgatacaaacgcgctttctgctcccgctcgtgccacggagcagctcgggcaggtagtcgccggcgcgcttacgcaggaataccaggaccagcagcgtctgggctttggcaaggcccaaactgcctggctgcagggccaggcagaagcatatgccgcgcttgaaagagataacgactacgcaaccatgcaggaccgctatggccagcagatgcagaaggttactgaaagttcagcttcaggcattactagcggtcgcatgcgccaggagttcgataactgggtaaaccagcagaacatccgcggcggtgaacaaatccgctctctggcatgggcaaaggaaaaagactcaaatatcgccggccttaatcagtcgctggagaccagccggtctacttatctgacatcgaccgacccggcaacccgtcagcaaattcttgatgccacgaacaatatgattcagggcgccgccagtaaggggtatatagaccagacgcaagcccagcaacttgggcagcggtggatcaccgatgctgctaccggttccctgaaaatgatgcagccagagcagcgtctttccgcattacagaatccgaccggcattgtgtcttttcttccgccagatcagcggcaggcaatgattaaagacgcgtcatatgaggcgttaaacaccaggctttggcaacagcaattgcagatgtataccggcgatgctggtatgaatgtgctggctgtgccccaggccactttgctgcaggccgtgtaccagcaggaaagcggtaatcgtcatcgtaatgctgacggtagcctggttacgtcaccagcgggggcacagggcgccgggcagataatgccccccacgggtaaagatccgggatttggtgttaaaccacttcaggacgacagcgaacaggaaaaccgccggtttactggtgattacctcaatgcaatgctcaaacgctatagtgggaaccagatcctagctcttgccgcttacaatgctggccctggtaaagtcgacgactggttgaaacagattggcgatccacgtacgggccaggtgagtaatgagcaatttgcggcatctattccattcaatgagacgcgtaactatgtttactccgtttcggcgaacgctcagcgtatgggaaatgtccgttccgtcatagattcgcaggaattcaaaaatctggacgggcagcagcaggctcagatagcgtcacgcacagtacaaatccaggatcaggttgattcagcatatcgcgtcaatattcagcagcgcataactgacgatgctgcacgcgcgcaatcaggactcaatattgagaatcctgtgaccgaagctgagttcatccgttcgatcccttcttctgcaacacctggagagcgtgcacagctttatcagcaatggaaccgttacaaagatacgctggcgcttcagccggtaaataactttgtgatgcagaattctgctgcagatggtcttgctgctgttcaggcgctgaaacccgccgataacgcagctgattttcagtttaaggcccaacagtatgctcaggctcagcagaattatcagcgcgttgttgcggcaagggaatccgatcccggcgggtggttagctcaaaattcagaccctgttaaaaatgcttaccaggcttatctcaacgacccaacgcagggggctaattacatccaggcggttattgcggaaaaacggaggctcggtatccgaagtaatgatgtgcttcctgatgccgctgcaagttctatcgctgcgcaggccgatggcggggatatgaagttttcagacctgaaagccatagctgatggtttcgggcaatacagcgataacgtgattgctcaaattcagaagaaatcaaaatcagctgttagggtggccgtggcagttaacgatcctaatgctgctgatactctctttacaatcaggaatgtgaagacagacgaacttaagaagaatgctggagagcaggctaaaaatgttgaggcagcatggaattcattggctgctgatatttcaccaaccttcagcatgcagcgacggggtgggccggaaactcttgctgatcttaacgaacaaggtaagcgccttgcttattactatatggctaatggtgaggatgcccaggctgcagccaagaaggcatacaccaaaatgatcggtgaccattatacggtttctgatacctggaggatgcctaacagcctcaggctgaaagaagtcaatgttactgatggtcttcgtaatgttgttaatagccttaaggcgggtgatatcggtagccgtagcattttttataacccatcaatgaatgaagagcaaaatgccgccaataaccttgctcagattaaaaatagcgctgaatgggtaacggatgaaaacgagcagggagtttatcttaccgttagtggaacttatgttcaggatccaagcggtttgcctattcatgtaagcttcgttgacgctagcaaatctggaattgcaaagccgagtacaaccggttccgttgttaactggatgagcgaaaaacgcaaggtaaccccgccatctgagttctacacacctaatgtcaatgccactatggctgacgcattcttagttatccaggggcaagatgctacgagtccacggacccagaaagagcctgataatccatcaaatacattgcgcgatgctttgagcaggaaaggagggaattaa

SEQ ID NO: 209241 - DNA, 1605 bp, Klebsiella oxytoca
atgtcagatattattcccggatattgcacactttgccgttcgcgttgcgggacgttgaatgaagtagcaaatgaccacctgatcaaggtacgggccaaccctgaacatcctaatggtaaggccatgtgtatgaagggcaaagcggcacctgagctggtggacagcgcaaatagaattctgtacccgatgaagagaacccatcctaaaggtgccgagaacccgggctggaaacgtataagttgggaagaggctatgtcaacgatagccggacaactggaaaaatttaaacgagagaacggagctgaatctgtcgctttcggttttacgagcccaagcggtacccccctcagcgatgcaattgaatggttagagcgatttgttcgtatctatggcagcccaaacaccagctatggaactgaaatatgtaactggcataaagacgttgcacatcgatggacctttggctgcggcatccctgttgctgactattcccatgccgatcttatccttctttgggggcataaccccgcgaatacttggcttgcccaggctagtgcgattggtactggtcgaaataacggtgcaaaactgatcgtcgtggatcctcgcccgacacctttagcgaaagaagcaaatgcctggcttgatgtcaatcctggaactgacggtgcattagctttggggttaagccatctcctggtagaaagaaacctgtttaatcatgagtttgttcgaaactggactaatggtcctttgttggttcgaaatgataatggttattttcttcgggaaaaagatattaacccacttgccatcagtaatcgctatacagtttgggacgaacacaaccagcaagtcacatttatcgattccgagactcgaactgaagaaacgctgacgcctacagctgcacttgagggtaatgttgaagttgcaatagctgatggtgcaaaaatttcctgccaaacggcgttttcatcttttaaagatatgttggctaattatgacccagaaaacgtaagccgtatcaccggggtatctgttgcatcaattgaagccgctgcgagtttgattgccggggccaagaaaatcgcctaccacagttggtctggagtggcacaacacactaatgccacccaaacagaacgtgcgattgcgacactgtatgctttaaccggttgtttcgatcaggaaggatgtaatcgaatctatgccagccacccggtgaatgtggttaattcaccgacactgatgccaaaatcacaatgggataaagcattaggtcttgaagaaaggcctatcgggccgccttcacaaggttgggttcattctcaggatatctggcattcagtattagaaggtacaccctataaaattcgcgggttaattggctttggtgccaacatattactttcacaaagtgatacttctctcggacaacaggcgcttgaggcacttgagttttatgcccatgtagatttgtttgaaacgcctacatcaaagtatgctgatatccttctgccagtaaacactgcctgggagcgcgaaggcctaagaaccgggtttgaaagtagtgctgctgctctgacctgcccccagagttag

SEQ ID NO: 209242 - DNA, 294 bp, Klebsiella oxytoca
atgaaaaaaaccaaatccaagaaaacacaatacaacggtgaaatcacgatgatcgaatttctcaaagctaattctgatttgactacgcgtgaaatcgccaatgcgctggggcgcggtatgtcgtcagtgaatggccagcttcgccagctgcatggagcggggcagattgtccagagcggcctacgcaacggcgcagccttgtggcgctttaacgacatgccgtttggctgtgcgaaccgtatccgcatgatgtttgaaaacctcctgagggaatgtcgcggggttgctcaatga

SEQ ID NO: 209243 - DNA, 384 bp, Klebsiella oxytoca
gtgcaggtcacgcgtattctggacagcattgcgctgtttcgcggctatccggctatgataagaaccgatcagggcccggagtttacctgccgcgcactcgatcagtgggcttttgagcatggtgtggagctgcgacttatccagcccggcaagccaacgcagaacggatttattgagagttttaacggacgctttcgtgatgaatgcctgaatgagcactggttcagcgatattgttcacgccaggaagatcattaatgactggcgactggattataacgagtgtcgaccacattcatcactgaattacctgacgccggctgaatttgcagcgggctggcgaaacgggaaatatgaagaaaaaccaaccgacattactaactga

SEQ ID NO: 209244 - DNA, 654 bp, Klebsiella oxytoca
atggctagttctgataggtttatcatattacaggaaaggcttgatgagttaaggagtcacttacttcctgcagaattttcacccataggtgagtacgatcctgtgcagctagatatggcaaagggatatcgtctcttgacacatgcagagtttgaatcttatttggaggatgtctctgctgacactgtaaattatgctttgagacaatggggtgaaaataaaaccccttccatgacaattgtttcattccttgctgcatatcacagttgctggtcagttggtgatgaagaaaacaatcaagagctaatcaatttatctcaaggaagaagccaccccaaagattcactcagtgaagtcatgaatatagccagcagacaattcatgaaaaaagtcaaatcgaatcatggaataaaggcgaaaaatttcaaacttctaatgttacctactggcatagacatcgatgagctacagccagaaatgttaccgaaattagatagctttggttccaagcgtggtgaaatagcacatacgtcaggaagaggtagggttaatcaacaaataaatccaaaagacgaactggatgatgttaattttttactagattgttttcgagccctagatttaaagttaaccgaaataaaagaaaccatatag

SEQ ID NO: 209245 - DNA, 1197 bp, Klebsiella oxytoca
atgtcggagtatttttttgagtacgaagaacaagccgaaaatgaagatgatgttgagttggttgagggcacggacttctctgctgcggtggttagcggaactgactggactacagaaaccattataaatcaaattaataagaacaatattcaactcaatccagattttcaacgtcgcgatgcgtgggacaaagctaggaaaagtaatttcattgagtcgttaattttaggcctacccatcccacagcttgttttggcagaaagaaaagatcagagaggtgcatatatagttcttgatggaaaacaacggctattaagcatccgtcaatttgccgcaaatagagacgatggggtttactcgcccttaaagttgagtggcttagaaatcagggttgacctgaaaggaaaaaacctgaatgaccttaaagaggatgctaacttttataacgatgtggctgcctttgaaaaccaaccaataagaactgttgtaattaaaaactggccgagtgaagaatttctctatcacgtcttcttacgacttaacacaggtagtgtgcaacttgcacctcaagaacttagacaagctcttcatccgggagattttgtttcttatgttgatgcagttgcaccggataacgaagcaattaaaagcatattaaaacttaataagccagattttcgcatgcgtgataatgaattacttttaagatattacgcactcaagaatttcctaccagaatattccggcgacctcaaaaagttcctggataacacctgcctaattttcaatagagattgggggcgtgcggaacataagattgtagaacaatatcaaaatctaaatcttgctcatgaaaccattttgagtatatttggtagcaatagttataggaaatggtttgcaggaagttatgaaaagaaattcaacagagctatttttgatattatggcgctttcattttcattccctgaggttcgtgacgctgttgttggcagagagccagaaattgaagaactattcagaaggctttgtaatggggactatccgttccttgcatcaatcgaaacaacaacgaaaagtttgaaatccacgcataccagaatatctgtatggttcaatgaattaaacgcgattttaggaactaatttacctactctcgagctggatgatactactaatagaataaaagtggtgtaa

SEQ ID NO: 209246 - DNA, 948 bp, Klebsiella oxytoca
atggtgaatgatgatgtaggtttaaaccagacttatgctcaagattttattttccgttgggatgatcagaataacttagccgttaatggtaaaacctttgctgatttcttcaaatactatgaaatccgcgtatatgaccgttatcgtaattacataacatcgtactacaccactacaagcaactggacgtactcatattcaatgaacaccagtgatggcctaagccgttaccgtgtgtttgggatcatcgctcatgggtggggtacaggtatctatagtgaagaagttcagattgaagttagtaatccacagcacccacagttgttaggtatcaatttgaagagtggttatgattccgtgttcattgactggacagaatcaaacgtaccggattatgcggggatcgttcttcaaatcgcacttgatgaagggtttagctcaggctcgaagtactttagcagtgctaaccgctattcagcatcgtttggtattgaggatggttcatggttcgcacgtgtagcagcctatgacgtgttcggacaggatgaactggtatggtcgcctactatcggctttaaccagaatacgaaggttccatacagcaaattgaacgaagatgttattgatagcctacttaacagtgatacggctactggcattgtcgagaaacaaatcgtagatgaacttggttcacgctggcagctacaggtatcaaacaacggtaacgtaaccggcattgccttagccgcagatgaaaaaacatcggtgtttaccgtcatggcagatcgctttagtgtcatcagtacggacagtgccaagctatcagacagggtttatcctctggttgttcagaatggtaaggtttggcttaactcagcggtgatagcatcagcaagcatcaatgaggcaatgatcaataaccttgctgttccgcgatcgacaatttaa

SEQ ID NO: 209247 - DNA, 222 bp, Klebsiella oxytoca
atgacgtacgatgatgcgatggttgcggtatctgaaggcaaacttgtgacgcaccccgggctgccggggggttttgtagtgatggatgtttctaaatccggaattatttccggcatgccattggttatttataaaaacggcatgttagccggtgagtacaggacgacagaagaggatatggccgtagaggactgggctgtcattgaggtcgcgcaggactga

SEQ ID NO: 209248 - DNA, 2163 bp, Klebsiella oxytoca
atgtatcatctcgacaataccagcggcgttcccgagatgccggaaccgaaagatacccagactatttctacacgctggttcggtgagagtcaggagcaagggggaataagctggccgggtgcggactggttcaatactgttcaggctgagctgcttaatttgctcgaggcggctgggattgatccggataaaaaatcttatgaccagttgagccaagctatacctgttctgggggatgcccgccttcgcaatgacctaggttcaggtgacggactgaaacaaatcggtcagtgcgcgcatttagatgaccttcgcgttgtcgagccgtcagctgacggacagcaaatttatttagcggagagaatacgccgctggccagttatcgatgcagggctgccgtggggcgggggtaaatttcgtcacatcgcaaatcttcccgatgaactgcaaattgacgacggcggaagcattattatggccgggggtaaatgctggctcagagaagaactgttgagcggacagggagaagttcgtgttgagtggtttctcgaccacgctccttcttttgacaatgatgcaagtgccgcattgcaggctgctgcgaacacagctaaattgctggcgcaatactcaggtcgcaataaaacgattcgtctcgttatgccatctaaaatatatataaccagaacggtcacgataaatacccgcggagtgagaattgatggtaatcatggtacggtattgtttagtaagaccggagactacacgaattactcaaacctaagcaccaactctaatataactgcgaccccggacactggcacagcagctaaagcctgcattaatctgacgcacggttcagtcggtccagggctcccgaaccctgcatatccaggacaagaattaatcaaggacttgaatctggttctgggagcgccagacggggcggatagctacaccgtttccccactttcggatagcggtctgattgctttatgccactggggaaccagcacagtagcagcagcgcagggttttttcaggaacgtatcattccagggctttggcgttggttatatcaatgggaataacacctggggatacgattttattgaatgtaaatggataggatgctggttgccagtgtggttaattgagggagcggataactcggagcgatattcgttgttcggctgtgttatgcagaacggctaccgttgcgtatattctccgtggggcggtgattttaatatcgttaagggctcctatgtctggaataccgggccgtacttcgaatttccgacagcgggaaatatgattgagcttaatccgtcgcgtattgagatggtcaacacagcgaagccgttgttaaaggttggtacaaaaactgaggctggtggcacatcgcaaggctatcctcttgttaagctccacggcgcaatgtttttgctggatgcgtctgctctccagcctgaaaattatcttttcagcgtcggtaaatgcgcgaagcttattgtcagggataatacgtggtcaaataaaaacatgaacacgctggctaatctgaaactgttaaacccatcggacactggtggcaaggttttattttctaacaatacaatgcgcgtgggaatattttccgaaatggggcgcgacagcaggctgctcacaagcacgactccggcggggcgtctggcttctgacggcatcacgctatccggaacgaattcagtccgggccagcatcagcgctagtggcgcaacgctgacgctgacggttaacgagacagctgctgggacaatgacgttattattgcgcgtgcctgtggatatcgacatgaccgactgggatagtttttcctggaaagcagaattcacaaatctgaatatttctggcaactggacaatcaactgttttgctaatgttgcgggtactcactatgtaaacaatcgtctcgaccttgggtctgtgacgctgaatgccgtgacagatatcagtgatgtctgtagcgccaactcttacgggttcaggaagattcagaagcgcgccgacggcggctgggaccgcgtaccaacggaggtgtatttttacattgctggcggcaacacgcagacagccggagaaacgctcactattagcaggctgggcctgctgggatattga

SEQ ID NO: 209249 - DNA, 876 bp, Klebsiella oxytoca
atgacttttgaattttctcaaagcccgcaggccatctggctttatcagtatgacgtcgatggcgtttatattggctccgtctttatgactattcctgcaggcaccggtctgccagcaaataccacgcatattccctgtgagccggaaaaaggccagaccggcatatttaaaaatggtgactgggaatatgtggatgatattcgcgggacacgttactggaatattcacggcaccggttttgttatttcctccctgagtgaatcgctaccggaatgggccatcaccactgagccacctgtcgcggatgccggttatgttctgctgttcgcagatggtcagtggacgcagattgaagacaaaaccggactgctttactacgagagcgacggcacgaaacataccgtctctgacgcttggttcgcgctacctgaaggctgcacgttcgtgcccccgccagaggacaaaacgacgttcgtcacccgctggaacggggctgagtgggtttatatcaaggacctgcgcggtcagattatctggaacaccacgacccgtgagcctcagaccgtcaccgatattggtcccgtccctgatggctataccctcaaaatgccgggccagttcgacgagtgggatggctcagcctggattaaaaatgccgccgctgaacgggcttatatcatcgctcaggctgaccgtcagaaagcgaagctgctctctgaggcttcggagcagatttcgctgctgagctatgccgtcagcagcggccaggctactgacgatgaaaccgcgcaactggcacgctgggaggcgtatcgcctcgcggtgagccgtgtggataccactgcaaccaatattgtctggcctgagaagccgtaa

SEQ ID NO: 209250 - DNA, 1242 bp, Klebsiella oxytoca
atgacctgcggcgaggcggacaaacgcctggtggcgcgactctccggcgatacgcatctgctgctggaagccggggagccggagctggatctggttctgcgtttccgcattcacgccctgatgcaggccctggaagcgcaatcaagagacggcgcgatcgatatcaccccggggattcgctcgctgcaaatccattttcagccggaaacgttgccccttgagacgctgctggcgtgggtgcgcggcgagtggtccacggtctgcctgagtgacgatctgcaggtgccgacgcgcgtggtgcatctgccgctctcctgggacgatccggcctgccgcagggcaatcgataaatatatgaccaccgtgcgccaggacgcgccctggtgcccgagtaatctggaatttatccgtcgcatcaacgatctgcccgatgaacaggcggtatggaatacggtatttgacgccagctatctggtgatggggctgggcgatgtttatctcggcgcgccggtggcgacgccgcttgacccgcgccatcgcctggttaccaccaagtacaacccggcgcgcacctggacggcggaaaactcggtcggcatcggcggggcctatctgtgcgtctacggcatggaggggcccggcggctatcagttcgttggccggaccctgcagatgtggaatcgctatcgcgaagtagcggattttgccggcaaaccctggctgctgcgtttcttcgaccaactgcgtttctatccggtttcggccgaagagctgctgcagattcgccgcgatttcccgctcggacgctacccgctgcgcattgagcacagcacgctgcggctggcggaataccagcagtttctccgccgtgaagcgcacagcatcggcgcgtttcgcgagcatcagcagcaggcgtttaacgccgaacgcgatcgctggatagccagcgggcaggcccattttgacagccaggagagcgccgtggatgagggcggagacgcgccgctgcggcagggcgaacagggggtggaaagcccgatttccggaaacctgtggcaagtacaaacggcggcaggcagccgggtccgcgcgggggatgtgctggtcgtgctggagtcgatgaagatggagatcccgctgctggccccctgcgatggcgttattcaacaggttcacgtgcagccgggcagcgcggtacgcgccgggcagcgggtggcggtgattattgaggagaaggcatga

SEQ ID NO: 209251 - DNA, 408 bp, Klebsiella oxytoca
atgcgccttaaatggtggtgctggctgctgttcccgctcccgctgctggctgaagagcgcgatccgtttcagcccccggtggaccgctgccggacggcgcagcttagccagtggcgctacggcggtgctatcggcgattcgctggcgcttatgggtatcgtgcaggatagcgccgggaaatggcgtcgcgtgagggcggaggccattttgcccacgggctggcgggtgacgcgcctgacgccagagaaaatgacaatatcaaccggtcctgggtgtgaacccgcacagtgggtctggctgcgaaagggaataaagaataatgcgatggacaagcctgctgtttctgctcctgccgctgatggtcgtcgcggccaaaaaggatcttcccgtgtcgctggtcgtcgatga

SEQ ID NO: 209252 - DNA, 294 bp, Klebsiella oxytoca
atgattccagcgtcactctcttcattttgcacagatccgaaaaaagtaagtcccggatcttcacccctctgcgtcgtttttgtccggtcatgcctgcggatttatcagatgcaatacactgtatttaaactgttatttttccattacgcggcacccgcgctgttcagcgcgggcgggtgtcaccgcgccagtaaacaccgctttgcttctttcctgaccgtggtacacttccggaaagtctcagatagcgtaaaagtcggattcaccagaaaccggcatccggtaatttactag

SEQ ID NO: 209253 - DNA, 417 bp, Klebsiella oxytoca
atgaaaaatgaactatccggtatgaaagctttcgtcacggtggcagagcttggctcatttagcaaagccgccgagcagctcagcctctcacagccggcactcaccaaaaagataaaaaaaatagagagtcatctgaatattgcgctgttcgaacgaaccacgcgaaaacttgcgcttacccaggccggaaaaatactgctccccaaggccaaagcgttgatttccagtcttgatgcggcaatatttaacctcaacgattcaacgtctcaattacatgataccgttacgctatcttgcattccgaccgccgtattttactttttaccgcgcgctatcgtgcaatttaataaaaactaccccaacatcaaagtacgaatttatgaacaaggtatagaaacgtgcggctttgttgaataa

SEQ ID NO: 209254 - DNA, 522 bp, Klebsiella oxytoca
atgtactgttcagcagtattagcagacttgataagagtacgagttagttcaacagaaccagtgaagatctctggttttagagtgatcttttcgaaagatgcgttatataacgaagtacttctatgtaatccagaaaatgtagacctatcgcgtttgaataattcaggggcagtactttttaatcatgaccgagatcatttgattggcaaagtactatcagcacgtattgattcagataaagtaggtcgtgctgtattacagatttccaatgcttcggaaaaagaatgggaacaaatcaatgaaggcgtattaacacatattagcttcggttataccgtaaatgattaccgtattgaaggtaacattatctatgtaactcatttcaccccatatgaaatatctcttgtaactgtacctgctgatgtatcggctggtgttggtcgttctttgataaataaaaaagaagataaccaagaggatattaatgtcatggatgacaatcaagaaatgatggagccttag

SEQ ID NO: 209255 - DNA, 1068 bp, Klebsiella oxytoca
atgagtcttcatcattactacccacagctaagatggaaacctgctgagtatgaatctctgatgcagttagatcagacaataatctctggtttcacccctatcctcaccattcttgatattgactgggactacgaaaatgactgttataaaaaatcgttaagcagctatttatctgacttcggtgctaatctcgcagcatcctggactcctatacgtccagttttgttagacctgaagtatctggataaacatggttcaagtcgcaatcatcctttagatatgtgcattaacgacgccagagcgtacggaaaggaaattgtgccagttgtttcccctgcatccactgcaaactacatacatgctgttcagcgaaacgtatctaatggtgttgctatttcgcttagcccccaaacatggcacttgtttgcacacttgctaaatcagttaaaccttcctcctaacttgattgacatcattgtagattatggagatatccaaagcgctaatgatagcttaaaacaacaagccttagccgttattagttctctttcaggacaagcaccttggagaacattaatcttatcttcaacctcttaccccagttcgcagacgggaattcctcagcatgtagtccatcatattccacgacacgaatacgatctctggttctatgtagtgaaaaattctatcaatggcaggacaccgtgtttcagtgattatccaacagcaagtgccaccataacgagcgtagatccacgattcatgtctcaatatgttgcagtaagatattcgaatgatacttcatggatttttgtaaaaggtacagcagttaagggaaatggatggagccaaactaaaaacctttgttctatcctagtcaattcggctgaataccaagcatttggcccaggcttcagtttgggagaccagtacatatacgatagggcttctggtattaataaatcagggagttctaaagattggcgtaaagtagcccatatacaccatcttacgctggttgttagacagttaaatctattgtcacagtctataccggctagaccctaa

SEQ ID NO: 209256 - DNA, 573 bp, Klebsiella oxytoca
atgagagatcaagatgttagggctgcggttcatcagaagcttcttaaagagtcgcatttagatcctgagtgtcttgtgatcgatgagttttccatatcccttggtgccagtagagcagatatagcggtagttaacggcgttcttcacggttacgaactgaaaagtgaatatgattctttggaacggttgccgctacaaatcaagcattattctgccgttatggacaaggttactctcgttgtagcagataagcatctggacggagcgcttgagttaatacctagctggtggggggtgaagaccgtatcagtagggccgaagggggcgattcgcatcaagcatatgcgtgccgaaaagctcaatcggaattacgattccttgatgctcgctcagttgttatggagagatgagtgtattgacgttctagagcgttggggccgttctaaaggttttaaaagcaagccccgatttgagttatggaatgtcgtcgccgattttatacccgttgcagatcttcgacttgaagtcagaactgcattaaagaatcggatcgactggaaggttagggtctag

SEQ ID NO: 209257 - DNA, 141 bp, Klebsiella oxytoca
atgagcgaagctaaatcgcaggacggcaacaccgtaaagggatatcgcactttaactcccggcgacattgaccggatgaatcgccttaaggacgtcagccgtcatttttgcagtctactggataacagaggtgatgcttag

SEQ ID NO: 209258 - DNA, 270 bp, Klebsiella oxytoca
atgagccttgaatttatcagcgggctggtagtcgttctgcttggcttaatcgctggcgcatttgggttaggccatgcccgcgggaccaacaaggccgaagccaaagccgagcagcagcgcactgaagaaaacgccgctgccagcgtcgccgcggcggaacggaaagaggaagccaccagagaggccagcaatgtacagcagactgttagccatatgcgtgatgacgatgttgattgcgagctgcgcgaaaactttacccgcaaaacctga

SEQ ID NO: 209259 - DNA, 339 bp, Klebsiella oxytoca
atgattattttcgctctgtcggcgcttgtgaccgtgctcgttctgttgctactgcgcaagtatacccagctggagttcgtcggccatgcccggctgctgcttaaaacatggtctgtccgtcttggggctgctggcgcgctggttggtgtatgggctcaatcattcccggacgctgctcttcatgcctgggagatgctgccgccggatatcaaagatattctgcctgccaacattgtggcgatgattagcccggcgctagtggtgctcgccatcctctctcaatacgtcagacagccaaagctgaaagaaaaagccgatgagcagcaggagacgcaatga

SEQ ID NO: 209260 - DNA, 279 bp, Klebsiella oxytoca
atggggcctcgcgtagccagtacattcctgcagcgttggttaacggcgttgaatatgcagggcaagctatatccggacctgaagccggacggcgcgatcggcaacatcaccatcgcagctctgaaaagttacttggcagtgcgcggcaaagatggtgaaaccacattactgaaagcgctgaattgcagccagggggctcgctatctggagttagccgaagcgaggccagctaacgaggcttttctatacggctgggttaaagagcgggtgagcatatga

SEQ ID NO: 209261 - DNA, 678 bp, Klebsiella oxytoca
atgactcttaaagagaaatatgatgacatttatagacgtctcttagacgagattgacgcctatgaatatttcatgaaaaatattaaaaacttttttgagtcaactaaagttaaagtgcatgtccattctcttcgttttaggttaaaggatattgatcatcttttagaaaaaatagaaaggaaaaataatgaggatgatcaattgcctgaaggggagcgcaaagggcatataacagctgagaatatctttgaacgcataactgatattgccggaatacgagtgttacatcttcacttaagtcaaatggaagatatacatcgtgcaattatgaaggcggtgagtgagggagaatatgcgctttttgaagatccaaaagcatatacttgggatccggagtcaaaagtttattttgagagtctagggcttcggactcatgttaaacaaagcttttatacgagcattcattacgtcttaaaacctaacagggaaagcagtgttacttgttgtgaagttcaggttagaacccttcttgaggaggtttggggagaaatagatcatacaatgaactatccaacccagcatgctgatgaaaattgcaaagagcagataaaaattcttgctagactaattggtgctggaagccatttagctgattcaatcatgaagcgctatcaatga

SEQ ID NO: 209262 - DNA, 1104 bp, Klebsiella oxytoca
atgaaaattatttcagtatttaataataagggcggagtaggtaaatctactcttggataccatacggctcatgcattggcagaaaaaggcattaaaactttaatgattgatcttgatcctcagtcgaatctcactttacagtgtatttctccggaggagctagaaaaaatatggttagaggaagagccttatatcgaggatttccaatcagccttagaggaaagtaagctttcttaccaagatttcttaagtaaaccgagaagtattcactgtttattaaaaccaattgaagatggtgtctacgagtcctcctcactaagttctgtgtatgaacttaatgatagattagggattataccaggccgattaagtttgcataaatatgaggataaaatagcgaagggttggagtgacgcctttatgggagagccccaagctttgcgacttataactagtattagaaatttatgtttagaggcagagagaaaatttggctatgaaatggtgataatagatacatctccgagtctcggtatgcttaacagagttattatttcaacttcgactggtttttttgttccatgtatgcctgatatgttttctacttttgggattacaaatattggagagtcattgaagagttggaaaaatcaattcgataccatgtataagcttttgcctgataaaaaaagagagatatttcctaaaaactttgtgaaatttttaggttatacaatttacaatgcgaagaaatatgaaggcagaaatgatcttgatttagcaactgcacattattcatatgttcagaaaatcccaggtgtaattaaaaaacatattccagaagaatgttatcgagagcaagatccagcagaaattgcacagccaattggtggtaaagccgttatacactcacataatactctgccatcaatgtctcaaaagtatagggctccaatatggaaggttcctttcattcagaatatgactgcagatgaccgagctactgtctcaggaaacagacaaacgtttcttgataagcagcaagcatacagtgattttgcggatgcacttttggttcgtattgctaagattgcagaggaataa

SEQ ID NO: 209263 - DNA, 864 bp, Klebsiella oxytoca
atgagacatttagaaattgattttgataatcttcagttacccgtcggctggaaagagaaaagtcaacaacttacgcgcgagttagtggctgaaactgactcaaaaaaacgtggggaacttatagataaaaatcaggaacactggaaaaatattaaacttatcctgacaaaattatttaactataaatgttggtacactgaagcacctcaacaaggtacggatatagatgttgaccattttcgtcctaaaaaaagggtgcaggaaacattatcttcccaggcaccacataatggttattggtggttggcatttagtttagaaaattatcgtataagttgtattgttgccaaccgtcgtcgtactgatgttgagactggcataactggaggtaaggctgatcattttcccttatgcgaagaatctaatcgagctaagacgccaggttgtaatatagagggagagcaacctattcttcttgatcctcttaaagcaactgatgtccaattactgcaattcaagcctgatggagaggcaatgccccgtttttcggaagataaaaacccaaggaaatatatgagggcagatctatcaataatgttttacaatttaaatcattctgattttgtacgctgtcgcattgagcttcgtgatcttattgataatgaagtgaaagctgctgctagatattttaaaaagcttgaggcgggtgatgctgataatgattttgcgtatgaagaagcaatacgaaggttgcgaaaaatgcgcggcaaagatgctccattctcaagtttctgtattgcttactctgatagtttcaggcataagccagaatatgagggggtccttgatggagtttttatatga

SEQ ID NO: 209264 - DNA, 1653 bp, Klebsiella oxytoca
atgaaagttgacaaactttatattcgctcgcgttttaaaaaccttaataacgttagagtcgattttgatgaagagcatctgatgactgtcatcgtcggcagaaatggttctggaaagtcaaatgtaatagaatctttagtggcggtatttcgtaatcttgatttgggtgaggctccacctttttcttatgagttggtataccgacttggtcaaccccataaacaaaatcaacctagcgatcgttggttagaaattaaaattgatgctgatccaactcgtggcagtttagctaaacaatatgtgataagtatccgtgatttattggaagttaaaagtgaaagctcatccagtaggaaagagctaattatacccttttccaaagttaagcgagataaagctggtaattcactgtatctgccaaaatatgtcttcgcttattattctggtccaagtgatcgattggaacgatatttcaaaaagcatcgtacagatttttatcgtcatcttcttgaagaaaaattggacctaaagggtgatattcgccctttattttatgccaaaccttatcatagccaatttgttttattagcttttttcttaaatgaagatgatagtgttgaaaaagattttctcagagaacatttaggcattgaaggtttagatagtattcatttcgtgatgcgtcaacctggttgggctaaggaaaaaggcgaaattttttggggtgctcgaggtgttgttcgtcgttttctggatgaactcatcaagtacagtttatcaccggtaaaagttacccgaacagaggatttatcattaacaggaaccaatatcaaaaacgaattttttcatttatttttaccagatgtgaatgcattacgtggatttgctaaggatctaagtgcagatgagttattcaaaatgctggaaagtactctcctttctgaaattatttcagaagttagtattagagtcaaagtttctagcagtgatgagccacttactttcagagaattgagtgaaggtgaacagcagttacttacggttcttggtctgctcaagtttactggtagtagagattcattattcttacttgatgaaccagacactcatttaaacccgtcttgggcggttaaatatctcacatttcttcagaaatttgttccaagtgttgaaactagtcatttattaatggttacacatcatccgttagctatcgcagagctccaaaagcaacaaatacaggttatgtggcaagatgaagatttccaagtacatgcccatgaacctgaagaaaatccaagaggactgggttacgcaggtattttaacaagtgatatgtttgggttacgcacaactttggacaattctactgaacgtttattgcgtttacggcggcgatttacggaaaaacaagagttatcaccaaatcaagtaagaaggctgcggaagattgatcaggctctcgaaggacttggctttacaacagcacactgggatgaggaatatgctcagtatctacgcataagaaaggaagtggaacgcgacattgaaggcggcatacttacaccagaattaatgcaactaagaaaagagcgggctaaagaaatagtcaggagattactgagatcagaacaacaaggagatgaaaaatga

SEQ ID NO: 209265 - DNA, 1653 bp, Klebsiella oxytoca
atgtcaaatacccccgttcttcatgaaaacaaaagcttaccaaacacttggataaaaacatcaatcggtgaaatttctgatgttttctcgggaggaactcctagagctgataaccctgcgaactttactcaacctggttcaggaatagcttggcttacaccagcagacctaagtggttatacggaaaagtacatcagtcacggtgcaagagatcttactgaaattggttatgaatcaagttcggctaaattaattcctgcaggaagcttgttattcagtagtagagcacctattggatatgtcgttattgcaaagaatgaaatatgtacaaatcaagggtttaaaagttttatctttcctaaagaagtagatccaagctacgcatattattatcttcttagtattcgtgaagttgctgaaaatctgggtacaggaaccacttttaaagaaatttcaggtgctgccgcaagaaatttaccttttatacttccatcttttgaggaacagaaagttattgctagcaggcttgattctttaattaaaatggtagagacatctaaaaatagtcttgtaagactccacgatctcattaaaaattttcgacaagcagttcttaccgctgcggtagggggatgtttaacaaacaatcaaaaatatgatgatcaggatcggaaaccattcataaaactaggcgatgcaggaattgaaataaaaactggtccttttggtagcactctgcataaaagtgattatattgaaaacggaattcctgttattaatcctatgcatatatcggaagggaaaatttatccttctaaggccatgtctatatctgaagaaaaatataacaatctggaagcatggcatcttaaaaatggtgacattatccttggtcgacgaggagaaatgggaagagcagctactgttagaacccctgtaagaatgctttgtgggactgggtctttaattcttcgagtacctgaaaatatattaccagaatatcttgagattatcttaagatctcctgatgcggttagttatttcaatactgcatcagttggttctacaatggttaacttgaatcaaaaagttataaaagatttggaaatatatttccctagcattgatgaacaatcgaaaatagtaaagcgtgtagagcaattgctcgcttttgcagatgttattgaagagaaagtcaatacatcgcgagattttgcagggagtttagttcagtctattttgcttaaagccttttatggagggctgaccagtgactggcgtgccaataatcttggtttaattgaaggggaaaatagtgcaaaagccttatataataaaattaaacgcgatcgtgaatcattgactaaacaacctaagccaaaacataaaatatcgaagagaaaggcggatggaagtatgaataggaaaatcatcaatgtagtcgatgcattaaaatatgctggtgagccactaaatggacagcagcttttagccgcagcaggttatcctaataatagtagtacagaagaattagagagattttttctggacattcgtaatgctttaacccaagaaaaattaattacattgttggaacgaagcgaagatgggcaggactggtttacacttacccatattgcctcccaaagctaa

SEQ ID NO: 209266 - DNA, 1491 bp, Klebsiella oxytoca
atgaaacaagaagctgtcattcaaaaaatctggggcctctgtaacatcctgcgtggtgatgggatcacctactatcagtatgtgtctgagctaagctatcttctttttcttaagattgctcaggaaaatggttcagagaagcatttacctgaaggctgtcgatgggctgatttagctgcacatggtgaagacggtttacttggattctaccaggaaatgcttacccgcctaggtgcatcagtagataacgtggtgatcaaagcaatttatgcttttcctacaaccgtgttttcacattctgcaaacctgaaagccgttattgatggtatatcaaaaatagaatggcatcaggtcgggcaagatggcttcggtgatctttacagtggcttgatagacaaaagtgctcaggatagtcgttctggagcgggtcagtattttaccccacgcccattggttgaatcaattattagattagttcagccaacaataggtgagttgatacaagatcctgcaacgggcagcggtggttttttagttgcttccgatggttatattcggaataacatttctgatgatttatatcagatgaatcctccaagatatcaaggtgtagaaatagagaaaaatacacgtcgaatttgtttaatgaatacctttttacatggtcttgatgcaaatattatttatggtgacgcattaactgacgatgccaatgagttggataaggctgatgtaatagtagctaacccaccttttggtaataaggcagggagtatgcgctcctttagaaaagatattccattctctaatactaataagcaactcgctttcttacagcatatttatcttgggcttaagggcggcggacgcgccgctgtggtcttgcctgacaatgtgctatttgaatcaggagtcggcacagatgttcgacgtgatttgatgaatcagtgcaacctacatactatattacgcttacctactggtattttttatgcgcaaggtgtaaaaaccaatgtgttatttttcactaaaggtagcgctgtcgataaattccaacaagagaattgtactaaagatatttgggtatatgacttgcgtacaaatatgccgagctttggtaagcgtacaacatttggtgatgcacatttggctccttttgaacaagtctacggtaaagataaaaatgggaaaagtccaagacaggaaggtgaatacagttttaatgctgagcgagtagaaattgcccagacagatgagaatcgcgacgttgatccgcatttagctcatagccgctggcgaaaattttcacgggattggattagcaaatgtaaaggcgattcactagatatcagctggctgaaggataaggatagcatagatgcattaaatctacaggagccagaagttttggcccgtatggctaaagatgaacttgaagtggttttaagtgagttggatagaatattggctgttctggaaggggctaattga

SEQ ID NO: 209267 - DNA, 633 bp, Klebsiella oxytoca
atggataagcatactgatagtggttctagtttagtaaaagcaattaaagctaaagaagtgaaagagctgagtgaagaatatttagaattgggagtggatgcgttgctcaaggatgaaacgctcaagagtttacctctcgtgaaaactgtagttagtgtttgtaattttgttagtactgttagagatcaagctctggcaagaaaaatcctgcgctttattaatgagctttctgagctcaatatgcaggagagagagcaaatgattgataggctaaacagcaacgataaatatgctggtaaagttggtgatacaataatcgaactaatggataagttagattatgaaagaaaaccagagatagctgctagattttttattgcatattcaaaagagcttcttccttatggtgagtttcgtcattgtcttttagctttggagaaagttgcctcctttgatatagataaactagtcccttttttagaggagaatagtagctcatgtgaatatgaagaatctatattacttggttttgtcaatgctggtttagcggtgaacaacggtggtcttgatggtggggttataattccaactaaactctgtaagtattttgttgataatgcattgaaaagttga

SEQ ID NO: 209268 - DNA, 222 bp, Klebsiella oxytoca
atgacgatgtgtcgggtgttgtgcgttgcccgggccgggttttatgcgtggctgcataacccggtctccgcgcgggataaagataaccagcgtctgctgacgcttatccgtgactcctattcactgagcggaggcgtatacggttaccgccgggttcatggcgacctgaacgaaatcgggaaatctgcggtaaaaaccgggtgggccgtattatgcaactga

SEQ ID NO: 209269 - DNA, 204 bp, Klebsiella oxytoca
atgaacgaaagaaaaagacttatccgcttacccgaagttttaaacaagactggtttttgtaaagcgtggatctatcggctgattagccggggtgatttcccttctccgatcaagactggtgaaagaactatcgcatttgttgaaagtgaagttgacgaatggattgatgataagattttttattcgcgtaatcaagcggcgtaa

SEQ ID NO: 209270 - DNA, 210 bp, Klebsiella oxytoca
atgaatctgataataaaacgcgtcaccgtacaaaaagatccccggcggcgagaggccgttgacctctttcttcatcagcatcagctctcgctggaggcggattgcgaaagggtgattgtcgccgaggatcagcggcgcattgtcggctgcggcgcgattgccggatgcgtcctgaagtgtattgccgtcgacccgtcgttgcagggataa

SEQ ID NO: 209271 - DNA, 438 bp, Klebsiella oxytoca
atggcgtttttcgttttcgagagcctgactcagtgccgtttacacacgatgcagtatctgctggttggtttgtcgctagtgatgttctatctgatattactggccctgtccgagcatattggctttacgccgtcatggattgttgccagcctgataggggcgctgatcaatggggtttatctgcatgcggtgctgaagggatggcttaacagctttctttttgtctgcgcattgctgctgctggatggcgttatgtggatgctattgcgttcggaagatagcgcgctgctattgggaacgggagtgctactgctggcgctcagcgcgctgatgttcctgacccgtcgcgttgactggtacacgctatctctcccgaagccaaaagagaggcagcccgagggcggtgatgatgacgataagttgaggatctggaaataa

SEQ ID NO: 209272 - DNA, 768 bp, Klebsiella oxytoca
atgaataacgataccctgaacgccctcattctgcgccacggtgaaaatctgctgcgccggtccggctggccagaacgtgtgggggtaatgcaggttgccccgggcgaagttcccggctggttgtcagtgagtggcgtgctcgatgcagacgagatcctcgcgctgacaacccggctgtgccagtccctgaatgacggacgggcgaaactgctgaccgccagcgcgcaacggctggcagggacgcccgcccggctgcatctgtacccggctcagtcttatccccgacccgaagccctgcctgactgtacgtgtatcagtctgccctatgcccgggaatggctgacaaaagccgagtgtgcagacctgctggccttcctgaaagacttcactgaacgggtgtgtgaaatcgttcggcaggacgcgcagcgcatcgcggcggcactggtgccatctgccgcgccgcggctgatggaaaaacgtttcggagactggcgactggttgcggacgaatacgggcatgacaactggctggacagtgaggacggggaacggctggatcaggtgctggacggcatactggtccgggatgcgcggttttgtccggtcctgctcaccctggtgaatgagtcccgggaagaaatcgaagcggccggggtgatgaccgatctcctgcgtttcccgggggaaccggtccgccgctggtttgaccgccgcgtgttgcgggatgtactgaacgaggtgcgcaacacagatccgatcggggattaa

SEQ ID NO: 209273 - DNA, 318 bp, Klebsiella oxytoca
atggaaacactgctgaatacctggcttgttggcctgagcgtcgacgtcgatggcactgaaatgatggtgtattacctggtttccgcgagtgacctgtcgctggctgaagcgggtgttctggaaatggggcgcacctggtggccatcgctgcaacgcgaggatgaccggcatcgctgggagtatcccgaaggcgtggtctggtttaacagcattattctgctcgatgacgtggaaaacagtatcctgcgcgagctgaagtttctcgatgcgtggacagtgaccggctcaacggatatgccgcgactgcacgatgattag

SEQ ID NO: 209274 - DNA, 936 bp, Klebsiella oxytoca
atgccgaactggtgtgccaaccgactgatgttcagtggtattaaaaacagtgatgccctcaatatgtggattgccggaggtgagctgtctctgcatcgccgcgccagaaaagaaggtatccagcttttcctgtcgggctgcgcgggaatactgcgcccccggacagaacagcattacgcgccatatccgcagctggtttcttacggagctgctgctgacaaccggccttcagcgcgggcatacagcgactggctggcgatgtttatggccggggcagcgctggatgtggaaacctgcctgaagctgcatcagtgctggctggacagtcatattgcctgtgcccgctggagcaccctcagtgaaccggaacagtcggtcatccgtcagctgtaccagcaaaaatcctgtgactgggggggcagtttccggcctgcgccggtgaatgaatggtgggacagcctgtgcgactcaggttctgccgtccctgctgccgatccgatggacttccgcgacgtgctgccgacgcgtctggatattgcggtgaacggcttcaacggtggcctgctggcggatatcccgtcgtcatatgaccattatctgacccggtacgggtgtaagtggccggtcggttatgaggcaaatatctgtttcgccggagagaacacgctgacggtggattttgacactccctggagtccggtcggcgaagacgttgtggctgaactcagtcagcgatatggcggtgaggtggagcactggtttgcggagcagggctgtaattactgcggttatgcccggtatgtcagcggcgaaactgacgtgtacatcactgacgagctggaatggggcgaggttgccccggacgatgaggacagcttcccggatgtgaccggcccggagtgggttatcaacaacgtggcgcattttggcggctga

SEQ ID NO: 209275 - DNA, 672 bp, Klebsiella oxytoca
atggctgactggtttattgccaccgaaggtgtgaaggtcgtgaaggacagcgccagtctgtggccgcagatcatcacggcggtttcgtccatatgtgctgcactgggtggcgtcggtctgactcactattttacccgcatacgggaagaacggaaagtagctgaagaagcagataaagagtgtcaatatcttgttactgaattagtgttcttgcttgaacgctattctgttgcttgggtggcactgaaatggcaccgtatccatgagttacatgagaataacaaaatccccgttttagatctttcagtagttaacggcgactggcgaaccctgcctccacatctgatattccggctccgatcacttgaaacttatcaagcggagctgtctttacgcatagaacagggaaaatttaatgattatctgccggtgtccatacctcttactcttgcgtgcgtgaacactggcatccgcgcttttattctggccgccaaacttcgtagatacgttgaattaccggaatctgtccatctgagaggtaagcaggagatgttcagcatgctgagagacttgcggcaaaaatattggcgcagaattgtattggaagggaagaaaggcaaggaggtttatcaattacttatggagaatgatgatggtaaaggcaggaggtaa

SEQ ID NO: 209276 - DNA, 453 bp, Klebsiella oxytoca
atgaaaattgctatcgtaatcgcttcaaatggtctacttggctgtgaattactccaaatggcagagagagctgttggtcaggtagaaaatgtcagaacgatacagtttcaagaaggagaaagcattgaggaactcgtatatcgttacagacaagccaacaaggaactcgataccactcatggcacagcttttttaatcgatgcaagattgagttgccaccaatacgttgccagtcaacttgtccatgaacacaaaaatggttgtgttattacagggattaacctcccgatgctaatttcattatttctgtatgaaatcaatgaaactgacattacatcttttgcctcaaaagcaaaattatatggcatagcaggcattcatttaattgagaaccacgatattgaaacagccatgaagggtaatcaatataacaacttattatctgaggtttaa

SEQ ID NO: 209277 - DNA, 1005 bp, Klebsiella oxytoca
atggccgatcccctgaacctacagaccgacgtcgtccggcagcacacggtgccccgttttttactggagcacttcagtgcgccgggaaaaggtaagcgccggcggttgcacgcctttgacaaggcccgcggagtcagttatcccaccacgcccgacgacgccacagtgcgcaacaccttttacaatcttgatggtcaccccgatcgcttgagtctggagccactgctggggatttacgaaaaccatgccgcgccggtgatcgccgcgctgctgcagcacagggatatccgccagctgaccgaggaggatcggtacaaactggccgtgtttgtggccgtgcagcgtgcgcgtacctttggcgagcagcagcgtatagccggaatggtctctgtgctttcggataaattggctggtatcggcgcgacagctgaccaggtgaccgatgccctgggtatatcgccagatcgcgatacccggcacgtttttctgcgtttgctggccgatcaggcgcctcatattgaccattacctgaataaagactggtatctctttgagaccacggccgatcatccgttctatgtgtctgataacccggtagtcctgcagaacagtaatgacttcgcaccatacggcaacctcgggctggcggttcgcggtatagaaatttatctgcctctgtcgtccacgctgatgctcgccctgtactgcccttccatacgggaaggaatgcttcagcaccggcagaacattgaatttttactggcacgcacgccgcatcgcataccggtacatatgcgcccgtttgagatgcttgagcatatccggcgttttacggactatctgtcttttccgctgagccaggagaatgtcacccgttacaattcgctgcaggttcagttttctgagcagtatgttttctgtgaaaggaatgactttactctggttgaaaaaatgctggctcatgacgagcgttaccggaccggcccacgttttatggctggctga

SEQ ID NO: 209278 - DNA, 225 bp, Klebsiella oxytoca
atgtttacctttttaactgtgccgcgtgcgcatagccgcattcaccgcattgcaaaccctgaattttattttcactacgtcggcgcgcttcgtggtggtgtcgtgacgctgatctccacgattgagctttttcaccctgcaattcacccccacgaagcgcgccggatatctattacctttcaggagaggtgctgtctgcctgctgacctgaaagtgcttcggtaa

SEQ ID NO: 209279 - DNA, 582 bp, Klebsiella oxytoca
atgtctactattgcagatttagtctcagcattggcatggccattggcttttgtatggttcgttcagaaatatggtaatgatgttaaagaacttattctccgattatcaaaagtaaagcttggaaatgctgaggctgaattcactttgggattaaaggtggtggaagaattagcaggtgaaacacctttggcggaagcatcaaaagatcttcctgaggaaggtgttgaattttctagacgtatggcgcaattagagcgaattgcagatgtatctcctagagccgcaattatggaatcttggttactaatcgaagaggctgcagggaaagcaggttttgtccatggggcatctgttccacgaataaaccctttgttatttattgactggttggtaaaacaagggaaagttgataattcaaccgctgccttagtcaataaaatgagaaagttacgaaacgaagctagtcatttaaaagatttcgaacttaccaaggatgaagctgaacgatatataaaaatagctgttcagatctcccttcttataatcgatccagacacacctacggcattggaaaatgattga

SEQ ID NO: 209280 - DNA, 525 bp, Klebsiella oxytoca
atgcaccaattcaatgagcttgcatataaatgtacatatttttcactcaatgtaataaacgaagcttatgaaaaagcagtagaggaattatcagaaaccggctcaactcctccagttaaacaattacaagctctaaatttacaaaagatgatacatgcggttggtttgttttctatttttgaagcatatctgcaacaaatgcttggatgtcgaagaggtttcaaagatgcagagatgattttagagcaagcaggcgagcatgctttaaaagaaaattttcataattgttatcttgcaattaatgctctcaagcatggtgaaggggccagctataagagccttattggtaaaatcaacacccttaacttcgtggttgagagtcagaccacaccaatctttgaagaaggtgatgtttctggtatttttgcactcgttaaagtcgatgatagttttattgataattgtttggagataattgacaaagtatataagtgtattaatcatcaccgttctaattttaagtga

SEQ ID NO: 209281 - DNA, 1362 bp, Klebsiella oxytoca
atgtataacaatctccctgtgctaatggaaaacattctttatacagattctttagtgaatagttattattccagtcttgaggaaaatactatcagtgaagcattaaatgaatacagattgagaatagatgatcttataaaaaatggtttaaatgaagatgaacagtcacctttaaatatttatctgtcaggtggggagcaaatctattcttacaagcatggtttgctgtcaatggataaggtgatattggatgatgttctctatgaaatttctttgcgaaataataattcaacgtctgatgttatgcttagtccatttattcaagaagataaacaagaaaagatagatttaacgaaaaaggctattgctaacttcatctcttttatcaaaaataattttgaattaattcgtgctggtttcatagcattttccagaagcaatagtatgcttgaagaagctgaacggaaagataagatttttgaagataatgcagatcgaaactttatctatagctttcttcctcgtgaggttgctaccatgtatgaaagaaagttaaaagtccagcctataagaaggttagcaaatactaataaaataaaatttgtttctgaaaaaacattgcctccagagataatgctagaaataactgattgtgaaagttcctatgttaatgggtatatgtatcagagtatagtagacagtaaactaaacgatgacagaacatttgattttagactggtattgggaaagcatgagaataaacgaagttatgatagttgggttcagggagctgtgaatagaacgatatttttccattataataccttgatgttaaacttaaagcaatcttatgcatatggagcctcattaggtactagttgccctttttatgctaatgttcttaagaaaatagatgcgcaaaataacgtatcaagaagaatgattgacgtgaatatccctttccttgacggattaacaccaactgaaatttttcgcataagaacagattatgaagatagttttctttcctttcgtaaggttctcagggaaacatcatatgagattgaacgctctcaatccaaaaaagatattgatttgattaataaacaattcaatgagcgaataatggatgaaggattatccgatgttaaagaaaggcttaaggaatataaacgtaagagtattaaggattttgctcttgaaacaacgcctttaattattggttatttagcggcaccatcaactacaacattaacagttggagcctttggattactgaaaaacatatacgatgtttggaatgattcaggtgaggtaaaacgacatccatcatatttcattctaaaatctctaaaaaaataa

SEQ ID NO: 209282 - DNA, 720 bp, Klebsiella oxytoca
atggaagatttagtttgtagttggtcaccaaagctgatcgttgatcttataaaaagtatcgcttggccagtagtcgtccttctcatcggcttcagttttcgaactcgaatttttgaagtggcacgttcatttttttctaaaaacacagtttcagaaatatcagctacagtatcaggtgtatcggcaaaatttgtgacagcaaagcaaacaactgaagtattagaaagtgctagtaccaatgcagcgaatttaccaaagagtatgagtattgaggctataagagcgcgacatgaacagcataaaacagaattcagcgaagatttatatcaatcaataattaaacatgcttcctctttagatattaataatgatgaaaaagtcaaaattctggcacgtgaattgtccatttatcaagctataatacgatatattgacattaataagatattatttcgctcacaatacaatttattttattctataaatagcaatggtggtcaaataaataaagaagacgccaatcttttttttgaggcgaccaagaagaacaataaggaagcattctccgattgggattggattaaatatattgcctatcctgttagtaatagtcttatctatgaagataataatttttataaacttacagagttgggaagatcgtatatagcttttatgtcaaaaaatccacaactaatcgacgaacttgcaaaattatag

SEQ ID NO: 209283 - DNA, 267 bp, Klebsiella oxytoca
atgaaagctgaaaaaagaaaagaagatacagcgcgtaaaataaaaattggtgctgagttaataagaatagttagagaaaatagcaaagaagtatctgacgagttagattttactaatgatttatcgctattggtcggggctttaactaatcgtatggtattaaaaagaatatacgatcagcgcgaatttttgagagcagaaggggataagaggcttaacgaatggaagctaaggaataataaaaaaaggagtaaaacggatgaatag

SEQ ID NO: 209284 - DNA, 237 bp, Klebsiella oxytoca
atgaatatattaggtttaatagcaaaagcgaaacctgcggtagacgacggcggcggtagtctcattcctgccgcgatgggtttttttatttgtgcttttctagttgctatcattgcctctgttgtttctagtgcttttcgttctgctaaaaactcagcagacgtgagtataaacaatgcaaaaaaatattacatagcactaataaaagatcagtatagaaagaaaggcgggggctga

SEQ ID NO: 209285 - DNA, 387 bp, Klebsiella oxytoca; identical to SEQ ID NO: 204688

SEQ ID NO: 209286 - DNA, 1917 bp, Klebsiella oxytoca
atgaacaaactttcgcctgaaatgcccgaactgcaatcaatgaatatcactgctgataacatcaccaagcttaaatcattgtttcctgaagcttttaatgaagacagtgttgattttgaggttttaaagcagcttttgggtgagaatgtagacgacaaagaagaacgctatggcctgaactggcatggtaagcgtcaggctcgtcagcttgctcttaccccttcccgtggaaccttacgcccatgtaaagatgaaagcgttgattgggacaacaccaaaaacatcgtgatcgagggtgataaccttgaagttttaaagcttcttcaaaaaagttatgtaaatagagtaaagctaatatttattgaccctccttataatacaggaaaggattttgtttacccggataattttcaagaaaacatgaagaattatcttgaaataacggggcaaacagatgaaggcgtacgcataagttcgaatacagaaaccagtggacgttatcatactgattggctgaatatgatgtatccacgacttattttagccaaaaacttgttggctcaagatggggttatttttctatccatagatggaacagaagcctcgaatttagaacatttgttgaataatgtattcggagaagaaaataaaatcacgtctatatgttggcaaaagaaagtatcacctgcaaatgatgctaaatggtttagttcggatcatgattttattttagtatatgcaaagaataaagacatttggagacccaaaaagcttaaacgcactggcgatcagctatcttattataagaaccctgaccatgatcctaaaggagaatggaattctgcaacgtacacatgtaataaaagcatgtatgagaggccgaacctttattacccaatagtaaatccaaatactatggaagagatatggcctaaagaaacagcggtatggaaatactcaaaggatataactgaaaaatatataagcgaaaaacgcttatattggggggttgatggacttgcaaaattcccgcgtataaaactatatctttcagaaatggatgacgttgttccaagatccatctggaattatggcgatgtaggtcatactcaacaagcgacgaatgaaataaaggaactattttctggtgagcaagtatttgacacaccaaagccactgaaattgttaagaagaataattcaactatcatcaaacaaaagcgatgatattattttggatttttttgcgggttcaggaacaacagcgcatgctatttttgaacaaaataaggaagatagtatttctcgcaaaagtataattgtacaacttcctgaagtattattagaaagtaatcgtgagcagaaagcctcatactctttttgtataaaaaacaatctcaagccaacaataagtgaacttactaaagaacgtctccgccgtgcaggtaaaaaagttcgtgaagaaaatccagaatggaaaggtgatgttggttttcgtgttttcaaactcgatacatctaatatccgtccgtgggaagcctctgccgaaacactttcacaacagcttgatgcttatgtaagcccaatccttgaaggtcgtagtgaagaagacttgctgactgaactgatgcttaagcgtggtattgatctgagcgtaaacgttgaaacccggcaatttgatggattaaccgtttcttgtgttgacggtggcaaattgtttacctgctttaccagtcaaatccctgcatcttcagtcgaagaactgaccaaggggatccttgactggcataagagtctgaaagctgggaaagatagtgtctgctatttccttgatgacgcatttgaaaataacgttgctaaaacaaatctttgcgccattctggaacaacacggcctgactaacctgcacagcctgtaa

SEQ ID NO: 209287 - DNA, 141 bp, Klebsiella oxytoca; identical to SEQ ID NO: 36145

SEQ ID NO: 209288 - DNA, 210 bp, Klebsiella oxytoca
atgtaccgggtaaaacagctgttcgggggttcactgacgctgcgtgactacgatggtcaggttgcggaggctatggccctggtacgagcgctgaacaaaatgacgaaagcaggtatgcctgaaagcgtgcgtattgcctgtaaacacaagccgctacgggggagacttacccgaaatctgatttattcaacaaagccatacgtcaaatga

SEQ ID NO: 209289 - DNA, 504 bp, Klebsiella oxytoca; identical to SEQ ID NO: 185467

SEQ ID NO: 209290 - DNA, 573 bp, Klebsiella oxytoca
atggaaaacgaaattcactttattggcattgatgttgccaaagctaaactcgatgtcgatatgttgcggcctgatggccgtcaccgcagcaagaaatttgccaacacccccggaggtcatgacgagctcgtcagctggttgcagggacatcaggtcatccatgcccatatctgcatggaagcgaccgggacgtatatggaagatgtcgccgctcatctctctgacgcagggtatcaggtctctgttatcaatccgatgctcagcaaagcgttcgtccagagtcagggaatacgcagcaaaactgatacggtggatgcccgccaactggcgtatttttgccgggagaaacgcccggcgatatgggaagcgccacacgcagacggttgtgaacccgtagcccggtcagcgcagcgcaagccgggaagaaaaccgcagcaaggcacccggcatcgcaccttccccggaggcggcgcgttgcgcctgtccgggcttgtattattaaaaaatccagagagaaccggccagttccctctggtggtggtccggatgccgtgtccgggctcagacttttag

SEQ ID NO: 209291 - DNA, 270 bp, Klebsiella oxytoca; identical to SEQ ID NO: 205751

SEQ ID NO: 209292 - DNA, 660 bp, Klebsiella oxytoca
  misc_feature (581)..(590): n is a, c, g, or t
atggaaataatgagttttgaggaagtaattacttatttacataagaaatctcggccatactctctacttatggggaatggttttagtatggcctatgataacgaaatattctcatataatgccctttataattttttaacatcaaggaatgatcagttaataaataaactttttgatgtgataaaaactaaaaattttgaattagtaatgcagcaattagatacgacgttggccttgttaaaggcttttagctcggatgataaattacaggctgatattattttagcaagtaaaaagttgaaagacggtttgctaagctcgatacatcaacttcatccagagcatgtgtataaaattccagagaaaaagataattgcttgtgctgaattcttaaatttatttattaaaagcggtgggcatgttttttctacgaattatgatatgttactatattggactcttatgcggaatcatgttgaaaatgctatcgatggctttggtcgagagatagaaaatcttgatgaagtgctccgtggagaaactccagaatattctgaccttgtgtgggggccaaatatagnnnnnnnnnngctttgcatatttttgactcaggggttgatattgaaaaggaacaatatgatcaaagtaattttttattag

SEQ ID NO: 209293 - DNA, 540 bp, Klebsiella oxytoca
gtggaagtacgtagcggcttcaccacactgaaagtgtgctcatacacggcggcacaggggcaggatgttaaaaactatcgagacaccgtgaccgaagtgagtaagatcaagcaaatactgttcggcggtttcaaaaaatgtctttatccgatacagaagttcgattctgacaccgaacgacgcttcgctatcatccttgagcgtgatgccattaaatggttcaaacctgccaagggccagttcaaaatgtactacaagaaaggcaccgaacacccggagtatgtgccagactttatcgttgaaaccaacgatagtattctcatggtggaaacgaaaagcgcgcagcataaaaacgctgatggcaactggaacgaagaagtaacagaaaaagctaagtcgggtgtaaaatggtgtgctaatgcctctacttatctaaaagacaacggcggtaaggagtggaaatatttacttatcccccatgacgaagttaaagaagcaaatatcttaggtagttatatttctaaatttcagcagtcataa

SEQ ID NO: 209294 - DNA, 666 bp, Klebsiella oxytoca
atgacaatagctggaaagttctcaccgccagaagaagatgaagttgatttatctgaggaggaaataaatcttgatctcactgataacgatgaagatacgccagaagaggatttacttgaatctgcatcagttgatgaaattaataaaaataatgaaatgccttcgattaaaacaacagccagaaaaaataaacaaaatgtttatctcttagataaaaaaacagcatttacaaatcatcataaaaaaatcgacgatttaattgaggaagcaaaaaggttacactcaattagatttaaacatagtgcaatgttactcagcagaacattgatccaaattatattgtcacatttgataaaagcatccactattcatgatgattataaaaagaaaagcacgtttaaatatcttgatttagatagcttactagatttttttagtaataaccttacaaaattattccccgatgagaatagccaagacattaaactcataaaacagacacttattagctacaaagaatcgggaagaattatagctaacttaacaactcatcacgagtcacatattcttacagaccaagaaatcaatcacatacaagcaaaattgcagatccttgttgattattttatccacaaaatacaatgtggccatcgaagcaatgattag

SEQ ID NO: 209295 - DNA, 294 bp, Klebsiella oxytoca
atgataggagatatcactgtatatcttgcgattgcttcacttgtgggaggattaataacatggggaatatctgagataagaagaaagtactctaataaagaagacctcgaaagacgtatcacagctatcgagtcgaaattagatattaatagtactaacagtaagaattatcttgagcgtcttaatgaaattaaagatgcattaggagatattcgtacagaaattcggactgttgaagaaaggacccgtggaaatgaaattcaactagcaagaatagaaggtcgtaatgattaa

SEQ ID NO: 209296 - DNA, 171 bp, Klebsiella oxytoca
atgaagctcgcgctaagcgtgaagaaattcttgaagaagacaaaattgaaactgaacaagctggtgattctgctgttaatgcaactgatgatagtccggctccagttcctgctcaagatgaactttctgaagaagaacgagaagaagaaaccgaagaaattctcgaagtag

SEQ ID NO: 209297 - DNA, 141 bp, Klebsiella oxytoca; identical to SEQ ID NO: 98997

SEQ ID NO: 209298 - DNA, 1290 bp, Klebsiella oxytoca; identical to SEQ ID NO: 202269

SEQ ID NO: 209299 - DNA, 690 bp, Klebsiella oxytoca; identical to SEQ ID NO: 202270

SEQ ID NO: 209300 - DNA, 1203 bp, Klebsiella oxytoca; identical to SEQ ID NO: 202271

SEQ ID NO: 209301 - DNA, 3135 bp, Klebsiella oxytoca; identical to SEQ ID NO: 202272

SEQ ID NO: 209302 - DNA, 363 bp, Klebsiella oxytoca; identical to SEQ ID NO: 202273

SEQ ID NO: 209303 - DNA, 276 bp, Klebsiella oxytoca; identical to SEQ ID NO: 198261

SEQ ID NO: 209304 - DNA, 681 bp, Klebsiella oxytoca; identical to SEQ ID NO: 202275

SEQ ID NO: 209305 - DNA, 912 bp, Klebsiella oxytoca; identical to SEQ ID NO: 202276

SEQ ID NO: 209306 - DNA, 285 bp, Klebsiella oxytoca; identical to SEQ ID NO: 202277

SEQ ID NO: 209307 - DNA, 666 bp, Klebsiella oxytoca; identical to SEQ ID NO: 202278

SEQ ID NO: 209308 - DNA, 192 bp, Klebsiella oxytoca; identical to SEQ ID NO: 202279

SEQ ID NO: 209309 - DNA, 528 bp, Klebsiella oxytoca; identical to SEQ ID NO: 202280

SEQ ID NO: 209310 - DNA, 699 bp, Klebsiella oxytoca; identical to SEQ ID NO: 202281

SEQ ID NO: 209311 - DNA, 459 bp, Klebsiella oxytoca; identical to SEQ ID NO: 202282

SEQ ID NO: 209312 - DNA, 810 bp, Klebsiella oxytoca; identical to SEQ ID NO: 202283

SEQ ID NO: 209313 - DNA, 321 bp, Klebsiella oxytoca; identical to SEQ ID NO: 202284

SEQ ID NO: 209314 - DNA, 1416 bp, Klebsiella oxytoca; identical to SEQ ID NO: 202285

SEQ ID NO: 209315 - DNA, 261 bp, Klebsiella oxytoca; identical to SEQ ID NO: 202286

SEQ ID NO: 209316 - DNA, 993 bp, Klebsiella oxytoca; identical to SEQ ID NO: 202287

SEQ ID NO: 209317 - DNA, 1287 bp, Klebsiella oxytoca; identical to SEQ ID NO: 202288

SEQ ID NO: 209318 - DNA, 765 bp, Klebsiella oxytoca; identical to SEQ ID NO: 202289

SEQ ID NO: 209319 - DNA, 1200 bp, Klebsiella oxytoca; identical to SEQ ID NO: 202290

SEQ ID NO: 209320 - DNA, 684 bp, Klebsiella oxytoca; identical to SEQ ID NO: 202291

SEQ ID NO: 209321 - DNA, 1098 bp, Klebsiella oxytoca; identical to SEQ ID NO: 202292

SEQ ID NO: 209322 - DNA, 204 bp, Klebsiella oxytoca; identical to SEQ ID NO: 202293

SEQ ID NO: 209323 - DNA, 303 bp, Klebsiella oxytoca; identical to SEQ ID NO: 202294

SEQ ID NO: 209324 - DNA, 1107 bp, Klebsiella oxytoca; identical to SEQ ID NO: 202295

SEQ ID NO: 209325 - DNA, 1221 bp, Klebsiella oxytoca; identical to SEQ ID NO: 202296

SEQ ID NO: 209326 - DNA, 534 bp, Klebsiella oxytoca; identical to SEQ ID NO: 202297

SEQ ID NO: 209327 - DNA, 1170 bp, Klebsiella oxytoca; identical to SEQ ID NO: 202298

SEQ ID NO: 209328 - DNA, 975 bp, Klebsiella oxytoca; identical to SEQ ID NO: 202299

SEQ ID NO: 209329 - DNA, 492 bp, Klebsiella oxytoca; identical to SEQ ID NO: 202300

SEQ ID NO: 209330 - DNA, 1719 bp, Klebsiella oxytoca; identical to SEQ ID NO: 202301

SEQ ID NO: 209331 - DNA, 852 bp, Klebsiella oxytoca; identical to SEQ ID NO: 202302

SEQ ID NO: 209332 - DNA, 828 bp, Klebsiella oxytoca; identical to SEQ ID NO: 202303

SEQ ID NO: 209333 - DNA, 768 bp, Klebsiella oxytoca; identical to SEQ ID NO: 202304

SEQ ID NO: 209334 - DNA, 963 bp, Klebsiella oxytoca; identical to SEQ ID NO: 202305

SEQ ID NO: 209335 - DNA, 630 bp, Klebsiella oxytoca; identical to SEQ ID NO: 202306

SEQ ID NO: 209336 - DNA, 1542 bp, Klebsiella oxytoca; identical to SEQ ID NO: 202307

SEQ ID NO: 209337 - DNA, 1296 bp, Klebsiella oxytoca
atgcgctcagcaaccgacattaatcaacgttaccggacgctgcgtccgcagctgctgatgtacatggtcatcggatatgcggcgttttacctgacgcgcaaaagcgtcaactacgtattgccggcgctgcaaacggatctgggtctggataaaggcgatatcggcctgctgggatcgctgttttacctgacctacggtctgtcgaagtttaccgccggactgtggcacgacagccacgggcagcgctggtttatgggcgtgggcctgttcgccaccggtctgctgaacgtggtgttcgccttcggcgaatcgctgacgctgctgctggcggtctggacgctgaacggattttttcagggctggggctggcctccctgcgcccgcctgctgacccactggtactcgcgcaacgaacgcggcttctggtggggctgctggaatatgtcgatcaatatcggcggagcgattatcccgctgattagcgcctttgccgcccactggtggggctggcaggcggcgatgctggcaccggggacgatcagcatggcatcaggcatctggttaacgctgcacctgaaaggaacgccccgcgaagagggattgccgtcagtaggccgctggcgtaacgacccgctggagctgcgccaggagcagcaaagcccgccgatggggctatggcagatgctgcgcaccacgatgctgaagaatccgatgatctggctgctgggcgtctcttacgtgctggtctatctgatccgcatcgcgctcaacgactggggcaacatctggctgacggagagccacggcgtcaatctgctcagcgccaacgccacggtgatgctgtttgaagcgggcggtctgctcggggcgttgttcgccggatggggctcggatctgctgttcagcggccagcgggcgccgatgattttactgttcacgctggggttgatggtctccgtcgccgcgctttggctggcgccggtccatcactacgcgctgctggcggtgtgtttctttacggtgggcttcttcgtttttggcccacaaatgctgattggcctcgcggcggtggagtgcggacacaaagcggcggcgggttcaattaccggatttcttggcctgttcgcctatctgggggcagcgctggcgggctggcctctgtcgctggtcattgaacgctacggctggtcgggcatgttcagtttactctcggtcgccgcagttctgatgggtttattgctgatgccgctgctgatggcgagcattactacctctgctgctcaaaggataaaataa

SEQ ID NO: 209338 - DNA, 1032 bp, Klebsiella oxytoca; identical to SEQ ID NO: 202309

SEQ ID NO: 209339 - DNA, 2079 bp, Klebsiella oxytoca; identical to SEQ ID NO: 202310

SEQ ID NO: 209340 - DNA, 1047 bp, Klebsiella oxytoca; identical to SEQ ID NO: 202311

SEQ ID NO: 209341 - DNA, 933 bp, Klebsiella oxytoca; identical to SEQ ID NO: 202312

SEQ ID NO: 209342 - DNA, 1407 bp, Klebsiella oxytoca; identical to SEQ ID NO: 202313

SEQ ID NO: 209343 - DNA, 1383 bp, Klebsiella oxytoca; identical to SEQ ID NO: 202314

SEQ ID NO: 209344 - DNA, 1380 bp, Klebsiella oxytoca; identical to SEQ ID NO: 202315

SEQ ID NO: 209345 - DNA, 1389 bp, Klebsiella oxytoca; identical to SEQ ID NO: 202316

SEQ ID NO: 209346 - DNA, 777 bp, Klebsiella oxytoca; identical to SEQ ID NO: 202317

SEQ ID NO: 209347 - DNA, 1137 bp, Klebsiella oxytoca; identical to SEQ ID NO: 202318

SEQ ID NO: 209348 - DNA, 900 bp, Klebsiella oxytoca; identical to SEQ ID NO: 202319

SEQ ID NO: 209349 - DNA, 1050 bp, Klebsiella oxytoca; identical to SEQ ID NO: 202320

SEQ ID NO: 209350 - DNA, 783 bp, Klebsiella oxytoca; identical to SEQ ID NO: 202321

SEQ ID NO: 209351 - DNA, 696 bp, Klebsiella oxytoca; identical to SEQ ID NO: 202322

SEQ ID NO: 209352 - DNA, 183 bp, Klebsiella oxytoca; identical to SEQ ID NO: 202323

SEQ ID NO: 209353 - DNA, 810 bp, Klebsiella oxytoca; identical to SEQ ID NO: 202324

SEQ ID NO: 209354 - DNA, 819 bp, Klebsiella oxytoca; identical to SEQ ID NO: 202325

SEQ ID NO: 209355 - DNA, 753 bp, Klebsiella oxytoca; identical to SEQ ID NO: 202326

SEQ ID NO: 209356 - DNA, 684 bp, Klebsiella oxytoca; identical to SEQ ID NO: 202327

SEQ ID NO: 209357 - DNA, 705 bp, Klebsiella oxytoca; identical to SEQ ID NO: 202328

SEQ ID NO: 209358 - DNA, 2526 bp, Klebsiella oxytoca; identical to SEQ ID NO: 202330

SEQ ID NO: 209359 - DNA, 669 bp, Klebsiella oxytoca; identical to SEQ ID NO: 202331

SEQ ID NO: 209360 - DNA, 588 bp, Klebsiella oxytoca; identical to SEQ ID NO: 202332

SEQ ID NO: 209361 - DNA, 543 bp, Klebsiella oxytoca; identical to SEQ ID NO: 189353

SEQ ID NO: 209362 - DNA, 843 bp, Klebsiella oxytoca; identical to SEQ ID NO: 202334

SEQ ID NO: 209363 - DNA, 885 bp, Klebsiella oxytoca; identical to SEQ ID NO: 202335

SEQ ID NO: 209364 - DNA, 873 bp, Klebsiella oxytoca; identical to SEQ ID NO: 202336

SEQ ID NO: 209365 - DNA, 882 bp, Klebsiella oxytoca; identical to SEQ ID NO: 202337

SEQ ID NO: 209366 - DNA, 663 bp, Klebsiella oxytoca; identical to SEQ ID NO: 202338

SEQ ID NO: 209367 - DNA, 810 bp, Klebsiella oxytoca; identical to SEQ ID NO: 202339

SEQ ID NO: 209368 - DNA, 798 bp, Klebsiella oxytoca; identical to SEQ ID NO: 202340

SEQ ID NO: 209369 - DNA, 1788 bp, Klebsiella oxytoca; identical to SEQ ID NO: 202341

SEQ ID NO: 209370 - DNA, 744 bp, Klebsiella oxytoca; identical to SEQ ID NO: 202342

SEQ ID NO: 209371 - DNA, 1068 bp, Klebsiella oxytoca; identical to SEQ ID NO: 202344

SEQ ID NO: 209372 - DNA, 945 bp, Klebsiella oxytoca; identical to SEQ ID NO: 202345

SEQ ID NO: 209373 - DNA, 564 bp, Klebsiella oxytoca; identical to SEQ ID NO: 202346

SEQ ID NO: 209374 - DNA, 1053 bp, Klebsiella oxytoca; identical to SEQ ID NO: 202347

SEQ ID NO: 209375 - DNA, 1104 bp, Klebsiella oxytoca; identical to SEQ ID NO: 202348

SEQ ID NO: 209376 - DNA, 1215 bp, Klebsiella oxytoca; identical to SEQ ID NO: 202350

SEQ ID NO: 209377 - DNA, 867 bp, Klebsiella oxytoca; identical to SEQ ID NO: 202351

SEQ ID NO: 209378 - DNA, 207 bp, Klebsiella oxytoca; identical to SEQ ID NO: 134348

SEQ ID NO: 209379 - DNA, 201 bp, Klebsiella oxytoca
atgactggctgggatgagatagataaagaggcaaaggaatggcgtctcccgacttgccgtatgaagatgaagcgtgagtacgtcgttctgctttctgaacaggctctggtgattctggaaagaatgaatcccatcactaagcacagagaatacgtttttcctcctggctatcgtaatccacttgaaccgattaacagttag

SEQ ID NO: 209380 - DNA, 225 bp, Klebsiella oxytoca
atggaacacgtgaaaggaaaaatccagcagggggcagggaacgcctattttgcagggatgcagtggcgcggtattacacttggacacgccgatgctgcagcgcttaatcagtttgatatcgatatcagcaaagctcaggcactcgaagcacgcacctggttgcttcagaacaaagcagaattcatcgctctgatcctaggcattgaagttgtaaaggtcgggtag

SEQ ID NO: 209381 - DNA, 249 bp, Klebsiella oxytoca
atggaccataacgttttgtccccgcttgaatccctgccggatggcacgtttacccgcgagcaggctcaggttgtcgcagcgcagtatcagaatgtggcgattgaagatgatcaggggacccattttcgccttgtcgtccgtcatcaggatgacggcagcatgatctggcgcgtctggaattttgaaccgggcggcgaggacatgatgaaccgctacatccgggactacggagtacgcaaaacgaagtaa

SEQ ID NO: 209382 - DNA, 210 bp, Klebsiella oxytoca; identical to SEQ ID NO: 198485

SEQ ID NO: 209383 - DNA, 216 bp, Klebsiella oxytoca
atgacggagctggaaaaacagttgctgagcgcattagagcagctacagcaggactactcgaaaaggctggacgagtgggagagcgccttcgcggaatggcggacgatgtctggtcttatgcaacgggagaacgcggcgctgagcgagcgcgtcacgggcttgagcaggcaggtgcagagtttgagcgagcagctgcgccggttgtcgcaaggctga

SEQ ID NO: 209384 - DNA, 486 bp, Klebsiella oxytoca
atgaacagtcttttaacgctggcgaaggacttagagcagaaatcgaaagcgcagcagcagagtaccggcgagatgctgaaagccgcattcagcgagcacgagaagtctgtcagagcggaactgagcgaaagcgagaagagaatcagcgccgccatcctcgaccacgaccggaagctgtcctcagccatgagccagcgcacgaaagggatggtgcgcatggtcagccagacgtggctgaccatcgtgctgatctccgtcctgctgatcgcgtcgagcgcgggcattctgtggtggcaggggaaccggatactcgagaactacacgaccatccgggagcagaagagcacgcaggccatgctgtcagagaggaacagcggcgttcagctctcgacgtgcggagagcagagacgccgatgcgtgagggtgaatccgcaagcgggcggattcggagaggactcgagctggatgatactggcggggaaatag

SEQ ID NO: 209385 - DNA, 345 bp, Klebsiella oxytoca; identical to SEQ ID NO: 198475

SEQ ID NO: 209386 - DNA, 345 bp, Klebsiella oxytoca; identical to SEQ ID NO: 95526

SEQ ID NO: 209387 - DNA, 630 bp, Klebsiella oxytoca
atgttttgcatttcctttgacggtaaggttattcagtttccctctaaaccctgggttacctcccccgttagtgcctggctcggcaacaaaaccgtactggtttccccggagattaagattagacgcggtaagcccttcgataccgcaatcagccagccctgcatagttaccgtagaatacgctgtcagtcacgatggcatcctgcgacgtcccggtgccacgctgcggctcaaagaaaatcccaaagtttttgttatttcgtccaataagctggctggcaaagaaaggctcactactgaggaagctagttccaataccgaagccagatgcaccaagggctccgactgtagccagtcgcccacagttttcagtcatacagcgaaatatggacgctctgtcatgcatatccatcccgaaccccgtagcgccggtgttgcggatagtaattcggtcaaataccgcgttgcggtaatactgcaggaagatgcctttaatatccgggatataaccatttactggatgcaactgctgattctcgccatcgattgtgaaatcgaagtactgaatgttctcaagataaacttcaggagcattgtcagtgggcttgccgcgatactgaaaagcaggtaa

SEQ ID NO: 209388 - DNA, 558 bp, Klebsiella oxytoca
atgcgaatttttggttatgcgcgggtctcaaccagccagcagtccctcgatattcagatcagagcgctcaaagatgcaggggtaaaagctaaccgcatctttaccgacaaggcatccggcagttcaacagatcgggaagggctggatttgctgaggatgaaggtggaggaaggtgatgtcattctggtgaagaagctcgaccgtcttggccgcgacaccgccgacatgatccaactgataaaagagtttgatgctcagggtgtagcggttcggtttattgacgacgggatcagtaccgacggtgatatggggcaaatggtggtcaccatcctgtcggctgtggcacaggctgaacgccggaggatcctagagcgcacgaatgagggccgacaggaagcaaagctgaaaggaatcaaatttggccgcaggcgtaccgtggacaggaacgtcgtgctgacgcttcatcagaagggcactggtgcaacggaaattgctcatcagctcagtatcgcccgctccacggtttataaaattcttgaagacgaaagggcctcgtga

SEQ ID NO: 209389 - DNA, 276 bp, Klebsiella oxytoca; identical to SEQ ID NO: 198496

SEQ ID NO: 209390 - DNA, 276 bp, Klebsiella oxytoca; identical to SEQ ID NO: 198496

SEQ ID NO: 209391 - DNA, 258 bp, Klebsiella oxytoca
ttggcagacaaacgcagcaaaatgctcacgatgtgggtaacggaagatgagcaccggcgtctgctggaacgctgcgacggtaagcagctcgcagcctggatgcggcagacgtgtctggatgagaagcccgcccgcgccggcaaacttccgtcgatctcgccggcgctgcttcgtcagcttgccggcatgggtaacaacctcaatcagattgccaggcaggttaacgccggtgctcatcttccgttacccacatcgtga

SEQ ID NO: 209392 - DNA, 1401 bp, Klebsiella oxytoca
atggcaactaatgttaagagtaataaatcctatcagggagatgttgctgcgcttccttcgccacaggcaccgatgccgaaactggccagtctttacctggactttgagaaagagctttatattgcactcggcagaacaacgggttatgccattcgctcccgccgtctggctgacgtggtaacctttatccgggcatcggaaactacccgcgtgaacaaaagcggcttgatagaatatctggcgtccggtgaagctgcgatcgaatatgatccggttactggtgagtgcctggggcttcgcgtcgctgcaggggtaactaaccttgcggccaacagtgaaaacttttctggcacgacctggacaaaatcgggcgtgtccaccacggccgccaaaacaatcgcacctgatggtaacgtctctgcatcacccttcaatgaaagcactgacagcgctgatactgtgcactttatgcaggaaaattccactccggccgccaccgtgggaagtcctgtcacattcagtatttttgcgaaagcgaataccgcgagtgttatccagctggtcgctcagggtgcagtaacaacgacgcagtttgcaaacttcgatctggtcaacggcttgagaacccgtagctcgtccggcatcctgcagacaagtatgcggaaatataaaaatggctggtaccgtctgagtatcaccattacccctgcgggcacagcctccccgcagttcacactggcgcttgtgaatgacgtgacatcagccgctgcgttgccagcctatacaggttcagggaagggtgtttatatctggggggcgcagattgaaaactgggacggggcgacgccttacattcccacatcaggcgcaacggtcaccagaccggacgaagtgtgcaccgtacgcaccgaccttgattttatggctgttgatcgcggcgctatctttgctgtttacaacatgcccgccagcctgcaggcgattagtggtgtctataacgccgggcaggcaattgtctgcctggataatgattcgttggctgaatacgtcagttttctgaaccgccgcatcagtaacagtatcaccaaccagaatctggcggccgccgcgaaaattgtcggcagttctgaagttacggttgaggtaaaacgtctcggccaggtccgaaacggccatcagtcctttatcagttcatttatcaacggcgacatgcgtgtatttgacggcatcaataaatacagcggtgcgccgctggtatcaactcagctgaatcggttaatggttgggcgggccagaacgacacctgcagcagtttcaaatgcatacctgaaacgcatggtttactaccccgtaactttgactgatgcggatatggcttcacaatttaatgcgctttcctaa

SEQ ID NO: 209393 - DNA, 3417 bp, Klebsiella oxytoca; identical to SEQ ID NO: 186568

SEQ ID NO: 209394 - DNA, 615 bp, Klebsiella oxytoca
atgaaacgtgtcggaataaaggctcaggtcggataccgaagcccgcgggcacgtaaaggcgaggccagtatcgtgtcacccaacaggctccagcgacagttcaatccggatgctcctgatgagcgttgggtaacggacataacctacatcaggacccacgaaggctggctgtatcttgccgttgttgttgatctgttctcacgcaaaattatcggctggtccatgcaatcccggatgacaaaggacattgtcctgaacgcactgctgatggctgtatggcggcgtaatcccgaaaatcaggtgctggttcattcggatcagggcagtcagtacacaagccatgagtggcagtcgttcctgaaatcacacggcctggagggtagcatgagccgtcgcggtaactgccatgataatgcggttgcagaaagttttttccagttgttgaaacgtgaacggataaagaaaaagatctacggaacgcgggaagaagcccgcagtgatatttttgattacatcgaaatgttttataacagtaagcgtcggcatggttctagcgaacagatgtcaccgacagaatatgaaaaccagtattatcaacggctcggaagtgtctag

SEQ ID NO: 209395 - DNA, 303 bp, Klebsiella oxytoca
atggcttacgggcgtcagttcgaaataaccgttaactgcacagatggagagacgatccacattactgatgtggacgctgatttctcgtctgtgcgtgacgatgaaaaagagccaaacgaggctgatttaacgttatggggtttaacaccacagacgcagaacgccatcgctcaggctgggtcaaccgtcagtgttgctgctggctatatagatgaaggaatgttcaccctgtttcagggcgaacttatcagcgccgtgaccatcaagcccaatgaggtatacggcctgaaaatgaatctatga

SEQ ID NO: 209396 - DNA, 783 bp, Klebsiella oxytoca
atgcctgaatcacgtccagcgataccagaagcaataaaaagagaggttaggcaacaatgctattttggttgtgctatttgtggaatgcctttctttcagtatgatcatattgttgaatattctgaagtcaaagaacatactgctgaaaatttagttcttttatgtcctcatcaccattccatgaagactactggtaagctagataacgaaattgtagtcaatgcgaaggagaaaccatacaatgcacagagagaaataacatcaaatcttaaaatagatggagctaaagtaattgacgtcaaggttggtagctcaaaatataagggtgatttctctggggaaagaggtgaggtttttcgagcaatagtagtagatggtcaagattttttatcaatttttaatgaaaatggatgcctgagtgttacggtaaagctaacagatgaaaatgctaaaactatacttgaaattgataaaggggagttaaaagtctggactgattcatgggatttcgattatacaggtcaagaaatgactgtaagacaaagtttgggaaatgttttactaagtatgatcttgactagttcaaaggtttatgtaaacaaaggggttttttacgtttcgaaaggtaatggtttaattattcaaaagggacagataaatatgattaacaattcagttgtagttggtgtaattggagatatttcaattaacgggatgggggggagtataggttttgcttacgatataaataacaggtctcttcctgactggatatatgaatag

SEQ ID NO: 209397 - DNA, 423 bp, Klebsiella oxytoca
atgatcgtcattgaggacttgaaggtcagtaacatgtcgaaatcggcaaaaggtacggcagagcggcacggacgaaacgtcagagccaaatcaggcttaaaccgttcgatactggatcagggctggtacgaaatgcgccgtcagcttgagtacaagcagctctggcgcggtggtcaggtactggcgataccacctgcctataccagtcagcggtgtgcctgctgtggtcatacggcgaaagaaaaccgtcaaacgcaaagtaaattcgtgtgtcaggtatgcggctacaccgagaacgccgatatcaacggagcacgtaacattttagcggcaggacatgccgtgcttgcctgtggagggatggtgcagtcaggccgctcgtcgaagcaggaacccaccgaaatgattcaggcgagagcctga

SEQ ID NO: 209398 - DNA, 1164 bp, Klebsiella oxytoca; identical to SEQ ID NO: 199886

SEQ ID NO: 209399 - DNA, 966 bp, Klebsiella oxytoca; identical to SEQ ID NO: 199887

SEQ ID NO: 209400 - DNA, 1500 bp, Klebsiella oxytoca
atggcgatgtatgaagtcggtaccgtcacgggtgccgcgtcgcaggcacgggtgacaggtgcgacaacaaaatggtcacaggaggcgctggggatacagcccgggtcgattctggtggtctaccgcagcggtagtgctgacctgtatgcgatcaaatccgtggacagcgacacgcaactgacgctgacccggaatatcaccaccgcattttccggcgcctcttacggcattattaccgctgaaaccgccagcacctcgtcgtttgctaaccagctggccagcgcgtttgcattctggcgtagtgtggtggagggctggtcgatggccctgaccggcagcggcgatatcaccctgactgacccgatcaccggaaagcaggtgaccgtgccggcgatagccgggatggcgaaggcatcagatcttaacgcgctggcaaaactcaccggaggaaacaaactcgacggctcgcaggttataaccagcgataatgccggttttattctcggtaagaactcagatctggctctgctcaaaaaacaggggcaaggcgggacaattgccgttggctcgggaacaccgttcagggttcagcgttcaagagcgaccactgtatcaccggcagacacctttgatgacatcctcgttattgatgccaataaccaaacgacactgcctggcgcgctgtctgccggcggcaatatcgataacacgtcgaagggtaaagtgttgacgcaggcgattgagctctcatttagcacgccatacatcgactttcattttaactacagcaccgacgacttcaccgggcggattatggccactgccgccgatcaaattagtgtgcaaggtagtcattggcgagttgacagggatcttcgtgttggtggcatggcagatattggaggctggacgcaatgccgcgacgacctttcggccaacaaaacagactttggatcccctgctattggttcgttggtttcaggcggaaggattcgatctcgaatgctcgggcgcggcggtaacgttgacacctccggggcgtggggcggtttctatcttgaagagtacgtgggaaccgaacacaggattgtcatgtatatggacggcttcgggagaacggacgcatggtcattccgcgcaggggggacaatctctacacctaaaggcgacgtcctgaccactggttccgacgtgcgcctgaaaacagacttcacacaagcgtctgaaaacgcctcagagcgcattgagcgcttaggggtgtgtgagtaccggatgaagggggaaacgcgccggaggcgtggttttatcgctcagcaggctgaaaaagctgatgatctgtatactttcctcggcatcgagcaggagattgatggcgaaaaattcaaggtgatgaatgtggattacacggcaatcattgctgacctggttacggtggcgcagggtttactggttaaaaatcaggaactggaaaggcgtatatctgtactggaggggatctga

SEQ ID NO: 209401 - DNA, 12705 bp, Klebsiella oxytoca
atggcaaataacataattaaagggcgcaagggtggcggctcaaagcagcgtacaccgacggaacagccggatgatttacagtccgttgcaaaagccaaaattctgctcgcattaggtgagggtgaatttgcaggtggtttaaccgggaaagatatttatcttgatggcaccccgcttgaaaatgctgatggttcgcaaaacttcagtggcgtgtcctgggaatttcgccccggcacgcaggctcagacttatattcagggtattcccggtactgaaaatgaaatcagtgtaggaacggaagtttccagcaagacagcctggacccatacctttactaatacccagctttctgccgttcgtgtccgcctgaaatggccgtccctgatgaaacaggaagatgacggcgacgtggtgggcaataccgtcaagtatgcgattgacctgcagaccgacggcggcgcctggcagacggtgctggaaaccgctgtcacgggtaaaaccacctccggttatgagcggagccatcgtattgatctgccccaggccggcagtacctggacgctacgcctgcgtaaaatctctccggatgcaaacagtgtcaaagttggcgacgtgatgacgctgcagagctataccgaagtgattgacgcgaagctgcgttatcccaacaccgcgctgctttatatcgagttcgactccagccagtttaatggctccattccgcaaatttcctgtgagccgcgtgggcgcgtgattcgtgtgccggataactacaatccggaaacccgcgaatataccggcgtctggaccggcgggtttaaatgggcctggacggataacccggcctggatctattacgacattgttacagctgaccgttttggtctcggtaatcgtctgagcagcgccaatatttcgaaatggacgctgtaccagattgcacagtactgcgatcagctggttcctgacgggcgcggtggtgacggcatggagccgcgctatacctgtaacgtctacgtccaggaacgcaacgatgcttacaccgtactgcgagactttgccgccattttccggggcatgacttgctggaacggtgagcagattgttgtgcaggctgatatgccgcgtgatgtcgattttacctatacgcgcgccaatattgtcggcaaaccccgttattcgagcagcagcagccaggttcggtacaccaacgccctggtttcctggtctgatccggataatgcttatgctgatgcaatggagccggcgtttatcccggaactggtttcccgctacagttttaaccagctcgaaatgaccgcgattggctgtacgcgccagagcgaagcccaccgtaaggggctgtggggcatactgaccaacaacaaagaccgggtcgttgagtttgatgtggggctggacggtcgcattcctcaacccggttatatcattgccctggcggatgagttgctggccggacgggtcaacggcgggcggatcagcgcggtgaatggccgggtgattacgctggatcgtgatgtggatgccaaacctggcgaccgcctccagctaaacctgccatccgggatctcacagagccggaccatccaggccgttaacggacgccggcagattacggtcacaacggcgtacagtgagacgccagaacgggaatgcgtctgggccgtagaatctaatgacctctttctgcagcagtaccgggtcacaggggtaaaagagaacggcgatgccaccctcacgatcaccggcgtgtcacatgacccggataaattcgcccgcatcgataccggcgcgattatcgatcagcgcccggttagcgtattgccggcgggcaaccagtcacctcctgacgatattgtcatcacatcccgctcggtcgtgaatcaggggatcagcgtcgaaacgatgcaggttaactggtcagcggtcagcggcgctattgcctacgaggcgcagtggcgccgtaacgacgggaactggattaatgtgccgcgcagctcgaccacctcgtttgaggtcagcggcatttatgccggtcgttacctggttcgcgtccgtgcgatcaatgcggcggagatctcgagcggctgggcgtattccgaagagaaaaccctgaccggcaaggtcggcgagccgctggcaccgctggcgctggcaacccgttcgctggttcatggggtccaggttagctgggagttcccgaccggctccggggatacgctgcgcacggaactgcagtacagcaaaaaccaggacggcagtgcgccaatgccgttatcagacgtggcctatccggggaaaagctatcagcagatgggcctcagtatgggcgccgaattctggtaccgggcgcgccttgtggatcgtcttggcaatgaaagcccgtggaccggctgggtccaggggatggccagcgataactttgatgactactacgaaaacctgaccgacgcgatcaaggatacggctgcctgggaggaaacgcagcgcaccattagcgaaacgcaggaaggtatccgcaatacgcagcaggaactggagcagaccgctgaagctctgcgtaaggaagccgaagaccaggcgaagcaggtcagccaggatattgacgcatcggcgaaaagcatcactgctgatgttgacgggaagatctccgccgtgaataaaaccatcacggatgagataacctcggtcaatgaggctctcgattctggtctggctcaggcaaacaaaggcgttcaggaggcaaaatccgccgtcgcagatgcgaacaagcagatcgcaactgtgaacaagtcgctgaccgacagcatcacccaggtaagacagtcagtcaccgatacggctgcggaaatcaacgccaccatcgacctggagattgccagggtcagcaaaacgctggccgacggcgatgccgcattgaatgcgcagataaagactgctgaaaatggcctgaagcagtcgctgtctcaggtcaacaccacgctgaccaatgcggtgaagcaggagaccgcggatcgtattgccgatgttaacgcgaaggcgtcacaggccgctgatgaactgctggcggcaacgcaggggattgaggcgagtatcgagagcctgactcaggtgatgaagaccgccgatgaaaatctggcgcgggaaatgtccagcctcgctgccggcgctaatatccagttcgattcgcaggttatctggcatttcaacaatcagacgaccgagggctggaccggcagcgccggcgtaccgggtgtgtcacaggatggctggttacgcccggcggacagcgccaccgatccgtacattacctctcctggcgggctggctgtcgatggtgcggcgtaccgtttcatcatgctgcgctttcgtaaaaccggcaaaccagtctgggcgggtgagatccgctgggtgtctgccggcgaaaacttcactaacacgaagcgatacattgttgctgagccggagtatgccgatggggtggcaaccctgacggtgcgtgatattccgtggacagggaacattgatcgtattcgcctggacctgacgaaccagcaggatgccagcaactttatcgaattcgactggatcgccgttggccggccagcacccggcgccagtacggcggctctgcaggatgtgcgcagcacgctgagtaacgcgctgaccgccgaagcgcaggcacgcagcacgctggcggcgcagatgcgtggctcctatgatgggaacgatctggagaaagtcacctccgggctgctgtaccaggaaaaaaccgcgcgcgttaccgccatctcggcggaagttaaggccagagagtccctgcagacgcagtttaacgacaacaaagctgctgtttctggtgaactgagttctctgacgacagagcagagcgcgcaggcgagccgtatcggtggcctggaaaccagcctcgggaaaaaagccgatgcagccgcgctgacgtccctgacgcagaaagttgagcaacagggcgccacgctgacatcgcagggcgccgcgttaacatcgctcactaaccgggttggccagacggaaacgggcctggctggtacgaatgaggcactgagcgggctgcagtctgttgttacccagcagggcgacaggataaccagccagggtcagtccatcacgaaactgacgagcgatttgggcacgacaaattccgcgctggcgaagaaagctgaagcggctgcggtcactgccttaacgcagcaggtagagcaaaacgggcgggatattcgcagcaatactgacagcatcaccagcctgtcgaatcaactggtcaatggccagccgaatcgctggtcccgtcggatctatccggtgcagctggctaacgccgggacagtcccgtcattcagcgatgttcgcgctgtggcaccaacggtagtggatgaggtggccgacgcggccaaactggactttacgtccgccggcagctatctgatcgcgctgtattcctgccaggtgaaagtggccgcagataccaccatcacactggcgcccggcgccagggtttttgatgataccggcgccatatttgtgaatggggttcaggtcgcctggggtaacgccagcaggaataccgtcagttttgaactgaaagtcggctggaacaccgttgagtttctggtgaatcagtggaccggccaggcgtatatcaacctgggcctgaagctgtcagacaaggttgctgagatgtactccggtctcggggtttccgcgctggcaaacgcagccggcgtgctcagctcgaatgtcagccagattggcaacgaggtggtcagcaattcgcagagcatcacccaactccggaatgcgctgacgcagacagacgcgaacgtggccagcaaagcggatcagacggcgatgaactcgctaaccggacgagtggagaagacggaatccgggctgacggctgctaacgccaacattacctcgctgaaatccgctgtacgggccggaaacgcatcaggcggagatttaattcccaacccgacatttgacccggcttacgaccagatggggtttagcgtcgtatccacgacggctgaggaggtccctcctggctgcccgtatggttatgcggccagaattgccagtcgggatcaccatcctaactttgccgcgttcccggccacgcttaacgatgtgattgagatcagcgcactggttgcctgcggcgctggcacggcgaattttaatctgtatgttggcaccgccgttcggccagatacgagcaccggtgcgccactcatggcggggggcggaaaatcaccttctgcgacctggcagagaaccacctggcgcttcaaggtcacgcaggcgatggtagacaggggttatatccgcccgttcctgcagatctcgcagaacagcccgtatggcaccgtatggttcgttacggactggcatatgcgaaatgtgacagcggcgcaaaaggttcaggatactgcggatgccacggcggcggcggttgactcgctgaccaccaccgtgacgcaacagggtaatctgctgacctcgaccggcaaccggacaacccagctggaaaacgggctggccaccaccaatgccgcagtggccaaaaaggctgatgcgacagcggtgcaggatttgaccaataccgtcacacagctgggcaacgatctgactgctgcgaacagcgccatcacgaaactgaccggaaatctggcgaataccgataaagcgctggcgcagaaagccgatgcgactgcgctggccacgctcgacacgaaagtgacgcagcagggtaaaacgctggagagccagagcaattcgctgacgaatctgtcgaacagtctctcgcaagttgcggcagatatcgatgccagcggtcagataccgggtaacctggtcgtgaatccctcatttgaacgcgggctggatggttataccgggcggtcaaccgcgaccagtgtggtggaggtttccgctcctcacagcgggacgcgggcgctgaaggttgatccggggagcgtgtctccggggcaatacatcccgtttgttcaggggcgaacctatgaaatcggggtgtgggtcaaggaacccggagcgacgacggataatggcgcggggaacaacaagttgcggatcggtaactctgccggccagccggtctttgagcgtccgtacaacagcggcacggtggggacaaactggaccctggtttccggtcgctggaaagcgacggagacagccagcctgccggtgacgctgagcaactatctgattagcggcagccgctacttcgatgatttttacgtcactgacgttaccgaccgggtggacatcgatgccaccgccggcgccgttaccggactgacgagccgggtcagcacagcggaaggggccatcacctcacaaagccagcagctgacgaacctgcagaacagcctgaacacgaccaacagcaatgtgtcgaagaaggccgatgccacggcactgacttcggtcgataaccgggtgacagaggcggaagggaaactgaccacacagagccagcagctgacaaatctggcgaatgtgctgacggccacccgcaacgccggcgacaacctgatcccgaactttgattttctgcagggcagcactgcctgggatattcagtatccagccggtgtgacctttggcgatttcggggacgggaaagcgggggtccggctgaaccggacgaccactatcagcccaggaattttctccaacaacaacaagccggtgccgctgaatggccagcgcaagtaccgggtggtggtgaaggccaaaggtgtttccggagcgatgagtctgctgatccgtcgccagaacaaaattggccagacggatagcacgtatgaggataaaacggtcacgctgaccactgactggcaaaccatcacctgggaaaccggattgacggctgccggcgcggacgggcagaacttcaaactttattctcatccgacaaacggtgaaatctggctcgattccgtccgggtttttgatatcaccgatgaaaccaacatcaaggcgaccagcgatgctgtttcgtctctgaccgggacggtgacgaaccaggggaacaccctgacatcacaggggcaatccatcacggcgctgaataacgcgctggaaggggtcaaaggcgatgtggcgaagaaggctgatgcgtcggcggtcagttcactgaccaaccgggttacccagactgaaaaggatatccgtagccaggccgacagcctgaccagcctgaatacatcgctgaagcagcaggcgacacggggagccaacgtactgccggacggcagttttgaatcctatgccgtcggcgatgttctcagtaatgcccgcgccgttatcaccagtgaagctgctcacagcgggaccaaaagcctgcgtgttacgcgcagtacggagtacaacccgaacgcgacggataataacgatacccatatcttttcaggcatgcaggttcgcgataacgcggtctattacgtggaggcgtgggttaagttgccggctggctcgaccgccgatccgaccgtttatatggtactcggattttccttccaggattcagccaatggctggtcgtggcctggcctgaacgtgaaagtctccgagttgtcggtggacaactggacaaaagtcagtggctatctgaccaacaaccgaaccgcactgaaacaggcaatggtgaggatctccatcccgaatacaccaaaagttcgcctgggtgacgccttcctgattgatgatctgatcatcactgacgtgaccgatgcgaaagcggcgctcgatgccgccgatgcgaatgcgcaggcgctttccagtctgtccgcgtcagtcacgcagaacgggaagaatattacgtctcagggcagcgcgatcacgaagctgcagtcggatgtgacgcaacttggtaaggatatcagcggcaaggccgatgccagcgcgctgacgaatctgacgacccgcgtgacggctaccgaaggcagcctgaaatcgcagggagacagcctgaccagcctgcagaacagcctgaacacgactaacagcaatgtggcgaagaaggctgatgcaacggcgctgcagagcctgcagaacaccgttgaacagcatggcagggatctgaccgcgcaaagcagcgcgctgacgaacctggaaaacaacttttcctccctggccgttggcgggaccaaccttatccgcaatgcggacacactggagggatggagcagccgccacgccacagagacgtatctgggcgaccgcgtggcctacacccggctggcgaaaggtgcatccggttatatccagctggatgaacagacgctggatgttaccgggcgtacggaatttgtattcagcttctatgcgaaaggggcttatgacgggcaggagatggcgagttatttctataacccgtcgaacaccaccaccacggaaaccagccagggcgttaaaggcggggccggtgacggcaaggcggtcacgaaactgaccaccgcatgggcgcgttactgggtgaaatgggttattcctgccaccagtggcaccaaacggctgattgccgcgcgtctggaaagcgcgacgtctgccgacaaagaagtctggctctgccgccctcagctggaaaccgggaccgtgatgaccgactggtcaccgagtccggatgatgcagccagcggtattaccgcgaacacctcggccattaacagcctcaccagtcgggtgacgaatgccgaggggcagctgaccgcgcagtctcagagcatcacgaatctgcagaacagcctgaacaccaccaacaacaacgtggcacaaaaggccagcgcgcagtcggtgagtgatctcaccagccgggtcaccagtgcggaaggcaaaatcacctcccaggggcaggctatcacgaagctgcagggcgatttgagcagcaccaccgataaggtcaacaccaaagcggatcagacggcgcttaacgcgctgactggccgggttgagaaaaccgaggcaggcctcacggcagccaacagcaacatcgtcagcctgacggcggcggtgaatgccgggaatgctgccggggatgattacattccaaacccgtcatttgatccggcgtatgaccgcatgggttatgacgtggtggagaccaccgccgatggtgtgccggctgactgcccgttcaggtatgccgtccggctggccgggcgagaccatgtgccaaaaatcaacaatatcgccgtgacgccgggcgacgtttacgaaatgtctgctctggtagcgtgtggtaccggcagcgctgactttaatttctacatcggtcgggccaccactgctactggtggcatcggggcgagagcgtccgggggaaacaccaggaccaccaccgcgtggaaacgagccacctggcgctttactgtgccggcagacacgaacttcctgcgaccgttcctgcaggttaatcagagcagcccgtttggcactgtctggtacgctgccgactggcatatgcgtaacgtgacggcggcgaacagcgcgcagaaaaccgcagatgcgaccgcaaaagcggtggattcactgaccaccacggttagccagcagggcgatacgctcagcagcatcggcacgcgtaccacctcgctggagaacagcctccgatcgacaaacgatacggtgagtaaaaaggctgacacgacagcggtgacgcagctgcagggcacggtgacgcagcaggggaatgacatcgcggcagccaacagcgcgctgacaaaactcagcagcgatctggccacgacgaatgcgaacgtgaacaaaaaagcggacgcaagcgcgatgaacaccctgcaaaaccaggtcacggagcagggcaaaacactcagtgcgcaaggggattctttgacgcaactgagtaacagcctgagccagacggcagcagatattgacgccagcgggaaaatgccgggcaacctcattgtcaacggcagttttgagcgcggcgcggcgggctttaccggctggagcagtaccgcaacggtggccgatttacaggttccgcactcgggtaacaaggcactgaaaatgtctgccggccagtctaacctggtcggacaggaaatcagtattacccaaggccgtacctaccgcatgggggtatgggcgaagcaggatccggggaccacgattaaagatgcggataacacgaagtttcgtgtggccgacagcactggcctgctggccggctcaaactacggaccgtttagttctggctggcaactggtaacgtttgactggaaagccacgaagaccacaatggccagtttccagctgacgaccttcctcagcgcgggggcaatgtattttgatgatttccatgttctcgatgttacggatgaaaaggatatcgcggctaacgccggggccatctctcagatgaatacccgcgtcaccgctgcggaaggggctatcaccacccaggcgcagcagctgacgaaactcagcggcgatctggccgtcacgaatgcggcggtcagtaagaaggctgagcaaagcgctgtcaccgggttgaccacccggatgacgtctgctgagggtaaactggattcgcagtcgcagcagctcaccagtctgcagaacagcctgaccacgatgaatacggagctggggaaaaaggctgacacgtccgcggtgagttcactgaccggtcgcgtcagccaggtggaaaacaccatcaccagccagtcgcagagcatcacgtcgctgaccagcaccatcaataccatccgcactcagggagctaatccgtgggttgacggtacatttgaaagctacagcgatggccaggtgctgggcgggagcggtaccgccgttgtggtagcgtctcagaaattcaccggcgataagagcctgaagttgagacgggatgagaacaacggcggcaacagcgataaacagcttggcacctggcagtcagtccgtgaggacgcgaagttccggtttgagttctgggccatgatgccggcggatcaggcgccctcctccgggtggacgacgctggtcggtatccagtcgcagaatgctgccgggcaaaatgcctggcaggcggcggtcactatcagcgaagcctctctgggcgcgcgcgataaatgggtgaaatttacgggtatcgccagtaacaacggggcgggcagaacacgcgcggtggtctggatctccacccgtggcgccaccggcaacggtacccctggctattcactgtatatcgacgatctggtcatcacggatgttaccgatgcgaaagcggcacaggatgcctctgacgcgacggcgagcgccgtgagcggcctgacggcgcgcgtaacggatgccgaagggaaaatcactgcccaggcgcagcagcagacagcactggcctcgaaagtggataacgccaactcccgcgtcgataacatggcgaagacgctgagcgacagccagagcacacaggccagcctgaatacctcgcttcagtcgcagattgacgcgcaggcggccgccaacatcaaaaaccagacgacgctcgacaacgcgattaaatcggtggccagtatcaccagtacccagcatacgcatgcaacggcactggaggcgctggcaacgcagcagacgaccctgacatccagtgtcggggatctcagcgcttccgttcaaaacaccgctaaaaccgtggcggatgtgaatggtacggtgagttcgctgtggtcgatgaaggttgagacggttaacgggaagaatgttggcgcggggattacgctgggcagcaatggtgaaacgagcgacatgatcctctacgccgaccgcttctcgctgtttaaccgtaacaatgcgacggcagtgccggtgatgattgccgaaggcaatgaactgtatatcgatacggcacgtatcaaaaacagttccctgacctcaaccaaaatcgcggacggttccatcacgaacgcgaagatcggcaacgagatccgctcgaatgactttgttgacgggtcacgcggctggcgtatcgctaaggatggctcttcgcagttcaacaacgtgatcgttcgcggtgcggtttatgcgactgacggctggttccaggggacggtatatgcgaaccacatcgagggcgacatcgggtcatttgcgatcaacatcgctcagcaccgcacgcgcaaggtgccgaaggctacatggcagtggtttgagctggcccggttccggcggcagaatttcgaccaggtgatcaatattcgcggtggactcctccagacggatagcatcactatcgacggcggcgcgaaactcagagcggggatgtcctacgcgccaggggatgacggcggactgaatcctggctatctgtcgtatgcaatgcttcttcgtggcacaggcgctacgtctggtggcggcagtatggagctaggcattgagcttatgtatgaaacaggtggagcaacacgcctgttaacggcgcaagagtcaatgaacgtagacaacatgtcatttgtcgtccctgccggtactggcgacgctgttctgcgatatggctgttacctggaccgtaacggacagatggtattaaccatcctctcaagattcgacgccttcgccgcgcgcaataacaacgtaattcgcggttcatcaacctga

SEQ ID NO: 209402 - DNA, 612 bp, Klebsiella oxytoca; identical to SEQ ID NO: 180566

SEQ ID NO: 209403 - DNA, 351 bp, Klebsiella oxytoca; identical to SEQ ID NO: 180567

SEQ ID NO: 209404 - DNA, 711 bp, Klebsiella oxytoca; identical to SEQ ID NO: 180568

SEQ ID NO: 209405 - DNA, 756 bp, Klebsiella oxytoca; identical to SEQ ID NO: 200128

SEQ ID NO: 209406 - DNA, 339 bp, Klebsiella oxytoca; identical to SEQ ID NO: 200127

SEQ ID NO: 209407 - DNA, 3381 bp, Klebsiella oxytoca; identical to SEQ ID NO: 200126

SEQ ID NO: 209408 - DNA, 366 bp, Klebsiella oxytoca; identical to SEQ ID NO: 200125

SEQ ID NO: 209409 - DNA, 462 bp, Klebsiella oxytoca; identical to SEQ ID NO: 200124

SEQ ID NO: 209410 - DNA, 402 bp, Klebsiella oxytoca; identical to SEQ ID NO: 200123

SEQ ID NO: 209411 - DNA, 390 bp, Klebsiella oxytoca; identical to SEQ ID NO: 180575

SEQ ID NO: 209412 - DNA, 339 bp, Klebsiella oxytoca; identical to SEQ ID NO: 200121

SEQ ID NO: 209413 - DNA, 318 bp, Klebsiella oxytoca; identical to SEQ ID NO: 180577

SEQ ID NO: 209414 - DNA, 396 bp, Klebsiella oxytoca; identical to SEQ ID NO: 180578

SEQ ID NO: 209415 - DNA, 1287 bp, Klebsiella oxytoca; identical to SEQ ID NO: 180579

SEQ ID NO: 209416 - DNA, 921 bp, Klebsiella oxytoca; identical to SEQ ID NO: 207001

SEQ ID NO: 209417 - DNA, 1260 bp, Klebsiella oxytoca; identical to SEQ ID NO: 200116

SEQ ID NO: 209418 - DNA, 1923 bp, Klebsiella oxytoca; identical to SEQ ID NO: 199857

SEQ ID NO: 209419 - DNA, 783 bp, Klebsiella oxytoca; identical to SEQ ID NO: 199856

SEQ ID NO: 209420 - DNA, 231 bp, Klebsiella oxytoca; identical to SEQ ID NO: 199859

SEQ ID NO: 209421 - DNA, 165 bp, Klebsiella oxytoca; identical to SEQ ID NO: 199860

SEQ ID NO: 209422 - DNA, 228 bp, Klebsiella oxytoca; identical to SEQ ID NO: 199855

SEQ ID NO: 209423 - DNA, 336 bp, Klebsiella oxytoca; identical to SEQ ID NO: 199854

SEQ ID NO: 209424 - DNA, 339 bp, Klebsiella oxytoca; identical to SEQ ID NO: 199853

SEQ ID NO: 209425 - DNA, 330 bp, Klebsiella oxytoca; identical to SEQ ID NO: 199852

SEQ ID NO: 209426 - DNA, 249 bp, Klebsiella oxytoca; identical to SEQ ID NO: 199851

SEQ ID NO: 209427 - DNA, 3975 bp, Klebsiella oxytoca; identical to SEQ ID NO: 199850

SEQ ID NO: 209428 - DNA, 609 bp, Klebsiella oxytoca; identical to SEQ ID NO: 199867

SEQ ID NO: 209429 - DNA, 738 bp, Klebsiella oxytoca; identical to SEQ ID NO: 199868

SEQ ID NO: 209430 - DNA, 609 bp, Klebsiella oxytoca; identical to SEQ ID NO: 199849

SEQ ID NO: 209431 - DNA, 135 bp, Klebsiella oxytoca; identical to SEQ ID NO: 199869

SEQ ID NO: 209432 - DNA, 477 bp, Klebsiella oxytoca; identical to SEQ ID NO: 199848

SEQ ID NO: 209433 - DNA, 246 bp, Klebsiella oxytoca; identical to SEQ ID NO: 180600

SEQ ID NO: 209434 - DNA, 366 bp, Klebsiella oxytoca; identical to SEQ ID NO: 199846

SEQ ID NO: 209435 - DNA, 228 bp, Klebsiella oxytoca; identical to SEQ ID NO: 200097

SEQ ID NO: 209436 - DNA, 204 bp, Klebsiella oxytoca; identical to SEQ ID NO: 199845

SEQ ID NO: 209437 - DNA, 288 bp, Klebsiella oxytoca; identical to SEQ ID NO: 200099

SEQ ID NO: 209438 - DNA, 309 bp, Klebsiella oxytoca; identical to SEQ ID NO: 200100

SEQ ID NO: 209439 - DNA, 222 bp, Klebsiella oxytoca; identical to SEQ ID NO: 180594

SEQ ID NO: 209440 - DNA, 231 bp, Klebsiella oxytoca; identical to SEQ ID NO: 200102

SEQ ID NO: 209441 - DNA, 1062 bp, Klebsiella oxytoca; identical to SEQ ID NO: 200103

SEQ ID NO: 209442 - DNA, 312 bp, Klebsiella oxytoca; identical to SEQ ID NO: 200104

SEQ ID NO: 209443 - DNA, 492 bp, Klebsiella oxytoca; identical to SEQ ID NO: 200105

SEQ ID NO: 209444 - DNA, 477 bp, Klebsiella oxytoca; identical to SEQ ID NO: 200106

SEQ ID NO: 209445 - DNA, 219 bp, Klebsiella oxytoca; identical to SEQ ID NO: 200107

SEQ ID NO: 209446 - DNA, 174 bp, Klebsiella oxytoca; identical to SEQ ID NO: 199871

SEQ ID NO: 209447 - DNA, 225 bp, Klebsiella oxytoca; identical to SEQ ID NO: 199872

SEQ ID NO: 209448 - DNA, 834 bp, Klebsiella oxytoca
atgggcgatgccgagcttgttcgccagcttctctccgatctccacgaactgttccggctgcgcaatagcgttaagcagcgcgtgcttggtccagtaatggaagtgctcggtcaggcggtaagtagtaccgacgtaagggaatttctccgctttgcccatctgctcaaggtcgcctttaaagacgcgagcagccgggttagagaccacgttcgggtgcagcgggttggtgcccagcggcgtttcaaacggctcgtagtgttccgggaacggcccttccgccatcttatcgatagcgaacagacgccccatcccttccggctgcatgataaacggcccgacatcgctgtccggcgccgcggcgctgtagtctggaatatccacgccgccccacttcgcgccgtcccatttcaggagctggcgcttcggatcccacggtttaccctgcgggtccgcggaggcgcggttatacagtatgcggcggttaagcggccacgcccatgcccagcccagcgtattgccgaggccagacggatcggcgttatcgcgacgcgccatctggttgccgtcaggcgtccagctaccggcgaagatccagcagccgctggaggtggtgccgtcatcgcgcagctgcgcaaacgagctgagctgctggcccttcttgacgatcaccgccccggttgccgggtcgataatgtctgccagcgccttgccgttgctctccattgccacttcttccgacgctggttcatgcggcgtggcgtagttccacgtcatgttcagcaccggttccggcgccggtccgccctgttcggcgtacatcttgcgcagccgtaa

SEQ ID NO: 209449 - DNA, 996 bp, Klebsiella oxytoca; identical to SEQ ID NO: 26186

SEQ ID NO: 209450 - DNA, 213 bp, Klebsiella oxytoca
atggtaacggaaaccgaaaaaacattgatggcaaatttcctggcaaagatgaagaaagagcaggatttatccgatctgaaaccccgtgaagctaaaaaatgtcgtggtgatcaggatgcagcggaagcgggatttaacgagggattaaaagctcgtttaaatcacggtgtttccggtaaagattcatccctttctctggagtacaaaccatga

SEQ ID NO: 209451 - DNA, 525 bp, Klebsiella oxytoca
atgaccagcaaattaaccataaccagagagcagttaacaaattgggtttcacagcttgatagtgatggtggctgtgatgcaactgatcgccagttagaagctctgattcgtcagtcgctggcgacaatggacagcgagcctgtggcgtacatcgataaacagtggatgttggtctattacgttccaccaatgagtttggggctaaaaattggcgataatttatatcgccagggacaaccagctcgggatagttgcgcgattgccgatattatcgctgaacgtcaacggcagcagtctgtagagggattttcgacagagcaggatgatacgtatgttggttgccaactggcggcagctgcaatctgttatatcgaaccgatggaggcgatgagttattggcccgctgactggcatgacgacagtttcaagccgacaaacgagcgacggaatctagtaaaagcagccgcactcattatcgctgaaattgagcgtatcgaccgcaaatcaaatgggaggactgaataa

SEQ ID NO: 209452 - DNA, 468 bp, Klebsiella oxytoca
atgaattacgaacttatctactgtgatccgccgtgggaatacggcaatcgaatcagcaacggcgcagcctgtaatcattacagcacgatgagcattgatgacctgaagtttcttcctgttcgaaagctggctgctgataacgctgtactggcgatgtggtatacggggacccataaccgcgaggctgtagaactggcagaatcatggggtttccgggtcagaacaatgaaaggctttacttgggtaaaactgaatcagaacgccgctgaccgctttaacaaggcgctaagcgccggagagctggtggacttcaatgatctgcttgagatgctggaccgtgagacgcgcatgaacggtggcaatcatacccggagcaatacagaagacgtccttatagccaccagggggaaccgggctaacccgcgccagtgcatcggtaaaacaggtggttcacacttgcctcggtga

SEQ ID NO: 209453 - DNA, 198 bp, Klebsiella oxytoca
atgttttacgcgctgacggcctacaactacgcaggtgagccccgtttcagggtctttccagacgatgatcggctccagtacacccagctccttgatgttcagtaccatcccttcgtcgatcggcaggtgaacacgttcatcgtagagagggtgggacatatcggtgaccaggtgcaggttttcgggctcgaacgttaa

SEQ ID NO: 209454 - DNA, 999 bp, Klebsiella oxytoca
atgccaaagcgaacaaacagcgttgataccacattttttgctcttgagctgttgcgtcgtattccgcgtaatcagcgcattactgcccatgagttgcatcaacaactcatggatgcaggtattgagcgtaatgtgcgtaccattcagcgccagcttgaacgcctgagccaacacttcgatctggagtgtgatgatcgctgccgcccctatggctggcgatggcgggtaggttcgcgaggcctgagcttggcgcagttatcgccagcagaatcgctgctgatgcagatggcgcaggcgcatttaaagcatctgctacccgcacatctgatggcttcattttcgccattttttagccaagcgggacacactcttagccaaagcgaacaggcgcagcgagagcgggaatggtcgcagaaggtgcgggtagtcgctgccagccagccactcctaccgccagtgatccaggaaggcgtgtttgacgcggttagtgaagcgctttactacaaccgctggctgaatattgattacagcaatgcgcacggtactcgccgtcaggtcgaggtgatgcccctcgggctggctcaacagggctcgcgactgtatctggtctgccgctttaaaggctacgataacgagcgcagcttggctctgaaccgcattacctcggcggtctgcagtacctttcacttttcccgccccacggattttaacctcaaacgttacgacgatgacgggcgtttcggattcggcgaagggcgacatatccgaattcatttcacgcttgaaaccgcgcgggcgcaacttttgctggaatcgccactttcatccgaccaacaggtcagcgagcttgacgacgggcggctgcgctttagcgccacggttgttgacagtccgatgctcgatggctttcttgcaacctttggtaacaccatcagtaacattaaacgcgacatagacgatgttagtacagaacaggaaaataatgatgagtacaggtga

SEQ ID NO: 209455 - DNA, 1017 bp, Klebsiella oxytoca
atgcgtgttgcgttacttgcacttccgggcagcatgcgttcggcgcttgcgggtctggctgatatgttctggctggcgaatcaggtgatcgtgcaaaatccttcggtaaacccagagctatccagagatacacctctttttgacgtcaggacgattaccgctgacgggcagccggtcagggacgttcagggacggattatcgaaagtgatggctcatttaatgaaccggacagcttcgggctgatcattgccagcggtatgcagctggatgagcaaaggttcccgtctgacagagctgccgtagcgagtgcagctggctggataagacgaaagtattcagagggaagctgtgttgccgcagcctgtgcagggggctttgtgctgggtgaggcaggcttactcaacgggcggatatgcaccacaacgtggtggttatatccaacttttgcggaacgctatccgatggcaaaacctgtatggggtaaagctctggccgaacaggacaatgtgatcaccgcaggcggaccactttcatgggttgatctggctatacacgtggttcgcagtcacgcaggtagtgaactggcaaagctgaccgctgacatggctgttgctgatagccagcctctgtcacagcaaatttatgcgcccgccggattcctcaactcaaggcatcctttgctgactaaagcagagaacctgcttcgttatcagaatcctgcaatgactgtagagcagcttgctgcagccctgaatatgacgccccggacgcttaaccgcaaaatgaaaatgctcgtccaggaaagcccgaaagacttcattacgcgggttcgcatcgaaacggcatccgtacttatggaaagccccgggaaaaccatttcccagatcgccagtgcatgcgggtacggcgatgaaacggctttcagacgcgccttcagcaccataatggggatgtcgcccggaagtttcagaaagcgactttcaacaaagctcccaacaaattcaggcaacgaatga

SEQ ID NO: 209456 - DNA, 780 bp, Klebsiella oxytoca
atgtggatgaaaaatgtaatgtccggcgcgctgcgaaaaggagcttttattttgtgtctgttgttaacgcacaacccgctgcttatggcacaggatgggggggtaaaaaatatcgtactggttcacggtgcctttgctgacggctcttgctggtctgacgtcatctctctgctgcaggaccgcggctaccacgtaacggctgttcagaatcccctgacttcattgcgggatgatgtggctgcaactgagcgcgtgctggagcgccagaatggtgacgttctgctcgttggtcattcatgggcaggtgccgtgataacgcaggctggcaatgccagcaacgtcaaaggactggtctatttatccgcccttgttcctgacagcaatcaatccgtatctgatgcactggcgcgatttcatgcccccatgaaaggtatggaagccgataaaaacggacttatctggcttgatgagcctaggctgtttcatcaggtaatggctaatgatataagcatcaaaaagagccagctgctcgctgctgttcagcagcctgtcgccgcttccgcctttcaggaaaaagtgaaggaagccgcctggcgaaagaaaccctcctggtatctactcacagaaaatgacaacgcgctgaatccgtcagtacaggccggttttgctcatgaggccggcgctagcatctcgcggattcgctcagatcatctgtccatgatttctcatcccgaagacgtgaccgcactgattataaaggcggcgcagagtattcactga

SEQ ID NO: 209457 - DNA, 774 bp, Klebsiella oxytoca
atgaaaattctccatcttgattccattatcaacaatgaattttctgtaacccgacagctgacggccgaaatagtgaaacagctgatggctgccggtcaggagcatcagctcacttaccgggatcttgtaaaaaacgaaatcagtcatcttaccagtgagattgctgcaggattcaggcctgttgccggtctgccggtagctacagcccggcttgaatctgaacgaaagttatcagactctctggtctcggagttccttgaaagcgaggtgatagttattggcgcgccaatgtacaacttttctgtttccagccagctgaaggcctggatggaccggattgcccagccaggcaaaaccttcagctataccccaacgggacctgtcggtctggctggcggaaaaaaagtcatcattgcctctgcccggggtggtttttacaccggtacgtcactggaagaaatggacttccaggaaaaattcctttgtaagtttctgggcttcctgggcatctcgcgcgttgaatttgttcgtgctgaaggtacatctaaaggcgatgaagtaaagctcagagaaatttcccgttcgttgtccctgataccccaggccatcaatgctgtttctgccgttaagggggtcagtttggatctcgaaaattattgtacgttaagaacgttttttaatcagcgtggaggatattctggaaacagaatagttctgatatcaaggcatccatgcggttaccttgaccaccgacagtcatattctgttgcttaa

SEQ ID NO: 209458 - DNA, 225 bp, Klebsiella oxytoca
atgcagaaagcccttatgattgatgagattcttgttctagcccggcttgccagcatggcatttgagaagcccttaaaatatatggatgacatggatgctgaagtcatggctcgttttaaaaaaacgattacccctgagcttattgagcagatgtgcctccggatccttgagcttgaagcgaaatgtcagagtgcgaacgaagaaattgttcaatcgtctgaataa

SEQ ID NO: 209459 - DNA, 231 bp, Klebsiella oxytoca
atgaagcatgtaaaagtactgggtacagggtgttccggttgtaaaacaaccctccggcttatccggcaggttgctgatgagcgaggcgtcgctgttcagcttgaaaaagtggagtcactacctgaaataatgaaatacaaagtgatgtcgacaccggcagtggtcattgacaacatcgtggtacacgccggaggaataccgtcaagagacatgatcgaaagctggctctga

SEQ ID NO: 209460 - DNA, 1002 bp, Klebsiella oxytoca
atgttccagattttcactgattttgccacctggctggtctatgaaagacttaatctcagtccagcaaccaaactgggggatgctctccatttttttgtcgaagacgtgagcaagattttcgttctgttgctggtcttaatctacttcgtggctatattacgggcctcgctggatgtcgggagggtaaaggattatcttgccggtaagcaccggggtataggatattttctgggctcctgctttggtgccattaccccgttctgctcctgctcgagtatccctgtatttctgggatttatatcagctggtataccgctcgggattaccatggcttttcttatcacttccccgctgatcaatgaagttgccgtcctgcttctggtcagtctgctcggatggaagttcacacttgtatatattgttgtcggaatggctgttggtatagctggcggggcttttcttgatcgtattaaaggcgaacgatggttagccgactttgccgctgacgcactcagggacgggcagcaacatcagactgctgtgatccagcaatctaccgggacaccgcatatgtctctctcaaagcgacatacctttgcaaaagatgaaacgctcaccatttttaaacgagtctggttctgggtcattctcggtgtcgggcttggtgcggcactccatggatttgtgccggacggatggatcgcgtcgcatcttggtgccggtcagtggtggaccgttccggtagccgtactggttggcattccactctattccaatgcgaccggtgtgatccccgttatggaaagcctgattactaacggcctgccagtgggtacagcactggctttttgcatgagcactgtggcagtcagcttccctgaattcgttctgctcaaacaagtaatgaagtggcaattactgtgcatcctgctgttgatgttgttgaccgcgttcacactggttggctgggtttttaacgtcgtattcccgctggtttcctga

SEQ ID NO: 209461 - DNA, 543 bp, Klebsiella oxytoca
atggtgcaaccgacaggctcgctaccctgcctgatgaaggcatggaagatgcatgaacacgaactttattgctggttacgcagacaaacgggtaatcaggctgatactgatgatctgatacaggaaaccttcctccgggcaatacgtcaacagaggaaattctgtgccattgtaaatacaagagcctggctgtttgaggttgcccggcatctggttattgataaaagccggcggcagcgcccatatcagcctctccacgatggtgtatgcatacaggataacgcccctgaaactgtcgattcactcgctgaatgtctgtcccgtatactggatgaaatgacagaagcggatcggactatcctgacactctgcgatctggaagggatgaaacaggctgattttgcagaccggaacggtctcacgcttggtgcaaccaaatctcggttattacgggcgagagcgagattgcatcagaaactctccagtgattgccaggtcagactggatgagtccggtcgggtatgttgtttcactccccgctga

SEQ ID NO: 209462 - DNA, 183 bp, Klebsiella oxytoca
atgcgtatcgaaaaagtcactggctggttattcaggctgatcccggaacgcgtttttgacgcgttatccgggatcgcatgcgcggaaatggatggtattgcgcgtgaccgtctgccggaacagactgagcggaaggccacactccctgcagcagggcaagagcggcgaaaaagaaataactga

SEQ ID NO: 209463 - DNA, 480 bp, Klebsiella oxytoca
atgaatattctttttctgtgtaccggtaattcctgtcgttccattctggccgaagcgacgtttaatgcgctttcaccggaagcgcaccacgccttcagcgcaggcagtcagccaaaaggtgaagtccatccccgcgctcttgctcttctcaggaaagaagggatacccacggatgggtattacagcaaatcgtgggacaacctccctgtgaccccggatgtggtgatcacggtgtgcgggaatgcggcgggtgaaacctgtcctgcgtatctggctccggcggtgagggcacactggggagtcgaggatcctgataaggctaccggaagtgatgaggagatcgatgccgctttcgaacagtcctggcatattcttcgtcgccggattgaagcctttctgttgcttgcgccatcagtcctgtcgggccctgaggagcgtcttcaggctgaactgaaccggatcggtgaaaccattttttaa

SEQ ID NO: 209464 - DNA, 366 bp, Klebsiella oxytoca
atgaaaacactgtcagtgtatgacccggcactttgctgcagttcgggcgtgtgcgggacggaagtggaccaggctttagtgtcattttccgcagacgtcacatggctgaaacagcagggtgtgccggtggaacgctttaacctgtcgcagcagcctctggcatttgccgagaatccgtcagtcaaagcctttcttgagcgctccggggctgaaagcctgccgttaattctgctggatggtgaatttatcctgtccggtcgctatccgacacggcaggatctggctcgctggtttgggcttaatcaggagaaaacaggcatggctccggggaaaagctgctgtggcagcaactcgtcatgttgctga

SEQ ID NO: 209465 - DNA, 498 bp, Klebsiella oxytoca
atgtttcatccgtttgatattctcaccctggacaatggtgccaggctgatatttaccccctgcccgggaaccagaggggtgtcccttgctgattcattaaaatccttaaaagaagccggtgcgcaggctgttatcacgatgatgacgctggctgaactcagtgaaaatcaggctgatgcacttccgtcactgtgcgctgaccttcatatggactggtttcacctccccgtgcaagacagctgtgcacctgaagaatcatttgaacaggcatttgcccgagagaaaacgagcctgctggctttagtccggtctggcgggacgctggttatccattgtcatggtggttctggccggacaggcatgatggccgctgttctgatgctcgagtcaggttatcagcctgctcaggtgaaaaaacaggtccagctaatcaggccaaaatcactgacttcgccggtacaggtcaattttcttagtaagcgatacggctaccagtaa

SEQ ID NO: 209466 - DNA, 309 bp, Klebsiella oxytoca
atgctgcacgccgtaacgcttacgtacctgacacaacccgatgcgatttctgctcaacttgacgcacataagcaatggctggtcaggggatttaatgaagggaaaatcctttttgccggcccgctcagcaatggcgccggcggctatatactttttcagggggataacgtcagcgatattcataactttctacaggaagatccctttatcatgcatagcgttgcagatgcaaaagtaatgagcattgagccggcgttatgcgcccatgggttccctgagaaatgggcggagaaagcccgttttatctga

SEQ ID NO: 209467 - DNA, 309 bp, Klebsiella oxytoca
atgagccgcgcccggcgaactttcccgccggagttgttggcacgcctgcacgcgatgcaggtaacggccgcgctcgatctcttgggcctctactggaagcacgacccggatttcaaaccgatcaaggacaaggccacggtgcgggtgaatgtcgcgctgggtggtggtggcgtggagctgctggcgaccgggccgaagtggtacgacacccgcgcagagaagggcggcggtggtgccatcgaccttgccatgcacctgctgcgcctggacttcgtttcagccgtgaagcgcctacaggctgcgacctga

SEQ ID NO: 209468 - DNA, 1476 bp, Klebsiella oxytoca
atggcaggacaggcacaacttgccttgttcgagccggccgacgaggccggcacctaccatgacacggccaggacgggctttttctcgctcctggtcgcggtagggaaggacaagcggcaggactcatacaggctcacagacatgcccacgatcttgggcatggtcgatcagacccgcgacacctggctgacgcaggccgaattcatgcgccctaaccggcgcgtggtgaatctggcgcgtgtcgggctgctgttcgccgacctggacacctaccggcagccgtgggccaccggcagaacgccggagcaactggcggccaccgtgctgtaccactgcgcccaggaaggcatccccacgccctcgctgctggtctatagcggccgcggcatacaagccaagtggctgctggacggcaccttgccgcgccaggcgctgccgcgctggaacgcctgccagcggtatcttgtcgatcgtctggccggcctcggcgccgacccccaggccaaggacgcaagccgcgtgctgcgcctggtcagcaccgtgaataccaagagcggcgacgtgtgccgcgttgtgcatgtcgagcacggccaggacggccagcccgtccgctacggtttcgagtacctggctgaaatgctgctgccggtggcccgctgggacatcgagcagcaacgccgcgaccgtgccgaacgccggcagctcaagctattgccaggcggcaaggccgacaatctgcgcggcttctccggccggcagctcgcatgggatcgcctggaggacttgcgcaagctgggcgagctgcgcggcggcgtcagggaaggcgagcggatgcagcatcttttctggcgtctcaatttcctgctgctgtccggtgccacgcacagcgggcagatgtaccacgaggcggccgcgctggccggcgagcttgatccggcctggtcgtatcgctccaaggagctgatgacgttgtacgccaaggcgaaagcctacgaggccggcgagaaggtgacgcttggcggccgcgagttcgcaccgctctacacgcccaagaacgacaccctcatcagcctgttccagatcaccgacgacgagcagcgcaagctacgcacgctcatcagctcggacatggcgaaggagcgcgatagggaacgccatacggcccgccggcgggctgctggggcggtagatcgggaaacctacctggacgcggccgaggcgaagcgtgcgcaggcccaggcgctcaaagccgaggggctttccgtgcgtgccatcgcgcagcgcatgggcatcagcaagtccttggcggccatgtacgccaaggaggcggccgagtgtccaaagtccgtgcgtattacagccgaccaggccatgccggtggccagcatcgccggaagtgacgagggcggccgcgaaggtgtccaaagtccgtccgtattactaatggcggagcctaccggccggggggcggtgtga

SEQ ID NO: 209469 - DNA, 315 bp, Klebsiella oxytoca
atgattacgtttgattcaaaggctgtcatcaatccgaccgcatttaaggaggtcgttttggtgggcggcgtacagggtgcgactgttaccgttgcagagaagggcctggttctggcgcttcggatcggcggagaaaatcgcatccttgggcagtatcggggcggcccccgctacttccgcacgattgacgcggcggcgtcgttgctgatccagcacggcatctaccgcttcgaggcggacgtggccgggtggaagcccaagacgctgacccgcaaaggtggcgagttgctgggtggcaccggcatcgagccgtaa

SEQ ID NO: 209470 - DNA, 330 bp, Klebsiella oxytoca
atggctgacgtatccaagctcaagaaactgaaaggccggcgcgacgagctgggcgcaccgccgacgctggacgaggccagcacgaacctgaccgcgccggaggttgcgccggtagccaggccggccgccgccaacccaccaccgcaagcgccggcggccaagaagatcgacggccggagcgcccgcaagacgaaccgtacggtgcagttcgccacgcgggtgacgccggaatgggatgcccgcattcgcgccctggcgcagcgtgaaggtgtgctgctggtcgagatactggaaaaggcccttgaccattacgaacaatctagcagctag

SEQ ID NO: 209471 - DNA, 633 bp, Klebsiella oxytoca
atggcggcgattgtcgcattcgtctcacagaagggcggcgtagggaaatccaccctggcgcgtgcccttgcgcgcgaagcggccgccggcggcttgcgcgtgaaggtagcagacctggatacacagcagggaacggctgtcgattggcaccgcctgcggctttcccagggcattgaacccgtggtgtccgtcgaggcgttcgccacggctgcgcaggccctggaagcggccaagggttacgaccttctcatcatcgacgggccggcccgcaccagctcggcgacgctcgacatagcccgcgctgccgatttgatcgtgcagccgtccggcgcatcgagggatgacctcattccggccgtgcgcgagttccacgcgctgacgaaggccggtgtcccgaacgaccgcctggcgttcgccctcaaccgcatcggcacgccggcggaagaggtcgcggcgcgggtctatttgcagcaggccggctacaccgtcctggatgggagcttgcgcgaccggccagcctaccgccaggcgcaaaacaccggccacagcatcacggaaacccgctttgcgggcctgaacgagcgggccgacacactcattcaatcgctcatcgaccgggtgacaaatggctga

SEQ ID NO: 209472 - DNA, 672 bp, Klebsiella oxytoca
atgtcaaacaacaaccagaaaacaaccattgatgcagtacgggccgcgttgtcagcggctcgcatgggaaccttcgaggtcgcagccggggtgcaatcggatgatgaccctgcggccctgttgctctacgcatggaacgctgaggtgtcgggcgcgttcctggccccgctgcatgtgtgtgaggtcgtcgtccgaaacgcggtgtccgatgcgctggaagccctctatgggccgcgctggccgtggtcggcaacattcgagcgcagcttgcccgatcccatgcaaggctacagcccgcgccgtgatctgcaaagcgccagacggtcagcgcagaccacgggcaaggtgatcccggaactgaagttcgttttctggcagaagatgttcacgggccgttacgacacccgcatttgggatcagaatctgcggcgcgtcatgccgaaccttgatccggccaagcctgttgccactctgcggcacgcgatctatggcgatttggagcgcgtgcgtctgctgcggaaccgcatcgcgcaccacgaaccgatctttgcccgagcgttggcagatgactaccagacgatagtggcactggtgacgtaccgctgcgcggttacagccgcgtggctggatagcaaccagactgccacagccatcattgctgccaagccctaa

SEQ ID NO: 209473 - DNA, 894 bp, Klebsiella oxytoca
atgagcaggacgaagccagcagccgcgccgatggtggcgcgggtctatctgcgcgtcagcaccgacgcgcaagaccttgaacgccaggaagggatcatcacggccgcgaaggccgccgggtactacgtcgccggcatctaccgcgagaaagccagcggcgcacgcgctgaccggcccgagctgctgcgcatggtggccgacctgcaaccgggcgaggtggtcattgccgagaagatcgaccgcatcagccgcctacccttgcccgaggccgagcgcctggtggcctcgatccgggccaagggtgcgcgcctggccgtccctggcgtggtcgatctatccgacctggcggccgaggcccagggcgtcgccaagatcgtcctggaatccgtccaggacatgcttttgaagctggccctacagatggcccgcgacgactacgaggacaggcgcgagcggcagcgccagggcatcgagctggcgaagcgggacggccgctacaagggaaggcgggccgatccgaagctacgcgcccaggtgatcgcgttgcgcagcatcggccagagcatcgcggagactgccaagctggccgggtgcagcgtggcccaggtcaaacggatttgggccagccgtgacatgagccgggccgaggcggccaggcatggcgctttcgtggaggacgcattgaccgaggccgacgccggcgcggctgccgacgtggagcagggcgcggccgagctgcccgagccggctttcctggacgacgaaggcccgagcgccgaccttccggctttcattgatacggccaacatccgcagcctgtacggttgggagcctggcgaaacggtggaagaagctatcgccaggcaccgggccaaagaagggaaaacgtcctag

SEQ ID NO: 209474 - DNA, 282 bp, Klebsiella oxytoca
atgtcgaaagaagccgttttcacgatgaagctggaaccggagctgcgcgccgacttcatggccgaggtggccggcgaagatcgcccggcctcccaggtcatgcgcgagctgatgcgcggctacatcgagcagcgccgccaggcccgcgaatacgacgaatacctgcggcgcaaggtcgaagccggccgcgcctcgatgcgtgccggccgtggccggtcgaatgatgaagttgaagccgcgttcgctgccaggcgcaaccaggtagcggcgggccaggcgtga

SEQ ID NO: 209475 - DNA, 282 bp, Klebsiella oxytoca
gtgatagtcatctggacgccagaagcggaacaagaccgcgccgacatttgggactacatcgcggccgacaaccccggcgcggccgttcgcatggatgagcttttcagcgatgcggccgcccggctggccgcgcatccgaagatgggaaaggcgggcaagatcgcaggcacccgcgagctgataccgcacgaaagctataggctggtgtatgagatcgacggaggcacggtttgggtgctggccttggtgcataccgcccgcctatggccgccggcgcgatga

SEQ ID NO: 209476 - DNA, 366 bp, Klebsiella oxytoca
atgggcaggaaggaaaccgaggaagcgattgcagacagccgtgccggccgcgtgacgcgggttggctcggtggccgagttgctggccgagctgaacgccgacgacacgccggacgttcaactaggcagcacaaacgtctatgccgacctgggccacgccgacgccgatgcaatgcgggaaaaggccggtcttgtgaccaggatcggccaggcgatcaaggcgcggcagttgtcgaacgaccaggcggcagcggctcttggattgacgccggccgagctgggcgagctgctggccggccgcttccgggcgcactcggtcgatgacctggaacgcttggcggcgctactcgatgaggccggccaatga

SEQ ID NO: 209477 - DNA, 609 bp, Klebsiella oxytoca
atgaccgacccgaagcacctggaaacctggctgcatgagaaggccggcccggcctatgacgcattgaaggccgatccggcccgcgccgtcacggctgaccaggtgcgccgcacgctcgatgagctgctggccgaggccgaagcagccggccagcatccattgccgcccgagcaacgcgaatgggtggatgcgcctgccgttggccgcgagtggccggcctgtgaaaccctggaagccgaccaggtgcgcgcacgcctgcatgacgacgcaatggccgaagccttccgcaaagacccggcctatgcggtggaactgctgaacagcatccttgaggatggcgaccaggacgaattgctgatcgcgcgccgccagataacggaagcgtttagtgaaagggtcgccgacattgccctggctatcgcgctggcccgccgcgtcgatgcgggcctggacccgctgacgcccttcgacccggccgaacatctgaccacggccgaggccgtgaccgcgctccttgccgacgccgaagccaccggcgatgcggcttacatcgagcacgcgcaccaggtcgcagcacgtgcgcgaaccatgcacggcctggaagggtag

SEQ ID NO: 209478 - DNA, 234 bp, Klebsiella oxytoca
atggcaactttgaatcctaccaatgcaatcgcaacccaggcagtccatcatgcggccgcgcagctcgcggccctggactggatcgaccaagaggcggcgcggcagctctcgccgatggcggaagccgtcgccaatatgttcatggtgctgtactaccaggccgagacgggccaggccacgcgggacgatttccgccaggccctggacgcggtgcggcagtcactcaccgcgtag

SEQ ID NO: 209479 - DNA, 258 bp, Klebsiella oxytoca
atgaaacgtagtggctttttcgactgcctggcgctcgaccaggtgcagcggccggcggtggagtttgagcagcctggcgaccaatcaaccgagcttgatgcagcggcggaagtggcggccttcgttgatcgccctgccccgtctgccgtcgaggccaccaggccggcggccaggtcatcgagcaacagctacagcggcagcaacaggaacacgccgctggccgaggccgccggcatctacagcagcggccagcgataa

SEQ ID NO: 209480 - DNA, 1662 bp, Klebsiella oxytoca
atgaaagcactgcacaaggcggcgctgatcggcgtcaccctcgcgctttactccaccgccgcatcggcccagctcaccaaccaagggatgcttgaccaggtggtgacggagttcgccacgcgggccacgtcctggcagacggtggtgatgaatgccgcgatgttcctgttctggacgctgggcacgatctcgctggttttcacgttcggcttcatggcgctgcgcaaggccgacattggcgagttcttcgccgagttcatccgcttcatcctgttctttggcttcttcctctggctgctgcgcaacggcccggccttcgccaactcgatcatccagtcattggcccggatcggtgagcaggcgtccggggtggcatcggtgacaccctcgggcatcgtggatatcggattcatgatcttgaagcaggcatttagcaactcgtcgatctggtcgcccgtggatagcttcatcggcgtggccttgagcctcggcatcctgatcttgctggctgtcgttgccataaacatgctgttgctgctcgtctcgggctggctgctgatgtacgccggcatcttcttcctcggcttcggcggaagccgttggacgtccgacatggcgatcaactactacaagaccgtgctgggcgtggccgtgcagatcatgacgatggtgctcctggtcggcatcgggaacgacctgctttccagcttctacgccaggatgaacaccggcacgctgaactttgaagagctgggcgtgatgctggttttctgcgtggcgttgctcatgctggtcaatcgcgtgccgccgctggtcgcgggcgtcatttccggtacgggcgtggggaacgctggcggcatcggtaatttcggcgcgggcgctgccatcggtgcggctatgggcgcggcgagcatggccgctggtgcggcaagcgtggccggtgcggccgtgatgggtggtgcaacctcggccgccggcggcatgtcggccatcaaggcagcgttcgagaaagcagggtctagcgccggcggtgaatcgggcggaatgcccatgctcggcggtggctccgactccggcagcgatgcaggctcgtttgcgcaagctgctggctttggtggcgggtcaagctcaggtgcgggcaccactacaccacttgcacaggccgccggtttcggcagcagctcgggcagcggtgccagcggctcgggcggcggcaatgggcagcagtccggtaaatcgggtggaggttccagctcgaagggtagcgacgaagccggcagcaagaaagcccagcaaggcggccagcaggccgcaccaggcagcaccggccccggcttgctggcctcggccgcatcggcgcttggcacggcgggccgcgtgacggccgacgccggcgcaaatctgatgcaaggcgtcggagaggttgcgaaggccaaggccgccagcatccgcgacgccgccgccgagcgcatcgccgacaccaccggcgggaagatcgcggcggcgatcagggcaagcgcggagagcgaccaggccagcgctgccgaggcggtgccgacattcggcggcaacaacctggcaggggccgattcggccgctgccgatcctgatgatgaagtggccgcgttcgccaaccgcgagcacggtaaatcggaggcgtga

SEQ ID NO: 209481 - DNA, 267 bp, Klebsiella oxytoca
atgaagaaaacgatgctgcttgccggcctcgtggtggtgctggtggctggctgcgacaacaagccggccatcccgcccatgcccgaggtcaatgacaccaattgccagatcgaggcgatcaagaagatcgaggacagggccacgcgcgagaaattcgccgggctgtgctcgcgtcggtcgccggccgccggcggcatcgcgccgaccgagaagcccatgaactggctcgaactggccgacccgaaagaccaggaggcgaagccatga

SEQ ID NO: 209482 - DNA, 786 bp, Klebsiella oxytoca
atgaaacacgtccgccttttagcggctaaaaccgcgctcgccgctgccctggctggcagcatcatcatcaccccggcgcaggccggcattcccgtcatcgacggcgcgaacttgggccagaacctgatgaccgccatcgagtcggtggcgcagacgctcaagcaaatcgaggaataccgcacccagctccagcagtacgaaaaccagctccagaacacgctggccccggcggcgtatatctgggatcaggcgcagtccacgatcaacgggctgatgaacgccgtcaacacgctggactactacaggaaccagctcggcagtctcgatagctacctgggcaaattccaggacgtggcctattaccgtggctcgccgtgcttctcggccgccgggtgctcggatgccgagcgcgccgcgatggagcagaaccgcaacctggcgagcgagagccagaagaaggcgaacgacgcgctgttcaagggtctggagcagcagcagcgcaaccttaccgccgacgctcgccagctcgaacggctccagtccgctgcgcagggagcgaccgggcagatgcaggccatcggcttcgccaatcagctcgctgccaaccaagcaaaccagcttctgcaaatccgtggcctgctgatcgcgcagcagaacgccgcgaccgccaggatgcaggcgcaggccgaccttgaggcgcagcagcaggccgccggcgcgacttccagggaatccaggatcgagcgcacggccagcccgagaaactggctcgaactgacccgctga

SEQ ID NO: 209483 - DNA, 1830 bp, Klebsiella oxytoca
gtgatcgccaagcacgtgcccatgcgctcgctgggcaagtccgacttcgccggcctggtgcggtatgtcaccgacgcgcagagcaaagaccaccggctgggccaggtgcaggtcacgaactgcgccgccgacaccgtgcgcgatgccatcaccgaggtgctggcgacccagcaggccaacacgcgggccaagggcgacaagacctatcacctgatcgtcagctttcgcgccggcgagcagccgagcgccgacaccctgcggcagatcgaggcccgaatctgcgccgggctgggctttgccgagcatcagcgcgtcagcgccgtgcataccgacaccgacaacctgcacatccacatcgccatcaacaagattcacccgaccaggggcacgatgcaggagccgtactactcgcatcgggcgctggccgacctttgcgcgaccctggaacgcgactacggcctggagcgggacaaccacgaaccacgccagcgcggcgcggccgccagggccggcgacctagaacagcacgccggcgtggaaagcctggtcggctggatcaagcgcgagtgcctggacgagatcaagggcgcggcgagctgggccgagctgcaccaggtcatgcgcgacaacggcctggcgctgcgcgcacgcggtaacggcctggtcatcgaggccggcgacggcacgatcatcaaggccagcaccttggcccgcgacctgtccaagcccgccctggaaaagcggcttggcacgttcgaggcgtcgcccgagcgccaggccacgccggcacggcgcagctaccagaagggacggccgatgcgcttgcgcggcggcctggacacgaccgagctttacgcccggtacaagggcgcacagcagaacctcacggccgccagggccggcgtgctggccgaggcgaagcgccggaaggatcgggccatcgagaacgccaagaaggcggcggccaccaggcgggcggcgatcaagcacctgaccgatggccggctgaccaagaagctgctttacagccaggccagcgccgcgctgcgggccgacctggaggcgatccacaagcgccacgaccaggagcgggcggcgatctacaacgagtaccgccggcggccgtgggccgactggctcaagcagcaggcgacggccggcgacggccaggcgctcgatgcgctgcgcgcccgcgaggcggcccacggcctcaagggcgacaccatccagggcgacggccccgccaagcccggccatgctccggtgatcgacaacatcacgaagaagggcacgatcatctaccgcgctggcagctctgccgtgcgcgatgacggcgagcgcctggccgtgtccagccaggccgaccgcgctggcgtggcggcggcgttgcgcctggcgatggaacgctacggcgagcgcatcaccgtcagcggcagcgtggagttcaaggccgccgtgatccgggcagccgtggatgcccagctccccatcaccttcgccgatccggcactggaaagccggcggcaggccgaggccaccaaggcccaggccaagcgccggtcaggtgtgccccctgtcggccaggaaccgccgccgcatcgccggaacggcctgcacacgttgggccagctcgacaggctgcacatcgagggcgaggcccggcggccggcgcaagcgccgacccaggccaccccgacgccgccggcggccaaagtgcagcagccggccaggcccgcgccgtccgagcttgaacagcgcgaggcgcggctacgggcgcagatggaagccaagaaggcgaaacgccaggagggcaagaagcgcgggcgatga

SEQ ID NO: 209484 - DNA, 378 bp, Klebsiella oxytoca
atggaggccaacgagaacaaggtaacgaggaagggcagcacgcccatcaaggtctattgcctgccggatgaacgggccgccatcgaggccaacgcccaggccgccggcatgagcacgtccgcctacctgctggcggtcggccagggctaccaggtcaaaggcgtgaccgacttcgagaacgtgcgcgacctggtgcgcgtgaatggcgacctcggccggctgggcggcctgctcaagctctggctgaccgacgacccgcgcacggcccgcttcggcgatgacaccatccgggcgctgctggcccggatcgaggcgacccaggacaagatcagcaccatcgcggaaagcgtggtgcggccgcgaggcggacgatcgtga

SEQ ID NO: 209485 - DNA, 420 bp, Klebsiella oxytoca
atgggaacccgatacaccgatgaacttgccgcctgggccgatcagaaggccgagaagaagcgccgccaggacgcggcggcagtagcgtttctggcggtgcgcggggatgtggtcgaggcaatggaagccggctacgcgctgacgacgatctacgatcacatgcacgaaaccggccgggtgaaaaccagctatgagacgttccgccggcacgtccagcggttcatcaaggcagcgccggccgacaccgcgccgccgacaccgaaggccgccaccaggtcggccagcaactcgccgaccaccgttccagccgtcacgccaaagccggccgtaccagctccggccagccctgccagcgagcaagccgggaagattcccagcttcaatttcaacccgacgccgaacaaagaggacttgctgtaa

SEQ ID NO: 209486 - DNA, 906 bp, Klebsiella oxytoca
atggcagtcacgaaagagcagattttttccgccgccgacgacttggccgccgccggccagaagcccacgcttgaggcaatccggcagatcaccggcgggagctacacaaccatttccccggccctgaacgagtggaaggcccgccaggccaccgccgccgcgcccctgcgcgagcctgcgccccaggccgtcgccgaccgcctggccgaactgggcagcgacctatggacgatcgccctcgacctggcgaacgcccgccttgccgttgagcgggaagggctggagaaggcccgcgccgagctagaagccgaccgcaacgaggcaaccgagctggccgacaaactggccggcgacgtggaagccctgcaatcccgcttggcgtccatcgaggccgccgaagcggccgcacgcggcgaagccgacgagctgcgcggccaactggccaccgcccaggaacaggcgcacacggcagaggcacgcgcccaagagatcgagcgccgggccggcgagctgcgcacggaactggacagggcgcaccaggacgccgaccaggcacgcggggcactggctgaacagcagaaggccagccaggcggccgccgctcaactcgaccaggtgcgcgccgaactggtgaaggtacaggccaaggccgaggccagcgaggaagctcaccaggaacagcgcaaggccacagcgggcgaggcacatcgcatggccgaacgcctcaccgccgcccaggccgagcgcgaccaggccacgaaggcggccgcacaggcccgcgaggaagccgcccgcctggccgggcagctcgacacgctcaaggaacaatcggccgcgctgctggctcgcatcacgccgccggcggccgaggcgaagccgaccaggaaaaagcccggcggcgagtga

SEQ ID NO: 209487 - DNA, 510 bp, Klebsiella oxytoca
atgcccaattcttctaactgttctggtgattcaatccctttacgtaataccacacgtgcaagcactaaacctacagatattaatagaccaataaccacacccaacaaaataattaatactttatttggttttactggcttaggttgcgttattgcagtatcgataattcggacgttacctatcgcactagatttcgcaatacttaattcctgctgtctgttcaagagttgcatatatactgcccgccccgaatccacatcacgactcaggcgtaacacttcttgctgcgtttctggcattgctgatacacgtttattcagcttatttttctcatcctgcagaatcttacgcttttccatcaacgccttatatgttggatgttctttagtgaacaactgtgaaacttctgattctctgattgttaactcattcaattggttatcgacgttaacgatttggtcaagtacagctttagcttctaaagacaggtcgactgaatctttttgctga

SEQ ID NO: 209488 - DNA, 486 bp, Klebsiella oxytoca
atggacgcattggccaccggtcgcaggatcaagtgccttacctgcgtagacgacttcacgaaggaatgcctgacggtcactgttgcctttgggatttcaggcgtgcaggtcacgcgtattctggacagcattgcgctgtttcgcggctatccggcgacgataagaacggatcagggcccggaatttacctgccgcgcactcgatcaatgggcctttgagcatggcgtggagctgcgacttatccagcccggcaagccgacacagaacggatttattgagagttttaacggacgctttcgcgatgaatgcctgaatgaacactggttcagtgacgtcagtcatgccaggaaaaccatcagtgaatggcgtcaggattataatgagtaccgcccgcactccgcgctgaattatcaggcgccgtctgaatttgcggcggcctggagaaagggtaattctgatagtgaaggatccgacattactaagtga

SEQ ID NO: 209489 - DNA, 906 bp, Klebsiella oxytoca
atgcctagttccccttctaagcggcttgaggacttgagtctggtccagcgcgagcggctggcctacatcgattttcggctctacttcttcggtgagatcggtcgcccagatctgattgagcgcttcggcgtggctccagcaggggcgacacgcgatttggctttgtaccgggaaatcgtgccgcataacatcaccttcgatggtagcaacaagatctatcgcatcgggcaggcgttttccccgttgttcaagcacgcatcgcagcgcattctgtcggcgctggctctaggctttggcgatggcgtgaacggctcaatgcaggcgctgctaccatgtgaatcccccgcagccctgtgcatccccaagatggatgtgttagcagcgatttgccgagccatccacgccaagcgacctgtcgccatccgctaccactcgatgagcggcggcgagtccgagcgggtaattgtgccctttgccttggttgataccggcctacgctggcacgtccgggcctttgatcgcaagagtagagagtttcgggatttcgtcgttacccgcatcgaagcaccaacattgctcgacgaagagccacaggacaacgaacgacaggataacgacatccagtggacgcgcatcgtcgagctggatttcgtgccgcacccgagcgttgagcggcccgatattatcaagatggactacgggatgacagacggttcgatcagaatgcgcgttcgcgctgcggtggtgggctatatgttgcagcgctggcgggtagactgctcacccgatcattgccttcgcggaccggagtaccggttatggctcaaagatcatctcgcaatttacggcgtaaaaaatgccttactggcaccaggctatagcgccactaagaaggctgactattaa

SEQ ID NO: 209490 - DNA, 3279 bp, Klebsiella oxytoca
atggaactgatcgacaatatcaaccgtctgctcggagacgacctaaagcagacgctcaaacctggtgctcgcctgaagatcgccgcctcctgcttttcgatgtacgcgttcgaagcgctcaaagcagagctggaaaaaatcgacgagctgcaattcatctttacctcgccgacgtttaccgctaacgaggttaccgacaagattcgcaaggaacgcagagaattccacataccgaaggctgaccgcgaacggagcttgtacgggagtgagttcgaaattcatctgcgtaacaaactgacccagcgcgcaattgcaaaagagtgcgcggactggatgaggcgcaaggcaacattcaagtccaatcgcagcaaggcaccgatgcagcagtttacttgcattcaggctgctgccgcagatactgcctacatgccactgcacggctttaccgccgtcgatctcggctaccagcagggcaacgctgtatccaactttgtcaacaagatggacgagccgacgtttacggcgacctacctcagtctgtttaaccagatctggcaagaccccgagaagctggaggatgtaacggcgcagatctgcgaccacattgcgtccgtctaccaggaaaactcgcccgagagtatctacttcctgatgctctacaatatcttcaatgagtttctggacgacatcaacgaggatgtcctgccgaacgaccgcacgggctatcaagatacgctcatctggaacaaactcttcaattaccagaaagatgctgccaccgggatcatcaacaaacttgagaactacagcggctgcatcttggccgacagcgtaggcttgggcaagactttcaccgcgctggccgtgattaagtattacgaactgcgcaacaagtcagttctggtgttatgccccaagaagctggcggacaactggctgaactacagccgtaacctcaagaccaacatatttgctcgcgaccggttcaactacgacgtgctttgtcataccgacctcagccgtacgagcggtgagtcgttcggcacaccgctgaatcgcatcaactggggcaactacgacctcgtcgtcatcgacgagtcgcacaacttccgcaacaatgacgcctataaggacaaggagacccgctaccagaagctgatgaacaaggtcatcaaggagggcgtgaaaaccaaggtgctgatgctttcggctaccccggtgaacaaccgcttcaatgacctgcgcaaccaactggcactggcctacgaaggtgattccgaaaacctcaacaagaagctgcgtaccggcaagacggtagaggacattttccgtggtgcgcaggctagcttcaatgcatgggcaaagcttccaccggaagagcgcacagcgcgagccatcctggactcgttggacttcgacttcttcgaattgctcgacagcgtcaccatcgcacgctcgcgcaagcatatccagactttctacgacaccaaggaaataggccaattccccgagcgccgcaaacccttgtcgttccactgtccgctcacgcagcgaacagatgtgatgagcttcaacgagatcttcgagcaactgtctttgctcaagctcgccgtttatgccccgatcagctacatcctgcccagtcgactcaagaagtacgaggagatgtatgacactcagatcgcagggaaaggcaagcttaagcaagtcgaccgcgaaaagagcctgcaggcattgatgacgaccaacctgctcaaacgcctggaaagctcaattgagtccttccgcttgacgctccagtccctgcgcgcgaaccacacgaatacgttagccaagatcagcactttcaatcagactggcgacctcggtggcattgacagcagaatcaatgacctgaccgaccagttagaaaacctcgaagcggacgatgacttgcataacattggcgacagcgagattggcggcaaggtcaaaatcagcctcgccgatatggacttgccttcttgggagcacgagctgaaggtcgatctggaaatcattgatgccttgctgacgtcgatgaacaagatcacggctgccgatgatgccaaactgcagcatctcaagacactggttctgaagaagatcgcagcaccgctgaatcctggcaacaagaaggtgctgatcttcaccgccttcgccgacaccgctgactatctgtatgccaatttggctccggaattgctggccacacagaccttgcacagtgcgaaagtcaccggcaaaggggcgccgaagagcacgctcaagaagaactatgacttccaggagctgctcaccctcttctcgccacactcgaaggagaaagcgatcgtgctgccaaatgaggcggcagagatagatttgttgatcggcaccgattgtatctctgaaggccagaacctgcaggactgcgactacctcatcaactacgacatccactggaatcccgtgcgcatcatccagcgcttcggccgtgtggatcgcatcggctcacccaacagcagcatccaactggttaactactggccagacatctcgctcgacgaatacatcaacctgaaggaacgggttgagagccgaatgatgattgccgatgtcacagccaccggtgacgacaatgtgctgagcgcccaagccaacgatgtgtcttatcgcaaagagcaattgcgacgtctgcaagaggaagtgattgagctggaagacctgaaaaccggagtgtcaattactgatctagggctcaatgacttccgaatggacttgctcaactatgtgaaggtcaatggcgaattgagcaacgtgccaagcgggatgcacgccgtagtgcctgccaagccggagatgggcctacgcccgggtgtgatcttcacgctacgcaaccggaatccaagcgtcaacgtcagtcagcacaatcgcctgcacccttattacctcgtctacattaatcgcgagggggaagtcattcacgatcacaccgaagtcaaacgtttgctggatctggttcgcacctgctccaagggacaaacccagcctattacagatgcctgtctcctgttcaataaggaaacggccgatggccgcaagatgcagatgtattcggacctgcttggcaaggccatccgctcaatgatcgaggtgaaggaagagaaggatctggacagcctcttctgcagcggaaagaccaccgcgttggtcaatactatcgtcggactggacgacttcgaactgattaccttcctcgtgattcaggaggccggatga

SEQ ID NO: 209491 - DNA, 702 bp, Klebsiella oxytoca
atgagtcagtctgcgcgatttgagtcgaataccgcgttcatcaactatccgaagcaggctgtctttgctcgtaccctgccaaagaataagatctacgaacacagcggcgccaatacaaggctgaaggacttgttcgtcgagcaggtggagcagatcgtctggcaatacaagttggctccagaaacgatcaacctgcccgccaggccgggagtaccagagcttcagattttctcaatccagctcaagacatcggagctgaatctggacgttttgcgttgcatcgatggcgcggtgcagtttcccatcatcttcgagctgagctttaatggccgaacaaaggtgatcgctgcatacaaaagaccgaatgagtcagacgccagccgttgggtcatgagtgactactttacgacagcctggttgccgagtgactgtgagcgcgccgccatgcctttagcactcgacctgggcggcttgtatgagcagacgcttcaccgcctaatccccatgcctgcgcgcccacgagaaagtctcgcggacgtggtcgcacgtgtcgaacttgttgcagccaagcagcgtgaagttgagaaagctgccagtagacttgccaaagaaaagcaattcaaccgcaaagtagagatcaacgcgcatttgcggcagcttaaaaaagaacttgaagaattgaccgggagtgagagtgcatga

SEQ ID NO: 209492 - DNA, 2703 bp, Klebsiella oxytoca
atgacacagagcttgaatgatgagtcaaggatacacatcgagcagatcgctggtgaagcgttggcgcaactcgaaagcatcgctgaaaccgctaggggcaagctgcacgatgggcggacattgggctcagaagcgttggcaagtatcaatacgatgacgtctagctcggctattcagaatctaggtcagattagccaagtgaatagagagagctatcagaccttggcatctgagccagctattgctcgtgtcgttgctgaggacgacacaggaaatcgacagacgttctatatctgtcgggcaattcctttaacaggatttatcaatcacactagttatcgaacagaaaaaggacgacttgcatccctacctgttggagcagagctggagctcaaagatggcagttatttaaccgtcattgagcgagcacatctccgccccaatgcgcttgccgatgggtgggactctcgtgacaccgtcgttgaagccgagcattttgggccgttcaccatcgagtcgctgcgtgcgctgctgaccgaggtcgcgggagaagaagtcaccgaagacattcttgcccaattgctggccgaggagtcagtcaaggccaacatcatcgacggcgttcgccgcagcgtcatcaccaagatgggactgcgtgatcagcctatcctcgatcaatatcaagatgagattttccgtcgccctatcgacaatcgtcttttgatcctgggcccgcctggtactggcaagacgactactctgatccgccgcctcggccaaaaactagacaccgccttcctagaagaaggcgaacaacgtctggttgaaacaatcgcctcagcccaaggcattgcgcatgccaacagctggttgatgttcacgcccacggaattgctcaagcagtacctcaaggaggcatttgcgcgtgaaggagttcccgcctcggatctgcgcatcagaacgtggcaggactatcgacgcgagctggcccgaaacgtattcggcgtcctcagaagggcttccggtggcggtacctttgttctgaaagacggactgaccagcatgaccgatgccgcactagagcaccccattcaatggtttgacgatttcgatgaatggcagcgcaaggcctatgtgcaggaactgcgtgaagcagcaacccagctccacgatgccaaaacgcccgacgtcttaagtctcggcgcacgtctgcaagacatcttgtcgcgcgcggccgatggcgcactggcggcgatgtttggctcgctgtcggtggagattgccaaagtgcaggcactcgtcagcagcctgaaggaaggctcggacgccaagatcaaagccgcactcaacctgcagctcaaacgcaaccgagcttttctggatgagttggcccgcatgatcgacagcctccaacaagggcaagcgactgaagcggacgaccaggacgacccggatgccgatgaagaagaagacaccacagcatcccgcacaggccgtaccgcggcgctcaatgtctacatgcaagcggtacgcgcccaagcccgggcagcagcatccaagcgcacagtcagcaaaacctctcgcaatggcaaaatcatcgagtggttaggggagcgtggtctgacagaagcggatcgcgttgaggtgggtgcaagtcttctggtgcaggccagtgcacgccgcttcgttaatccggtcaagcgctacctcgagggcatcccgaagcgctaccgtgcattcaggcgcgaacgccaaccggtaaacacctggtatcgccacgaaggctttgaggcgcgcgacatccatccactcgaattggacatcgtcttgctcgcaatcttgcgcggcgcaggcgacctgatcagtcggcccaacgttcagcgcgacatagatagtcccgcgtggtcatcgctccagcccattctggggcattactgcaaccagatcctggtggatgaagccacggacttctcgcccatccagctggcgagcatggcggcgctgacgcatccgcgactgcgctcattcttcgcctgtggcgacttcaatcaacgcctgaccacctggggcgcacgctccgtcgacgacttgaagtgggtcttcgccgatttcgatatcaaggagatcactgtctcctatcggcagagcaagcaactgaacgatttggcccgcgccatgatccgcgctgtcggtggcaccgagcaaaacgccagcttgccagcgcatatggacagcatgggcgttgcgccagccttgctggagcacgcgaccaacgcagaaaccattgtcggttggctagctgatcgcattcgcgagattgagcgctttgtcggccagttgccatccaccgccatttttgtgaacaccgaggacgacgttgctccgttggccgacgcgctgaacatcaccctggccgagcacaacatccaggtcatcgcttgccgagagggccaggctgtggggcaggaaagcaacgtgcgcgtattcgacatccagcacatcaaaggcctggagttcgaggcggtgttctttgtcagcattgaccagctcgccacactgcatccggcgctattcgacaaatacctgtacgtcggcactacccgggcggccacctacttgggtgtgacctgccagggcagcttgccctccgccatcgaaagtctgcgcccgcacttttgccaggactggcaacaaggcgactga

SEQ ID NO: 209493 - DNA, 2106 bp, Klebsiella oxytoca
atggaaaagctaaaaatgcattcacccaatctcacgcaggacaacatcgcccgcattcgcgatctgtttcctggctgcgtcaccgaagccaagggcgaggacggcagcgtgaagttggcagtggatttcgaccagttgcggcaagagttggccgagtcgattgtggaaggtccacaggaacgctaccacctgaactggccgggcaagcgtgaagccttgcttacggccaacgcgccgattgccaaaacgctgcgcccttgccgcgaggagagcgtggatttcgataccacgaagaacctattcatcgaaggcgataaccttgaagcgttaaagctgatgcaggaaaactacctcgggaaagtcaagctgatctacatagatcctccctacaacacagggaaagacttcatctaccacgacaactttacggcatccaaagaagcatttgagatagttagtggcgagcgtaatgaagaaggtggtcgactcgtcagcaacccggaaacgcgtggtcggtttcatactgactggctgaatatgatctatccgcgcttgacgctggccaagaggctgttaagcgacgatgggctcattctgattagcattgatgacgctgagcaggcttcattgcgccgcgtctgcgatcaggtatttggcgagcaaaactttatttcccaactcgtgtgggaaaagggccggaaaaacgacgcaaagtatttttccgttgggcatgaatacatgctcatctacgccaaggacttggtgttactccgagagcgcggtgaggtctggcgggaagaaaaacctggtgcacgggaaatttgggctgaatttctgcggctccagagcattcatggcgaagattatgtcgcgatggaagcagcaataagcaagtggtattcggacctgcccaaaggtcacccatcaaaaaaatgggcgcgttataaacgcgtggataagaatggcccatggcgtgaccgtgatatttcttggccaggtggtgatggcccgcgttatgacgttattcacccagaaaccaagcagccatgtgtggtgccggaagccggatggagatattcatctcctgatgaaatgcaacgccagatcaagcttgggcttgttgagtttcgcaaagatcactcagaaccaccatttcgtaaggcgcacattcgccccattcctgatgaggcggttgaagatcaagttgatggcgatgatgaaagcggcgatgaagaggccgatgctgaacttgcaactcaggtgcgcggctcgtacttctacaagcagtcccaggtggctgtgaaatacctgcgcaagctaatgggagcaaaagtattcagtaacccgaaagatcatgacgagcttgctcgtctgattgaatacatgacgccgcgtaaccgggaagccatcattatggatttctttgctggttcgggaacaacagcagaagctgtgttgagggctaatgctgcctatggcaccaaccaccgtttcattgtcgtgcagctaccggaaagtcttgaagatgccttgacctcaacaacaggaacggcaaaaaagactgttcaagcggcaattaatctcctgaaaaagagtagtcgtccgttgttgctttcggaggtaacaaaagagcgcattcgtagggccggtgaagccacattgaaggaagacacacacgaggaatggaagaaagatattggcttccgtgtcctcaaaatcgacacctccaacatggccgacgtctattacacacccgacgcgctggacgagactaaccttgacctgttcgtggacaacatcaagcctgaccgcacgcctgaggatctgctgttccaggtaatgctagattggggcgtcgatctggtcctgccaatcgccaagcagtccatccaaggtaaggacgtgttctttgtcgatggcaatgtgctggcagcctgcttcgacaccagcggcagcatcgacgaagcctttgtgaaggaactggccaagcatcagcctctgcgtgtggtgttccgcgacgcggggtacaagaacagcgcggtcaagatcaacgtcgagcaaattttcaagctcgtgtcgcccgccaccgaagtgaaatgcatctga

SEQ ID NO: 209494 - DNA, 3072 bp, Klebsiella oxytoca
atgaaacttaaattcaaacatcaatcctatcaggctgccgccgtgcaagcggtcgtcgatgtttttcaggggcagcccccgggctctgatgcagccatgagctatcgccttgaccccggtaataccaaaaacggcatgggagatctgttcgcggtagatactggttttaaaaatgctgagctaaccctcagtgaggatgccttgcgggagaacatccaacaggtgcagcgccagcaaaacctaccgttgtcagagggcttggtcaagactaaggtcgctaggctaaatcttgatatcgagatggaaacggggacaggtaagacctactgctacatcaaaacaatcttcgagctgaacaaacagtacggctggagcaagttcgtcatagtggtaccgagcattgccatccgcgaaggcgtggccaagtcgctggaaatcacggccgagcactttctggaaacctaccacaaaaaggcgcgcttctttatttacaattctaagcagttgcaccatctggagagcttttcctccgatgccggtatcaatgtcatggtgatcaacgtacaagcgtttaacgccaccggcaaagataaccgccgcatctatgaagcgctcgatgattttcagtcacgtcgcccgatcgatgtgatcagcgcaaaccgccccatcttaatcctcgatgagccgcagcggatggagggaggcaagacgctggattccctggcgaacttcaacccgttgatggtattgcgttattccgctacccacaagaccacacacaacaagatccaccgactggatgcgcttgatgcttacaaccagaagctggtgaagaagattgaggtgcgcgggatctcggtgaagggacaggcgggaaccaacgcctatctctatttacaagccatcggaatctcaaacaaaaaacctccaatcgcggttgtggagctcgaacagaaactcagcggtggcaacatcaagcgcgtcacccgcaagctgggcaagggtgacaatctgtttgtgctatcgaacgagctggatcaataccgcgatgggtttgtggtatcggacatcaatgccaatacggacatcttgagctttaccaatggcgtagagctgacggtgggtgatgcgactggtgatgtttccgagatagcgctgcgccgcattcagatccgtgagacgatcaaggcgcactttgacaaggagatggagctcttcgataaaggggtgaaggttctctcgctgttctttatagacgaagtagccaagtaccgggattactctgctgccgatgaaaagggagagtacgcaaaaatctttgaagaggagtacgctaaacaccttcaagaagccttggataatgggtttatgcagggggataccccttatgctaaatatctacgccgcattgcagccaataagacgcacaaaggctacttttccatcgacaagaagagtaagcgcctcaccgatcccaaggtcgctgcgcgcggtgaaaatgctggcttgtcggatgatgtagatgcttatgatctgatcctcatagacaaggaacggttattatcactcgctgagccagtgcgttttatcttctcacactcggccttgcgtgagggctgggataacccgaacgtgtttgttatctgcactctcaagcatagtgataacaccatttcacgccgccaggaggtcgggcgcggcctgcgtttgtccgttaatcaaaatggtgatcgcatggatcacccgtccattgttcatgacattaacgtactgacagttgtggccagcgaaagttacaaggacttcgtaacagccttgcagaaggacattagcgagtccttgtcagctcgtccgcgtgtggcggacaaggcctacttcacgggcaagatgctgaacacgaaggaaggcccaattacggtatcggacgaccaggccacggacattgagttttatctgattcagaacggctatgtcgataagaagcgcaatatcacggagaagtaccatcaagctaaaaaagacggctctctggaagcattgccggacgagctgcagtcctttgcagagcaggtattccaactgattgacagcgtattcagcgaaagccaactcatgcagatagacgatggtcgcaagcccaaaagactgcagaccaacgccaactttgaaaagcaggaattcaaggcgctgtgggggcgaatcaatcgcaaggctacttacaacgtgttgtttgatgatgttgagctagtgaacaatgcgatcaaggcgctcaatgacaagaatgcagggttgcgtgtgacgccgttgcaatacaccattcaccgtggcgagcagactgatacggcaacttacgatggcctcaaaaagggtaatgccttcgagctgaaagttaccgaaacagaatcgcacaacgcctccatccactccgctgtgcagtatgatctgattggcaagttatcagaggggacgttgcttacaagacgaaccgttgccgaaattcttaaaggcctcaatgccgacgtcttcgcacaattcaagagcaatccggaaagcttcattgccgaagccattcgcttggtcaacgaacaaaaggccaatgtcattatcgagcatttggcctatgacacgctagaagacaagtttgatttggacatctttaccacgggccagagcaaacaggatctcagtaaggccgggaataaattgcaaaatcacatctatgactacgtgcttaccgactctgcgattgagcgtaagtttgtcgaagagctggataccagcaaggatgtggtggtatatgccaagttgccacgtggttttctgatcccaacccctgtcggcgattacaaccccgattgggccatttctttcaaagaaggctcggtcaagcatgtgtatttcgttgctgagaccaagggctcgatgtcgtcactggatttacggcctattgaagctaccaagattaaatgtgcccgtaagttcttcgatgagatcaacaagaagtttgctccagaaaacgtgaagtatgacgtagtggatagcttcggtaagctgatggaagtggtcaagtaa

SEQ ID NO: 209495 - DNA, 615 bp, Klebsiella oxytoca; identical to SEQ ID NO: 209394

SEQ ID NO: 209496 - DNA, 906 bp, Klebsiella oxytoca
atgcgagatttagagccattgataaaagcgaagaagggcacagtacacacttatgagaatggcgacgtcattctgacattacaggatgtgaaatcctacatcaccaagaaagatgccccctcttcgcacatttgtttgctagttaacgctgttgataaaaatgggagcactaccgttttaaaaaatatacaaacccaagagagggttgagatatcaccaaagcatgaagaaggtgaaggatatgaattatcatcacacataattattaaacttgatgatgcaatgagaacatacgacatgagttttatgcctatcccaggtgtatcaacatccagaatgaacagtttcctgaataggattctatatcttatagctaaagataacgaagatttatttactgcgaaggctgtaaccaacattgtatcagcagcaactaacaaaccaatcaaagtacgttacaagcctgtgttcgatataattggaaaacttgatcaagaactattcaataaaatcaatcaagagggtttatccgatgtgattttaatgaagaatgaattcagtgtcatcaatgccccggatgtaaacacagcaatcgtaccaaaggagagcactttgcgtctaacaccaaaccatgggaaatctgatgtaattggttggctaaaaggcatatctaattatttcaaggaggatgcaaatggaggatatgactctgttaagattaaatttaaagaacctgacactggcgcaacaagacaagttgattttcagactgcgaatattaggcttgatggattagaaaaaacatttgttaaaaaaagtgttctgaatggtttttcatcgcgtttaaaggactcatatgataccattgacattgagtttgtacgtaaaatcatagcgtccatgtga

SEQ ID NO: 209497 - DNA, 579 bp, Klebsiella oxytoca
atgataaatctattttcacatttatttaagccttatggatatctttttatcaaaggaatcaatggtaaacgatcctacgactggtacgcccccattattttaaccatattatcctgctgctatttttatagttttgggatatctcccaacgaacttttaaaagataacggatttataaaactagtaacatcttttatatcaaatctcccaggcttttacattgcagcccttgcagcaatcgcaacattcaatagagaacaaatagactacccattaattggttcaaatggaacgccatttataaaaatcaagataaccaaagaaaatgggagaacagtaaatacaaatgagaaactcacaagacgcctattcctttgcatgcttttctcatttttaacagcgttaagcattagcatcgtaatgcttaacgcattcgtaactccagttataaatataggcatcagcattattgccgaatggttttatataactgcatttatgtttctaacttggcaaatgcttattgccacttttttcggtctatattacctaggggaccgaattcatatcaatcaatag

SEQ ID NO: 209498 - DNA, 348 bp, Klebsiella oxytoca
atgcgtgatatatacgaagtattagaccgttggggcgcgtgggcttcctctgataaaaacggagtcgactggcaaccaattgcagcgggatttaaaggtctgctgcctcatggaaaaaaatcgcgcctgcagtgcgatgatgatgaagggatcatgattgacgggtgtgtagctcgattgcgcaagtataaacctcaagagcatgagttgattattgctcattttgtcattggcatctcattaagaaccatcgcgaagaagcggaagtgttctgatggtaccatcaggaaggaattgcagactgcaatggggtttatcgatggtgttttatcgattctaaccccatga

SEQ ID NO: 209499 - DNA, 1065 bp, Klebsiella oxytoca
gtgcgagcgttgcttactccggaaattgttccacgtctcggcgttgtgctgtttaagcctgggcgcgagctaatgcatctttttatcggcgggcgcgttctgattgagcgccagcccgataagatgaaatccctgccgaccggacggatccctgatgcgcgccaaccgcttgccgaactggacatattgcgcgtctttttcagtgatgaacgcgtattgaatgctgttggtggtattaacgcgcttgaagcatggctgatccgaagatttaaagaatgccagtaccctcattcggattaccatcatcatgaggttgtaaccatgcgccatccccctggcgcgatggtggtttgttggcattgcgaccggacactggcagaacagactacggttcagctgtcagaactggcttaccggaacgtcgtggattgggtgatcgacattgttctaatcagtctcgggtataacaaggaacgcgagctatcgatggcggagctctgctggtgggcggtgaagtcgggtattggcgaagccgttactgaaacgatggcacagcacgctctaaggcttccaaatgagccgtttctttccgtctataaagaaagcgacattgtcccgtcggtacccgcagtcgatatttttcaggaattggtgaagggggtaggactaccagaaagcggtgttattgacgagttagctgaagaacctctggaataccataagccagtcctgaagctgtctatcgatcccgaaagcccggaatcatttatgctccggcctaagcggcgtcgctgggtcagttctgaatacacccgatgggtaaaaacgcagccatgtgaatgctgtaggcagccggctgacgatccacaccacatcataggccatggcctgggaggaaccgcaactaaagcccatgatctcttcgtgatcccactgtgcagagtgtgccacgacgaattacatgccgatgtaccagcattcgaacagaaatacggtacacagttagaactgtgggtgcgttttctggatcgggtaatgggtattggcgtcattttaaaagcatga

SEQ ID NO: 209500 - DNA, 843 bp, Klebsiella oxytoca
atgactaaccacgtcatgggtgctgctgcatccaataatcactcgttttttgtcatcgatggcgtttccgtccgtcaggatcacgaaggccgctactgtttaaatgatttgcatcgtgctgctttgaccgctggcgcgaatgggcgaaccaaggaaccaggtaaatttcttgtgagctcccagactgctgagcttatccatgagttaaccgttacccaaaacttgggtaacgctcctgtaaacactatccgcggtggccatgagcagggcacatatgtttgtaaagagctggtatacgcctacgcgatgtggatcagcgctgcttttaatctgaaggtcatcaggacatttgacgcgcttcaggctgctggtgcagcaaccgtcaatgccgatcggatacaggctggcgtaatccttcttgagtcagcagccaaaatgctcaatctctccaactcgtcaaagctcggagcatatcagaagcttcagcaggtggccgggttgcctgatttaatgccctcttatgccattgatgcgccagctggcgcgcaagacggttcaagcaggccaacactttctctcagtgctttgcttaaaactaacaacatcagaatgaccgcgaaccaggcttatcaccttatggcaggccacggcatagtcgagcagaaggagcgtcgtagccgaacgggtattaatggcgtgaaaagattctggtctgttacggcaaaaggttgcctgtacgggaaaaacatcaccagtccggcgaatcccagggagacccagccacatttttttgaatcgaaattccctgagctgttgaagttgctcggtattgttactcagtaa

SEQ ID NO: 209501 - DNA, 951 bp, Klebsiella oxytoca
atgagccaggaagtttcagaagtgatgaatgcggaagaacaagccgcagaaaagacaatcagcccttactgcctggctcttgaagaacagcgccagttaagcgcgcattatttgaaagaaatcggggatcaatggcgaacaccggatcctctgttctgggggattaacgcaatgtttggtccgttggttctggatctgttcgctgacgacagcaatgcaaaatgccctgcatggttcacagcagaagataacgcgcttacacaggattggtcgacccaccttgaagaactgggtggtgctgggtttggcaatccaccatatagccgctctcagtaccacgaaaagcaggcgatcaccggtatgacgcacatcatgcagtacgctgcagatcaacgcgagaaaggcggtcgctatgttttcctactcaaagctgcaccgagcgaaacgtggtggccagaagatgccgatcacattgtcttgattcgcggtcgtattggtttcgatctgccttcgtggtttatccctgctgatgataagcaaaagcccaccagcgcatttttcgctggtgccattgttgtgtttgataagtcatggcgaggcgagcgtttcagctatatccaccggtccgatctggaagctaagggtcatgcattcatgaggctggcgcagtttgctgttggcaatattccagcacaagtaacagcgccggcggcggcagtagaaccacctgcagcgcctgtggaattaccggcgacggaatcacgtatctggccattggaagtagggctgttgtttcgacaggttgaaggagccgaagatatggagttgtcccatcaaaacaagctgaaggcacaaattaaccagctctggctggagcgtatgcccaccagtgaaatcatcgctattgctggtggactggttgaaagcatgcagggggtgagccatgcgtga

SEQ ID NO: 209502 - DNA, 462 bp, Klebsiella oxytoca
atgattattgcgaaatcggcattcgagtttatcgagaaaaacccaggggtgatgatgcgggacatcattgcagcattccctcagtgcaaccccatgtctgtgaaaaacgcggtacaccgcctgtattacgagggccgtctggcgagcgcccaaacgtcgagtgtatttcgttatcgtgtcgccggtaaccctgacggaaatgatcaaaatcagccagaggatacctccgaagcaatgcgcaatctggaactggtggcgaggagcctggaaagccggcgctacttccgccgggcggcgacggtctggcagcaactgtgcgattcaaactgcagcgttaaatccagagagcgttatatgcggatgaaaaatcagtgtgtacgcaatgccaaaactgggatgaattccagcggaatttctatgctggcaggtaattactgcggaggtgacctgtgctccgattaa

SEQ ID NO: 209503 - DNA, 180 bp, Klebsiella oxytoca
atgcgagaagttaaccggaagttcaaagaccactacggtaagcccgtcaaggtcatccgctgggagccagaaacgcagcgtgtcatcttcttgcgagaagggtatccccatgagtgctttagcccactcgatcagttcaaacgtaagttcagggaagtagagggcagccatgagcagtaa

SEQ ID NO: 209504 - DNA, 492 bp, Klebsiella oxytoca
atgcttttatctttggcattgatacttccgatggcgtcaaacgcttctgatgcttcagaccaaccaagcagcagtctaaatgatggcgttgaaaccttttcaattgcctgctttggtatgcctcaacagacaactatcgatatggatgcatgcttagtggctcaattgactcaggttgaatgggttaaggacaagtacctggtaacagcccaaaatcgtttaaaacaagacaataaagatgaccctcagcatctacaggaactgaccactgcttttgaggctgaaaataaagcatggactgatttaatcgagagagcttcggcgtcagtgaaagttgattatgccggcggcacgatcgttggttcggaagttacaacacgcaaaattggtctgtatgaattacaagtgcatgatatctgggagcactggttgcgatttgaggattcaacacctccacttttaccagaacccaagttcaaatctgaccaatag

SEQ ID NO: 209505 - DNA, 285 bp, Klebsiella oxytoca; identical to SEQ ID NO: 201727

SEQ ID NO: 209506 - DNA, 237 bp, Klebsiella oxytoca; identical to SEQ ID NO: 96025

SEQ ID NO: 209507 - DNA, 642 bp, Klebsiella oxytoca
atgagcgctttccggccggatggatggacgacgccggaactggcccaagcggtcgagcgcgggcagcttgaactgcactaccagcccgtcgtcgatctgcgcagtggtgggattgtcggcgcggaagccctgttgcgctggcgtcatccgacgcttggactattgccaccgggccagttcctgcccgtggtcgaatcgtccggcctgatgcctgaaatcggcgcttgggtgctgggcgaagcctgccgccagatgcgtgactggcgaatgctggcatggcgaccgttccggctggccgtcaatgtttcggcgagccaagtgggaccggacttcgacgggtgggtaaagggcgtgctggctgatgccgagttgcccgccgagtatctcgaaatcgagctgaccgaatcggtcgcgtttggtgatccggcgatcttccccgccctggacgccttgcggcagatcggtgtgcgcttcgccgccgatgacttcgggacggggtattcctgtctgcaacatctgaagtgctgcccaatcagcacgctcaagatcgaccaatcgtttgtcgccgggctcgccaacgaccgccgcgaccaaaccatcgtgcaggggtcgtttgcgggagggggcggaatcctacgctaa

SEQ ID NO: 209508 - DNA, 390 bp, Klebsiella oxytoca
gtgcacaccgtgattcagcttgcgcacgggctgggcatggatgtggtggctgaaggcgtggaaacatcggcgagtcttgatctattgcgacaagcggactgcgacacaggacaaggcttcctgttcgcgaagccaatgccggcggcggcattcgccgtcttcgtcagtcaatggaggggtgccaccatgaatgcaagtgactcgaccaccaccagttgctgcgtgtgctgcaaggaaatcccgctcgatgccgccttcaccccggaaggcgcggaatacgtcgagcacttctgcgggttggagtgttatcaacgcttcgaagcgcgtgccaagacagggaacgaaaccgatgccgatccgaacgcctgcgactcgctaccgtcagattga

SEQ ID NO: 209509 - DNA, 915 bp, Klebsiella oxytoca; identical to SEQ ID NO: 81402

SEQ ID NO: 209510 - DNA, 246 bp, Klebsiella oxytoca
atgcagccccagcctgccgttcacgatggtctgccaggcatcaatgcgcggacggtcggcgcggtcgtaatacggctggagacgcttgccagtcagcagctccgtgttcgggatcaggaagttcagctccagccgccccttgtcccggtgctcaacccacagcacgctgtactggtctttgtcgagtccgggcatcagaacccgttcaaagctcgccatcagcttttcgcgctgcccgggcggtaa

SEQ ID NO: 209511 - DNA, 294 bp, Klebsiella oxytoca
atgaccagcaaattaaccagagagcagttaattaaaaaggctcaggagcaaattgagttttgccgtcacacaaaggtaacgggtgaaggccgcacccacgtagaccaatgtgcggcgttgtttgaaatcgcgctggccgcaatggacaacaaacagacggacgaattggtcatgtgggttaagcgtttagcccactcactcagaaaggccagccctgacagtaagttgcagaacgatgcaatggactatctgagccgtaaaggattaatcagcgcggaggacgtattgcgatga

SEQ ID NO: 209512 - DNA, 486 bp, Klebsiella oxytoca; identical to SEQ ID NO: 191101

SEQ ID NO: 209513 - DNA, 375 bp, Klebsiella oxytoca
atgagcaatgtttctgacgtaagacttaagaaaacaacggttgatagcctaaaagaatacgtgaatgactttggaatgacggttgatgatgttgttctgaacttaattgaggagaataattcattaagatcgttattaggacaaggcttttctctgcctactgacaataaggacactcattcctttaatgagtacgttattcataagctcccaaaaggaaaaatcttggtaacgaaggatgggcttaaagttagtaacatgaagaaagttttgatcgaggcgggtagcgatttaggtatggatgaatcagagttaaaccctgattttacgacctatgaaatagggcggtttctcttcaaacaccttcatgggtaa

SEQ ID NO: 209514 - DNA, 237 bp, Klebsiella oxytoca; identical to SEQ ID NO: 162285

SEQ ID NO: 209515 - DNA, 1401 bp, Klebsiella oxytoca
atggcaactcaaatcaagagcaataaaacttatcagggcgatgctgccgcacttccttccccgcaggccccgatgccgaaactggccagcctttacctggactttgagaaagagctttatattgccctcggcagaacaacgggtaatgccattcgctcccgccgtctggctgacgtggtaacctttactcgcgcatcagaaactacccgcgttaacaaaagcggcctgatagagtatcttgcgtccggtgaagctgcgatcgaatatgatccgattactggtgagtgcctggggcttcgcgttgctgcaggggtaactaaccttgcggccaacagtgaaaacttttctggcacgacctggacaaaatcgggcgtgtccaccacggccgccaaaacaatcgcacctgatggtaacgtctctgcatcacccttcaatgaaagcactgacagcgctgatactgtgcactttatgcaggaaaattccactccggccgccaccgtgggaagtcctgtcacattcagtatttttgcgaaagcgaataccgcgagtgttatccagctggtcgctcagggtgcagtaacaacgacgcagtttgcaaacttcgatttggtcaacggcttgagaacccgtagctcgtccggcatcctgcagacaagcatgcggaaatataaaaatggctggtaccgtctgagtatcactattacccctgcgggcacagcctccccgcagttcacactggcgcttgtgaatgacgtgacatcagccgctgcgttgccagcctatacaggttcagggaaaggtgtttacatctggggggcgcagattgaaaactgggacggtgttacgccgtacatcccgacagctggcgcaactatgacccggcctgatgaggtctgcaccgtgcgtaccgaccttgattttatggctgctgaccgcggggcaatttttgctgattacaatatgcccgccagcctgcaggcgatgagtggtgtctataacgccgggcaggcaattgtctgtcttgataatgacagtgtcgctgaatatgtcagttttctgaaccgccgcatcagtaacagtatcaccaaccagaacctggcggccgccgcgaaaattgtcggcagttctgaagttacggttgaagtaaaacgtctcggccaggtacgaaacggccatcagtcctttatcagttcatttatcaacggcgatatgcgtgtatttgacggcattaacagatacagcggaacgccattggtatcaacacaactgaaccggctgatgatcgggcgagcgagaacgacaccctcagcggtttccaatacatatctcaaacgcctggtgtattacccggtcacgttagtggaagctgaattagtatctcagtttaattcactctcctag

SEQ ID NO: 209516 - DNA, 696 bp, Klebsiella oxytoca
gtgtggatggggtgtgaagaggactttgacctgcaggagatgcagggagaagaatgctatggcggcctggacctttcaggaactcgtgaccttacgtctctggcgctctttttccctaaaaaaagaaagctgctggtggagttctggacaccaaaagatactttgctggatagagcgaaaacagaccgcgtaccttatgacgcatgggaacggggaggccatattcatactacgcccggaaaggcggtgaaatatggctttgttgctgaacgcattgctgatctttccatgttgttcgatataaaggcgatcgccttcgaccagtaccgcatcaaatatcttgaaccggaactggagagtgcttctgtgtcggtaccgcttattcctcacggacagggatattacaaggcgcaggattctggactgtggatgcctcattccatcgaactttttgaacagatgctggatgatggcgtaatcattattaaaacaaacccctgcctccgatggaacgctgcttccgccgtaaccgaagccgaccaaaaagaaaaccgcatattcgccaagaaaaagagtactggtcgaatagatggtgtggttgcgtcagcgatggcaattggtgctgcagaaggttatgagcctgatgatggcgatattgagggcttttttgacgatccgatcatagtgggtatctga

SEQ ID NO: 209517 - DNA, 327 bp, Klebsiella oxytoca
gtgtttagtattaccgttgatgtggttgcccttcagaatgcctcggttaccggggtttcccgcgccgtttgttcccggagaacctttaaacccatattcattgaaacgcaggttattaccgatcgcgatgaggccatctataccgcagtcggccatccccgcatggttgtactcacacacattcccgatagcaatagtgtcgcgagccacaccgacgccacgttgtggctcgaaaaatataccgtaatttttattgcccttattcacggtctgaccgatataaatcggttcactggcaaggtacccggttcccagaccaatgcctga

SEQ ID NO: 209518 - DNA, 267 bp, Klebsiella oxytoca
atggataaccggctctggaacaatggacgtacagaagtgggggatgccatcgctggcgcagcggatatggtgaaatgcgggattaccggcaataaaatccgcgacacgcaggacactgcaactcagcgatacccggttaatctctccggagcactgacagataccgatatctcattcaaccattgtgttggaaatgcccagaacaccttaaatcttaccggcacacaaacccgagttaccacgatcaacaacccagggattgcataa

SEQ ID NO: 209519 - DNA, 339 bp, Klebsiella oxytoca
atgcaggcaggacgattacggcacagggtcaccattcagaacttcacaacctccagaacgccttccggccagccggttgaaaagtgggaagatgggaaaaccatctgggccgaggttaaggggataagcggtcgtgagctgttagccgctggcgtagagcatgctgatgcgacaatccgggcctgggtgcgttttcgcagggatatttcagccacatcccgattgaaggtacggaccggcccgtttaaaggcgcagttcttaacgttaccgggcctccggttccggatatcaaaggtacccggctggaaattctctgcaaacaggggatcgaaaaatga

SEQ ID NO: 209520 - DNA, 267 bp, Klebsiella oxytoca; identical to SEQ ID NO: 209518

SEQ ID NO: 209521 - DNA, 660 bp, Klebsiella oxytoca
gtgttgacggattttgtcgacggcctgttgttagaagttcacgacagttggcataacgggttttgtgatggggttgaccaggagcatgtgtgggaggcattaaaaatccgtgctgggcgggtggcaaagagctgtctcgataactggcgcaacgtgctaacggcgttccgtgacggggccatcagcgggatcattagtaacttgatgacaacgctgataaatactttcttcaccaccgcacgcagcctggtgcgaatgatccgtgaaggggttttttcgttgttccgcgcagccaaaaccgtactgatgcgaccagagggtacaagccgtgctgaagcactagatgcagggctgaagattgccgtcagcggcgcattcgtcattggtggcgtactgcttgaagagcacctcagcaaaactctcggtgcgctgcttaccgttctgcccggtgggctgatcactaccctggtggctgtgttgacggggtgcgtcaccggccttggtaccgtattaacggtttatatgctcgatcgattagatctgtttggtgcgcagcaccagcaggaagacaatgcagtactaacgatgttacaggacggcagggcgcaggccgatgcgcgtttgcaggctctgttgggatcggacccgaaacctgtctaa

SEQ ID NO: 209522 - DNA, 660 bp, Klebsiella oxytoca
gtgttgacggattttgtcgacggcctgttgttggaagttcacgacagttggcataacgggttttgtgatggggtggaccaggagcatgtttgggaggcattaaaaatccgtgcggggcgggtggcaaagagctgtctcgataactggcgcaacgtgctaacagcttttcgtgacggggccattagcggaatcattagtaacttgatgacaacgctgatcaacaccttcttcacaactgcccgcaacctggtgcgaatgatccgcgaaggcgttttttcgctgttccgcgcgtgcaaaaccgtattgatgcgaccagagggtacaagccgtgccgaagccctggatgcagggctaaagattgccgtcagcggcgcattcgtcattggtggcgtactgcttgaagagtacctcagcaaaactctcggtgcgctgtttaccgttctgcccggtgggctgatcactaccctggtggcagtgctgacggggtgcgttaccggccttggtaccgtatttacggtctatatgctcgatcgattagatttgtttggtgcgcagcaccagcaggaagacaatgcagtactaacaatgttacaggacggtaggacgcaggccgatgctcgcttgcaggcgctgttaggatcggaccctgaaccagcctaa

SEQ ID NO: 209523 - DNA, 267 bp, Klebsiella oxytoca; identical to SEQ ID NO: 209518

SEQ ID NO: 209524 - DNA, 162 bp, Klebsiella oxytoca
atgctcaccgccgttgagcttcagtactttggcaaaaaagtcgatagcacgctgcgccgctgcaacatcccaaaccaacccgcgagcatggcaggattccaaatctttgagatgtcgtttacaggagtttctgatatcaggcccggcgatttcttttcctga

SEQ ID NO: 209525 - DNA, 690 bp, Klebsiella oxytoca
atggtcaatctggggggcttcagtatcaatctcggcaagaccggcatggggaccgcgagaaaggacgacaagcaggtgaacggcgccttctatcacgttcactggtacaagtacccgctgacgtactggctgaacatcatcacctctgcaggctgtctggaaggcggagacatggatatagcctatctgtccgagatagacccgacctgggtggacagcagcctcaccaccatcctgaatccggaagccatcctgtttgccaaccccatcgcgcagggcgcctgcgcagcggatgcgctggccagtgcattccatatgccactggatgtgctcttctggtgtggtggaagtcacggctcactttacccatttaacggccaggtcagtaatgagtccagcccgctgcagtcgtcggtactggtcagtgagcgtatggccttcaagctccaccggcagggacaaattatggagagtatcgggaaggacaaggcagtctgttacgaatatccctccccgatcatcccgaaagagcgctggcgctatcagatggtgaacatgtatccggacagtggtcagtgccatccgcttggacgcagcgtgatgcgctgggaggccggcaaaaatccacccaacacccgcaagaactacggctatctgatgtggcgtaaacgcaattgtgtctttctctga

SEQ ID NO: 209526 - DNA, 690 bp, Klebsiella oxytoca
atggtcaatctggggggcttcagtatcaatctcggcaagaccggtatggggaccgcgagaaaggacgacaagcaggtgaacggcgctttttatcacgttcactggtacaagtacccgctgacctactggctgaacatcatcacctccgcaggctgtctggaaggcggagacatggatatagcctatctgtccgagattgacccgacctgggtggacagcagcctcaccaccattctgaatccggaagccatcctgtttgccaaccccatcgcacagggggcgtgcgcggctgacgctatggccagcgcgtttcatatgccactcgatattctgttctggtgtgccggctctcagggttcgatgtacccgtttagcggctgggtaagcaacgagtccagtccgctgcagtcctcgttacttgtcagcgagcgcatggcgtacaagcttcaccggcagggacaaattatggagagcatcgggaaggacaaggcggtctgctatgagtatccgtccccgatcatccccaaagagcgctggcgctatcagatggtgaacatgtacccggacagcggccaatgccatcccgtggggcgcagcgtgatgcgctgggaggccggtaaaaatccacccaacacccgtaagaactatggctatctgatgtggcgtaaacgcaattgtgtctttctctga

SEQ ID NO: 209527 - DNA, 450 bp, Klebsiella oxytoca
atggctaaatacatggtcagcgaaaacgaaattcgccgacctgatacaccgcttggccgggctaaaaaaatgtcagacgcgctcgaccgcggactcgatgaggacgacattgcggtgttgtttggctgcagcgttcagaccgttcgtgcaacgctctccctcctcgatgccacccaggccgtcagggaagctgtggaggctggcacagtgaccgttacccaggcacgtcagttggcatcgcttcccccggaagagcagcgggaaaaagtaaaagagattgaatctgcaaccgttggaactaccggccatgaaaaagccaggcgccagcgcgccgtgcttggcgaaactaagccacgtctcaaatcacgcaaagaaatcacaaaagcccttgaaggtgccagcggtgaatacgctgatgctctgcgctgggtgctcggggaggctgtatga

SEQ ID NO: 209528 - DNA, 267 bp, Klebsiella oxytoca; identical to SEQ ID NO: 209518

SEQ ID NO: 209529 - DNA, 1419 bp, Klebsiella pneumoniae
atgaaaatcaaaactcgcttcgcgccaagcccaaccggctatctgcacgttggcggtgcgcgtactgctctctattcctggctttttgcccgtaaccacggcggtgagtttgtgctgcgtattgaagacaccgatctcgaacgctccaccccggaagcaattgaagccatcatggatggcatgaactggctgaatctgcaatgggacgaaggcccctatttccagaccaaacgtttcgatcgttataacaacgtaatcgatgagatgctggaagccggtaccgcttacaaatgctattgctcgaaagaacgtctggaagcgctgcgcgaagagcagatggcgaagggtgagaagccgcgttacgatggccgctgccgccatagccacgagcaccatgctgacgatgagccgtgcgtcgtgcgtttcgccaacccgcaggaaggttcggttatttttgacgatcagatccgcggacctatcgagttcagcaaccaggaactggacgatctgatcattcgccgtaccgatggttccccgacctataacttctgcgtggtggtagatgactgggatatggcgatcactcacgtgatccgcggcgaagatcatatcaacaacacgccgcgccagatcaacatcctcaaagcgctgaatgcgccggtgcctgtttatgcgcacgtgtcgatgatcaacggcgatgacggtaaaaaactttccaagcgccacggcgcagtgagcgtgatgcagtatcgcgacgacggctacctgccggaagcgctactcaactatctggtgcgcctgggctggtctcatggcgatcaggagattttcactcgcgaagagatgattgagttcttctcgctgggcgcggtgagcaaatccgccagtgcctttaacaccgataaactgctgtggttaaaccatcactatatcaataccctgccggcggagtatgtggcaacgcatctgcagtggcatatcgagcaggaaaatatcgacactcgcaacggcccgcagctggctgagctggtgaaactgctgggcgagcgttgcaagacgctgaaagagatggcccagagctgccgctacttctatgaagagttcgctgaattcgatgccgacgccgcgaaaaaacatctgcgtccagtggcgcgtcagccgctggaagtggttcgcgataagctggcggcgattagcgactggacggcggaaaacgtccatcacgcgattcaggcaactgctgatgagctggaggtggggatgggtaaagtcggtatgccgctgcgcgtggcggttaccggggcagggcaatctcctgcgctagacgttactgtccatgctatcggtaaatcccgtagcgtagatcgtatcaataaagcgctggcttttatcgctgaacgcgaaggcccggcgtcctga

SEQ ID NO: 209530 - DNA, 393 bp, Klebsiella pneumoniae
atgatgaaactgaaagataaaatgacgcccgcagagcttgccgactgcctggggctggccagacaaacgatcaatcgctgggttcgcgagaaacaatggcgcaccgaagcaatacccggcgttaaaggggggcgagcgcgactggtggttatcgaccaaccggtacgcgagtttctgaccaacatccctgccagacgccatctgcttaccgacaatcatctcgcggaatcgccaggtgcatacctggtcaatgaggcagacgcgatctggcggcaaatcacggaaaccctacagctgatgactccggcagaacagctgcagctccgcgatctgctggcccgggaagggattagcggttttcttgcccgcctcggcatcgccagtccggaataa

SEQ ID NO: 209531 - DNA, 354 bp, Klebsiella pneumoniae
atgctcaaggaacgaatgacacctgaagaaattgcccatctaaccggctacagtcggcaaactatcaataagtgggtgcggaaagaaggctggcaaacctctccgcgacctggcgtccagggcggcaaagcgcgcctggtccatgtcaatgagcaagtcagggagtttatccgcagcgcccagcgggtggcggagacgcccggcatctattctccccatgatagcgatctggaatcgctgctgctgaccctcagtaaagaactcacccccagcgagcagaagcagcttatgtctttgttgctgcgcgaggggatcaccgggttactgcttcggttagggatccgcgatcggtaa

SEQ ID NO: 209532 - DNA, 843 bp, Klebsiella pneumoniae
atgcttgataaaattaacattaatatcaaaaaaactctattggcctttatcatttgtttagtcgctattccgctggctcgttttatttcaccgcaaacgataattgacggcaaccttatttatattgcctggctgccaatcagcgtgatgttttctgttatttttatctttggccgctatgcaattgcgccattaattctcgcgtttgccatcaccaatagttttctcattaaattaacgctgccgcaggcgtttatcttacttttttgtcaactgttcgccgtgtttgtctcctgcgctattctgcgactgttggtggggaagcgctggcgctgcggtccaacggcaaaacatatgggggcgcggatcttctggggcggcttcttcgcgccggtgctcctgaaaatcaccatgtatctcgccggacaatattttgcgtttccattagctattaccagttactttggtagtatgccgttgatttatactgtaatagatatccaaagtttaatcagtgcggcattaatttttacgacgtttctttattatccaatgcggatgattatcagtccgcgctacgcccgacgtttctggcagcaggaatgtttaccgtggctggcaccgcaatatcgctcctttaccctatattggtttatcgcgttggcggtgatattaacgctattgtgtgcgccgtatcagtctgaatttattgccggttatttagttccggttatttttattgtctactttatcggtatcagtcgaataggccatgcgctattgcgtatttcatggtctgtctcggcctttttgctggtggtatataacaaaaactttctctag

SEQ ID NO: 209533 - DNA, 1326 bp, Klebsiella pneumoniae
gtgcaaagcgagtattcactctcctttgtgctgtcggttctgatctcctttactatctgtttgttttatatggccgacatctatgcccgcagcgaccgcaacaaacgccgctggcgtagccaggcggaagaggatccgctgaccggcttgcctaacctgcgcgcgctggagagccatttacagagctgtcctcagcaggctatctgcagcctgcgtattgataatctcgactttctcagtcggcattatggtctgatgatgggggtggactgtaaacggcagattattcgggcgctgcaaccgctgctgggagcggcggataaagtcttccaggtaccgggcagcgaactgatcctcgtgcttgatggaccggagccgtcgtcccgcttgaaccatatggtcgcggtcctcaaccacaaaaagttcagctggcacaatcagccgctggatttggagtttggcgcggcctggggccgcgatgacggtcagggtgagggactttaccagatgctgggccagctaagctggctttccgaacaggcgggcagtgaacgtcgggtgctggcgctggacgaggagcaggatctggtggtggatcaaactaccgagcaggtgcgcctccttatgcgcgtcaagcaagtgctcaaagatcgcgcgctgatgctctatgcgcaaccgattcagaatccggagggggagggttatcatgagatcctcacgcgcatgcgctgtggcgatagcgtcattatgcccgaccgattcattccgctgattgtgcagtttaacctcagccaacgttttgacatgctggtgctggagaccttgttcagtatgctccataagcatcccggccagcgattctcggtcaacctgctgcctgcaactctgatgcaaaagaacagcgcagggcagattatcgcgctgtttcaacgctatagcgtctcgccagaacttataactattgaggtgaccgaagagcaggccttctctaatgcggacaccagtcggcaaaatcttgaagcgttgcgcgcgtttggctgcgccatcgctattgatgactttggcaccggctatgcgaactatgaacgtctgaaacatctacaggccgatatcattaagattgacggctgcttcgtccgcgacatcctcacggacccgctggacgccatcatggtgaaatcgattgtcgagatggcgcgggcgaaacagatgagcgtggtggcggaatatgtcgaaagcgaaccgcaaaaagcgcgcttgctggagctgggcgtgaattatctgcagggttatctgatcggtaaaccacagccgctgggtgaatga

SEQ ID NO: 209534 - DNA, 1203 bp, Klebsiella pneumoniae
atggaccgcgtcttgcattttgtcctcgcgatcgttgtggtggctatactggccctgttggtcagccatgaccgccaaaagatccgtattcgttatgttgttcaactgcttgtcattgaagtcctgctggcctggttcttcctcaactccgatattggtctgggttttgtgaaaggattttccgagatgtttgaaaaactcctcgggtttgccaacgaagggacaaacttcgtgttcggcggcatgaacgataaaggcctggccttcttcttcctcaaagttttgtgccctatcgtcttcatttcggctttgatcggcattttgcagcatattcgtatcctgccgattgtcattcgcgcgatcggtaccgtcctgtcgaaagttaacggcatgggcaagctggagtccttcaacgccgtgagctcgttgatcctcggccagtcggaaaactttatcgcgtataaagatattctcggcaaaatgtcgcgcaaccgcatgtacaccatggcggcgacggcgatgtccaccgtgtccatgtccatcgtaggcgcttacatgaccatgctgcagccaaagtatgtcgttgcggcgctggtgctcaacatgttcagcacctttatcgttctgtcattaattaacccttaccgcgtggaagagagcgaagaaaatctgcagatgtcgaatctgcacgaaggtcagagcttcttcgagatgctgggcgagtatattctggcaggttttaaagtcgcgattatcgtggcggcgatgttgatcggcttcatcgcgctgatctcggcgctgaatgccctgttcgccaccgtgaccggttggttcggctatagcatttccttccagggtatcctcggctatatcttctacccggtcgcctgggtgatgggtgtgccggcaagcgaagcgctgcaggtgggcagtattatggctaccaaactggtctccaatgaattcgtcgccatgatggatctgcagaaaattgcctcgacgctctccccgcgcgcggaaggcattatctctatcttcctggtctccttcgccaatttctcatctatcggtattattgccggggcgatcaaaggtctgaacgaagaacagggcaacgtagtttctcgcttcggtctgaagctggtgtacggctccacgctggttagcgtgttgtccgcctcgattgcggcgctggttctgtaa

SEQ ID NO: 209535 - DNA, 1242 bp, Klebsiella pneumoniae
atgactagcagtcgcgttgagaatagcagtagtcgcgccgcgcgcaaggtgaagctcgccttaatgggcccggctttcgtcgctgccattggctatatcgatccgggtaatttcgccactaacattcaggccggcgccagctttggctaccagctgctgtgggtcgtggtgtgggctaacctgatggcgatgctgatccaggtgctttctgccaaactgggcattgccaccggcaaaaacctggccgagcagatccgcgaccattacccgcgtcctgttgtctggttttactgggtacaggcggaaattatcgctatggccaccgatctggctgaatttatcggcgccgcaattggctttaagctggtgctcggcgtgtcgcttctgcagggggcggtgctgaccggggtggcgacttttctgatcctgatgctgcagcggcgcgggcaaaaaccactggagaaggtgatcggtggattgttgctgtttgtcgccgtggcctatgtcgtggagttgatcttttcccagcccgcgctggctcctctgacgaaagggctggtgatccccacgctgcccaacggggaggcggtattcttagccgccggggtactgggggcgacaatcatgccgcacgtcatttacttacactcatcgctgactcagcatctgcatggcggaacgcgaaaagaacgctataacgcgacccgctgggatgtggcgatcgccatgaccattgccgggttcgtcaatctggcgatgatggcgaccgctgcggcggcattccactttaatggccataccggcgtcgccgatctcgatcaggcctacatgacgctggagccgctgctgagccacgcggcggcgaccatctttggcctcagcctgattgccgccggtttatcgtcgaccgtggtgggcactttggcaggtcaggtcgttatgcaggggtttatccgctttcatattccgctgtggtttcgccgggcgatcaccatgctgccgtcgtttgtcgtcattctgctggggctggatcctacgcgcatcctggtaatgagtcaggtgttgctcagctttggcattgcgcttgccctggtgccgctgctgatatttaccagcaatgcgaagctgatgggggacctggtgaatacccgttgggtgagaggcatcggctgggcgatagtcgctattgtggtgagcctgaacggctggttaatagtggggtcgctgctcggggtggattaa

SEQ ID NO: 209536 - DNA, 360 bp, Klebsiella pneumoniae; identical to SEQ ID NO: 137255

SEQ ID NO: 209537 - DNA, 993 bp, Klebsiella pneumoniae
atggtttaccaggcaagcaccacgcgatatcaaacgatggagtaccgtcgctgcggccgcagcggtctgcagctaccggctatttcccttggcctgtggcataactttggcgatgaaacgcgagtggaaaccagccggcagatgctcctgcacgcttttgacctcggtataacccatttcgatttggccaacaactatgggccgccgccgggctcggcggaaagcaactttggccgcatcctgaaagagtcgctcctgccttatcgcgatgagttaatcatctccactaaagcaggctacacgatgtgggacggcccttacggcgactggggatcgcgaaaatatctggtagccagtcttaaccagagccttaaacgcatggggctggaatacgtcgatattttttaccatcaccggcctgatccacagacgccgctgatggaaacgatgcgtgcgctcgatcatctggttcatcagggtaaagcgctatatgtcgggatctccaactatcctctggcccaggcgcgggaggcggtgaagatccttaacgacctcggcaccccctgcatcattcaccagcctcgctactcgatgttcgaacgcggcgtggaagaaggactgctggattttctgcagacggaagggattggaagcatagcgttttcaccgctggccggcgggcaacttaccgaccgctatctcaacggcattccggccgactcgcgcgccgccagcagcagtcgttttctgcagccggaacaactgactcctgcccgattagaaaaaattcgtcagcttaacaggcaggcggaagcgcgtgggcagaagctgtcgcagatggcgctggcctgggtgttgcgcgaagagaaagtcacctcggtgctgatcggcgccagcaaaaccgcgcaactggatgatgccgtcggcatgctgcagaatcgccatttcaccaccgaggagtgcgcggccatcgacgccatccttgcgctgtaa

SEQ ID NO: 209538 - DNA, 1662 bp, Klebsiella pneumoniae
atgcaaccgacctacactattggggattatctgctggatcgccttgtcgactgcggtattgaccgcttgttcggcgtgccgggagattacaacttacagtttctcgatcgcgtcatcgcgcacagcgccttggggtgggtcggctgcgccaacgagctgaatgcggcatatgccgctgacggctatgcgcgcatcaaaggggccggtgcgctgctgaccacctacggcgtcggcgaattgagcgcgctgaacggcattgcgggtagctatgcggaacatattccggtattgcatattgtcggtgcgccctctaccggcgcccagcagcgcggcgaactgctgcaccataccctcggcgatggcgattttcgccatttcgcccgcatgagcgagcagatcacctgtagccaggcgctgctgaccgccggcaacgcctgccatgaaatcgaccgtgtgctgcgcgatatgttgacgcatcatcgccccggctatttgatgctgccagccgatgtcgccagagcggcagcgattgccccagcccagcgcttgctggtggagcccgctccggcggatgaaaaccagcttgccgggttctgcgaacatgccagccgcctgctgcggggcagccgacgcatttccctgctggcggacttcctggcgcaacgttatggcctgcagaagacgctccgggagtgggtggcgaaaacgcctgtcgcccatgcgacgatgctcatgggcaagggattgttcgatgagcagcagagcgggtttgtcggcacctacagcgggattgccagcgcgccgcagacccgggaggcgattgaaaacgccgacaccatcatctgcattggcacgcgcttcaccgacaccatcaccgcaggatttacccaacatctggcgcgggaaaagactattgagatccagcccttcgccgtcagggtgggcgatcactggttcagcggggtgccgatggataaggctttggccgcgctgatgacgctttccgccccgctggcggcggagtgggctacgcctcaggtcgtggcgccggaggctgaggagggcgctgaaggcgagttgacccagaaaaatttctgggcgacggtgcagggcgccctgcgtccgggggatattattctcgccgatcaggggacggccgcctttggcattgcggcgctgaagctgccctctgaagcatcgctgatcgtccagccgctgtggggctcgattggttttactctcccggccgcctatggcgcacaaaccgcggcggcggagcggcgggtggtgctaattgtcggcgatggcgcggcccaactgaccattcaggagatgggctccatgctgcgtgataagcaaaagccgcttattctgctgctgaataacgaagggtataccgtggaacgggcgattcatggtccagagcagcgctacaatgacatcgctctgtgggactggcagcggctgccggaagccttcgcccctgacgttgcttcgcgctgccggcgggtcactcagacgtctgaactgcgggaggcgatgacggagagcatcacctccgataccctcaccctggtagaagtgatgctgccgaaaatggatatccccgatttcctgcgcgcggtgacgcaggcccttgaggagcgaaacagccgcgtttaa

SEQ ID NO: 209539 - DNA, 1236 bp, Klebsiella pneumoniae
atgctccatcctcgcgccagaacaatgctgatcctgtcggtgccggccatcctgataggcatcgcctgcagcctgatcctgatcgtggcgatgaaggttgccgcgctgctgcagcgcgtgctgtggagcaatctgcccgcgcagttgggggtgagcgccgacagcccgctgtggatcatcgccatgctgacggcgacaggcatcgcggtgggtctggtcattcgttacagccccgggcacgccgggccggatccagcgaccgagtcgttaatcggcgctcccattgccaccggcgcgctgcccggactcctggccgcgctgatcctcggcctcgccggcggcgtcagcctcggcccggagcatccgattatggtggtgaatatcgcgctggctgtcgctgtcggctcccgactgtttccgcgcgtcagctcgctggactggaccatcctcgcggcctcaggcaccatcggcgccctcttcggtaccccggttgccgccgcgctgattttttcgcaaaccctcaatagcagcaacgatacgccactgtgggatcgcctctttgctcccctcctcgccgccgccgccggcgcgttgacgacgggtctgtttttccatccccatttttcgctgccgatcccgcactatggtcagatgcgcttcgttgatattctcagcggcattatcgtcgccctgatcgctatcgccgtcggcatggtggccgtctggtgtctgccgcgactgcatgccctgatgcatcggttgaaaaatccaatcctgaccctcggtatcggcgggctgctgctggggatcgtggggacgataggcgggcccttaacgctctttaaagggctggatgagatgcagcagctggccttcagccagacgctaaccgccgcggattttctgcttatcgcgctggtcaaactggcggccctggttcttgcctcagccagcggctttcgcggcgggcgaattttcccggcggtgttcgtcggggtagcgctggggctgatgctgcatgctcatgttgacgcagtgccggcggcaatcaccgtttcctgcgcgatcctcggcatggtgctggtcgtcactcgcgacggctggttgagcctgtttatggccgccgtggtggtcccggatacgactttgctgccgctgttgtgtatggtgatgctcccggcctggctgctgctggccgggagaccgttgatgattgccaaacggcataccgattaa

SEQ ID NO: 209540 - DNA, 966 bp, Klebsiella pneumoniae
atgacaaaatttgctttagtaggagatgtcggggggaccaacgcccgcctggcgctatgtgatctggcgagtggagagatctctcgcgcaaagacctattccgggctcgattaccccagtctggaggcagtggtgcgcgtctacctcgaggagcaccaggtaacggtcaacgaaggttgtatcgccatcgcatgcccgattaccggcgactgggtggcgatgaccaaccatacctgggctttctctatcgccgaaatgaagcgcaacctcggctttgcccatctggagataattaacgattttaccgctgtttcaatggccattccgatgctgaaagctgagcaccttattcagtttggcggcagtgcgccggtagcgggcaaaccgatcgccgtttatggcgccgggaccgggctcggcgtggcgcatctggtccacgttgataagcgttgggtcagcctgccgggcgaaggcggtcatgttgattttgccccgaacagcgaagaagaagggatcattctggaagagctacgcgccgagctggggcatgtttccgcagaacgcgtgctctcaggtcccgggctggtcaacctgtatcgcgcgattgtcaaatcggacggccgactgccggagaacctgcagccgcgtgaggtgaccgagcgagcgctggcggacagctgcaccgactgtcgtcgggcgctgtcgctgttctgcgtcattatgggacgcttcggcggtaacctggcgctgaccctcgggacgtttggcggggtgtatatcgccggcggcatcgtgccgcgcttcctggagttctttaaagcctctggtttccgcggcggttttgaagacaaaggccgttttaaagcttatgttcaggatatcccggtttacctgattgtgcatgataacccaggcctgctgggctccggtgcgcatctgcgtcagacgctgggccaggtgctttaa

SEQ ID NO: 209541 - DNA, 738 bp, Klebsiella pneumoniae
atgaaagttatcattgtggaggatgagtttctggcccagcaggagctctcctggcttattaacacccatagccagatggagatcgtcggcagctttgacgacggcctggacgtgctgaaatttctccagcacaacaaggtcgacgccatctttctcgatatcaatattccgtcgctcgacggggttctgctggcgcaaaacatcagccagtttgcccataaaccttttatcgtctttatcaccgcgtggaaagaacatgcggtggaagcctttgagctggaagcctttgactacatcctgaaaccttaccaggagtcgcgcatcatcaatatgctgcaaaagctgaccaccgcctggcagcagcaaaataacgctgcttcaggattagccagcgcagcgccacgggaaaacgacaccatcaatctgatcaaagatgagcggatcatcgtcaccagtattcatgatatttattatgccgaggcacatgaaaagatgacattcgtctatacccgccgggagtcattcgtcatgccgatgaacattactgaattctgcagcaaactgcccaccgcgcatttcttccgctgccaccgctcgtattgcgtaaatctcagcaaaattcgggaaattgagccgtggttcaacaacacctatgtgctgcgcctgcgtgacctggagtttcaggttccggtcagtcgcagtaaagtgaaagagtttcgccagctgatgaatctgtag

SEQ ID NO: 209542 - DNA, 1698 bp, Klebsiella pneumoniae
atgcacgaaatctttactatgatgctggcggtctatgatcgtgcggccctgatgcttatttgcctctttttccttattcgcctgcgcctgttccgcgaactgttgcataagtcggcccatactccgaaagagctgctggcggtgacagccattttctcgctgttcgcgctatttagtacctggtccggcgtcccggttgaggggtccctggtgaacgtccgcattatcgccgtgatgtccggtgggatcctgtttggtccctgggtgggcgcgattgtcggggcgattgccggcgtgcaccgctatttgattgatatcgacggcgtgaccgcggtgccctgctttatcaccagcattgtcgccggcctgctgtcggggttgattaatcgtaaagtggcccgcgaacaacggtggaaaatcggcattctggcggggatgatgtgtgaaactctgaccatgatcctggtggtggtctgggcgccttccctgagtctcggcgtagatattgtttcgaaaattggtatcccgatgatcctcggcagcgtctgcatcggctttatcgtgctgctggtgcagagcgttgaaggggaaaaggaggccagcgcggcgcggcaggcgaaactggcgctcgatatcgccaacaaaaccctgccgctgtttcgacacgttaacagcgattctctgcgccaggtttgcgagattatccgccgcgacattaccgccgacgcggtggcgatcaccaataccgagcacgtgctggcctacgtgggcgtcggtgaagccaactatcaacgccacgacgatatgattagccccaccacccggcaggcgattcgttatgggaaaatcatcataaaaaacaatgacgaagcccaccgtaccccggagatccactccttgatggtgatcccgctgtgggaaaaaggggtggtgaccggcacgctaaaaatctattactgccacgcccatcgcatcacttcgacgctgcaggagatggcgattggcctgtcgcaaataatctccacccagctggaagtctcccgcgccgaacagttgcgggagatggccaacaaagcggagctgcgcgccctgcaaagcaaaattaacccgcattttttatttaatgcgctgaacgcgatctcctcctcgattcgccttaatccggacaccgcgcgccagctcatttttaatctgtcgcgctacctgcgctataacatcgaattaaaagacgatgagcagattgatatcaaacgagagctgtatcagatcaaagattatatcgctattgaacaggcgcgattcggcgacaagctgacggtcatctacgatattgacgacgacgtcagctgcgtgatcccgagcctgcttatccagccgctggtggaaaatgccatcgttcacggtattcaaccctgtaaaggcaaaggcgtggtgacgatcggcattaacgagtgcggcaatcgggtacgcatcagcgttcgcgatacgggcaacggtatcgatcccgccgtggtcgcccgcgtggaagccgatgagatgccgggtaacaaaatcggcctgctcaatgtgcatcatcgggtgaaacttctctacggcgagggtttgcatatccgcaatctgacgccgggaaccgaaatcgccttttatgtccccaataactctacgccgcaggcgctgacggagtcgctgttgtcatga

SEQ ID NO: 209543 - DNA, 1215 bp, Klebsiella pneumoniae
atggctgaatccagtcctgaacgccgttttacgcgtatcgatcgtctccctccgtacgtttttaacattactgctgaactgaaaatggctgcgcgtcggcgcggcgaagatattatcgatttcagtatgggtaatcccgatggcgcgacgccgccgcatatcgtggaaaaactctgcaccgttgctcaacggcctgacacccatggttactctacctcgcgggggatcccgcgcctgcgtcgcgccatttcacgctggtatgaagaacgctataacgtcgatatcgatccggaatcggaggcgatcgtcaccattggttcgaaagaggggctggcgcacctgatgctggcgacgctggatcatggcgacaccgtactggtgccgaaccccagctatccgattcatatctatggcgcggtgattgccggggcgcaggtgcgctcagtgccgctggtggaaggggtggatttctttaacgagctggaacgcgccatccgcgagagctatccgaagccgaagatgatgatccttggctttccctcaaatccgaccgcgcagtgcgtcgaactggatttctttgaaaaggttgtcgctctggcgaagcagtatgacattctggtcgtccacgatctggcctatgccgatatcgtgtatgacggctggaaagcgccctccatcatgcaggtgcccggcgcgcgagatgtcgccgtcgagttctttaccctgtcgaaaagctataacatggccggctggcgcattggctttatggtgggtaataagactttggtgaatgccctcgctcgtatcaaaagctatcatgactacgggacttttactccgctgcaggtggcggcgatagctgcgctggagggcgatcagcagtgcgtgcgcgatattgccgaacagtataagcgccgtcgcgatgtgctggtcaaagggcttcatgaggccggctggatggtggagtgtccgaaagcgtctatgtacgtgtgggcgaaaataccggaaccttacgccgccatggggtcgctggagtttgcgaaaaagctgcttaatgaagcgaaggtttgcgtctcgccggggattggctttggcgactatggtgatacccacgtccgcttcgcgctgatcgagaaccgggaccgtacgcgccaggcgatccgcggtatcaaggcgatgttccgcgcggatggtctgctggcctccgcgagctag

SEQ ID NO: 209544 - DNA, 1197 bp, Klebsiella pneumoniae
atgacaccagcgctgcgacagaacctgacgctggcagtcctggtactgactgggatcaatatgcggccgctgcttacctccattggtcctttgctgccggacatccgcgcagccagcggcatgagctataccctggccgcactcctgaccgcgctgccggtgatcgcgatgggggtgctggcgctggccgctggctgggtcgatcgctatatcggtcaaaagcgcagtattgcgctgagcctgctgattatcgcggcaggcgccctgctgcgggaaatcgccccgaatagtggcttactgctcaccagcgctctggccggaggaattggcatcggcattattcaggccgccatcccggcggtaattaagcacctctttccccgacggacgccgctggtgatgggactatggtcagcggcgctgatgggcggcggcgggttaggcgccgcgttcaccccatggctggcgtcacatagcgcggcctggcatgatgcgctagcctggtgggcgctccctgcgctcctggctctgctcagctggctggcgatttgtcggcatttgcctcgcgcaccgcatcagaccagcgcttcctcccgggtcgcgattattggccagcgccgcgcctggacgctgggactctatttcggactgatcaatgccggttacgccagcctgatcgcctggctgcctccttactacatccagctaggcgacagcgcccagtacagcggttcgctgctggcgctgctgaccgtcgggcaaaccgccggcgcgctgctgctcccggcgctggctcgccaggaggatcggcgccagcttcttctgctagcgctggcgctacagctgattggcttctgcggctttatctggctgccagagcatttctctgcgctctgggccattgcctgcggcgtgggattgggcggcgcgtttcctctgtgcctggtgctggcgctggatcacgccggacaaccggcggtggccggcaggctggtagcctttatgcaggggatcggatttatcatcgccggtctgtcgccctggctttcaggcctgctgcgtagcctgagcgggaactacacgcttgactggtcctggcatgcgatctgcgtcctgctactcatggcgctgacgctgcgctttatcccggcacactacccggccgagtggcgacagcgcgcctcagacctgccctga

SEQ ID NO: 209545 - DNA, 459 bp, Klebsiella pneumoniae
atgtccgctcacgatcgttatcttcagcgcgcattagtgctggcaaaacaaaacattgctgacggtgggcgccccttcggcgccgtgctggtgcggaatgatgagattgtcgctgaaagcgtcaatacctttcatctgagcggtgacccaacggcgcatgccgaactgaacgccgttcgcgatcttgccgccagactgggaagcgcggtgttgcgcgaatgcgtcatctatgccagcggacaaccttgccctatgtgcctgagcgcgctctatttaaccggcgtgcgggaagtgtttttcgccaatagcaatcaggacggggagccttttcagctctcgaccgccgcgatttatcagcagctgcagcagccgctggcccagcaaacgctgtcgatccatcatcgcccgcagccggagggaactgaactttatcagcgctgggcggaacggcagtcatga

SEQ ID NO: 209546 - DNA, 909 bp, Klebsiella pneumoniae
atgcttctgcgccaactttcctactttatcgctgtggctgaacattgtggcttttcccgcgccgccgcggcgctgcatgtctcccagcctgcgctgtcacagcagatacgccagctggaagcgatgctggaggttcagcttttcgaccgctctggccgacgtattcgcctgaccgatgccggtgagatctggctggagtatgcccgtcgcgcgttacgcgagcttgaggaaggtcggcgcgccttgcatgacgcagaagatctccagcacggtaaactccgcattgcaatgacgccaactttcactacctatatgctgggcccgctgatggaggcgtactaccgacgctatcctggagtaaaagtgcttatccaggagatgaaccaggagcggatggaggcgatgctgctggaggatgaactggatgtggggattgcctttgacgattgccggtcacaggagattgtggttcagccgctactgacggaaacgcttgcgctggtggtgagccgtgcgcatccgctggcaggagagcgcgacttgcaactgcaggctctcgacgcccagccgctaattttactgagcagcgagtttgctacccgcgagcagattgatcgttattgccgccttcatcggctcgaaccagacgtgcggatggaggccaactccatcggggccgttctgtcggttattcgaagcacaacgttagcaacgctgctgccggcggcgatcgccggacagtttgatgatgtggtggcgattgagctaagacctgcgctgctgcagcgcacggcctgtttattgcagcggcagggcgcctggcagagcgccgcagcgcgcgaattcatcaccctggcccgagagaatgcgataacgattgagcaggaaaaccgccagtcccttgcctga

SEQ ID NO: 209547 - DNA, 882 bp, Klebsiella pneumoniae
atgaatattacagaacggaatatctggaagctaaataatttaccgccaatggagtattgctctctggcgcgggcgcaaaaattattaaactgcgaactcgaagacattcttcactggcatgatataggcgcaatcaatctatgtcttaagcttaacccaacgccgggaatattaaaaatcgccgtcctctcccatcaggaaaaagaggtaaccagcgcgtttaatccatttacctcagtcgaggcaggagaaacagtctggtcgcaacactcccatatccgcagcattctgcggcttgaaggcgatattccgacgatggaaaccctgcgcggaaatacggtaacccagttcaacgtaaaggtatttgcttcagagctctggcatccacactgtcggaacctaatggcgctgctggaggcgccagatgatattcttttcgaaaaccgcctcagcatgatgctgccggataaaccatttgtttattgtcatttcattccagaggaagacgaacgcccctcgatatcattgaaccgcatctatatcaccagccaggccattgagaaaatatacgcccacagtattagcgcccggcctatggacgtgacgaaaaatccgctactggatcaaacccgttacatccagcaggaattaaccgtcctgccgcaaagtgaggtattgctggaatttatccattatcttgttcagtcccatactgtatttaatgagaagttgcagagtatggctgagccagacaagactcagctctttcatcacgtgctggaaaggcttaaggaagaaggcatgcttatagagaatgcccagcccgatgaaggcgatatcggcagcgaagccagccgtgagtcgcagttcgccggcgagtaa

SEQ ID NO: 209548 - DNA, 483 bp, Klebsiella pneumoniae
atgaaacagatcaccctcagcgatatgcagcagcagagcgaagcggcagccagtgctccgcgcctgcgtgcccatcgcaattttcatcccgaactaagcgacccgatacagcgtctggccatcgccatggaacccggcacctatatccgcccccaccggcacagacataccttcgaacttttactgccgctgaaaggccgatttgtggtactgaattttgatgaccacggcgtggttacccgccgggtggtgctgggtgaaacctgcacggcgctggaaatggaggctggcacctggcatacggtgctctcgctcgacgcaggcggcatggtatttgaagtcaaacaaggcgcttatcaaccgcttgccgaaatggacactatggcctgggcgcctgctgaaggccagccaggcactgccgaaatgatggcctggtatgccatcgcgcaaccgggtgaccgcttcctgtctatgccgcaataa

SEQ ID NO: 209549 - DNA, 930 bp, Klebsiella pneumoniae
atggatgaactagacaataacaaattaaaggcagaggatgacgaaagagaagtggaaagtgaggaaaatcagcgtggtgaagagatcgaagtaaatgaagatcgccttccctcgcgggcgatggcgatccatgaacatattcgccaggaaggggaaaaagagatggagcgcgatgcgctggccctgctatggtcagcgattgcggccggcctgtcgatgggggcctccctgctggcgaagggaatttttcacgtcaaactggaggggatcccgggaggttttttgctggaaaacctcggctacaccttcggctttattatcgtaattatggcccgtcagcagctgttcactgaaaatacggtcaccgccgttctgccagtgatgcataatcccaccctcggtaacgtcggtttgctgatgcggctatggtcggtggtgctggcgggcaatctcatcggtaccgcggtggccgcatgggccttcaattatatgcctatttttgatgagccaacccgtcaggcctttgtcagcattgccgaagacgtaatgaaaaacagtccgacagagatgttcgccaatgcgattatttccggctggctggtcgccaccatggtctggatgtttcctgtcgccggcgccgccaaaatcgtggtgattattctcatgacctggcttatcgccctggcggataccacccatattgtggtgggctcggtcgagatcctttatctggtgtttaatggaaatctgccctggagccactttatctggccgttcgccctgccgaccctggcgggaaatatctgtggcgggaccttcatcttcgcactgctgagccatgcgcagatccgtaacgatatgagcagcaagcgaaaagcggaagcccgcgcccaggcggcggagaaagggaaaaaggccgaccgggcataa

SEQ ID NO: 209550 - DNA, 762 bp, Klebsiella pneumoniae
atgaattatcgcctgtcggcgcttgcgcttggcgccacattgctggtgggatgtgccagttccagctctggcgatcggccgcaggggcgctcagacccgttagaagggtttaaccgcacgatgtttaacttcaactttaacgtggttgatccttacgtacttcgccccgtcgcggtggcatggcgcgactacgtcccacagccggcgcgcaacgggttaagcaattttaccagtaacctggaagagccggcagtgatggtgaactacttcctgcagggcgacccctataaaggtatggtgcattttacccgcttcttcctgaacaccattctcggtatgggtgggcttatcgatgtggccgggatggcgaatccgcagctacagcgggttgagccacatcgtttcggcagtacgcttgggcattatggcgttggctatggcccgtatgttcagttgccgttctatggaagctttaccttgcgcgacgaaggcggcgatatggccgatggcttgtatccggtgctctcctggctgacctggccgatgtcgatcggtaaatgggcggtggaagggattgagacacgtgctcagctgctggattccgacggcctgctgcgccagtcttccgacccttacattctgatgcgtgaagcctacttccagcgtcatgactttatcgccaacggcggtaagctgaccccggcggacaacccgaatgctcaggctattcaggatgagctgaaggatatcgattcacagtga

SEQ ID NO: 209551 - DNA, 1323 bp, Klebsiella pneumoniae
atgagccagaaaacccgctttacccaatctgcccttgcagtggctgtcgcacttgtttccacccaggcctggtcagcaggcttccagctcaacgaattctctgcatcggggctgggtcgtgcctattccggtgaaggggcgatcgctgacgatgctggtaatgccagtcgtaacccggcattaattatgatgttcgaccgcccgaccatgtcggcgggcgccgtgtttgtcgacccgggcgttaatgtttcgggcacctctcccaccggcaagagcctgaaagcagacaatatcgccccgacggcgtgggtgcccaacttccactttgtcgcgccgattaacgaccaatttggttggggggcgtctatcacctctaactatggtctggcaacagagtataacgatgattatgcggccggcagcatgggcggtaaaaccgacctgaccaccgcgaacttcaacctgagcggcgcctaccgcctcgacagcaactggagcttcggcttaggctttgacgcggtctacgccaaggcgaagatcgagcgctatgcaggcgatctggggcagattgtcgcaggctctggcgcgctgccgccggcgctggcgggccaggtagcgaagatcccggccgacacgcagatcgcccatcttaatggcaacgcgtggggcttcggctggaacgccgggatcctctatgagctggataagaataaccgctacggtttaacctaccgttctgaggtcaagatcgacttcgacggtaactaccgcagcagcctgccggcggcctataaccagatcctcggcaacttcggcctgccggcgggcaccagcggccagacgacaaatggttcgctaacccttaacctgccggaaatgtgggagctgtccggctataaccgcgtggcgccgcagtgggcggtccactatagcctgacctacaccagctggagtcagttccaggagctgaaagccaccggcagcaacggccagacgctgttctataaagaggaaggcttcaaggacgcctatcgtcttgcgctggggaccacctattattatgacgataactggaccttccgtaccggtatcgccttcgatgacagcccggtgccggctaataaccgctctatctctattccggaccaggatcgcctgtggctgagcgcgggtaccacctacgcgttcaataaagatgcctcggttgacgtcggcgtttcatacatgcacgggcagcatgttgaaattaaggaaggcccgtataccttccgttccgaaggaaccgcctggctgtacggcgctaacttcaactaccgcttctga

SEQ ID NO: 209552 - DNA, 285 bp, Klebsiella pneumoniae; identical to SEQ ID NO: 137551

SEQ ID NO: 209553 - DNA, 1311 bp, Klebsiella pneumoniae
atgagtcaggcattaccgcttatcacccgtcagggcgatcgcattgccattgtcacggggctacgcacgccatttgctcgtcaggctacggcttttcatggcgttccggccattgatttaggaaaaatggtggttggcgagatgctggcgcgcagcgacattcctgccgaagtcatcgagcaactggtctttggccaggtggtgcagatgccggaagcgccgaacatcgcccgggaaattgtgctgggtaccggcatgagcgtacataccgacgcctatagcgtcagccgcgcctgcgccaccagtttccaggccgtggcgaacgtcgctgaaagcctgatggccggtaccatccgcgccggtattgccggcggcgccgactcctcctctgtcctgcccattggggtcagtaaaacgctggcccgcacgctagtggatgccaataaggcacgcacgctgagccaaaagctgaagctgttttcccgtctgcggccacgcgacctgctgccggtccccccggcggtggctgaatattcaaccggattgcggatgggcgataccgccgagcagatggcgaaaagctgggggatctcccgcgagcaacaggatgccctggcgcatcgttcgcaccagctggcagcgaaagcctgggaagagggtaaactgtccgcagaggtgatgaccgcctatgctccccctttccgcgaaccgctcgagcaggacaacaatattcgtaaaaattcaacgctcgcagattatcagaagttacgcccggcctttgaccgcaaacatggcaccgtcaccgccgccaacagtacgccgctgacggacggcgcggcagcggtgatcctgatgaccgagtcgcgggctaaagagctggggctgaggccgctgggctatctgcgcagctacgcctttaccgccatcgacgtctggcaggatatgctgctggggcccgcgtggtccacgccgctggcgctggagcgcgctggcctgacgctggcggatctcacgcttatcgatatgcacgaagctttcgccgcgcagacgctggccaatctccagtgtctggcaagcgaccgctttgcccgcgaggtgctgggccgctcgcaggccaccggtgaggtagatgaaagcaagtttaacgtcctcggcggctctatcgcctacggtcaccccttcgccgccaccggcgcgcggatgatcacccagacgctgcatgagctgcggcgacggggcgggggatttggtttggtgacggcctgcgcggcaggtggtctgggtgcggcgatgatcgtggaggctgaataa

SEQ ID NO: 209554 - DNA, 2145 bp, Klebsiella pneumoniae
atggatactgtttccgcttttaagcttgaggtctgtgcggacaaaatcgcggtgatcaccattgatgccccgggtgaaaaaatgaataccctgaaagccgaatttggcagtcaggtacggggattgatacgccagttacgtgacgataagtcagtgcgcggcgtagtatttatctccgccaaagcggataactttatcgccggcgctgatatcaacatgattgcccgctgccgcagcgcgcaggaggcggaagcgctggcgcgccagggacagcagattatggctgagatccatggcctgtcgatcccggtgattgccgctatccacggcgcctgccttggcggcggtctggagctggcgctggcctgtcatggccgtatctgtagcgatgacgaaaaaacccgactcggcttgccggaggtacagcttggcctgctgccgggttccggcgggacgcagcgtttaccgcggctgatcggggtcagcaccgcgctggatatgatgctcaccggcaagcagctgcggccgcggcaggcgctgaaggccggtctggtggacgaggtggtgccgcaggcgattttactgcaggcggcggtggagttggcgctgaagggacgaccgaccagccgggaggtgcctgttcgtgaacgcgtactggcagggcccctggggcgccatctgttattccagtttgtcggtaaacaaacgcagcgcaaaacgcagggaaattacccggcggtgaagcgaatcttgcaggtcgtcgagaatggtctggcccatggctgcagcagcggatacgctgaagaggcgcgcgcatttggcgaactggcaatgagcccgcagtcgcaggcgctgcgatcgatcttctttgccagtaccgatctgaaaaaagaccctggcgccgaggcgggccccggtccgctgagaagcgttgcagtactgggcggtggcttgatgggcggggggatcgcctatgtgaccgcctgtaagggggggctgccggtgcggattaaagatatccagccgcgtggcatcaaccacgccttaaagtacagctgggatctgctgaataaacaggttcgtcagcgtcgactgcgcccagtggagcgcgatcgtcagatggcgctgatctccggcactaccgactatcagggctttgctcatcgcgatgtggtgatcgaggcggtatttgaagacctggctctcaaacagcggatggtcagcgaagtggaacaatacggcgggccgcagaccatctttgcgtcgaatacctcatcgttgccaatcggcgatattgccgctcacgccagccgcccggggcaggtaatcggcctgcattttttcagtccggtggaaaaaatgccgctggttgaggtgatcccgcacaagggaaccgacccgcagactatcgccaccgtggtgcagctggctaaacggcaggggaaaacgccgattgttgtcgcagataaagcggggttctatgtgaaccgtatcctcgcgccgtatatcaatgaagcgatgcgcctgctggtggaaggcgaaccgattgaagtcattgataacgcgttggttaaattcggtttcccggtggggccgattcaactgctggatgaggtgggtatcgataccggcaccaaaattatccccgtgctggagagcgcgtttggagaacgttttagcccgcctgcaaacatcattgacgcgattttgaaggacgatcgcaaaggcagaaaaaataatcgtggtttctatctttatgagacaaaagggcgtaaaagcaaaaaacggcccgacccggcagtctatccgctgctcggcatcggccgcccgcagtcgcggctctacgcgcagcaggtggcggagcgctgtgtgatgatgatgcttaacgaagcggcgcgctgctttgatgagcagattatccggagcgcgcgcgatggcgatatcggcgccgtctttggtatagggtttccgccatttcttggcggcccgttccggtatatggatactatcggcgcgggtgaagttgccgcgatcctgcagcgcctggccgcccagttcggcccacgttttacaccctgtgacactttattacgcatggctgaacaggggaccaccttttggccagcggatgaacggctgacctaa

SEQ ID NO: 209555 - DNA, 387 bp, Klebsiella pneumoniae
atggcaacctggctgaaaggtcaaaaagtggatattgagcgcgttcttgtcagtccctatctgcgtgcggaacagacgctggatattgttggggagtgcatgaacctgccgaaacatgtcgacgtgatgccggagctcacgccgtgcggtgatgtgggaatggtgagcgcctatctgcaggcgctggcgaatgaaggcgtggcgacggcgctggttgtctcccacctgccgctggtggggtatctggtctcagagctgtgtccgggggaaacgcccccgatgttcaccacctcggctatcgcctgcgtgacgctggatgccgacggcaaaggtgagttcctctggcagaaaagcccctgcaacctcaagatggccaacgccatctga

SEQ ID NO: 209556 - DNA, 552 bp, Klebsiella pneumoniae; identical to SEQ ID NO: 137554

SEQ ID NO: 209557 - DNA, 933 bp, Klebsiella pneumoniae
gtggataaaatttttgttgatgaggcagtcaatgagctgcataccattcaggacatgctgcgctgggcggtaagccgtttcagcgctgctaatatctggtacggtcacgggactgataacccgtgggacgaggcggtacagctggtgctgccttcactgtatctgccgctggatatcccggaagacatgcgcactgcgcgcctgacctccagcgagaaacatcgcattgtagagcgggtgattcgccgcgtgaacgagcgtattcccgtcgcctatctgaccaacaaagcgtggttctgcggccatgagttttacgttgatgagcgggtgctggtgccgcgctccccgattggcgaactgatcaataaccagtttgccggactgattaaccataagccgcagcacatccttgatatgtgcaccggtagcggctgcatcgccatcgcctgcgcctatgccttcccggaggcggaagtcgatgcggtagatatctccccggacgcgctggccgtcgccgagcacaacgttgagtcccacggcctgatccatcacgtgacgccgatccgttccgacctgttccgcgatctgccgaagctgcagtacgatctgatcgtcaccaatccgccgtatgtcgatgaagaggacatggccgatctgccggaagagtatgagcatgagccggtgctggggctggcctccggaagcgacggcctgaagctaacgcgccgtatcctcggcaacgcgccggattatctcagcgacgacgggattctgatttgtgaagtcggtaacagcatggtacatctgatggagcagtatccggatgtgccgtttacctggcttgagtttgataacggcggcgacggggtctttatgctgaccaaacagcagctgattgacgcccgtgcgcacttcggtatttataaagactaa

SEQ ID NO: 209558 - DNA, 1086 bp, Klebsiella pneumoniae
atggcaggaaatacaattggacaactctttcgcgtcactaccttcggcgaatcgcacggtctggcgctgggctgcatcgttgacggcgtgccgccgggcatcccgctgaccgaagccgacctgcagcacgacctcgatcgtcgtcgcccgggtacctcgcgttacaccacgcagcgtcgcgagccggatcaggtcaaaatcctctccggcgtcttcgaaggcgttaccaccgggaccagtatcggtctgctgattgagaacaccgatcagcgttcgcaggattacggcgcgatcaaagatctgttccgtccgggccacgccgattacacctacgagcaaaagtatggtctgcgcgactatcgcggcggcggtcgttcttctgcgcgcgaaaccgcgatgcgcgtagcggccggggcgattgccaaaaaataccttgccgcgaagttcggcatcgtcattcgcggctgcctgacgcagatgggcgatattccgctggccatcaaagattgggatcaggttgagcagaaccccttcttctgtccggacccggataaaatcgacgccctggatgaactgatgcgcggcctgaaaaaagagggcgactccattggcgcgaaagtgacggtagtggctgacggcgtaccgccaggcctcggtgagccggtcttcgaccgcctggatgccgatatcgcccacgcgctgatgagcatcaacgccgtgaaaggggtggaaattggcgacggcttcgaggtggtgaagctgcgcggcagcgaaaaccgcgatgagatcaccaaagccgggttccagagcaaccacgccggcggcattcttggcggcatcagcagcggccagcagatcgttgccaacatcgcgctgaagcctacctccagtattaccgttcccggtcatacgattaaccgctttggcgaagaagtggagatgatcaccaaagggcgtcacgatccgtgcgtcggcatccgcgccgtaccgatcgctgaggcgatgctggcgatcgttctgatggatcactttatgcgtcagcgcgcgcagaatggcgacgtgacgacgacaattccacgctggtaa

SEQ ID NO: 209559 - DNA, 822 bp, Klebsiella pneumoniae
atgaaaaacaccgttatcgcactgcttgcgctgttggctagcgccggtagcctggccgccacgccatggcagaaaataacccaaccgatcggcggcagcgcccagtcaatcggcgcgttttccaatggctgtatcgttggcgccgaggcgctccccctgagtgcccccggctatcaggtgatgcgtaccgatcagcgtcgctacttcggtcatccggatctggttcagtttattcagcgcctgagtaatcaggtgcacaataaaggaatgggaaccgtgctgattggcgacatggggatgccggcgggcgggcgctttaacggcgggcacgccagccaccagacgggcctcgatgtcgatatcttccttcagctgccgcaaacgcgctggacatcgtcccagctgttgaagccgcaggcgctggacctggtcgccagcgatggcaagcatgtggtgccgtcgctatggagcccgcaaatcagccagcttatcaagctggcggcggaagatagcgaagttacccgcatcttcgtcaacccggcgattaaacagcagctgtgcctggacgcgggcagcgaccgccagtggctgcgtaaagtccgtccctggttccagcatcgcgctcatatgcacgtccgactgcgttgcccggcgggaagtctggagtgcgaggatcaggcgccgccgccgcccggcgatggctgcggagcggagctgcagagctggttcgaaccacctaaacccgggtctaccccccctgtgaagaagacgccgccgctgccgccttcctgccaggcgctactggatgagcatgtgctgtaa

SEQ ID NO: 209560 - DNA, 810 bp, Klebsiella pneumoniae
atggatagttttatcgagttgtttgccgtatcgccgctggtgctggtggtactcttctttgtcgccatcctggccggttttattgactcactggcgggaggcgggggcttattgactgtccctgcgctgatggcggccggcatgccgccagcccaggcgctggcgaccaataagctgcaggcctgcggcgggtcgctatcggcgaccctctattttgtccgccgcaaggtggttaatctggccgatcagaagctgaatattctgatgacctttatcggctcaaccgccggagcgctgctggtgcagcacgtgcaatccgatattctgaagcagatcctgccgttgctggtgattggcatcggcctttatttcctgctgatgccgaaactgggcgaagccgaccggcagcgtcggctttacggtctgccgtttgcgctggtcgccggcggtagcgtagggttttacgatggctttttcggccccggcgccggttcgttttacgccctggcttttgtcactctggccgggtttaaccttgccaagtcgacggcccatgccaagctgctgaacgccacctcaaacgtcggcggcctgctgctgtttatcatcggtggaaaggttatctgggccaccggctttgtgatgatggccggccagtttattggcgcccgtgccgggtcccggctggtgctgagtaaagggcagtcgctgatccggccgatgatcgttatcgtctcggcggtgatgagcgcgaaacttctttatgacagccacggggctgagattttgcagtggttgggaattcattaa

SEQ ID NO: 209561 - DNA, 549 bp, Klebsiella pneumoniae
atgcaacagcaacaccattatcagcagctgatagaccttttcgacagctgctttgccgaagaatttaatacccgcctgattaaaggcgacgatgagccgatctaccttccggctgacgatgaaacgccctatcaccgtatcgtgtttgcgcacggattttttgccagcgccctgcacgagatctctcactggtgtgtcgccggcaaggcgcgtcgcgaacaagtagattttggctactggtactgcccggacggccgcgatgcgatgacccaaagccagtttgaggatgtcgaggtgaaaccgcaggcctttgagtggctgttctgcgtggcggcgggatttccgtttaacgtcagctgtgacaatctggaaggggacgttgagcccgatcgcatcgccttccagcgccgggtgcatgctcgggtgatgactttacttgaacaagggatccccgaacgtccggcgcgctttattcgcgcgttacaacactattatcaaacgccgccattgacggcgaaacactttccgtggccggaagacctgcactaa

SEQ ID NO: 209562 - DNA, 282 bp, Klebsiella pneumoniae
atgatcgcggagtttgaatcacgcattctggcgctgattgacaacatggtagaccacgccagtgatgatgaactgtttgccggcggttatctgcgcggccacctgacgctggcggtggctgagctggaaggtgagggcgagcattctgctgacgcggtacacagcagagttagccagagcctggagaaagccatcagcgctggcgaactgtcgccgccggaccaaattctggtgcaggggatgtggcataacctgtatcaacaggcgaaaaatcaggcctga

SEQ ID NO: 209563 - DNA, 1989 bp, Klebsiella pneumoniae
gtgaaacaaaacgccatacaacccgccaacctggaattcaacgctgagggtacacctgtttcccgagatttcgacgatgtttacttttccaatgacaacggtctggaagagactcgctacgtttttctcggcggaaatcgcctgccggagcgcttccccagccaccctcgcccgctgatgatcgtcgcggagagcggcttcggcaccgggctcaatttcctcaccctctggcaggcgtttgacgtttttgttcgtgataacccggacgttaccttgcaaaggttacatttcatcagttttgaaaaatatccgctgaaggctgaggatctccgcctggcgcaccagcgctggccagagctggctccgtgggcgcagcagctgcaggcgcaatggccgtcggccttcggcgggtgccatcgtctgctgctcgacggcgggcgggtgacgctcgatctgtggtttggcgatatcaatgagctgaccagggagctggatgattcgctgaaccagcaggtggacgcctggtttcttgacggctttgccccggcgaaaaatcccgacatgtggactcaggatctgttcagcgccatggcgcgcctggcgcgacccggcgggacgctggccacctttacctccgccggttttgtccgccgtggcctgcaggaggccggctttaccatgcgtaaaagcaaaggcttcggccgcaagcgggagatgctgaccggcgagatggcgcaaacgctgagctttcctgcgcgcgtcccctggttcgctcgcagtagcagcgatgcccgcgaggcggccatcatcggcggcgggatcgccagcgccctgctctccctggcgctgctgcgccgcggctggcaggtgaccctttactgcgccgatgaggctccagcgcagggcgcctccggcaatcgccagggcgcgctgtatccgctgttaagtcagcacgatccggcgctggcacgcttttttccggccgcctttaccttcgcccgccgaatgtatgacgcgctgccggtgatgttcgatcaccaatggtgcggtgttacccagctcggctgggatgagaaaagcacgcataaaatcgcccagatgctggcgctgaatttacccccggacatcgcctgcgcggtgacggcggaacaggttgccgggctgaccggcgtcgataccggctgcggcggcatcacctatccggccggcggctggctgtgcccgcagcagctcaccgccgagctgctggcgctggcggccacgcgcggactgcacgtgcactatggttatcccgtcgaaacgctcagcgcggagggcgatggctggctgctcaatcagcagcgctatcatcaggcggtggttctggcgaacggccaccgcatcactggttttgcgcaaacagcccaactgccggtctacccggttggcggccaggtcagccatattcccaccaccccgcggcttgccgccctgcgccaggtgctgtgctacgacggctacctgacgccacagaatccgcaaaatcagcagcactgcattggcgccagctaccaccgcgggaaaaccgacaccaccttcagcgaagaagatcagcagcacaaccggcaacggctgatcgactgcttcccgggcgcggagtggccacaggacgtggatatcagcgccaacgacgctcgctgcggcgtgcgctgcgccacccgcgatcatctaccgatggtcggcaacgtgccggactacgcggcaacattgacgcaatacgccagcctccacgaacaaccggatatcgccgatagcgcgccggtctgtcgtaacctgtttatgcttggcgcgctcgggtcgcgcggactttgcaccgcgccgttaagcgctgagctgctggcggcgcaaatgagcacggaaccgctgccgctggatagcgacaccctggcggcgctgaatccgaatcggctgtgggtgagaaaactgctgaagggaaaagcggtgaaataa

SEQ ID NO: 209564 - DNA, 1221 bp, Klebsiella pneumoniae
atgaaacgtgcagtgattactggcttgggcatcgtttccagcatcggtaataaccagcaggaagtcctggcatctctgcgtgaaggacgttcagggatcactttctctcaggagcttaaagattcagggatgcgcagccacgtatggggcaacgtcaaactggataccactggcctcattgaccgcaaagtagtgcgctttatgagcgacgcctccatctatgcttacctgtccatggaacaggctgttgccgacgcaggtctggcgcctgaagcatatcagaataacccgcgtgtcggcctgatcgcaggctccggcggcggttccccgaaattccaggtcttcggcgccgatgccatgcgtagcccgcgtggtctgaaagccgtgggcccgtatgtggtcaccaaagcgatggcttccggcgtttccgcctgcctcgctacgccgttcaaaattcacggcgttaactactccatcagctcggcctgcgccacttccgcccactgtattggtaacgcggtagagcagatccagctgggcaaacaggacatcgtctttgccggcggcggcgaagagctgtgctgggaaatggcctgcgaattcgacgccatgggcgcgctgtccactaaatacaacgacaccccggaaaaagcgtcccgtacctatgatgctaaccgtgacggcttcgttatcgccggcggcggcggtatggtcgtggtggaagagctggaacacgccctggcgcgtggcgcgcacatctacgccgaaatcgtcggctatggcgcgacctccgatggcgcggacatggtcgccccgtctggtgaaggcgcagtgcgctgcatgcagatggcgatgcatggcgttgatacgccgatcgactatctgaactcccacggtacctccactccggtcggcgacgtgaaagagctgggcgccatccgcgaagtattcggcgacaacagcccggctatttcggcaactaaagcgatgaccggccactcgctgggcgcggcgggcgtacaggaagccatctactccctgctgatgctggagcacggctttatcgcgccgagcatcaacgttgaagagctcgacgagcaggctgccggcctgaacatcgtcaccaaaccgacggacgctaagctgaccaccgtaatgtccaacagcttcggcttcggcggcaccaacgccacgctggtgatgcgtaaatacaacgcctaa

SEQ ID NO: 209565 - DNA, 1176 bp, Klebsiella pneumoniae
atgtccgcagttactgaaacaacatccaattcttcggcgaatttttcgcttttccgtattacgtttgccgtctttttgacctatatgaccgttggtttgccgctgccggtgatcccactctttgtccatcaggagctgggatttggcaacaccgtggttggcgtggcggtagggatccagttcctcgccaccgttctgacccgggggtacgccggacgtctggcagaccagtacggcgctaaacgctctgtcctgcaggggatgctggcctgcgccctggcgggcgcggcatggctggccgctgcgctgctgccgctgccggtgctcgccaggctcggcctgctgctgctgggccgcttgatcctcgggtttggcgaaagccagctgctgaccggaaacctgagctgggggatgggcctggtgggaccggcccgttccggcaaagtgatgtcatggaacggcatggcgatgtacggctcgctggcggtgggcgccccgctgggattattgatctatagccattttggcgtggcggtgctggcctgtgtcaccatgggactaccgctcgtcgcctggcttattaacggtaccgtgcgcaaagtggcggcccacggaggcgagcggccttcactctggagcgtcatcggcatgatctggcggccgggcattggcctgggcctgcagggtgtcggctttgcggtgatcggcaccttcgtctccctctatttcgccagccatagctggccaatggccggctttaccctgacggcgtttggtggcgcctttgtgctgatgcgagtgctgttcggctggatgccggatcggtttggcggcgttaaggtggcgatggtctcgctgctgatagaggcggttggtctgacgctgctgggactggcgccgaatgcctggctggcgctggccggtgcggcgctgaccgggtgcggctgttcgcttattttcccctcacttggcgtggaagtagtgaagcgcgtcccggcgcaggtgcgcggcaccgcgctcggcggctatgcggcctttcaggacatctcctatggcctgaccgggccgctgaccggcctgctggcgacctcgctgggctactcgtcggtgttccttgccggcgccctctgcgcggcgctggggatcctcgtcacccttatctcatttcgccgctag

SEQ ID NO: 209566 - DNA, 978 bp, Klebsiella pneumoniae
atgacgcacccccttgctgatatgccagaccgtcctccagggcgaggcccatcaggcactgccgccaccggcgaaccttcgctttccatgcagcaacgcaccgttctggagcgactgatcacgcgcctggtggcgctgacctcgcagcagaacgcggaagtgtgggcctgcgtcaaacatgacctcggactgaaaggcgactcgcccctgctggcctgccatttcagcgccgcggaggccagtctcaaccagcgcttagccgccgctcaggataatcatcatcatcgccagaccttagcgcagctcagcgatctgctcggtcagggcaataaccgccaggcggtgagcgattatattcgtcagcattatgggcaaacggcgctgcatgcccttagccagacgcagctggagaccattctgcatctgctgcagcatggccagctgtcgatcccgcagccgcagcagcgcccgccgaccctgcgcccgctgttgccagccgagcataatacgctcaatcagctggtgactaagctggcggccgctaccggcgaaccaagcaagctgatttggcaatccatgctggagctttgcggcgtcaagtccggggagctgatcccggcgacgcacttcctgccgctttcgtactggctgcaggcgcggcaaacgctgagtgcgcaaagcgtgccgacgctcacctcgctgcagggagcgctcaagcagccgctggaggccgcggagtggcagacaattgtcgacttcgccagtcgcagctggcaggtcacgccgcggaccacgctgagcccggcgcagatcctggcgctgctgaacaaggtgtttgtgctgcgggtggcccgcgcccaggagacgctggccatcccgcaggaggagcctgtcgccaggcggacgtggagcgctaagccgtggcagctggcgctgggcgcggttgtcctgctccttgtgctgtggctcctgctgtag

SEQ ID NO: 209567 - DNA, 1137 bp, Klebsiella pneumoniae
gtgaaaatcctcgttgatgaaaatatgccctatgcccgtgagctttttagccgtttaggcgacgtgcaggcgatcccaggccgtccggtcccggccgatgccctgaccgatgcggatgccctaatggtgcgctcggtcacccgggtcaatgaagcattgctcgccggcaaggccattaagttcgtcggcaccgctaccgccggcaccgatcacgtcgatcaggcgtggctgcagcaggcggggattggtttctctgcggcgccaggctgtaacgccattgcggtggtagagtacgtcttttcatcgctgctgatgctggctgaacgcgacggctttgcgctgcgcgatcgcaccgtcgggatcgtcggcgtcggtaacgttggcgggcgactgcaaaagcgcctggaagcgttggggatcaaaactctgctctgcgacccaccgcgcgccgatcgcggcgacgaaggtgacttccgctccctcgaggcgctggtccaggaagccgatgtcatcaccttccatacgccgctgtataaagaagggcaatataaaaccctgcatctggcggatgaggcgctgataagccgcctgaagcctggaacgattttgatcaacgcctgccgcgggccggtggtcgataacgccgcactgctaaagcggctggaagctggtcagccgctgagtgtggtattggacgtctgggagccggagccggatctaaacgttgagcttctcaagcgagtggatatcggtaccgcgcatatcgccggctacaccctcgaagggaaagcgcgcgggacgacgcaggtttttgaagcctacagcgcctttatcggccatccgcagcaggtagcgctggacactctgctgccggcgccggaatttggccgcattaccctgcatggaccgctcgatcagccgacgctgaaaagactggtccacttggtgtatgatgtgcgccgcgatgatgcgccgctgcggaaggtggccggcgtcgccggtgaattcgacaagctgcgtaaaaattatcaggaacgtcgcgaatggtcttcgctgtatgtgcagtgcagcgatgagcaggcggcgacgctgttgcgccagctcggttttaacgccgtgcatcatcctgttcgttaa

SEQ ID NO: 209568 - DNA, 1014 bp, Klebsiella pneumoniae
atgtctgaaggctggaatattgccgtactgggcgcaacgggcgccgtaggcgaagccctgctcgaaactcttgctgaacgccagttcccggtaggagagatttttgctctggcgcgcaacgacagcgcgggcgaacatctgcgttttggtggcaagtcggtgatcgtcaaagacgccgccgaatttgactggacccaggcccagctggctttcttcgccgccggcgtcgaagccagtgcagcgtatgtcgaagaagcgaccaacgccgggtgtctggttatcgatctcagcggcctgtttgcgctggagccggacgtaccgctggtggtgccggacgtgaacccgttcgtattaggcgattaccgcaaccgcaacctgattgcggtgcctaatagcctgaccagtcagctgttgacggcgctcaaaccgctgatcgatcagggcgggttgtcgcgcattagcgtcactaacctgctctccgcctcggggcaggggaaaaaagcggtggatgcgctggcgggtcagagcgctaagctgctgaacggcatccctatcgatgaagacgatttctttggtcgccagctggcgttcaacatgctgccgctgctgccggatcgtgaaggtagcgtgcgcgaagagcgccggatcgtcgatgaagcgcgcaaaattcttcaggatgacgggctgatgatctccgccagcgtcgttcagtcgccggtcttctacggccatgcgcagatggtgagcttcgaagcgatgcgcccgctggcggcggaggaggcgcgcgacgcttttacccgcggcgaggatatcgaactttctgaagagggcgaattcccgactcaggttggtgatgcctcaggcaatgcccgcctctccatcggctgcgtgcataacgattacggtatgccggagcagatccagttctggtcggtagcggataacgtgcgcttcggcggcgcgctgatggcggtgaagatcgccgagaagctgattgaggagtacctgtactga

SEQ ID NO: 209569 - DNA, 813 bp, Klebsiella pneumoniae
atgtctgagatggagcaacagccgatctgtaaaatcgcgctgggcatcgagtacgacggcagcaaatattacggctggcagcggcaaaacgaagtgcgcagcgtgcaggagaagctggaaaaggcgctctcgcaggtggcgaacgaaccgattaccgtcttttgcgccggccgcaccgacgccggcgtccatggcaccggccaggtggtgcatttcgaaacccgggcgcagcggaaagatgccgcctggacgctgggggtaaatgcgaatttacctggtgacatcgcggtgcgttgggtcaaacatgtaccggcggattttcacgcccggttcagcgccacggcgcgccgctatcgctacgtcatctataatcatcgcctgcgtccggcggtgttaagtcatggcgtgacgcattttcaccagccgctcgacgccgagcgtatgcagcgcgccgcgcagtgtctgctgggagagaatgactttacctcgtttcgcgcggtacagtgccagtcgcgtaccccgtggcgcaacgtgatgcatattaacgttacccgctacggcgcgtatgtggtggtggatatcaaagcgaatgcctttgtacatcatatggtcaggaatattataggcagcctgatggaggtcggggccggaaaccagccggagagctggatggcagaactgctggcagcaaaagacaggacgctcgctgcggcaacggcaaaagcggaagggttgtatctggtgtcggtggattacccggcccactatgatttaccggtgctgccaatgggcccgctgtttctggcggactaa

SEQ ID NO: 209570 - DNA, 660 bp, Klebsiella pneumoniae
atggacttgattcactttttaattgatttcatcctgcatattgatgtgcaccttgccgaactggttgcccagtatggcgtctgggtttatgccattctgtttttgattctgttctgcgaaaccgggctggtggtgacgccattcctgccgggcgattccctgctgttcgtcgcgggcgcgctctcggccttgccaaccaacgatctcaatgtccacctgatggtactgctgatggtcatcgcggccatcgtcggcgatgcggtcaactacaccattggccggctgttcggcgaaaagctgttcagcaatccgaactcaaagatattccgtcgcagctatctggataaaacccacagcttttacgaacgtcacggcgggaaaaccattatcctggcgcgctttgtgccgatagtccgaaccttcgcgccgtttgtggcgggaatggggcatatgtcctatcgtcattttgcagcctataacgtggttggggcgctgctgtgggtgctgctgttcacctatgccggctatctgtttggcgatttgccggtggtgcaggagaacctgaagctgctgatcgtggcgatcatcgtgctttccgtcctgccgggcgtgattgagattattcgccacaagcgggcggcggcgaagcaggcgaagtag

SEQ ID NO: 209571 - DNA, 984 bp, Klebsiella pneumoniae
atggcattatgcgccccttacgacaaaactggcatcgaccaggttcaggcagaaaggttatcaatgagctggattgaacgaattaaaagcaacatcactcccacccgcaaggcgagcattcctgagggtgtatggaccaagtgcgacagctgcggtcaggtactctaccgcgccgagctggagcgcaacctggaggtttgtcctaagtgcgatcaccatatgcgcatgtcggcgcgtaatcgcctgcatagcctgttggatgaaggttctctggtagaactgggtagcgaacttgagccaaaagatgtgctgaagttccgcgattcaaaaaaatacaaagaccgcctggcgtccgctcagaaagagacgggcgagaaagacgcgctggtggtgatgaaaggtacgctctacgcgatgccggtggttgccgccgcctttgagttctcctttatggggggctcgatgggttccgtcgtcggcgcacgctttgtgcgcgcggtggagcaggcgctggaagataactgcccgctgatctgcttctccgcctccggtggcgcccgtatgcaggaagcgctgatgtcgctgatgcagatggcgaaaacctccgcggcgctggcgaaaatgcaggagcgcggactgccgtacatctccgtgctgaccgacccgaccatgggcggcgtatcggcgagctttgcgatgctgggcgatctgaacattgccgagccgaaagcgctgatcggctttgccggtcctcgcgttatcgagcagaccgtacgcgagaagctgccgccgggattccagcgcagtgagttcctgattgaaaaaggggcgatcgatatgatcgttcgccgtccggaaatgcgtctcaagctggccagcattctggcgaagctgatgaacctgccggcgccggttgccgtttcggaagcgcctcatgaaggcgtggtggtgccgccggcaccggatcaggaacctgaggcctga

SEQ ID NO: 209572 - DNA, 1269 bp, Klebsiella pneumoniae
atggaaaaagatcctattcctcaggccacgtcgcccctggctacgtggctttcttatctggaacatctgcacagtaaaaccatcgaccttgggctggcgcgcgtcagcgaggtcgccgggcagatggatatcgttaaaccggcgccgttcgtttttaccgttgcgggcaccaatggcaaaggcaccacctgccgcacgctggaaaccatcctgatggcggccggttataaagtgggggtctacagctctccgcatctggtgcgctacaccgaacgcgtgcgcattcagggggctgaactgccggaggcggcgcatacagcttcgtttgctgaaatcgaagcggcgcggggtgacatctcgctgacctattttgaatacggcacgctctcggcgctgtggctgtttaagcaggcgcagctggatgtggtgatccttgaggtcgggctcggcgggcgtctcgacgccaccaacatcgtggatgccgacgtcgcggtggtcaccagcatcgccctcgatcataccgactggctgggcccggatcgcgaaagtatcggccgggaaaaagcgggcatctttcgcgccggtaaaccggcggtggtgggggagccggatatgccgctcaccatcgcggaagtggctagcgagaagggcgcgctgctccagcgccgcggcgtcgactggcgctatgaggtggagggcgaaacgtggtccttccgcgatacggcaggggcgttaagccacctgcctctgcctcaggtgccgttgccgaatgcggcgacggccgtggcggcgctgcgcgccagcgggcttgccgtggatgacgctatcctgcgcgcagggatccgcgatgcgatgctcccgggacgctttcagataatcagcgacgccccgcgagtgatcctcgatgtggcgcacaacccgcacgcggcggcctatctcgccgggcgtctcaaaacgttagcgaaaacgggacgcgtgctggcggttattggtatgctgcatgataaggatatcgccggcacgttggccaatctggccccggaagtcgatgcctggtactgcgcgccgctggaaggcccgcgcggcgcgacggcagagcagctggtggaacatttgcgctgcggtacagtctatagcagcgtggcgcaggcgtggcgtgcggccatggctgacgctaaagtggaagataccgtgctggtgtgtggttcgtttcacaccgtagcgcaggttatggaagagatagacgcggggagaatcggtggcgagtaa

SEQ ID NO: 209573 - DNA, 690 bp, Klebsiella pneumoniae
gtggcgagtaagtttcagaaccgtttagtcgggacaatcgtgctggtggcgctgggggtgattatcctgccagggctgctggacgggcagaaaaagcattaccaggatgagtttgccgcgatcccgctggtaccgaaaccaggcgatcgcgatgaaccggatatgttgccggcggcaacccaggcgttgccttcgcaaccgccggaaggggcggcggaagaggtgcgggcgggcgatgccgccgcgccatcgttagatccatcgcgtattccggtgaacagcaacagcttcgatgacgttcaggagccggtggtggccgcgaaaccgcagcccaagccgcagccgaaaccgcagccgcaacagcaggccgcgacgccaacgccgccgccggctaagccacagcagcaacagccatcgcagcagcaggcggccctgccggcgccgaccggcaaagcctatgtggttcagctgggcgcgttgaagaacgccgataaggtgaatgagattgtcggtaaactgcgggcctcgggtttcaaagtctatacgtcgccttcgacgccggtacagggtaaaattacccgcatcctcgtcggcccggatgcgtcaaaagacaagctgaaaggccagctgggcgatctgcagcagatttccgggcttagcggggtggtgatgggtttcaccccgaactga

SEQ ID NO: 209574 - DNA, 489 bp, Klebsiella pneumoniae; identical to SEQ ID NO: 136409

SEQ ID NO: 209575 - DNA, 1518 bp, Klebsiella pneumoniae
atgtgcggtattgtcggtatcgccggtgttatgccggttaaccagtcgatttatgatgcgctaacggtgctccagcaccgtggacaggatgccgctggcatcatcaccattgatgccaacaactgcttccggttgcgtaaggctaacgggctggtaagcgacgtattcgaggcccgccacatgcagcgtatgcagggcaatatgggtattggccacgtgcgttatcctacggcgggcagctccagcgcctccgaggcgcagccgttttacgttaactcgccgtatggcatcacattggcgcataacggcaacctgaccaatgcgcacgagctgcgtaaaaagctgtttgaagaaaaacgccgccatatcaataccacctctgattccgaaatcctcctcaatattttcgccagtgagctggataacttccgtcactacccgctggaagcggacaacatcttcgcggcgattgcggcgaccaaccgcctgatccgcggcgcgtacgcgtgcgtggcgatgatcatcgggcatggcatggtggccttccgcgaccctaacggcattcgtccgctggtgctgggtaaacgtgacgttggcgacggtcgcaccgagtatatggtggcctcggagagcgtggcccttgatacgcttggttttgaattcctgcgcgatgtggcgccgggcgaagcggtctatattaccgagaagggccagctctatacccgtcagtgtgccgataatccggtcagcaacccgtgcctgttcgagtacgtctattttgcccgtccggactcgtttattgacaaaatttccgtctacagcgcccgcgtcaacatggggactaagctgggcgaaaagattgcccgcgagtgggaagatctggatattgacgtcgttattccgatcccggagacctcctgcgacatcgcgctggaaatcgcccgcattctcgacaaaccttatcgtcagggcttcgtgaagaaccgctacgtcggccggacgtttatcatgcccggtcagcagctgcgtcgtaaatctgttcgccgtaagctcaacgccaaccgtgcggaattccgcgataagaacgtgctgctggtcgatgattccattgtacgcggcaccacctcggagcagatcattgagatggcgcgtgaagcaggggcgaaaaaagtgtatctcgcctccgctgcgccggaaattcgtttcccgaacgtgtacggtatcgatatgccgaccgccaacgaactgatcgcccatggccgcgaagtggatgagatccgccagatcattggcgccgacggcctgattttccaggatctcaacgatctgatcgacgcggtgcgcgcggagaacccggatattcagcagtttgaatgctcggtgttcaacggcgtatatgtgacccgggatgtcgaccagcagtacctcgactatcttgactccctgcgtaacgatgatgccaaagcggtccagctgcaaaacgaagtcgaaaacctcgagatgcacaacgagggttaa

SEQ ID NO: 209576 - DNA, 570 bp, Klebsiella pneumoniae
gtgaaacgactgattattggcatttccggcgccagcggcgccatttacggcgtgcggatgctgcaggtgctaagagatgtgccggatattgaaactcatctcatcctcagccaggcggcgcgccagacgttggccatggagaccgactactccgtacgtgaggtgcaggcgctagccgatgtggtgcatgacgcccgcgatatcgccgccagtatctcttccggttcttttaaaaccgccgggatggtgattttaccctgctcaatgaagacgctctcgggcattgtccatagctatacggatggcctgctgacccgggcggcggatgtcgtgctgaaagagcgtcgtccgctggtgctctgcgtgcgggaaacgccgttccatttgggccatctgcgtctgctggttcaggctgcagagctgggggcggtgataatgccgccggtaccggctttttaccaccggccacaaagcctggacgatgtcatcaaccagaccgtcaatcgggtactcgatcaatttgatattagtctggagcacgacttgtttacccgctggcagggggcctag

SEQ ID NO: 209577 - DNA, 783 bp, Klebsiella pneumoniae
atgaagaagacgattctggctctctctttactcgtgggaatgagcagcacggccagcgtgtttgctgctctgccgcagagcattcgcattggcactgacgcgacctatgcgccattttcgtcgaaagacgcgaaaggggactttgttggttttgatatcgatttaggcaatgagttgtgctcccgaattaaggtgaaatgtacctgggtcggcagtgattttgactccctgatcccctccctcaaagcgaagaaaatcgacgccatcatctcttccctctctattaccgagaagcgccagcaagagatcgccttctctgacaagctatatgccgctgactcgcgtctgatcgccgccaaagggtcgccgatccagccgacgctggaggcgctgaaaggcaagcacgtcggcgtgctgcagggttctactcaggaagcctatgctaacgaccgctggcgcagccagggcgttgacgtggtggcttaccagaaccaggatctgatctattcagacctcgcagctggccgtctggatgcggcgctgcaggatgaagtcgccgccagcgaaggcttcctgaaacagcctgccgggaaagatttcgccttcgccggcccgtccgttaaagacaaaaagtactttggcgacggcaccggtatcggcctgcgtaaggacgacgccgagctgaaagccgcgtttgataaagcgctgggcgagatgcgtaaagacggcacctacgacaaaatggcgaagaaatacttcgattttaacgtgtacggcgactaa

SEQ ID NO: 209578 - DNA, 783 bp, Klebsiella pneumoniae
atgaaaaaactggcgttgtctctctctttagcgctggccctttccagcgtttccacggtctttgccgccatcccgcaaaaaattcgtatcggtaccgatccgacttatgctcccttcgaatcgaagaatgcgcagggagaattggtcggttttgatatcgatctggcaaaagagctgtgtaagcgtattaatacgcaatgtacctttgttgaaaacccgctggatgcgctgatcccctccttaaaagcgaagaaaatcgacgcgattatgtcttcgctgtcgattactgaaaagcgccagcaggaaattgccttcactgacaagctgtatgcggcagattcgcgtctggtggtgaaaaagggcagcccggtaacgccggatctcgccaccctcaagggtaagcgcgtgggcgtgctgcaggggacgactcaggaaacctatggcaatgagcactgggcgccgaaaggtatcgaaattgtctcctatcaggggcaggacaatatctattccgacctgaccgccggccggatcgacgccgcgttccaggatgaggtcgcggccagcgaagggttcctgaaacagcctattggtaaagattaccagtttggtggcccgtcaatcaaagacgagaaactgtttggtgttggcaccggtatggggctgcgtaaggaagacaacgaactgcgtgaagcgctgaataaggcgtttgcggagatgcgtaaggacggcacctacgacaagctggcgaaaaaatatttcgattttaacgtatacggcgaataa

SEQ ID NO: 209579 - DNA, 687 bp, Klebsiella pneumoniae
atgctgtatgggttttcacaggttattttgcagggtgcgctcgtcaccctggagcttgcgctcagctcggtcgttctcgccgtcctgattgggctggcgggcgctggcgcaaagttatcgagcaaccgtccactggcgctggtgtttgaaggctataccactctgatccgcggcgtgcccgatctggtgctgatgctgctgattttctacggcctgcagattgcgctaaacagcgttaccgacgcgctgggcatggcccagtttgatatcattccgatgatcgccgggattattaccctcggctttatctatggcgcctattttacggaaaccttccgcggcgcctaccttgcggtgccgaaggggcatatcgaagcggccaccgcctttggctttagcggcgggcagacgttccggcgtattctcttcccggcgatgatgcgctacgcgctgccggggataggcaacaactggcaggttatcctcaaggcgacggcgctggtctcgttgctagggctggaggatgtggtcaaagccacgcagctggccgggaaaagcacctggcagccgttctacttcgccatcgtctgcggcctgatttatctggtgtttaccaccgtttctaatggcgtactgctgctgctcgaacgccgctataccgttggcgtgaagagggctgacctgtga

SEQ ID NO: 209580 - DNA, 717 bp, Klebsiella pneumoniae
gtgattgaaattattcaggagtactggaaatcactactgtggaccgacggctatcgctttaccggcgtggcgattaccttatggttgctgatctcttcagtggtaatggggggcatcctggcggtgtttctggccatcggccgcgtctcgagcaataagtttatccagttccccatctggctgttcacttacatatttcgcggcacgccgctgtatgtgcaactgctggttttttactccggcatgtataccctggaaatcgtcaaaggcacggagctgttgaacgcttttttccgcagcgggctaaactgcacggttctggcgttaaccctgaatacctgcgcctataccactgaaattttcgccggcgcgatccgctcagtacccgccggagaaattgaagcggcgcgggcctacggcttctcgtcagtcaaactgtatcgctgcattattctgccttccgcgctgcggattgcactgccggcctacagtaacgaagtgatcctcatgctgcactctaccgcgctggcgtttaccgctacggtaccggatctgctgaaaatcgcccgcgatatcaactcggccacctatcagccgttcaccgcgtttggcatcgccgcggtgctttatttaattatctcgtatgtgctgattagcttgttccgtaaagcggaaaagcgctggttgcagcatatcaaaccttcttcgacgcattga

SEQ ID NO: 209581 - DNA, 774 bp, Klebsiella pneumoniae
atgtccgacaataaattaaacgttatcgatctgcataaacgctatggggaacacgaggtgctgaagggcgtctcgctgcaggcgaaagccggggacgttatcagcatcatcggttcatcgggctccggaaaaagtacctttttgcgctgtattaacttccttgaaaaaccgagcgaaggcacgatcgtcgtcagcggccaaaatattggtctggtacgggataaagacggccagctgaaggtggccgacaagaaccagttgcgcctgctgcgcacccggttgaccatggtgtttcagcatttcaatctgtggagccatatgacggtgctggagaacgtcatggaagcaccgattcaggtgctgggcttaagcaaacaggaagcgcgcgaacgggcggtaaaatatctggccaaggtcgggatagacgaacgtcagcaggcgaagtatccggtgcatctttccggtggccagcagcagcgtgtctctattgcccgcgcgctggcgatggaaccggaagtgctgctgtttgatgagccgacctccgcgctggatccggaactggtgggcgaagtgttacgcattatgcagcagctggcggaagagggaaaaaccatggtggtggtgacccatgaaatgggctttgcccgccacgtctcttcacatgtcatttttctgcatcagggtaaaattgaagaagaagggcatccggatgcgctgtttggcgcgccgaaaagcccgcgcctgcagcagtttctgaaaggttcgctgaaataa

SEQ ID NO: 209582 - DNA, 528 bp, Klebsiella pneumoniae
atgacgaccatcaccacaccacgcctttcgcttacccgctttgttaccgatgactggcccttttttctgcgcctgcgccaggatccgcaggtgatgcgttttatgggggaggtgttaagcgaggaggtgctgcgcagcgtcttcgtcagtcgctgtgccgatcccggggtgtttgtattgcgcgataaattcggcgaggcgctgggcgatattgggctccgcatcagtccgaaaaatccgcacgaagctgacgtcggctacgcgctgctgcctcaggctcagggaaaaggctatgccagcgaagcgctgcgggcggtctgcgagtatggtttcaccaccctgggggtgcaggccatcaatgcctgggtgctgggtgaaaaccgtggctcatcgcgcctgctggagaagcaaggctttgtgcgcacccaggtgctggagaaagcctatcatctgaacggcgtcgattacgatgactggatctatcggctggagcgggaagctcatccggcgtccgcagacgccggatga

SEQ ID NO: 209583 - DNA, 894 bp, Klebsiella pneumoniae
atgaagatcctgcttactggtggtaccggcctgattggccgacatctgatacccagattgctggagctcgggcatagcgtcacggtctccacgcgacatccggataccgcccgcgcccgtctcgatccgcgcgtcaccctgtggcgcgatttcgagggccatcaccacctcaatgatattgatgccgtcatcaatctggcgggtgaacccatcgctgataaacgctggacggccgagcagaaacaacgcttgtgccatagccgctgggatctcacgcagcggctggtgggcctgatccacgccagcgacacccctccctccgtgctgatcagcgggtctgccatcggctactatggcgacctcggcgaagtggtggtgaccgaagaagagccaccgcacaatgagtttacccataagctgtgcgcccgctgggagcaaattgcctgcgaagcgcaaagcgagcgcacccgcgtctgcctgctgcgcaccggcgtggtactggctccgcggggcggtattctcggcaaaatgacacccgcctttaagctcggcctcggcgggcctatcggcaatggcagacagtacctggcctggatccatatcgacgatatggttaacggcattctgtggctgctggataacgatctgcgcggtccgttcaatatggtttctccctacccggtgcataacgagcagttcgcccatgcgctgggtcatgcgctccatcgaccggcgattttccgcgttcccgccgccgctatccgcctgttgatgggggaatccgccgtcctggtgctcggcggccagcgcgcgctgccaaagcgtctggaggccgccggctttgccttccgctggtacgatctggacgaagcgctaaaggatgtgctgagttaa

SEQ ID NO: 209584 - DNA, 363 bp, Klebsiella pneumoniae
atgtctcaaccagacgccattattcgtattaagaacctgcgcctgcggacttttattggtattaaagaggaagagatcgccaaccgccaggacgtggtagtgaatgtagccattcactaccctgccgataaagcgcgcgacagcgaggacatcaatgatgcgctgaactatcgcaccattaccaagcgcataatcagccatcttgagaatggccgtttttcgctgctggaaaaattaactcaggatgtgctgaatatcgcatgcgaacatcactgggtcacatatgctgaagtggagattgataaacttcatgcgctgcgctatgccgactcggtgtccatgaccatgagctggcgtcgctaa

SEQ ID NO: 209585 - DNA, 630 bp, Klebsiella pneumoniae
atgatcgatctttactatgcacccaccccaaacggccacaaaatcaccctgttcctcgaagaggcggagctagcctatcggctaattcgggtcgatatcggcaaaggggaacaatttcatccgcagtttctggcgatttcgccgaataataaagttccggctatcgtcgaccacatgcctgctgacggcggggcgccgttgagcgttttcgagtcaggcgccatcctgctctatctggcggaaaaaagcggtaagctgctgagcggcgagctgcgggaacgctacgtcacgctgcagtggctgttctggcaggtcggcgggctggggccgatgctggggcaaaatcaacatttttcccactccgcgccgcaaaccgtgccctacgctattgaacgttttcaggtggaaacccaacgactgtatggggtgctaaatcagcgtctgggatgcagcccgtggcttggcggcgaccactacagtatcgccgacatcgccgcctggccctgggtgaactgccatgtccgacagcgtatcgatctggcgaactatccggcggtgcacaactggtatgagcgcattaagcagcggccggcaacgtcggaagcgatgttaaaaattcagctttattaa

SEQ ID NO: 209586 - DNA, 639 bp, Klebsiella pneumoniae
atgagtcagcctgtcattaccctgtggtccgatgccgattttttctcaccgtacgtgatgtctgtctatgtcgctctgcaggaaaaaagcctgccttttacccttaaaaccgtcgacctgaaccgcggcgaacatctgcaggcgggctggacaggctatgccgccacccgtcgcgtaccgctgctggaggttgatgatttcgcgctaagtgagtcttcggcgattaccgagtatctggatgagcgtttcgcgccgccggagtgggagcgcatctacccgcatgatctgcaaaaacgagcccgcgcccggcagatccaggcctggctgcgcagcgatctgatgccaattcgtgaagagcgatccaccgccgtggtgtttgacggggcgaaaatgccggacctcagcgaggccggcaggcaatctgcggaaaagctgtttgccaccgccaccatgctactggcccacggcgggcaaaatttatttggcgaatggtctattgccgacgcagacctggcgctgatgctcaatcgcctggttctcaatggcgataaggtaccggaggcgctggctgattatgcgtctttccagtggcagcgggcctcaatccagcgttacgtggcgctttccgccaaacgctga

SEQ ID NO: 209587 - DNA, 552 bp, Klebsiella pneumoniae
atgaagctgatgtttgcctccgatattcatggttcgctgcccgccacggaacgcgtgcttgaacggttcgcgcaaagcggcgccaggtggctgatcatactcggcgatgtgctcaatcacggtccgcgcaacgcgctgcctgaggggtatgcgccgggtaaggtggcggagcggttgaacagcgtggcggaacgcattgttgccgttcgcggcaactgcgacagcgaagtggatcagatgctgcttcgttttccaatgaccgcgccctggcagcaggtgcttagcgaacgctatcgcctgtttctgacccacgggcatctctatagtccggataatctgccgccgctggccgctggcgatgtcctggcatatggccatactcatataccggtcgcggaaaaacgcggcgcaatttacctctttaatcccggctcagtgagtatcccgaaagggggatattccgccagctatgggctgctggatcaggggcggctgcaggttttagcactcaatgataatcaggttattgcagaggttgcaatttacccgtaa

SEQ ID NO: 209588 - DNA, 552 bp, Klebsiella pneumoniae; identical to SEQ ID NO: 136428

SEQ ID NO: 209589 - DNA, 2148 bp, Klebsiella pneumoniae
gtgtcccgtactatcatgttaattcctaccggtaccagcgtaggtctgaccagcgtcagcctcggtgtgatccgcgctatggaacgcaaaggcgttcgtctgagcgtctttaaacctatcgcccagccgcgttccggtggcgatgccccagaccagaccaccaccatcgttcgcgccagctcctccaccaccaccgccgctgaaccgctgaagatgagccatgttgagtctctgctctccagcaatcagaaagatgtgctgatggaagagatcattgccaactaccacgcgaatactcaggacgcggaagtggtgctggtggaaggcctggtaccgacccgtaagcatcagttcgcccaggcgctgaactttgaaatcgccaaaacgctgaacgctgaaatcgtcttcgtgatgtctcagggcaccgacacgccagaacagctgaacgagcgtatcgaactgacccgtaacagctttggcggcgccaaaaataccagcatcaccggcgttatcgtcaacaaactgaatgcccctgtcgacgatcagggccgtacccgtcctgacctgtcggaaattttcgacgactcgtcgaaagcaaaaatcgtgaagattgacccggctcagctgcagaaaggcagcacgctgccggtgctgggcgcagtgccatggagcttcgatctgatcgcgacccgcgcgatcgacatggcgcaccatctgaatgcgaccatcatcaacgaaggcgatatcaatacccgccgcgtgaaatccgtgactttctgcgcgcgcagcatcccgcacatgctggaacacttccgccctggttctctgctggttacctccgcagaccgtcctgacgtgctggttgcggcctgcctggcggcaatgaacggcgtggaaatcggcgccattctgctgaccggcggctatgaaatggacgcgcgcatcagcaagctgtgtgaacgcgctttcgcgaccggcctgccggtatttatggtcaacaccaacacctggcagacctccctgagcctgcagagctttaacctcgaagtaccggttgacgatcacgagcgtatcgagaaagttcaggaatacgtggccaactacatcaacgccgactggatcgaatcgctgaccgcgacctccgagcgcagccgccgtctctctccgccagccttccgctaccagctgaccgagctggcgcgcaaagccggcaaacgtgtcgttctgccggaaggcgacgaaccgcgtaccgtgaaagcggcggcgatttgcgccgaacgcgggatcgccacctgcgtcctgctgggtaacccggatgagatcaaccgcgtagccgcggcccagggcgtggagcttggcgccggcattgaaatcgtcgatccggaagtggttcgcgaaagctatgtgggtcgcctggtcgaactgcgtaagaacaaaggcatgaccgaagcggtcgcgcgtgagcagctggaagacaacgtggttctcggcaccctgatgctggaacaggacgaagtcgacggtctggtatccggcgcggttcacaccactgccaacaccattcgtccgccgctgcagctgatcaaaaccgcgccgggcagctcgctggtctcctccgtgttcttcatgctgctgccggaacaggtttacgtttacggcgactgcgcgatcaacccggacccgaccgccgagcagctggcggaaatcgctattcagtccgctgaatccgcgattgccttcggcatcgaaccgcgcgtggcgatgctctcctactccaccggtacctccggcgcgggtagcgatgtcgagaaagtccgcgaagcgacccgtctggcgcaggaaaaacgtcctgacctgatgatcgacggcccgctgcagtatgacgccgcggtgatggctgacgtagcgaagtccaaagcgccgaactcaccggtagctggccgcgcgaccgtgttcatcttcccggatctgaacaccggtaacaccacgtacaaagcggtacagcgctctgccgacctgatctccatcgggccgatgctgcagggtatgcgcaagccggtcaacgacctgtcccgtggcgcgctggtagacgatatcgtctataccatcgcactgaccgcgatccaatcggctcagcagcagaagtaa

SEQ ID NO: 209590 - DNA, 1203 bp, Klebsiella pneumoniae; identical to SEQ ID NO: 139480

SEQ ID NO: 209591 - DNA, 456 bp, Klebsiella pneumoniae; identical to SEQ ID NO: 139481

SEQ ID NO: 209592 - DNA, 495 bp, Klebsiella pneumoniae
atggaaatgaccaatgcgcagcgtctgattttatccaatcagtacaaaatgatgacgatgctcgacccggataatgcggaacgctaccgtcgtctgcaaaccatcatagagcgtgggtatgggctacagatgcgtgaactggaccgcgagtttggccagttgacggaagaaacctgccgtaccgttattgatatcatggagatgtaccacgcgctgcacgtctcctggaccaacctgaaagacgcggcgggtatcgatgaacgccgggtcaccttcctcggatttgatgccgccaccgaagcgcgttatctcggctatgtgcgttttatggtcaacgttgaaggccgctacagccattttgacgccggtacccatggctttaactcgcagaccccgatgtgggagaaatatcagcggatgctgagcgtctggcacgcttgcccgcgccagtatcatctgagcagtaatgaaattaatcaaattatcaacgcctga

SEQ ID NO: 209593 - DNA, 660 bp, Klebsiella pneumoniae
gtgcagtgtaaaggtttcctgttcgatttagacgggacgctggtggattccttgccggtggtggagcgttcatggtgcaagtggggggatcgtttcgccattgaccatgatgaaattctcagttttattcacggcaagcaggccattacctccattcgccattttatgccggggcgcagcgaggaggatatccaggccgaatttcgctacctcgagcagatagaagccactgatattgagggtatcgtcgcgctgccggaggcattagccctgctgaatacgctcaatgaggccgggatcccgtgggcgattgtcacctccggctcgattccggttgcccacgcgcgtcaccgcgcggcgggcctgccgatgcctgaggtgttcgtcaccgccgagcaggtgaaacacggcaaaccggcgccggacgcctatctgctgggcgccgagcggctgggtctgcctgccggggagtgcgcggtggtggaagatgcgccggcggggctcctctccggactggcggccggctgtcgcactatcgcggtcaacgtgcccgccgatgcccctcgcctggatgaagccgacctcgttctgagcagcctggaagatctggtggttgaacgccagactgacggcgtggtaaatgtgcgtcttaaagcgtaa

SEQ ID NO: 209594 - DNA, 1833 bp, Klebsiella pneumoniae
gtgaacggtgaattgatttgggttttatccctcctggccatcgcggttgtgctgtttgctaccggcaaggtgcgcatggatgctatcgccctgatggtcattgtcgcctttgtcctcagcggaacgctgacgttaaatgaagctttttccggattcagcgatcctaacgtgatcctgattgccgccctgtttattatcggcgatggcctggtgcgcaccggagtcgccaccaaaatgggggcatggctggtgagcgtggcggggaacagcgaaaccaaaatgctgatctacctgatgctcaccgtcgccggtctgggcgcgtttatgagctccaccggggtggtcgccattttcatcccggtggtacttagcgtctcggcgcggatgaatacctcgccatcgcggctgatgatgccgctgagcttcgccgggcttatcagcgggatgatgaccctggtggcgacgccgcccaacctggtggtcaacagtgaattgctgcgcgagggactgcacggcttcagctttttcagcgtcacgccgattggcctggtggtgctgatcctgggcatcgtctatatgctggcggtgcgctttatgctgaagacggataatggcgactccgcacgcgatgggcgaaaaagaagcaccttccgcgatttgatccgcgagtatcacctcaccggccgcgctcgccggctggccatccgcccgggttcgccgatgatcggtcagcggctggatgatttaaagctgcgtgagcgctactgcgccaacgtgatcggcgttgaacgctggcggcggttccgccgggtaattgtcaacgtcaacggggtatcggaatttcgcgcccgcgacgtcctgctgatcgatatgtccgcctccgatgtcgatttacgccagttctgcggcgagcaaatgcttgagccgatggtattgcgcggcgagtattttgccgatcaggcgctggatgtggggatggcggaggtggcgctgatcccggattcagagatgattggcaaaacggtgcgtgagatagccttccgcacccggtttggtctcaatatcgtcggcatgaagcgcgatggcaaagcgatggatggttcggtggtcgatgagccgctgcagctcggcgatatcctgctggtggtcggcaactggcggcaaattgccctgctggcgaagcgcggccgggatttcgtggtactcaatatgccggttgaggtcgatgacgcttcgccggcccacagccaggctccgcatgcgattttctgcctggtgctgatggtagccctgatgctcaccgatgaaattcccaacccgattgccgcgattatcgcctgtctgctgatgggcaaattccgctgcatcaatgccgaaagcgcctacaaggcgatccactggccgagcattattttgattgttgggatgatgccgtttgccctggcgctgcaaaaaaccggcggggtggatctggtggtgaagggactgatggatgtcgccggaggcgaggggccttatctgatgctcggctgcctgttcatgatgtgcgcggcgattgggctgtttatctcaaacaccgccacggcggtgctgatggcgcctattgccttagcggcggcgaagtcaatgggcgtctctccctatccttttgccatggtggtggcgatggcggcttcggcggcgtttatgaccccggtctcctcgccggttaacaccctggtgcttggccctggcaagtactcatttagcgattttgtcaaaataggcgtgccctttaccatactggtgatggtggtctgcgtcctgctgatcccggtactgtttccgttttaa

SEQ ID NO: 209595 - DNA, 600 bp, Klebsiella pneumoniae
atgagtcagagtcatttctttgcccacctctcccgcctgaaactgattaaccgctggccgctgatgcgcaacgtgcgcaccgaaaatgtctccgaacacagtctgcaggtggcgatggtcgcccatgcgctggcggcgattaaaaaccgcaaatttggcggccaggtcaacgccgagcgtatcgccctgctggcgatgtaccatgacgcctcggaagtactaactggcgatctccctactccggtgaaatatttcaattcgcagattgcccaggaatataaggcgattgaaaaaattgctcagcaaaagctggtggatatggtccctgacgagctgcgcgatattttcgagccgctgattgatgagcatcactacagtgaggaagagcagtcgatcgttaaacaggctgacgccctctgcgcttacctgaagtgcctcgaagagctatctgcaggcaataacgaatttctgctggccaaaggtcggctggaaaagaccctggcatcgcggcgcagcgcggagatggattactttatgcaagtgttcgtcccaagcttccagctgtcgctggacgaaattagccaggattcgccgctgtaa

SEQ ID NO: 209596 - DNA, 1218 bp, Klebsiella pneumoniae
atgtcccccatcgaaaaatccagcaagttagagaacgtctgttatgacatccgcggcccggttctgaaagaagccaaacgtcttgaagaagaaggcaataaggttctgaaactgaacatcggcaacccggcgccattcggcttcgaggcccctgacgagatcctcgtcgacgtcatccgcaatttgcctaccgcccagggttactgcgattcgaaaggattgtactcggcgcgtaaagctatcatgcagcattaccaggcccggggtatgcgcgatgtcacggtggaagacatctatatcggcaacggcgtgtccgagctgattgtgcaggcgatgcaggcgctgttaaacagcggcgatgagatgctggttcccgccccggactacccgctgtggacggcggcggtgtcgctttccagcggcaaagcggtgcactatctgtgtgacgaatcctctgactggttcccggatctggacgacatccgcgcaaaaatcacaccgcgcacccgcgggatcgtgatcattaaccctaacaaccccaccggcgcggtctattccaaagaattgctgcaggagatcgtggagatcgctcgtcagcataatctgatcattttcgccgatgaaatttacgacaagatcctctacgacgaagcccagcatcactctattgccgccctggcgccggacctgctgacggtgacctttaacggattgtcgaaaacctaccgcgttgccggcttccgtcagggctggatggtgttgaatggcccgaaaaaacacgcgaagggctatatcgaagggctggagatgctggcttcaatgcgtctgtgcgccaacgtgccggcccagcatgctatccagacggcgctgggcggctatcagagcatcagcgaattcatcatccccggcggacgcctgtatgaacaacgcaaccgcgcctgggagcttatcaacgatattccgggcgtctcctgcgtgaagccaaaaggcgcgctgtatatgttcccgaaaatcgatgccaaacgcttcaatattcatgacgaccagaaaatggtgctcgacttcctgctgcaggagaaagtcctgctggtgcagggcaccgcctttaactggccgtggccggatcacgtacgcatcgtgaccctgccgcgcgaagacgacctggagatggctatctcccgctttggccgcttcctctccggctaccatcagctttaa

SEQ ID NO: 209597 - DNA, 927 bp, Klebsiella pneumoniae
atgattaatacaactcgtcccatactcaacctcgatctcgatctgctgcgtacctttgtcgcggtcgctgatttgaacacttttgccgccgccgccgccgcagtgtgtcgtactcagtccgcggtcagtcagcaaatgcaacgcctggaacagctggtgggcaaagagcttttcgcccgccacggccgcaataagctgctgaccgagcaggggatccagctgctgggctatgcccgcaaaattctccgttttaacgatgaagcctgtatgtcgctgatgtatggcagcctgcagggggctctgagcatcggcgcgtcagaagaaacggctgacaccatcctgccgtttttgttaaaccgcatcggctgtttctatcccagaatgacgttggagatcaaagttcacccccatgccgccatcatggagatgttggccgaggggctggtcgatctggcgttgaccacccatcagcctcccggctttacctcttttaccctgagaacatcacctactctctggtattgtgcagcggaatatgtgctggcgaagggggaatctatccccctgatcctgctcgaagagccaagcccattccgccaggatattatcgccgcgctggaaactgctcgcgtcagttggcatctggcccacggagcttcctcgctatcgggcgtgaaagcggcggtgaaggccgggctgggcgtgacggcgcgcccggtcgaaatgatgagcccggatctacgcgtggctggcatcagtgaggggttaccggcgttgccggacacccggtacgtcgtcagctgcaatccgcggacggtgagcgaactgccgcaggcgatttttcagtctctgagtcaggagatccatccctgggaaacgggcacagcacttactccggaagagggagggaataccttggttttgtaa

SEQ ID NO: 209598 - DNA, 360 bp, Klebsiella pneumoniae
atgctcgtcggcggctggtaccttggcggtcgcgcgcgcgcgcgtagtaaaaacacgccgtttgaatcggggatcgactccgtcggttcggcccgcttacgtctttctgcgaagttttatctggttgccatgttcttcgttatcttcgacgtggaagccctgtatctctacgcatggtcgacctctatccgcgagagcggctgggtcggctttgtggaagccgcaattttcattttagtgctactggctggtctggtttatctcgttcgcatcggcgcactggactggacgcccgcgcgttcccgtcgcacgctggttaacccggaaacagacagtcccactaaccgtcatatgcagtaa

SEQ ID NO: 209599 - DNA, 675 bp, Klebsiella pneumoniae; identical to SEQ ID NO: 139153

SEQ ID NO: 209600 - DNA, 1809 bp, Klebsiella pneumoniae
atggtgaacaatatgaccgatttaaccgcgcatgacgccgcaccagcctggcaaacccgcgatcaccttgatgacccggtgattggcgaactgcgcaaccgctttgggccggatgcctttaccgttcagccaacccgtaccggcgtaccggtggtatgggtgaagcgtgaacagctgctggaggtgggtgatttcctgaagaaattgccgaagccttacgtgatgctgtttgacctgcacggcatggacgaacgtctgcgcacgcaccgcgatggcctgcccgccgcggatttttccgttttctatcacctgatctccatcgatcgcaaccgcgacatcatgctcaaggtggcgctgtcggaaaacgatctgcatctgccgaccttcaccaaactgttccccaacgccaactggtatgagcgtgaaacctgggaaatgtttggcattaccttcgatggtcacccgaacctgcgtcgcatcatgatgccgccgacctgggaaggtcacccgctgcgtaaagattatccggcgcgtgccaccgagttcgacccgtttgagctgaccaaagccaaacaggatctggagatggaggcgctgacctttaaaccggaagagtggggcatgaagcgcggcaccgacaacgaggacttcatgttcctcaacctcggtccgaaccacccatcggcgcatggtgcgttccgcattattctgcaactggacggcgaagagatcgtcgactgcgtaccggatatcggttatcaccaccgcggcgccgagaagatgggcgagcgtcagtcctggcacagctacatcccgtataccgaccgtattgaatatctcggcggctgcgtcaacgagatgccgtacgtgctggcggtggaaaaactggctgggatcaccgtaccggatcgcgtgaacgtgatccgcgtgatgctctccgagctgttccgcatcaacagccacctgctgtatatctcgacctttattcaggacgtcggcgcgatgacgccggtcttcttcgcctttaccgatcggcagaaaatttacgatctggtggaagcgattaccgggttccgtatgcacccggcgtggttccgcatcggcggcgtcgcgcacgatctgccgcgtggctgggatcgcctgctgcgtgagttcctcgagtggatgccgaagcgtctggactcctatgagaaggccgccctgcgcaacaccattctgaaaggccgttccgtcggcgtggcagcctataccgccaaagaggcgctggagtggggcaccaccggcgcaggcctgcgcgccaccggtatcgacttcgacgtgcgtaaatggcgtccttactctggctatgaaaacttcgacttcgaagtcccgaccggggggggcgtctcagactgctacacccgcgtgatgctgaaagtagaagagctgcgccagagtctgcgcattcttcagcagtgcctcgataacatgccggaaggcccgttcaaagcggatcacccgctgaccacgccgccgccgaaagagcgcacgctgcagcatatcgaaaccctgatcacccacttcctgcaggtatcgtggggcccggtgatgccggccaacgaatctttccagatgattgaggcgaccaaagggatcaacagttactacctgaccagcgacggcagcaccatgagctaccgtacccgcgtgcgtacgccgagctttgcgcacctgcagcagatcccgtcggcgatccgcggcagcctggtatccgacctgatcgtctatctgggtagtatcgattttgttatgtcagacgtggaccgctaa

SEQ ID NO: 209601 - DNA, 501 bp, Klebsiella pneumoniae
atgcacgagaatcaacaaccacaaaccgaggcttttgagctgagtgcggcagagcgtgaggctattgagcacgagaagcaccactacgaagacccgcgtgcggcgtccatcgaagcgctgaaaatcgttcagaaacagcgcggctgggtgccggatggcgcgatctacgccatcgccgatgtgctggggatcccggccagcgacgtggaaggcgtggcgacgttctacagccagattttccgccagccggttggccgtcacgtgatccgctactgcgacagcgtggtatgccacatcaccggctatcagggtattcaggccgccattgagaagaaactgaatatcaagccggggcagaccacctttgatggccgctttaccctgctgccgacctgctgcctgggtaactgcgacaagggaccgaccatgatgattgatgaggatactcacagccatctgacgccggaggcaattcctgacctgctggagcagtacaaatga

SEQ ID NO: 209602 - DNA, 1338 bp, Klebsiella pneumoniae
atgaaaaccgtaattcgtactgcggaaacgcatccgctcacctggcgcctgcgcgacgacaagcagccggtgtggctggacgagtatcgcagtaaaaatggctatgaaggggcgcgtaaagccctgaccgggatggccccggatgagattgtcacggcggtaaaagacgctggcctgaaagggcgcggcggcgcgggcttctccactggtctgaagtggagcctgatgccgaaagacgaatccatgaacatccgttacctgctgtgtaacgccgatgaaatggagccgggcacctataaagaccgcctgctgatggagcagctgccgcacctgctggtggaaggcatgctgatctccgcgtttgcgctgaaagcgtaccgcggctacatcttcctgcgcggggaatatattgaagcggcccagcatctgcgtcgcgcgattgctgaagccaccgaagcgggtctgttggggaaaaacatcctcggcaccgggtttgacttcgagctgttcgtgcacaccggggcagggcgctatatctgcggcgaagagacggcgctgatcaactctctggaaggccgccgcgccaacccgcgatccaagccgccgttcccggcgagctccggcgtctggggcaagccgacctgcgtcaacaacgtagaaaccctgtgcaacgtgccagcgatcctcgccaacggcgtcgagtggtaccagaacatttccaccagcaaagatgctggcaccaagctgatgggcttctccggccgggtgaagaatccgggcgtctgggagctgccgttcggcaccactgcccgcgagatcctcgaagattacgccggcggtatgcgcgatggcctgaagtttaaagcctggcaaccgggcggagcagggaccgacttcctcaccgaagcgcacctcgatctgccgatggaattcgaaagcattggtaaagcgggcagccgtctgggcacctcgctggcgatggccgttgaccacgagatcaacatggtctcgctggtgcgtaaccttgaagagttctttgcccgcgagtcctgcggctggtgtacgccgtgccgcgatggtctgccgtggagcgtgaagatcctgcgcgccctggagcgcggcgaaggccagcctggcgatatcgaaacccttgagcaactgtgtcgattcctgggcccgggtaaaaccttctgcgcgcacgcgccgggcgcggtcgagccgctacagagcgcgattaaatatttccgcgaagaattcgaggctggcattaagcagcagttcagcaatacccatgcaatcaacgggattcagccgaacctgcttaagacgcgctggtaa

SEQ ID NO: 209603 - DNA, 2727 bp, Klebsiella pneumoniae
atggctacgattcatgtagacggcaaagaatacgaggtcaacggggcggacaacctgctagaggcttgtctctctcttggtcttgatattccctacttttgctggcacccggcgctagggagcgtcggtgcttgccgccagtgtgcggtgaagcaatatcagaacgcggaagacacgcgtggtcgcctggtgatgtcctgtatgactccggcatccgacggcacctttatttctatcgacgacagcgaagcgaagcagttccgcgaaagcgtggtggagtggttgatgactaaccacccgcacgactgcccggtctgcgaagagggcggcaactgccacctgcaggatatgacggtgatgaccggtcatagcttccgccgctatcgtttcaccaagcgtacccaccgcaatcaggatctggggccgtttatttcgcacgaaatgaaccgctgcatcgcctgctaccgctgcgtgcgctactacaaagattatgccgacggcaccgatctgggcgtctatggcgcgcacgacaacgtctacttcggccgcccggaagatggcaccctggagagcgagttctccggcaacctggtggaagtctgcccgaccggcgttttcaccgacaaaacccactccgagcgctataaccgtaagtgggacatgcagtttgcgccgagcatctgccagcagtgttccatcggctgtaacatcagcccgggcgaacgctatggcgagttgcgtcgtatcgaaaaccgctataacggcaccgtgaaccgctacttcctctgcgaccgcggtcgtttcggctatggctacgtgaacctgaaagaccgtccgcgtcagccggtgcagcgccgcggcgacgatctgatcacccttaacgccgagcaggcgatgcagggggcggcggatatcctgcgccagtcgaagaaagtgatcggcatcggttccccgcgcgccagcattgaaagcaacttcgcgctgcgcgagctggtgggcgccgacaacttctataccggcatcgccaaaggcgaacaagcgcgcctgcagatgatgctgaaagtgctgcgcgagggcgggatccacacgccaagcctgcgcgatatcgaatcctacgatgcggtactggtgctgggcgaagacattacccagaccggcgcgcgcgtggccctggcggtacgccaggcagtgaaagggaaagcacgcgaaatggcggcggcgcagaaagtggccgactggcagatcgccgcgatcctcaacatcggccagcgcgccaagcacccgctattcgtcaccaacgtcgatgacacccgcctggatgacatcgcggcgtggacctaccgtgcgccggtagaagatcaggcgcgtctcggctttgctattgcccatgcgctggacgacagcgcgccggcggttgacggcctgagccaggacctgcagggtaaagtcgacgttatcgttcaggcgctggccggggcgaaaaaaccgctgatcatctccgggaccaacgccggcagcatggagatcatccaggccgccgctaacgtggcgaaagctctgaaaggccgcggcgccgatgtcggggtgaccatggtcgcccgggcggttaacagcgtcggactgggcatgatcggcggcggctcgcttgaagaggcgctggacgaactggaaagcggcgccgcagacgcggttatcgtgctggaaaacgaccttcaccgtcatgcttccgccgcgcgcgttgacgctgcgctggcgaaagcgccgctggtgatggtggtggatcatcagcgcaccgcgattatggacaaagcgcacctggtgctctccgcggcaagctttgcggaaagcgacggtaccgtggtgaacaacgaaggtcgcgcccagcgtttcttccaggtttacgatccggcttactacgacgcgaaaaccgtaatgctggaaagctggcgctggctgcattcgctgcacagcaccgtcaacaaccgtcaggttgactggactcagctggaccacgtcattgatgcggcgattgccgcgctgccgcagctggcgggcattaaagacgccgcgccggatgcgaccttccgcatccgcggccagaagctggcgcgtgaaccgcaccgctacagcggccgcacggcgatgcgcgctaacatcagcgtgcacgagccgcgtcagccgcaggataaagacacgatgttcgccttctccatggaagggaacaaccagccgtccgccccgcgttcgcagatcccgttcgcttgggcgccgggctggaactccccgcaggcatggaacaagttccaggatgaagtgggcgggaaactgcgccacggcgatccgggcgttcgtctgtttgaagcgtccgccagcggactggagtacttcacggcggtgccggccagcttccaggcggaagagggcaaatggcgaattgcgccgtactaccatctgttcggcagcgatgagctgtctcagcgcgcgccggtgttccagagccggatgcctgagccgtacatcaagctgaacccggcggatgccgcgaagcttggcgtcaacccaggcgcaatgctctcctttagcgtggaaggccagaccctgcgtctgccgctggttatctctgaaggcctgaccgcgggacaggttggcttaccgatgggcatgccgggcattgcgccggtgctgaccggatcgcgtattgattcactgcaggaggcgaaagcatga

SEQ ID NO: 209604 - DNA, 978 bp, Klebsiella pneumoniae
atgagctggttaacgccggatcttatcgacattctgttaagcatcctgaaggccgtggtcattctgctggtggttgtcacctgcggcgcgttcatgagcttcggcgagcgtcgtctgctcggcttgttccagaaccgctacggacctaaccgcgtcggctggggcggttcgctgcagctggtcgccgacatgatcaagatgttctttaaagaggactggatcccgcgcttctccgatcgcgtgatctttactctggcgccggttatcgcctttacctcgctgctgctggccttcgctatcgtgccggttagcccgacgtgggtggtggccgacctgaacatcggcatcctcttcttcctgatgatggcaggcctggcggtctacgcggtgctgttcgccggttggtcgagcaataacaaatactcgctgctgggggcgatgcgtgcttccgcgcagaccctgagctacgaggtatttctcggtctctccctgatgggcgtggtggcgcaggcggggtcattcaatatgaccgatatcgtcaacaaccaggcgcatctgtggaacgttatcccgcagttcttcggcttcgtgactttcgccatcgccggcgtggcggtgtgtcaccgtcacccgttcgaccagccggaagcggagcaggaactggccgatggttaccacattgaatattccggcatgaaattcggtctgttcttcgtcggggaatacatcggtatcgtcaccgtttcagcgctgatcgtcacgctgttcttcggcggctggaatggcccgtggttacctcctttcatctggttcgcgctgaaaaccgcgttcttcatgatgatgttcattttgatccgcgcatcattaccgcgtccgcgctatgaccaggtaatgtcctttggctggaaggtatgcctgccgttaacgctggtcaacttgttggtaacggcggctgtcattctctggcaggcgcaataa

SEQ ID NO: 209605 - DNA, 543 bp, Klebsiella pneumoniae; identical to SEQ ID NO: 134516

SEQ ID NO: 209606 - DNA, 555 bp, Klebsiella pneumoniae
atggaattcgctttttatatctgtggcctgatagccatcctcgcaaccttgcgggtcgtcacccacaccaatccggtgcatgcgctgctgtacctgattatttcgctgctggcgattgccggggtgtttttctcgctgggcgcttacttcgccggtgcgctggaaatcatcgtttacgccggggccattatggtgctgttcgtcttcgtggtgatgatgctcaacctgggcggcaccgagatcgaacaggagcgcaagtggctgcagccggggatctggattggcccggccatcctctccgcggtgctgctggtggttatcgtttacgccatcctgggcattaacgaccagggtatcgacggtgcggcgattaacgccaaagaagtgggcattgcgctgtttgggccgtacgtcctggcggtggagctggcctccatgctgctgctggcgggcctggtggttgccttccacattggccgcgaagagcgcgccggcgaggtgctgagcaaccgtctgaacgacagcgacaaacgaaaaacggaggaacacgcatga

SEQ ID NO: 209607 - DNA, 303 bp, Klebsiella pneumoniae
atgatccccttaacacatggactgatcctcgcggccatcctgtttgtgcttggtctgacggggctggtgatccgccgcaatctgctgtttatgttgattagcctggaaatcatgattaacgccgccgcgctggcctttgtggtggcgggtagctactggggtcaggcagatggtcagataatgtatatcctcgccatcagcctcgcggctgcggaagcgagtatcggcctggcgctgctgctgcagctccatcgtcgccgccagaacctgaacatcgattcagtaagtgagttgcgtggatga

SEQ ID NO: 209608 - DNA, 1842 bp, Klebsiella pneumoniae
atgaacatgcttgccttaaccattcttttgccattgattggctttgtgctgctggccttctcccgcgggcgctggtcggaaaatctttccgccgccgttggcatgggctcggtaggcctggcggcgctggtcaccgcgtacgttggcgtcgactttttcgctaacggcaaacaggcggtcagcgtgccgctgtggacctggatgtcggtcggtgatttcaacatcggcttcaacctggtgttggacggcctgtcgctgaccatgctctccgtagttaccggcgtcggcttcctgatccacatgttcgcctcctggtacatgcgcggtgaagagggatattcccgcttcttcgcctataccaacctgtttatcgccagcatggtggttctggtactggccgataacctgctgctgatgtacctcggttgggaaggcgtgggcctctgttcttacctgctgatcggtttctactacaccgatccgaagaacggcgccgcagcgatgaaagcgtttgtggtgacccgcgtcggcgacgtgttcctcgccttcgcgctgttcattctttataacgaactgggcaccctgaacttccgcgaaatggtggagctggcgccgcagcacttcgctaacggcagcaccacgctgcagtgggcgacgctgatgctgcttggcggcgcggtcggtaaatccgcccagctgccgctgcaaacgtggcttgccgatgcgatggcgggtccgacgccggtctctgcgctgatccacgccgcgaccatggtcaccgcgggcgtctatctgatcgcccgtacccacggcctgttcctgatgacgccggaagtgctgcatctggtcggtatcgtcggggcggtcaccctggtgttggcgggcttcgccgcgctggtgcagaccgatatcaaacgcgttctcgcctactctaccatgagccagattggctacatgttcctcgcgctgggcgtgcaggcatgggacgcggcgattttccacctgatgactcacgcgttctttaaagcgctgctgttcctgtcgtctggttcggtcattctggcctgccatcacgaacagaacatcttcaagatgggcggcctgcgcaaatcgattccgctggtatacgtctgcttcctggtggggggcgcggcgctgtccgcactgccgcttatcaccgcaggcttcttcagtaaggatgagattctggcaggcgcgatggccaatggccatatcaatctgatggtggcaggcctggtcggcgcctttatgacctcgctgtacaccttccggatgattttcatcgtattccacggtaaagagcaaattcacgcgcacgcagggaaggggattacccatcatctgccgttgattgtgctgctggtactatccaccttcgttggcgcgctgattgtgccgccgctggaaggcgtactgccgcagaccactgagctcgcccacggtagcgtgatgacgctggagattgcctccgggatcatcgccattgccgggattctgatcgctgcatggctgtggctgggcaaacgcacgctggtgacctccatcgccaacagtgcgcctggccgcttcttcggtacctggtggttccatgcctggggcttcgactggttatacgacaaggtgttcgtaaaaccattcctcggtattgcctggctgctgaaacgcgatccgctgaactcgttgatgaatatcccggcgatcctttcccgcttcgcaggcaaaggcctgctggtgagcgagaacggttatctgcgctggtatgtggcttcaatgagcatcggcgcggtggtggtgctggcgctgctgatggtattgcgttga

SEQ ID NO: 209609 - DNA, 1530 bp, Klebsiella pneumoniae
atgttactaccctggctaatattaattccctttatcggcggcttcctgtgctggcagaccgaacgctttggcgtgaaagtgccgcgctggatcgcgctgattaccatgggactgacgctggtgcttggcctgcagctgtggatgcagggcggctattctctgacgcaatccgcgggtattccgcaatggcagtcggaattcgtgctgccgtggatcccacgcttcggcattagcatccatctggcgatcgacggcctgtcgctgctgatggtggtgctgaccggtctcctcggcgtgctggcggtgctctgttcgtggcgtgaaatcgaaaaataccagggcttcttccacctcaacctgatgtggatcctgggcggcgttatcggcgtgttcctcgccatcgacatgttcctgttcttcttcttctgggaaatgatgttggtgccgatgtacttcctgatcgcgctgtggggccacaaagcctcggacggtaaaacgcgtatcacagcggccaccaagttcttcatctatacccaggcgagcggtctggtgatgctgattgccattctggcgctggccttcgtccacttcaacgccaccggcgtgtggaccttcaactatgaagatctgctgaaaaccccgatgtctcacggcgtggaatacctgctgatgctcggcttcttcatcgccttcgcggtgaaaatgccggtggtgccgctgcacggctggctgccggacgctcactcccaggcgccgaccgccggctctgtcgacctcgcggggatcctgctgaaaaccgccgcctacggcctgctgcgctttgcgctgccgctgttcccgaatgcctccgccgagtttgcgcccatcgccatgtggctgggcgtgatcggtatcttctacggcgcgtggatggccttcgcccagaccgatattaaacgcctgatcgcctacacctccgtgtcccacatgggcttcgtgctgattgctatctacaccggcagccagctggcctatcagggagcggtgatccagatgattgctcacggtctgtccgcggcgggtctgtttattctctgcggccagctgtacgaacgtctgcatacccgcgatatgcgccaaatgggcggtctgtggagcaaaattaaatggctgccggcgatgtcgatgttcttcgcggtcgccactctggggatgccgggcaccggtaacttcgtcggcgaatttatgatcctgttcggcagctataaagtggtgccgacgatcaccgttatctccacctttggtctggtattcgcgtccgtttactcgctgtcgatgttacatcgcgcttacttcggtaaagcgaagagcgaagtggcggcgaaagagttgccggggatgtccctgcgtgaactgtctatcatcctgctgctggtggtgctgctggtgctgttgggcttcttcccgcagccgatcctcgacacctcgcatgctgcgatgagcaacattcagcagtggtttgttaattctgtttctactacaaggccgtaa

SEQ ID NO: 209610 - DNA, 1458 bp, Klebsiella pneumoniae
atgacaataactccacaacaactgatcgcactgctaccgctgctgatcgtcggcttgacggtggtggttgtgatgctctccattgcgtggcgacgcaatcattttctcaatgccacgctgtcggttcttggacttaacgccgcgctggtctcgctctggttcgtcggccagaacggggcgatggacgtcacgccgctgatccgcgttgacggctacgccatgctttacaccggtctggtgctgctggcgagcctcgcgacctgtactttcgcctacccgtggcttgagggttacaaggacaacaaagaagagttctacctgctggtgctgatcgccgccctgggcggcattctgctggccggtgcgaatcatctggcggcgctgttcctcggtattgagctgatttcgctgccgctgttcggcctggttggttacgccttccgccagaagcgttcgctggaagcgagcatcaaatacaccatcctctccgcggcagcttcgtccttcctgctgttcggtatggcgctggtgtatgcgaactccggcaatctgtccttcctcgcgctgggcaaaagcctggcggacaacatgctgcacgagccgctgctgctggcgggcctcggtctgatgatcgtcggtcttggctttaaactgtcgctggtgccgttccacctgtggacgccggacgtttaccagggggcgcctgcgccggtctccaccttcctggcgaccgccagcaagatcgctatcttcggcgtagtgatgcgtctgttcctgtacatgccggtgggcaacagcgaagcggtacgtgtggtgctgggcctgatcgccttcgcctctatcatcttcggtaacctgatggcgctgagccagaccaacattaagcgcctgctcggttactcttccatctcccatctcggctatctgctggtggcgctgattgccctgcagagcggtgaaatgtcgatggaagccgttggcgtctacctggccggttacctgttcagcagcctcggcgcgttcggcgtggtcagcctgatgtccagcccgtaccgcggcccggatgctgactcgctgttctcctaccgcggcctgttctggcaccgtccgatcctgtcggctgtgatgacggtgatgatgctctccctggccggtatcccgatgaccctcggctttatcggtaagttctacgtgctggccgtcggtgtgcatgcgcatctgtggtggctggttgccgcggtggttgtcggctcggcgatcggtctctactactacctgcgcgtggccgtcagcctgtatctgagcgcgccggagcagctgaatcgcgatgcgccgtcaaactggcagtacagcgccggcggtatcgtggtgctgatctccgcgctgctggtgctggtgctcggtatctggccgcagccgctgattagcatcgtgcagctggcgacgccgctgatgtaa

SEQ ID NO: 209611 - DNA, 921 bp, Klebsiella pneumoniae
atggaattaacttttttggggacatccgccggggtgccgacccgcacgcgtaatatgacgtcgataatactcaatttgcaacagccgacccgcgccgaaatgtggttgtttgactgcggcgaagggacccagcatcagtttcttcacacgccctaccatcccggcaaactgaataagatttttattacccatctgcacggcgaccacctgttcggcctgcccggcctgctgtgcagccgctcgatgcagggaaactccctgcccctcaccctctacgggccaaaaggactcaaagagtttgttgagaccgcgctgcgcctgagcggttcgtggaccgactatccgctcaccatcatcgaagtcggccctggtctggtgttcgacgaagagggctatcgggtcaccgcgtatccgctcagccatccggtggagtgctatgggtatcgcattgcgcagcatgacaagcccggcaccctcgacgccgcccagctgattgccgatggcgtgcctcccgggccgctgttccatcaactcaagcgcggacagcgcgtcacgctggcagatggccgggtcatcgacggcagccgctatctggggccagcgaccccgggtaaaacgctggccatcttcggcgataccgccccctgcccgcaggcgctggagatggctcgcggggcggatgtgatggtccacgaaaccacccttgagcaggcgatggcggagaaagccaatagccgcggccactcttccagtcagcagaccgcggcgcttgccaaagaagcgggggtcggtacgctgatcgccacccactttagctcgcgctacgatgccgaaggctgtctgcgtatgctggcggaatgccgggagattttccctaacacgctgctggcggaagactttatggtctacaagatggcgtaa

SEQ ID NO: 209612 - DNA, 462 bp, Klebsiella pneumoniae
atgatgacctggcaggatctccaccatagtgaactcaccgttccccagctgtatgcgctgctgaaattgcgcagtgaagtctttgtcgtagagcagcagtgcgtctatcaggatgtcgacggcgatgatttggttggtgaaaatcgccatctgctcggctggcgcgatggcgaactggtggcctacgcgcggatcctcaaaagcgaagaggagtttgcgccggtggtgattggccgggtcatcgtcagccccgccgcccgtggtgcgaagctcggctatcagctgatggagcaggcgctggccagctgtcagcagcactggccgcaaaaggcgatttacctcggggcgcaggcgcacctgcaatccttttacgcccacttcggttttacgccggtgaccgaggtctatgatgaggatggcatcccccacattggcatggcgcgagaaaagcgcactgtctga

SEQ ID NO: 209613 - DNA, 1290 bp, Klebsiella pneumoniae
gtgctgtctgtttccactgcgctggcccgtttgcaagacggcctgggcgagtcttttccagacttgcccggcacgcgaattatcgatgttgcttttccgctgaatgatgccttcgatccgctactatggtgcggccagcaggcgcaatggccgcagttttactggcagcagcgcaatggcgatgaggaactggcgacgctgggggcggtaaaaacctttacctcgctcgacgcggcgaaccgctttttacgccaggtcggccggcaggatctgcgtatctgcggcctgaatgcgtttgaaccgcagcagggcagcctggcgctgccgcgtctggagtggcgccggtgcggcggcagggccgtgctgcggctggtgctgcatagtgatatctccctgcgtgaggatgccgcgacggcccgcgcgtttctcgccagcctgacaaccactcaggcgactcccggcgccataccgccgttgctgagcgagcgccactcatccgactatcctcaatggcaggcaatgattgcgcgggcgactaaggcgatcagcgccggtgaaatggataaagtagtgctggcgcgggcaaccgacctgcagtttgccgccccgctggacgccgtgagcatcatggcggctagccggcgcagcaatcttaactgttttcatttcctgatggcgttcaatgcccggcaggcatttttcggctccacgccggaacggctgtggcgccggcgcggcgcgctgctgcgcaccgaagcgctggcggggaccgtcgcgaaccatcaggaagacgcgaaggcgcagcaactggccgactggttgatgaaagacgacaaaaaccagcgggaaaacatgctggtggtagaggatatctgccagcgcctgcagagtgaggcctcgacgctggacgtcctgccgccgcaggtggtgaggctgcgtaaggtgcagcatctccgacgctgcatctggaccgagctggcggcgcctgacgacagccgctgtctgctgcagctgcagcccaccgccgcggtggccggcctgccgcgccgggcggcgctggcgttcattcagcgtcatgaaccgttttcccgcgaatggtacgccgggtccgccgggtatctgtcactggcgcaaagcgagttttgcgtggcgctgcgttcggcgaaagtgaaccacgacaccctgcggctgtatgccggggcggggatcgtcagcggctctgatgcacagcaggagtggcaggagatagacaacaaagcggccgggctgcgctcgctgctgtgtccataa

SEQ ID NO: 209614 - DNA, 1671 bp, Klebsiella pneumoniae
atgtcagtaagcgcatttaaccgacgctgggcggcggtgatcctggaagctttaacgcgccatggcgtgcagcatatctgcatcgcgccgggctcgcgctcgacacccttaaccctggcggcggcggaaaaccgcgcctttatccatcatacccatttcgacgaacgcggcctcggccacctggcgctcggcctggcgaaggccagccggcagccggtggcggtgatagtcacctccgggaccgccaccgcgaacctctatccggcgctgattgaggcagggctcaccggtgaaaagctgatcctgttgaccgccgaccgtccgccggagctgatcgactgcggcgcgaaccaggctatccgccagccggggatgtttgcctcccatcctgcgcagacgatttctttgccgcgtccctcgcaggatattcctgcccgctggctggtctcaaccatcgaccaggcgctgggcgcgctgcacgccggcggggtgcatattaactgtccgttcgctgaaccgctgtatggtgatatggatgagaccggcgtggagtggcagcagcagctcggcaactggtggcagagcgacaaaccctggctgcgccaggcgctgcagttagagagcgagaagcagcgcgactggttcttctggcgacaaaaacgcggcgtcgtcgtggcgggcagaatgagcgccgcggaagggaaaaaggtcgctgagtgggcgcagaccctcggctggccgctgatcggcgatgtcctgtcgcagaccgggcagccgctgccgtgcgccgacctgtggctgggcaacggcaaagcggtcagcgagctggcgcaggcgcagatcgtcgtgcaactcggcagcagcctgaccggcaaacgcgtgctccagtggcaggcgacctgcgagccggatgaatactggctggtggataatctgcccggtcgcctcgacccggcgcagcaccgcggtcgccgtctgctctcaagcgttgagcgctggctcgaattacatccggcggagaaacgccagccgtgggcgacggtgatcccacagcttgccgggcaggcgtggcaggctgcagtcgccagcaacgagccttttggcgaagcgcagctggcgcagcgtattcggggctatctgccggagcagggccaattgtttgttggcaacagcctggtggtgcgcctgatcgacgccctggcgcagctaccggccgggtatccggtctacagcaaccgcggcgccagcggcatcgatggcctgatcgccactgcggccggcgtgcagcgcgccagcgcccgaccgacgctggccatcgttggcgatctctccgcgctctacgatctcaactcgctggccctgctgcgccaggcgtcggcgccgctggtgctgatcgtggtgaataacaacggcgggcagattttttctatgctgccgacgccgcaggacgaacgccgtcagttctatttaatgccgcaggacgtggatttcagccacgcggcggcgatgttcggcctggcctatcatcgccctgatgactggccgtcgctggatgaggcgctggccggcgcctggcgcagggcaggggcgacggtgattgagctggcggtcaatgagaccgacggcgcgcagaccctccagcagctgctggcgcaggtaagtcgcctgtga

SEQ ID NO: 209615 - DNA, 759 bp, Klebsiella pneumoniae
gtgatcctcagcgctgctgtcgacaacggccagccgggctatccctggctggtgtttctgcacggtttttccggcgaccgcaacgagtggcggaaagtgggcgacgcctttcccgcctggccgcggctgtacctcgatctgccggggcacggcggctccgcggatatcgcggtgcaggactttgccggggtcaatactctgctgcagtctacgcttaatagttacaacatacataagtattggctgatcggctactcgctgggcggccgggtggcaatgaacttcgccagccagccgcgcgcaggcatgcgcgggctgatcgttgaaggcggccatccgggcctgcaggatgtagaggcgcggcaggcgcggcgcagcaatgacagcgcctgggcggaacgttttcgccgcgagccgcttgagcaggtctttgccgactggtatcagcagccggtcttcgcttcgctgaatgccgcgcagcgtgagtcattggtcgccttacgcagccggaacaacggcgcgacgctggcggcgatgctgcaggcaacctcccttgccgcgcaggccgatctgctcgcgtctctgcaggcgcgcgattttccttttcactacctgtgcggcgagcacgacgcgaagtttcgcgccatcgcgcagacgctcgcggcggatctccatcttattcaccatgccggacacaacgcgcaccgggacaacccggcggcggtgattgcctgtctggcgcagattctggcaagttaa

SEQ ID NO: 209616 - DNA, 858 bp, Klebsiella pneumoniae
atgatctctcttgatgaagcaatgctctacgcccccgttgaatggcacgattgctccgaaggctataccgatattcgctatcacaaatcgactgacgggattgccaaaatcaccattaatcgtccgcaggtgcgcaacgccttccgcccgctgaccgtcaaagagatgatccaggcgctggcggatgcccggtatgacgacaatatcggcgtcatcgtgctgaccggtgaaggtgagaaagccttctgcgccggcggcgaccagaaagtccgcggcgactacggcggctatcaggacgactccggcgttcatcatcttaacgtgctcgacttccagcgtcagatccgcacctgcccgaaaccggtggtggcgatggtggccggctactctatcggcggcggtcacgtgctgcatatgatgtgcgatctgactatcgcggcggaaaacgccatcttcggccagaccgggccaaaagtcggctctttcgacggcggctggggcgcctcctatatggcgcggatcgtcgggcagaaaaaagcgcgcgaaatctggttcctgtgccgccagtatgacgctcagcaggcgctggacatggggctggtgaataccgtggtaccgctggcggatctggaaaaagagaccgtgcgctggtgtcgtgaaatgctgcagaacagcccgatggccttgcgctgcctgaaagcggcgctgaacgccgactgcgacggccaggctggtctgcaggagctggcgggcaacgccaccatgctgttctatatgacggaagaggggcaggaaggccgcaatgccttcaaccagaaacgtcagccggacttcagcaaatttaaacggaatccataa

SEQ ID NO: 209617 - DNA, 966 bp, Klebsiella pneumoniae
atgcgcgtttcgcaggtttaccgctggcagataccgatggacgcgggcgtggtgctgcgcgagcggcggttaaaaacccgcgacgggctgttcatccgcctgcaggagggtgaacgcgaaggctggggcgaaatttctcccctgccgggattcagtgtcgagacgctggaagaggcgcaaatggcgctgttagcgtgggcacaggcctggcgcgacggcgccgagccgccgcttcccacgcagccctccgtcgcgtttggcatcagctgcgcgcaggcggagcttagcggcggactaccgcaggccgcggattatcgcgcggcgccgctctgctccggcgatccggatgagctattcgccagactggcggcgatgcccggcgagaaggtcgctaaggtcaaagttggcctctgggaggcggtccgcgacggcatggtggtgaatctgctgctggaggcgatccccgacctgcagctgcggctcgatgccaaccgcgcctggacgccgctcaaagcgcaacagttcgccaaatacgttaatccggcgtaccgccagcgcattgcttttcttgaagaaccttgcaaaacgcgggaggattctcgggcctttagccgcgagacagggatcgctatcgcctgggatgaaagcctgcgcgaggcggatttccgctttgtcgccgagccgggggtacgtgcggtggtgatcaaaccgacgctaaccggcagtttgcagaaggtgcagcaacaggtcgccgcggcgcatgcgctggggttgagcgtagtgatcagctcgtcgatcgagtccagtctcggcttgacccagctggcgcggattgccgcctggctgacgccgcagactattcctgggttggatacgctgtcgctgatgggcgcccagctggtacggccgtggcccgaaagtgtgctgccggtgctcaacattgatgcgctggagccgctgctgtga

SEQ ID NO: 209618 - DNA, 1377 bp, Klebsiella pneumoniae
gtgacctttaacgactggccctggcggcattggcgtcagcggcgcggagaggccctcgccttacgtctgaataaccagccgctgacctggcgggagctatgcgcgcgggttgacgcgctggcgtctggttttgccgcgcagggcgtaatggaagggcagggcgtggcgctccgggcctataaccagccggaaactctgctggcatggctggcgctgctacagtgcggggcgcgggtgctgccgctgaatccgcagctgccagcggtgttgctgcaggaactgctgcctgcgttaaccgtacagcatcaactggtgcttaacggtgatacgctgccggggaatttaccggcgttaactctgcaggcggcagaaggcgcttgtgccgtttgttggcatggcgatcggttggtgtcgatgacgttgacctccggttcaaccggcctgccgaaagcggcggtacatagcgccaacgcccatctggccagcgcggctggcgtgctggcgctgatgccgtttgccgcaggagatgactggctgctgtcgctgccgttgttccatgtctccggtcaggggatcgtctggcgctggctgctggccggcgcgcgactcacggtacgtgacaaacagccgctggcgcagatgctgcacggctgtacccatgcttcgctggtgccgactcagctatggcgcctgctgaatgatgatgctgcggtttccctcaaggcggtgctgctcggcggcgcgtcgatcccggtcgaattgactgaacgggcgcgaaagcagggcatacgcagcttctgcggctatggcctcaccgaattcgcctccaccgtgtgtgccaaagaggccgacggcgctgcggatgttggcgaagcgctgccggggcgagaggtgaaaattgtcgccggcgagatctggctgcgggcgtcgagtatggccgcaggctactggcgggatggtcaattgttgtcattaaccaacaatgaaggctggtttgcgacgcgcgatcgcggagcattgcataacggtcggctgacggttgttgggcgactggataacctcttttttagcggtggagaaggtattcaaccggaagaggtcgagcgtgtgatactcgcccatccacaggtacagcaggtgtttatcgtgccgctggatgatgcggaatacggccagcgcccggtagcggtggtggaatgcgatgacggctgcgagttgagcgcgctggcggcatggagcgctgagcggttagcgcgttttcagcagccggtgcgttggctgcggttgccggaaacgttaaaaaacggcgggattaagatttcgcgccgggcgctgtgcgagtgggtcaggcagcagacgcatgcgaccgtatcgtag

SEQ ID NO: 209619 - DNA, 423 bp, Klebsiella pneumoniae
atgcgccacaggacgattgtttgcccgctgatcgagaataaaggccattatctgctttgcaaaatggccgccgaccgagggggttttcccgggcaatgggccttatccggcggcgtggagccaggggaacgtattgaagaggcgctgcggcgggaaatacgcgaagagctcggcgaaaaactcatccttacccatatcgcgccatggtgctttcgcgacgatacccgcgtcaaaacctaccccgacgggcatcaggaaacgatctacatgatctatctcatcttcaactgcgtgagcgccaatcgcgatgtgacgatcaacgaggagtttgacgattacgcctgggtcaaagccgaagatctcaaaaactacgatcttaatgccgccacccgcgttactctcagcctgaaagggctactttag

SEQ ID NO: 209620 - DNA, 954 bp, Klebsiella pneumoniae
atggaaagggcgacgaattccccccacgatgctgtatttaaacacctgctgtcgcatcgggcgacggccagggattttctggacattcaccttcccgcaccgctgcgcgcgttatgtaacctgaacacgctgcggctggagtccgggagctttatcgacgacgaactgcgggcgagtcattccgatatcctttactcgctgcaaacgcaggcgggggagggctatatctatctgttgatagagcaccaaagctcggcggaccgccatatggcatttcgcctgatgcgctatgcgatagccgcgatgcagcgtcatctggataaagggcatacgcagctgccgctggtgatcccgctgctgttttatcatggtcgcgtttctccctggccttacccgatgtgctggctggcaggctttgccgatccggacatcgcgcggcgggtctatggtgaagattttcccttaattgatatcactagcaccccggacgatgaaatcatgcgccaccggcgcgtggcgatgctggagctgctgcagaagcatattcgccagcgggatttgatggacctgcatgagcaactggtcaggctcctggcgctgggatacactagccgcaggcagcttaagacgctgttgcactatttattacaggcaggaaacgccgccgatccggttgcttttttgcgccatcttgcgcaaaacgttccccggcggccgcataaggagacgctaatgaatattgcccagtttctggaacaacgcggccatcagcaaggattaaagcaaggtcttgaacaaggtctacagcaaggtatcgaacaaggtatcgagcaaggtgagcagcagaccgcggagcgtatcgcccgggcgatgcttgctaacggactcgacctgtcgctggtggcgaaactgaccggcctcgccccggaatgtctggcccggctgcagcattaa

SEQ ID NO: 209621 - DNA, 543 bp, Klebsiella pneumoniae; identical to SEQ ID NO: 137164

SEQ ID NO: 209622 - DNA, 1197 bp, Klebsiella pneumoniae
atgttgaatgtggaaatgctgtccaccggcgatgaagtgttgcatggtcaaattattgatactaatgcggcatggctggcggatttcttttttaatcagggtttaccgttaacgcgccgcaataccgttggcgacgatctcgatgcgctggtggcgattctgcgcgaacgcagcgaacaggcggatgtgctgatcgtcaacggcggcctcggcccaaccagcgacgacctgagcgcgctggccgccgccactgcgaaaggcgaagggcttattttgcatccggagtggctggaaaccatgacccgcttttttgccgagcgcggcaggccgatggcggaaagcaaccgtaagcaggcggaaatcccggccagcgccgagatgatcaacaacccggtcggtacggcctgtggctttgccatccagctcaaccgctgcctgatgtttttcactcccggggtcccctctgaatttaaggtgatggtcgagcaggaaattttaccgcgcctgcgccagcgctttacgctgccggacccgccggtatgcctgcgtttgaccacctttggccgctcggagagcgagctggcgcaaagtcttaatccgctgacgctgcctccgggcgtggtgatgggttaccgctcgtcgatgccgatcattgaactcaagctaaccggaccggccaaccagcgcgacgccatgctggccctgtggccggaggtgcgtaaggtggctggcgacagcctgattttcgaaggtacggaagggttacccgcgcaaatcgcccgctgtctgcaggagcggcagctgagcctgacgctcagcgagcagtttaccagcggcctgctggcgctccagctgtcccgcgccggcgcgccgctgctggccagcgaagtcgttccggcgcaggaggagacgctggcgcaggcggcccgctgggcggccgagcggcgcataaaccattttgccggcctggctctggcggtgagcggtcaggaaaacgatcatcttaacgtggccctggccaccccggacggcaccttcgcgctgcgggtgaagtttagcgccacccgccacagcctggcggtacgccaggaagtctgcgctatgatggcgttaaacatgctgcgtcgctggctgaatggtcaaccgctggccagcgaacatggctggattaacgtggtggattccctctcgctgtaa

SEQ ID NO: 209623 - DNA, 786 bp, Klebsiella pneumoniae
atgttggaatcaacgaaagtcccggcgctgacccgcgcgattgagatcctcaatttaattggccgcatcggcccctgcagcgcggcgacgataatagcggagctggggatcccgaaaagcacggtgtatctgctgctgggcgagctgaaaaagcagcgcttcatcagtatggataatcaggataactactgcctgtggaccaagctggtggagctggccgggcaggcgctgagcaaaatggacctgcgcgagctggcgcggccgcgcctcacccggctgatggatgagtgcggcctgctttgtcacttgggcattatcgatcagggtaacgcctactacattctgaaaattgagtctcccgccaccatcagcgtgcgctcgcatgagggtaagagcctgtctctttaccgctccgggatcggcaaatgtttgctggcctggcagcccgccagcgttcaggcgtcgattatcgaagacctacagtgggagcgggccacgccaacgaccatcaccgatgctcaacagctgcgggaggagctggggcggatccgcgcccggggctggagctttgataatggcgaggactatccggatgtgcgctgcgtggctgccccggtatttaacgccaataacgacctgaccgccgccatctcggtggtgggtacccgtctgcaaatcaatgaagacaatcgcgattacctggctggtaaggcgattgcctgcgcgaaagatatttcacgtctgctggggtggaaaagccccttcgaacaactcgcctcatcataa

SEQ ID NO: 209624 - DNA, 1005 bp, Klebsiella pneumoniae
atgaccctaccgaaaattaaacacgtccgcgcctggttcatcggcggcgccacagcagagcagggcgccggcggcggcgattaccatgaccagggggctaaccactggattgacgatcatatcgccaccccgatgagcaaatataaacagtatgagcagtcccggcagtcgtttggcatcaacgtgctggggacgctgattgtggaagtggaagccgacaacggacagaccggctttgcggtgtcgacggccggggagatgggctgctttatcgtcgaaaaacatctcaaccgctttatcgaaggcaaatgcgtcagcgatatcaaactgatccatgaccagatgcttaacgccaccctttactacgcgggatccggcggcctggtgatgaataccatctcctgtgtcgacctggcgctgtgggacctgttcgggaaagtggttggcctgccggtctacaaactgttgggtggggcggtgcgcgacgaaatccagttctatgccaccggcgcacgtccggacctggcgcaggagatgggctttatcggcggcaaaatgcctacccactgggggccgcacgatggcgacgccgggatccgcaaagacgtcgccatggtggcggatatgcgcgaaaaatgcggcccggatttctggttaatgctggactgctggatgagccaggacgttaactatgccaccaaacttgcccatgcctgcgccccttataacctcaagtggatcgaagagtgcctgccgccgcagcagtatgaaggctatcgcgagctgaagcgccaggcgcctgccgggatgatggtgaccagcggcgagcaccacggcacgctgcagtccttccgcaccctgtcggaaaccggcatcgatattatgcagcccgacgtcggctggtgcggcggcttaaccaccctggtggagatcgcggccatcgccaaagcgcgcgggcagctggtagtgccccacggctcgtcggttactcacatcatgcggtga

SEQ ID NO: 209625 - DNA, 204 bp, Klebsiella pneumoniae
gtgatcaccttcaccaacacgccgttcagtgagtttctgatgaccagtccggactgcgccacgctgcgcccgcagttcgacccgatcctgctcggcgagccggtgccggagagagggcgcattcataaatcggtcctggataaacccggctttggcgtcgagctcaatcgcgactgcaacctgaagcgtccttatcaacactga

SEQ ID NO: 209626 - DNA, 1293 bp, Klebsiella pneumoniae; identical to SEQ ID NO: 137160

SEQ ID NO: 209627 - DNA, 804 bp, Klebsiella pneumoniae
atgaacgcactgttatctaaccccttcaaacggggattattacgcggtgagacgcaaatcggcctgtggctgagctccacctcatcctacatggcggagatcgctgcgacgtcgggatacgactggctgctgatcgacggcgagcatgccccgaacaccattcaggatctttatcatcagctgcaggcgattgccccctatgccagccagccggtcattcgcccggtcgagggcaaccgcagcctgataaaacaggtgctggatattggcgccagaaccttgctggtgccgatggtcgataccgccgagcaggctcgggaggtggtctcagcgacccgttatccccccatcgggagccgcggcgttggcgccggcgtggcgagagcggcgcgctggggaagggtggagaattatatggcggaggcgaatgacgaactctgtctgctgattcaggtcgagagccgaaccgcgctggagaacctggacgctattctcgaggtggacggcattgacggggtgttcatcggtccggcggatctctccgcctcgctgggctacccggacgatgccggtcaccctgacgtgcagcgggtgatcgagcagagcatccggcgcattcgcgcggcggggaaagcggccggatttctggcggtcgacccggcgatggcggaaaaatgtcttgcctggggggccaactttgtcgccgtcggggtggataccatgctgtatacccaggcgctggaccgccggctggcgatgtttaaatctgccagcgcccagccgcaagagaaaacgagctattga

SEQ ID NO: 209628 - DNA, 1179 bp, Klebsiella pneumoniae
atgaacgatacccgttttgaaagctgcattaagtgcacggtctgtaccaccacctgcccggtaagtcgggtcaatccgcgctatcccggcccgaaacaagcggggccggacggcgaacgcctgcgtctgaaggatggcgcgctgtacgacgaggcgctgaagtactgcattaactgcaagcgctgcgaggtcgcctgcccgtcggatgtgaaaattggcgatatcattcaacgcgcccgggcacagtacggccagcaaaagccgaccctgcgcgacgccatcctcagccataccgacctgatgggtaccctttccaccccctttgcccccctggtcaacgccgccaccggcttaaaaccggtgcgccgtctgctcgacgcgacgctcaacatcgatcaccggcgtacgctgccgaaatatggtttcggcaccttccgccgcgcttaccgccagctcgccgcccgtcagaagcagtacagcgaacaggtggctttctttcatggctgctacgtcaactataaccatccacagttgggtaaagatctgattcgcgtcgtcaacgcgctgggtaccggggtgcagttgttatcaaaagaaaaatgctgcggcgtaccgctgatcgccaacggttttttcgacaaggcgcgtaagcaggcgcagagcaacgtcgccgcgatgcgggaaaacacgctaccgatcattgccacctcctcgacctgcgcctttacgctacgtgatgaatacccccatctcctcgatgtcgataacagcgatcttcgcgatcgcgtcgagcttgccacccgctggatctggaaacagctggctgccggcaggacgctaccgctgcgcccgctgccgctgaaggtggtctatcacaccccgtgtcatatggaaaagatgggctggtcgctgtataccctcgagctgctgcggctgatccccggcctgcagctggaggtgctggattcacagtgctgcggcatcgcaggcacctacgggtttaaaactgagaattacgcggtatcccaggctatcggcgccccgctgttccgtcagattgaggagagcggggccgacctcgtcgtcaccgactgcgagacctgcaaatggcagattgagatgtccaccagcaaacgctgcgagcatccgctgacggtgctggcgcaggcgctcgtctga

SEQ ID NO: 209629 - DNA, 1260 bp, Klebsiella pneumoniae
atgaagtttgattgcgcgattatcggcggtgggctcgccggcctgctgtgcgggctggccctgaatcagcacggcctgcgcagcgtcatcatcagccgcgggcagagcgcgctgcatttttcctccgcgtcgttagacctgctctcggcgctgcccaacggcgatcacgtcactgacgtcgcacaaggtctgcagcaactcgctgaacagcttcctgaacacccttattcccggctcggcgccgaggcggtactcgaatacgctacgcagaccgaagccctgctggccgcctgcggcgcggtgatgcagggcgatgcgcgccggccgcaccggcgggtaacgccgctggggacgttgcgcccggcatggctgtcgccccttgaggtgcctgtcgagcccctgccgtcgcagggcgcctgtctggtggggatcagcggctttgctgattttcagccgcatctcgccgccgccgcgctcggtcaacacggagttaccgccgcggcggtggaaatcgagttaccgctgctggatgtgctgcgtgataacccgaccgagtttcgcgccgccaatatcgcccgcgtcctggatgatgagaatatgtggccggccctgcatgcagcgctgctaccgctggcgcagcagtatgacctgctgatcatgcccgcctgttttggcctcgccgacgatcgcctgtaccactggctgcaggcgcgtctaccctgcccgctgcgtctgctgccgacgctgccgccctcggttcccgggatgcgtttgcattctcagctgcaacgccagttcattcgcgagggcggcgcctggctcgcaggcgatgaggtggtgaaaatcagccatcgacagaacgccgtcgaggcggtctggacgcgaaatcacggcgatattgcgctgcgtccgcgctttaccgtgctggccagcggcagctttttcagcaacggtcttgtcgccactcgcgatagcgtgcgcgagccgatcctcggcctcgaccttcaccagactctgccacgggaaagctggtaccagcgcgatttcttcgcctcacaaccgtggcagcgcttcggcgtgaaaaccgatgccctgctgcgccccctgctgggcgggcagccgttccataatctgttcgccatcggctcattgctcggcgggttcgatgccattcagctcggctgtggcggcggcgtctgcgccgttaccgcgctgcacgccgccagacagatccacgcccttgccggaggccggccatga

SEQ ID NO: 209630 - DNA, 1623 bp, Klebsiella pneumoniae
atgacgggacgtcttgatagcgaggtcattatcatcggcggcggagcaaccggcgccggtatcgcccgcgactgcgcccggcgcggattacgaacgctgctcattgagcgccatgatatcgccaccggggcgaccggccggaatcatggactgctgcacagcggcgcccgctacgcggtgaccgacaacgaatccgcccgcgaatgcatcagtgagaaccgcattctgcgccgcatcgcccgccactgtattgaaccgaccaatgggctgtttatcaccctgcctgaagatgacctggcatggcagcaaacctttatcgacgcctgtcagcaggctggcatagaggccacgccgctctcgccgcaggaagcgctgcgccgggagcccgccgtcaacccgacgctgctgggcgcggtgcaggtcccggacggtaccatcgacccgtttcgcctcaccgcggccaatatgctcgacgcccgcgaacacggcgcgcagatccttaccggctgcgaagtaacaggcctgctgcgccggggcgatcgcgtctgcggcgtccaggtatacgaccgccaacttcaccaggcccgcactctgtacgccgggatggtggttaacgccgccgggatctgggggcagcgtattgcggaatatgccgacctgcgcatcaccatgttcccggcgaagggatcgctgctgatcctcgatcatcggattaacaacctggtgatcaaccgctgccgtaagccggccgacgccgatattctggtgcccggcgataccatctcgctgatcggcactacctcaatgcatattccttatgacgaaattgacgacaaccgggtaacagcggcggaggtcgataccctgctccgcgaaggggaaaagctggcgccggtcatgggccgcacccggatcctccgcgcctactccggcgtccgcccgctggtggccagcgataacgatcccagcgggcgcagcgtcagccgcggcatcgtcctgctcgaccatgcccagcgtgacggtatggaaggcttcattaccatcaccggcggcaagctgatgacctatcgcctgatggccgagtgggccaccgacgccgtctgtcgtaagctgggaaacaccaccccctgtaccacggccgaagccccgctgcccggttcacaggagccaacggaaagtaccctgcaaaagattatctccctccccaccccgctgcgcggctcggccgtctaccgtcacggcgatcgcaccccgtcctggcttggcgacagccgccagcaccgtagcctggtctgcgaatgtgaagccgtcactgccggtgaagtgaaatacgcggtggaaaacctggcggtcaacaccctgctcgacctgcgccgccgcacccggattggcatggggacctgtcagggggaactctgcgcctgccgcgctgccggcctgctgcagcgctttaacgtcaccacgcccgcgcagtcgttaacccagctctcggaatttctcaatgaacgctggaagggcgtgcagcccatcgcctggggcgatgcgctgcgcgaaagcgaattcacccgctgggtctacctcggcctgtgcggattgccacaggagcaccgggatgaagtttga

SEQ ID NO: 209631 - DNA, 1347 bp, Klebsiella pneumoniae
atgttaagtatttttaaacccgccgcgcataaagcgcgtttgccagcagcggagattgacccgctatatcgccgattacgctggcagttttttattggcatcttttttggttatgccgcctactatttggttcgtaagaactttgccctggcgatgccttatcttatcgagcaggggttctctcgtggcgacctcggcttcgccctttccggtatctccatcgcctatggattttcgaaattcatcatgggatcggtctctgaccgctcgaatccgcgcattttcctgccggctggcttgatcctagccgcgctggtgatgctggtgatgggcttcgtgccgtgggcgacgtccagcatcatgataatgttcgtgctgctgttcctctgcggctggttccaggggatgggctggccgccgtgcggccggaccatggtgcactggtggtcgcagaaagagcgcggtgggattgtctcggtgtggaactgcgcgcataacgtcggcggcggcattccgccgctgctgttcctgttagggatggcgtggtttaacgactggcacgcggcgctgtatatgccggcattcggcgccattctgctggcgattttcgcctttgcgatgatgcgcgacaccccgcagtcctgcggtctgccgccgattgaagaatataaaaacgactacccggacgattacagcgaaaagcacgaagaagagctgacggcgaagcagatctttatgcaatacattctgccgaacaagctgctgtggtacatcgctatcgctaacgtcttcgtttatctgctgcgctacggcattctcgactggtcgccgacctacctgaaagaagttaaacacttcgcgctggataaatcctcctgggcctatttcctgtacgagtacgcggggatcccgggcacgctgctgtgcggctggatgtcggacaaagtgtttaaaggcaaccgcggcgccaccggcgtgttctttatgaccctggtgaccatcgccactgtcgtttactggctgaacccgccgggtaatccgggcgtcgatatggcctgtatgatcatcattggcttcctgatctacggcccggtgatgctgattggtctgcatgccctcgagctggcgccgaaaaaagccgccgggaccgccgcgggcttcaccggcctgttcggctatcttggcggttccgtggccgcgagcgctatcgtcggctacaccgtcgatttcttcggctgggacggcggctttatggtgatgatcggcggcagcgtgctggcggttatcctgctggttatcgtgatgctcggtgaacgtcgccatcaccaacagctgaaacaagcctaa

SEQ ID NO: 209632 - DNA, 1071 bp, Klebsiella pneumoniae
atgaaaatgaaacttaccgcgctgatgagcggaatgattctgtccagttcggcgctgtgcttcagtgcgacagcggctgataaaatggtcatcgcccaccgcggcgccagcgggtatctgccggaacataccctgccggcgaaagcgatggcttacgctcagggggcggattaccttgagcaagacctggtgatgaccaaagacgaccggctggtggtgttacacgaccactatctcgatcgggtgactgacgttgcgcagcgtttcccgcagcgagcgcgtcaagatggccgtttctacgccatcgactttaccctggccgagattaaatcgctgaagtttaccgaaggttttgagccgaaaaatggtaagaacgtgcaaacctatcccggtcgattcccgatgggcaaatccgatttcagtattcatacctttgaagaggagattgagtttgtccaggggctgaaccattccaccggcaaaaacatcggtatctacccggaaatcaaagcgccgtggttccaccaccaggaaggcaaagatattgccgccagcacattgaaggtgctgaaggaatatggctataccagcaagcaggataaggtttatctgcagtgctttgacgccaacgagctcaaacgcattaaaaatgagctggagccgaagatggggatggatctcaatctggtgcagctcatcgcctataccgactggaatgaaacccagcagaaacaggccgatggtaagtgggtgaactacagctatgactggatgttcaagccaggggcgatggcgcagattgcgcagtacgcggacggcatcggcccggattaccatatgctggtagcggaaggctcgaagccgggggcggtgaagctgacggcgatggtgaaagaggcgcacgccagccatctgcaggtgcatccgtacaccgtgcgcgcggatcagttgccggagtacgcgactaacgttaatcagctctatgacgtgctgtataaccaggcgggcgtcgacggcttatttaccgatttcccggataaagcggtgcagttcctggacgcgaaacactaa

SEQ ID NO: 209633 - DNA, 255 bp, Klebsiella pneumoniae
atgaagcggatcttcctgaaaatctctgacactcgccttgagtgtcaggatgaacacccttccctgctggcggcgctggagtcgcataatatcgacgtcgaatatcagtgccgcgaaggctactgcggctcctgccgcactcgcctggtctccggccaggttgactggctgaccgagccgctggcctttatccagccgggagaaattttgccctgctgctgccgggcgaaaggcgatattgagatcgagatgtag

SEQ ID NO: 209634 - DNA, 1131 bp, Klebsiella pneumoniae
atggcatacaccactttttcacagacgaaaaacgatcagctgctggaacccatgttttttggccagccggttaacgtggcccgctacgatcagcaaaaatacgacatctttgaaaagctgattgaaaagcagctctccttcttctggcgcccggaagaggttgacgtttcccgcgatcgcatcgactaccaggcgctgccggaacatgaaaaacatattttcatcagcaacctgaagtaccagacgctgctcgactccatccagggccgtagcccgaatgtggcgttgctgccgctgatctccatcccggagctggagacctgggtagaaacctgggccttctccgagaccattcactcgcgttcgtacactcacatcatccgcaacatcgtcaacgacccggcgaccgtgttcgacgacatcgtcaccaacgagcagatccagaaacgtgcggaaggcatctctcactattacgattcgctgatcgagatgaccagctactggcatctgctgggcgaaggcacccacaccgtcaacggcaagaccgtgaccgtgaatctgcgcgagctgaaaaagaaactctatctgtgcctgatgagcgttaatgccctggaagcgatccgcttctacgtcagcttcgcctgctccttcgcctttgccgaacgcaaactgatggaaggcaacgccaaaattatccgcctgatcgcccgcgatgaagcgctgcacctgaccggcacccagcatatgctgaacctgctgcgctccggcagcgacgatccggaaatggcggaaatcgccgaagagtgcaagcaggagtgctatgacctgttcgtgctggcggcgcagcaggagaaagagtgggcggactacctgttccgcgacggctcgatgatcggcctgaataaagacattctctgccagtacgtcgagtacatcaccaatatccgcatgcaggcggtgggcctcgatctgccgttccagacccgctccaacccgatcccatggatcaacacctggctggtctccgacaacgttcaggtggcgccgcaggaagtggaagtcagttcttatctcgtcggccagatcgattctgaagtcgatgccgacgatctgagtaacttccagctgtaa

SEQ ID NO: 209635 - DNA, 2286 bp, Klebsiella pneumoniae
atgaatcagagtctgctggtgacaaagcgcgacgggaccaccgagcgcatcaatctcgacaaaatccatcgcgtactggattgggcggcagaaggactgaataacgtttcgatttcccaggtagagctgcgctcccatatccagttctatgacggcatcaaaaccgcggacatccacgaaaccattattaaagccgctgcggatctgatctcccgcgacgcaccggattaccagtacctcgccgcgcgtctggcgattttccatttgcgtaaaaaagccttcggtcagtttgagccgccagcgctctacgatcacgtggtgaagatggtcgagaaaggtaaatacgatcatcatctgctggaagactacacggaagaagagttccagcagatggacggtttcctcgaccactggcgcgacatgaacttctcctacgcagccgttaagcagctggaaggcaagtatctggtacaaaaccgcgtcaccggcgaaatttatgagagcgcgcagttcctctatattctggtcgccgcttgcctgttctcgaactatccgcgcgaaacgcgtctggactatatcaagcgtttctacgacgcggtgtccacctttaaaatctcgctgccgacgccgatcatgtccggcgtgcgtaccccaacccgtcagttcagctcctgcgtgctgatcgagtgcggcgacagcctggattccatcaacgccacctccagcgcgattgtgaaatacgtttcccagcgcgccggcatcggcatcaacgccgggcgcattcgcgcgctgggcagcccgatccgcggcggcgaagccttccacaccggctgcattccgttctacaagcatttccagaccgcggtgaaatcctgctcgcagggcggcgtgcgcggcggcgcggcaaccctcttctacccaatgtggcatctggaagtggaaagcctgctggtgctgaaaaacaaccgtggtaccgacgccaaccgcgttcgtcacatggactacggggtacagatcaacaagctgatgtacacccgtctgctgaagggcggcgatattaccctgttcagcccttccgacgtcccgggcctgtatgacgccttcttcgccgatcaggacgagtttgagcgcctgtacacccagtacgagcaggacgatagcattcgtaagcagcgtattaaagccgttgagctgttctcgctgatgatgcaggagcgcgcctctaccggccgcatctatatccagaacgtcgaccactgtaacacccacagcccgttcgatccggtagtcgccccggtgcgtcagtctaacctgtgcctggagattgctctgccgaccaaaccgctggaagatgtcaacgacgaaaacggcgaaatcgcgctgtgcaccctgtcggccttcaacctcggggctatcgacagcctcgacgagctggaagagctggcggtgctggcggtgcgtgctctggatgcgctgctcgactatcaggattaccccattccggcggctaaacgcggtgcgatggggcgtcgtacgctgggtatcggcgtgatcaacttcgcttactatctggcgaagcatggcaaacgctactccgacggcagcgccaacaacctgacgcacaaaacgttcgaagcgattcagtactatctgctgaaggcctctaacgagctggctatcgagcaaggcgcctgcccgtggttcaacgaaaccacctatgcgcagggcatcctgccgatcgatacctataagaaagatctggacggcatcgtcagcgaacccctgcactacgactgggaagcattgcgcgaatccattaaaactcacggcctgcgcaactccacgctctccgcgctgatgccgtccgagacctcgtcgcagatctccaacgccaccaacggcattgagccgccgcgcggccacgtgagtatcaaagcgtccaaggacggtatcctgcgccaggtggtgccggattacgaaaacctgcagaacgcctacgagctgctgtgggagatgccgaacaacgacggttatctgcagctggtgggtatcatgcagaagtttatcgaccagtcgatctctgccaacactaactacgatccgacgcgcttcccgtccggaaaagtgccgatgcagcagttgctcaaagacctgctcaacgcctataaattcggcgtcaaaacgctgtactatcacaacacccgtgatggcgctgaagacgcccaggatgacctggccccgtccatccaggacgacggctgcgaaagcggcgcttgtaagatctaa

SEQ ID NO: 209636 - DNA, 729 bp, Klebsiella pneumoniae; identical to SEQ ID NO: 138823

SEQ ID NO: 209637 - DNA, 2634 bp, Klebsiella pneumoniae
atgagcgaccttgcgagagaaattacaccggtcaacattgaggaagagcttaagaactcttatctggattatgcgatgtcggtcattgttggccgtgcgctgccggatgtccgagatggcctgaagccggtacaccgtcgcgtactttacgccatgaacgtattgggcaatgactggaacaaagcctataaaaaatcagcccgtgtcgttggtgacgtaatcggtaaataccacccgcacggcgacatcgcggtatacgacaccatcgtgcgtatggcgcagccgttctcgctgcgttacatgctggtggacggccagggtaactttggttccatcgacggcgactccgccgcggcgatgcgttataccgaaattcgtctggcgaaaatcgctcatgagctgatggccgatcttgaaaaagagacggtcgatttcgtcgacaactatgacggtacggagcgtattccggacgtcatgccgaccaaaattcctaacctgctggtgaacggcgcctccgggatcgccgtagggatggccaccaacataccgccgcataacctgacggaagtgattaacggctgtctggcgtatgttgacgatgaagacatcagcattgaagggctgatggcgcatattcctggccctgatttcccgaccgccgccattatcaatggccgtcgcggcatcgaagaggcctatcgcaccggtcgcggtaaagtgtacatccgcgcgcgcgcggaagtggaagtggacgcgaaatccggccgcgaaaccatcatcgtgcacgaaattccgtatcaggtgaacaaagcgcgcctgatcgagaaaatcgccgagctggtcaaagaaaaacgcgtggaaggcatcagcgcgctgcgtgacgagtctgataaagacgggatgcgcatcgtgattgaagtgaagcgcgatgcggtaggggaagtggtgcttaacaacctctattcccagacccagctgcaggtctccttcggcatcaacatggtagctctgcaccatggtcagccgaagatcatgaacctgaaggacatcatcgccgcgtttgtacgccaccgccgtgaagtggtgacccgtcgtacgattttcgaactgcgcaaagcgcgcgaccgggcgcatatcctcgaagcgctggccgttgcgctggccaacatcgacccgattatcgaactgatccgtcgcgcgccgaccccggcagaagcgaaaacggcgctggttgcccaggcgtgggatctcggtaacgtcgcggcgatgctggagcgcgccggggatgacgccgcgcgtccggaatggctggagccagagttcggcgtgcgcgacggtaaatactatctgaccgagcagcaggctcaggcgattctggatctgcgtctgcagaaactgaccggccttgagcatgaaaaactgctcgacgaatataaagagctgctggagcagatcgcggagctgctgcacattctcggcagcgccgaccgtctgatggaagtgattcgcgaagagctggagctgatccgcgatcagttcggcgacgaacgtcgtaccgaaatcaccgccaacagcgctgatattaacatcgaagatctgatcaaccaggaagatgtggtggtcaccctgtcgcatcaggggtatgtgaagtatcagccgctgaccgactacgaagcacagcgtcgtggcggtaaaggcaaatcggcagcgcgcattaaagaagaagactttatcgaccgcctgctggtggctaacacccatgacaccatcctctgcttctcaagccgcggccgtctgtactggatgaaggtctatcagctgccggaagccagccgcggcgcgcgcggtcggccgatcgtcaacctgctgccgctggaagccgatgagcgcatcaccgccatcctgccggtccgcgagtacgaagagggcgtcaacgtctttatggcgaccgccagcggtaccgtgaagaaaaccgcgctgaccgagttcagccgtccgcgttccgccggtatcatcgcggtcaacctgaacgaaggcgatgagctgatcggcgtcgatctgacctctggtcaggatgaagtgatgctgttctccgcggccggtaaggttgtacgcttcaaggaagacgccgttcgcgccatgggccgtaccgccaccggcgtacgcggtattaagcttgcggaaaacgacagcgtcgtctcgctgattattccacgcggcgaaggcgcgatcctgacggtgacgcaaaacggttacggtaaacgtaccgcggcggcggagtatccgaccaagtcgcgtgccacccagggcgttatttcgatcaaagtcaccgagcgtaacggttccgtggtcggcgccgtgcaggtggatgactgcgatcagatcatgatgatcaccgacgccgggacgctggtgcgtacccgcgtttccgaagtgagcatcgtgggccgtaacacccagggcgtgatcctcatccgcaccgcggaagatgaaaacgtggtgggtctgcagcgcgtggctgagccggtggatgatgaagagctggatgccatcgatggtagcgcggcggaaggcgatgacgatatcgccccggaagcggataccgatgacgacatcgccgaagacgaagaataa

SEQ ID NO: 209638 - DNA, 2841 bp, Klebsiella pneumoniae
ttgaaatatcttgcctcttttcatacaaccctgaaggtttcacgttatctgttcagagcgctggcggtattgctgtggctgcttattgcgtttgtctctgtgttttatatcgtcaacgcgctgcacgagcgggaagccgaaatccatcaggagcttaatctcaacgccgatcaggcccagcgctatatccagcgtaccgcggatgtaatgaaagagctgaagtatgtcgccggtaatcgcttgtcggcaggggacgcggtagcgcaagggcaaaacggcgatatggcggtgcccaactttgaacccctgtaccccgattccgactgcagcgcgatgagcgccacctggcgtaattcgctgcagtcgctggcatggtttatgcgctactggcgggataattttactgccgcctacgaccttaaccgcatctttctcatcggcagcgataacctctgcatggccaactttggcctgcgggacgtgccgattgagcgcgatcaggcgctgaaagtcctgcatcagcgcatagagcaatatcgcaacgcgccgcaaaacgagcgcggcaacaacctgttctggataagccagggcgttcgccccggggtgggctatttttacgccctgacgccggtctatatggccaatcgcctgcaggcgatgctgggcgtggagcagaccatccgcatggaaagcttctttacgccgggcagcctgccgatgagcgtgacgatctttgacgataacggccagccgctgatttcgctggccggtgcggaaggtaaaatccagagcgaagcgaagtggatgcaggagcggatgtggtttggctacagttcaggtttccgcgagctggtgctgaaaaaaagcctctctccgtcctccctgagcatcgtctattccgtctcggtagatcaggtgctggagcggatccgtatgctgatcatcaatgctatcgttcttaatatcctcagcggcgcgatgctgttcgcgctggcgcggatgtatgagcggcgcatttttatccccgcggagaatgacgcccagcgcctggaagagcacgagcagttcaaccgcaaaattgtggcttctgccccggtagggatctgtattctgcgcactgccgacgggaccaatattctcagtaatgaactggcgcacaactacctgaacatgctgacccacgaggaccgccagcggctgacgcagatcatctgcggccagcaggtcaattttgtcgacgtgctgaccagcaaccataccaacctgcagattagctttgttcattcacgctatcgcaatgaaaacgtcgccatttgcgtgctggtggacgtttccgcccgcgtgaaaatggaggagtcgctgcaggagatggcccaggcggcggagcaggccagccagtcgaaatcgatgttcctggcgaccgttagccatgagctgcgtaccccgctgtatggcatcatcggtaacctcgatctgctgcagaccaaagcgttgccgaaaggcgtcgatcgccttgtgacggcgatgaacaactcctccagcctgctgctgaaaatcatcagcgatattcttgatttctcgaaaatcgagtccgagcagttgaagatcgagccgcgggagttctctccgcgcgaagtcatgaaccatatctccgctaactatctgccgttggtggtgcgcaagcagctgggcctgtactgctttatcgagccggacgttccggaacaaatgtccggcgacccgatgcgcctgcagcaggtgatctcaaatctgctcagcaatgcgataaagttcaccgataccggctgtattgtcctgcacgtccagtgcgcgggggattatctgcagattagcgttcgcgacactggagaggggatcccggcgaaagaggtattgcgcctcttcgatcctttcttccaggtggggaccggcgtgcagcgcaattttcagggcaccggccttggcctggcgatctgtgaaaaactgatcagcatgatggatggcgatattgctgtcgaaaccgagccggggatgggtagccgctttaccatccgtattcctctgtatggcgtgcagaatacctcaccggtgagcagagacggtttcgctggcaagacctgctggctggcgattcataacacttcgctggcgatgttcgtcacctcgctgctcagctaccacggcctgacggtccgccgccatgccggcgaaacgccggacgccgaggatgtcttactcactgacgatgaggcgctgagcggatggcagggaagggccatggtcatcttctgtcgccgtcatatcggtattccgcaggagcggtccgccggcgaatggctgcacagcgtgacgactccccacgaactgctgccgctgctggggcgtattttccatgttgcgctcgccagtgcggaaaatagcccggcgctgatggccccggaggcgcaggccggcaataatgacgacatgatgatcctcgtggtcgacgatcacccgatcaaccgccgcctgctggcggatcagctgggttcgctcggctaccagtgcgtgaccgcgaacgacgggatcgacgcgctcaacgtcctcagcaagcagcacatcgatatcgtgctcagcgacgtcaacatgcctaatatggatggttatcgcctgacgcagcgcattcgtcagcttggcctgacgctgccggtgattggcgtaacggccaatgccctggcggaagagaagcagcgctgtctggaatcggggatggacagttgtctgtccaagccggtcaccctcgacgtactgaagcaaacgctgacggtatatgcggcgcgggtgcgtaaagggcgggaataa

SEQ ID NO: 209639 - DNA, 651 bp, Klebsiella pneumoniae
atgaacactatgaacgtaattattgccgatgaccatccgatcgtactgttcggtattcgtaagtcacttgagcaaattgagtgggtgaacgtcgttggcgagtttgaagactccacggcccttatcaacaatcttccgaagctggacgcccatgtgctgatcaccgatctgtccatgcccggtgacaaatacggcgacgggatcacgctgattaaatacatcaagcgccacttcccggatctgtcgatcattgttctgaccatgaacaacaatccggcgatcctcagcgcggtgctggatctggatatcgaagggatcgtcctcaagcagggggcgccgaccgacctgccaaaagcgctggccgcgctgcagaaagggaagaaattcaccccggaaagcgtctctcgcctgctggaaaaaatcagcgccagcggctatggcgataaacgtctgtcgccgaaagagagcgaagtgctgcgcctgttcgccgaaggtttcctggtaaccgagatcgccaaaaagcttaatcgcagcattaaaaccatcagcagccagaagaaatcggcgatgatgaagctgggcgtcgaaaacgacatcgccttgctgaactacctctcttccgtctcgctgagcgcgacggacaaagagtaa

SEQ ID NO: 209640 - DNA, 2658 bp, Klebsiella pneumoniae
atgaccccgaaaaaattctccctgatccccggcaacatcagccgcttcttcattttgatggttattgtcctgctggcgacaatgggggtgatgatccaaagcgccgtcaatgcctggctgaaggagaaaagctatcaggtggttgatgtctcccacgctctgcaccagcgcattgacgcctggcgctatgccacctggcagatctacgacaatatcgccgccacctcagtcaacaccgcaagcggcggtctgcaggagacgcgtttaaaacaggacgtttactacctggagaaaccccggcgtaaaaccgaagccctgatctttggctcccatgacagctccaccctcgaaatgacgcagaaaatgtccgattatctcgatattttgtggggcgcggagaccattccgtggtcgatgtactatctcaacggcctggacaatagtctgatcctggtctccactctgccgttgaaggacctctcttcgagcttcaaagagtcaacgatcagcagcgtcgtggagtcgcggcgcgcggaaatgctgctgcaggctaatacccttgatgagcgcgagacgttctcgccgttgcgccatctcgcctggcagaacgcgcactattttacgttacgcaccaccttcaaccagcccggacaccttgccacggtggtcgccttcgatctgccgattaacgatctgatcccgcccggcatgactatcgacagcttccgtatcgagcctgacccgtcgcaaaatctcgccaccacgccggataaagagagcgccgatcatattgggatcacctttaacggcatgcagattgacatcgccaccgacatcagcaccaccggtatgcagttgctgtggacggtaccaatgagcaccatgctgctggagtccatgcagaacattcttctgccgctgctgctcaacattggtctgctggcgctggcgctgtttggttttaccacctttcgccactataaaggacgcagccattcgtctggcgccgggctcccctccgccgccaacagcgaactgcgtctgctgcgcgccattaacgaagagattgtttctctgctgccgctggggctgctcgttcacgatcaggaagccaaccgaacggttatcagcaatccaattgccgaccatctgcttccgcacctgaatctgcagaacatcactaatatggcggaccagcatcagggggtaattcaggccaccgtcaataatgagcagtatgaaatccgccagtatcgcagccaggtagcgccgcgcacccagatcctgatcatccgtgatcaggaccgcgaagtgctggtcaataaaaagctcaagcaggcccagcgcttgtatgagaaaaaccagcagggacgggccgcctttatgcagcacatcggcagcgccctgaagcagcccgcgctgacgctggcggcagaggcggcggcgctcagtagtacagagaatcggacgctggcccagcatgccgatgagctggtcaaactcatcgatgacattcagctcgccaatctgctggaaagcgatgcctggaaaaccaaccagacgttgttctcggtgcaggagcttattgacgacgtcgtgccggaagtgctgccggcgatgaaacgcaagggtctgcagctgctcatcaacaatgcgctcccggccggcgagcagcgctatggcgaccgtgaagctctgcggcgcacgctggtgctgttaatccaatattcagtgaccaccacgcctatcggcaagatcaccctcgacgtctgtcaggatgagtcggccagcgatcgcctgaccttccgcattctggataccggcaacggcgtctcggcaaacgagatcgacaatatgcacttcccgtatctcaacgagacccagagcgacctgtacggcaaagcaaacgcccttaccttctggctatgcgaccgcatgacgcgcaagctgggcgggcaattgaccattaaagcccgggagtcgctggggacgcgctataccctgcatctgaaaatgccggctagcgaagaggcgccagaggcgggagagcatttgctggatgacgttatcgtcctgctggatgtgacttccagcgaagtgcggcggattgtcactcgccagctggagagctggggagcgtcctgcatcacaccggacgatcgggcgaccagtcaagcctttgatctttatttaacggataatccgtctaatcttactgcttcaggcttgcttttaagcgatgatgaggtcgggatacgcaagatcggcccgggccaactgcgggtcaactttaatattagcacggcgatgcaggaggctatcctgcagcttattgagcagcagctggcggaggaggcggttcagcccgtcacctcaggaaacgagagtaacgccgaactccatgccagcggctattacgcactgtttgccgatacggtaccggatgatgttcagagattgtatactgaaatcgaagcgggcgattttgctgctctggcgcaaaccgcccaccgcctcaaaggggcatttgctatgcttaatctgatacccggcaagcagttatgtgaaacgcttgagcatctgattcgcgaaaaggatgcgcaaggcatagaaaaatatatcagcgacattgacgcttacgtcaagagcttgctgtag

SEQ ID NO: 209641 - DNA, 1104 bp, Klebsiella pneumoniae
atgaaagttaaagtactgtccctcctggtaccggctctgctggtagcaggcgcagcaaatgcggctgaaatttataacaaagacggcaacaaattagacctgtacggtaaaattgacggtctgcactacttctctgacgacaagagcgtcgacggcgaccagacctacatgcgtgtaggcgtgaaaggcgaaacccagatcaacgaccagctgaccggttacggccagtgggaatacaacgttcaggcgaacaacactgaaagctccagcgatcaggcatggactcgtctggcattcgcaggcctgaaatttggcgacgcgggctctttcgactacggtcgtaactacggcgtagtatacgacgtaacgtcctggaccgacgttctgccggaattcggcggcgacacctacggttctgacaacttcctgcagtcccgtgctaacggcgttgcaacctaccgtaactctgatttcttcggtctggttgacggcctgaactttgctctgcagtatcagggtaaaaacggcagcgtcagcggcgaaggcgctctgtctcctaccaacaacggtcgtaccgccttgaaacagaacggcgacggttacggtacttctctgacctatgacatctatgatggcatcagcgctggtttcgcatactctaactccaaacgtcttggcgaccagaacagcaagctggcactgggtcgtggcgacaacgctgaaacctacaccggcggtctgaaatacgacgcgaacaacatctacctggccactcagtacacccagacctacaacgcgacccgcgccggttccctgggctttgctaacaaagcgcagaacttcgaagtggttgctcagtaccagttcgacttcggtctgcgtccgtccgtggcttacctgcagtctaaaggtaaggatctggaaggctacggcgaccaggacatcctgaaatatgttgacgttggcgcgacctactacttcaacaaaaacatgtccacctatgttgactacaaaatcaacctgctggacgacaatagcttcacccacaacgccggtatctctaccgacgacgtggttgcactgggcctggtttaccagttctaa

SEQ ID NO: 209642 - DNA, 1053 bp, Klebsiella pneumoniae
atggatatgactttctttcgcgccgcgctgctgggcgcctgcgttctgctctctggctgcgattcagctaccactcctgcgacccccaccgcgacggccaccgtgctggatggcaaaacgatgggcaccttctggcgggtcagcgtcattggcgtggatgaggcaaaggccctggcgttgcgcgccaaggttcaggcccagctggacgccgacgatcgcctgctgtcgacctggaaaaacgactcagcgctgatgcgcttcaatcatgccgccactaccgaaccctggccggtgagcgaagcgatggcggatatcgtcaccctgtcgctgcggattggcgccaaaacgcacggcgcgatggatattaccgtggggccgctggtcaacctgtggggctttggcccggataaacagccggtcaccaccccggatgccgaggcgatagccgcggcgaaggcgcgcaccggcctgcagcatctgcaggttattaatcagagcggcaggcagttcctgcaaaaagatattcccgatctgtttgtcgacctctccaccgtgggggaaggctatgccgccgaccacctcgcgcggttgatggagcaggaggggatctcccgctatctggtgtcggtgggcggggcgctggtcagccgtgggatgaacggcgaaggcaagccctggcgggtagcgatccagaaaccgaccgaccgcgaaaacgccgttcaggcgattgtcgacatcaatggtcacggcatcagcacctccggcagctatcgcaactactatgaactcgatggcaaacgcatctcgcacgttatcgatccgcagaccgggcagccgataacccataagctggtctccgtgaccgtcattgcgccaacggcgctggaggcggacggctgggataccggactgatggtgctggggccggaaaaagcgcagcaggtggtgcgcgaggaggggctggcggtctacatgatcgttaaagaaggagagggttttaaaacctggatgtcgccgcagttccgcactttccttgtcggcgagaaaaattaa

SEQ ID NO: 209643 - DNA, 1065 bp, Klebsiella pneumoniae
atgaaaccgatagttgccgataccgatgatcgccgctggcaggcggtctgcgaacgtgatacccgggccgatggtcagttcgtctttgcggtactgaccaccggcatctgctgtcgtccctcctgccgctcgcggcgcgcgcggcgagaaaacgtacgcttttttgccgacgtcgccgccgccgtggcggcgggattccgcccctgcaaacgctgccaaccggataaagactacccgcagcagcaaagggtcgacaaagtggcgcaggcctgtcggctgctggagcaggacgcgcccctgaccctcgaggcgctggcaggccagctggcgatgagcccgtttcatttccaccgtttatttaaatccgtcaccggcatgacccctaaagcctggcaacaagcgtggcgggcgcagcgcctgcgggaagcgctggagcaggggataccggtgacccgcgccgcgctggcggctggttttcccgacagcagcagctattatcgccaggccgacgcagcgttagggatgaccgccagccagtttcgccgcggcggcgccgccaccgtggtaacctggaccacgggcgactgcgcgctgggtcgttgcctggtggcgcagagcgagcgcggcgtctgcgcggtgctgccgggtgataacgatgcggcattgctcgacgacctgcgccggcgctttcccaatgccgagctgcgtgaaggcgaccctgatttttgtcagcagatggccgagattttcgcccacctcgacgacagccggcggccggtatcgctgccgctggatctgcagggcactgcgtttcagctgcaggtctggcaggcgctgcggcagatcccggtgggcgagacccgcagctaccgccaggtggcagagcatattggccagccgcgggcggtaagagccgtggccggcgcctgcgcggcgaattcgctggcggtgattgttccctgccaccgggtggtgcgtgaagatggcgccctgtccggttatcgctggggaacggcgcgaaaagcgcagctgctggcgcgcgaggcccaacatgaggaggagtaa

SEQ ID NO: 209644 - DNA, 654 bp, Klebsiella pneumoniae
atgctcgatctgtttagcgatatcccaccgtggcaggagccgctggcccccggcgcggtggtgctgcggcgatttgcccgcgaacgcgccccggcgctgctgcaggcgatagccgacgtcgccagtcagtcgccgtttcgccagatggtcacgccgggcgggtacaccatgtcggtcgccatgaccaactgcggcgcgctgggctggactaccgatcgccacggctatttgtacgccccggtcgacccggtaaccgatcaaacctggccgccgatgcctgccgtatttcatgaactggcgctggcggcggccgccgccggcggctatccggagttttcccccgacgcctgtttgattaaccgctattgtcctggcgcaaaactgtcgttgcatcaggataaagatgaacaggatctgcgggcgccgattgtctcggtctcgctgggcttgccggccatctttcagtttggcggcttgcaacgcagcgacccgctgcagcggctgctgctggagcatggcgatgtggtggtctggggcggcgagtcgcgcctgttttatcatggcattcagccgctgaaagcggggcatcatccggaaacgggcgattgtcgttacaatctcaccttccgacaggcgggtggtcgccagtattaa

SEQ ID NO: 209645 - DNA, 1644 bp, Klebsiella pneumoniae
atggaacttctctctctcgtctggcgccagtatcgctggccgtttctgggcgttattgctctcagcctgctcagcgccgcgctgggtatcggcttaatcgctttcattaacctgcgtctgattaccgctgtcgatacctcgctgcgggtcctgccggagtttcttggtctgctggggctgctgatggcggtgaccctgggttcgcagctggcgctaaccaccctcggccaccattttgtctatcgtctgcgcggtgagtttgttaaacgcatcctcgatacccagattgaacaagtagagaagatcggcagcgcgtcgctgcttgccgggctgaccagcgatatccgcaatatcaccatcgcctttgtgcgcctgccggagctggtgcaggggatcattctcaccttcggctccgcggcctacctcgcctggctgtcaggaaaaatgatgctggtgacggtgctgtggatggcgctcaccatctggggcggctttgtgctggtctcgcgggtgtacaaacatatggccagcctgcgcgaaacggaagataaactgtatcacgactatcagacggtgctggaggggcgtaaagagctgaccctcaaccgcgagcgcgcggagtatgtgtttaaccagctctacctcccggacgccagggagtaccggcaccatatcgttcgcgccgataccttccacctcagcgcggtcaactggtcgaatattatgatgcttggcgccatcgggctggtgttctggatggccaacagcctcggctgggccgataccgccgtggcggcgacctattccctgacgctgctgtttctgcgcacgccgctgctctccgccgtcggcgcgctgcccacgctgctcagcgcccaggtggcgtttaacaagcttcgtcagttctccctcgccccgtaccgggccgactttccccggccgcaggcgcatcctgactggcagacgctggagctgcgcgatgtcaccttccattatccggaccagcgctttgcggtagggccgcttaatctgacgctgaagcgcggcgagctggtgtttttgataggcggcaacggcagcggcaagtcaacgctggcgatgctcctgaccggcctgtaccagccaatatccggtcagatcctcgtcgacggccagccgctggcggcggagaggccagaggagtaccgcaaactgttttccgcagtgtttaccgacgtctggctgtttgaccgcctgctcgggccgcagggcgaggaggccgatccggcgctggtggcgacatggctggagcgtctgcaaatggctcacaagctgcagctggagaacggaaaaatcgccgacctgcggctgtcgaaagggcagaagaagcgcgtggcgctcctgctggcgctggccgagtcccgggacatcattctgctggatgaatgggcggcggatcaggatccgcatttccgccgcgagttctaccaggtcctgctgccgctgatgcagcagatgggcaaaaccgtgttcgccatcagccatgacgatcactacttccagcacgccgatcgtctgctggagatgcgcgccggccagctcgccgaacttaccggcgaagagcgggaacaggcttcccgcgatgcggtggcccgtacggcctga

SEQ ID NO: 209646 - DNA, 1437 bp, Klebsiella pneumoniae
atgtccgttttgcataaaaaaagcgcccgcttgcgtgacgaagagcgcgcccgtctgatttggctcttgagcaccgataaagcggtgacttccgcgctgctgggcaaactgacgctggctgaacgatatgatgaagggacgctggccgatgacctggccgaagtggaaatgctggtctcgcatctgccgccgccggatctcgccgatgcgctggaagcgcttccctatgacgcccgcaccgcgctatggtgcctggtgcccgacgataaacgcggcgaagtgctgctggaggcctcagagaacgtctggggcgacctgatcgacaagatgagcgaccccgagctgctgcaggccatgcagccgctggatatcgatgaacaggtttacctgctgcagcatctgccgcgcaacctgaccggacggctgctggcgaccctgccggccgagaagcgcgcccgtattcgccagattatgcgctacgccgacaacagcgtcgggtcgatcatggagtttgaggtcattacggtgcgaccggaggccaccctggcggcggtgcagcgctatctgcggcgtctcggtaaaatgccggaaaacaccgataagctgttcgttaccacccgtaacaagctgctgctcggcgagctggagctgcagaccattctgctcaatgatgcgcagaagcgggtgggggaggtgatggagggcgacccggtcacctttcagccgcacgaagaggcggagaaggtggcgcgcaccttcgaacgtgatgacttgctcagcgccgccgtcattgatgccgacggcaagctgatcgggcgcctgaccatcgatgagatcgtcgatgtggtttatgaagaaaccgataacgatctgcggcggatgggcggcctgagcgatgaagaggatgtcttcgccccggtcagcaaagcggtgaaaacccgctgggcatggctggcggtcaatctgtgtacggcgtttattgcttcccgggtcatcgacggcttcgaacacaccatttcacagctggtggcgctggcctcgctgatgccgatcgtcgccgggattggcggcaacaccggcaaccagacgatcaccatgatcgtccgggcgatggcgctgcagcagatccagcccggcagctttacctttctgatcctgcgtgaaatgggtgttgcgctgattaatggcctggtgtggggcgggattatgggggccatcacctggtggctgtatgacgatccgcagctcggcggggtgatgacgctggccatgatgctcaacctgctgatggcggcaatgatgggcgtgataatcccgatggtcatggtgaagctggggcgtgacccggcggtcggctccagcgtgatgatcaccgccatcaccgacaccggcggcttctttatttttctgggtctggcgacgctgtttctgatgtag

SEQ ID NO: 209647 - DNA, 1239 bp, Klebsiella pneumoniae
atgcctccagtttctgaccccgccgcttccggcaacctgcgtcccatcctccgctccccgtctttactgacgcgtgaagtgctggccggcgtgctcaccgccctggcgctcatccctgaagtgatttcgttttcagtcattgccggcgttgacccgcaggtaagcctgattgcttcggtggtgctctgcctggcgatgtcagtcttcggcggacgcccggcgatggtcaccgccgccgcgggctcggtggcgctggtgattggcccgatggtgcatcagcacggcgtggggtacattttaccggctgtcattctggcgggtattattcaaattttgtttggtctgtgcggcatggcgcgcctgatgcgctttattcccccggcggtgatgaccggcttcgtcaacgcccttgggatcctgattttctttgctcaggtgccgcatttctggagtcgacaaccgctaatcgttggcctgttcgtcctgacgctgcttatcgtcctgtgggcgccgcgcgttattaaggctatcccggcgccgctgatcgccatcgtcgcgctcaccctctataccgcgaccaccggccagcagctgccgaccgtcggcgatgaagggtcaatgagcggcggcctgccggggttcaccgccctgaccgttcccctgaacctgaccaccctgcagataatctggccgtgcgccctcagcatcgcctttgtcggcctgatggagtccttgctgacggctaagctggtggatgatctcactcataccccgtcgaacaaatcgcgggaaagcgccgggctgggtatcgccaatatccttgccggctgctatggcggcatcgccggctgcgcgatgatcggccagactatcgtgaacgtggaaatgggccgggcacgcagccgcctctcaacggtaatcgccggcctggtgctgctcctgctggtgacagcgctcagccaggtgatggcgaagatcccgatggcggttctggccggggtgatggtgatcgtggcggtgaagacatttagctggcacagcattcgtccggtcgagctggcgcgtaatccgtggccggaaacgctggtgatgctggtgactgtcgccgcgacggtgggaaccagcaatctggcgatcggtgtgctggcggggattgtcgcgatggcgatcatcccccgccgcctgcgggcaaaagcgcaggctacatcagaaacagcgtcgccagacccagaaaaataa

SEQ ID NO: 209648 - DNA, 1635 bp, Klebsiella pneumoniae
atgaataaaaagatggccgtaccacgctcacaggcggttggtcccaacagcactcggaccaacacccgccatgagcaagagacggatgtattgttgattggcggcggcattatgagcgccacactgggaacctggctgcaggagcttgagccagactggtctattaccatggttgagcagatgtccagcgtggcggaagagagctcaaacgggtggaataatgcgggtaccggccacgcggcgctgatggagctgaactacacgccgcagaccgccaacggcatcaatatcgacaaagcggtcgacatcaacgaagccttccatatctcgcgtcagttctgggcgcatcaggtgacgcgcggcgtcctgaacaaaccaaaatctttcattaacagcgtgccgcacatgagctttgtgtggggcgaagataacgtcaacttcctgcgtgcgcgctacgcggcgctgcagcaaagtgaactgttccgcggtattcgctattctgaagaccatcagcagatcaaagcctgggcgccgctggtgatggaaggccgcgacccgctgcaaaaggtcgccgccactcgctcagaagtgggaaccgacgtcaactatggtgaaattacccgccagctgatcgccggtctgcaaaagcatgataatttctccctacagctgggcaccgtggtgcgtcgcttcaagcgcaacgccgacaagagctggacggtcaccctggcggatgccgacaatcgtcgtcagaagcgggtcattaaagccaaatttatctttatcggcgccggcggcgcagcgctgaccctgctgcaggagaccggcattccgcaggccaaagagtatgcgggcttcccggtcggcggccagttcctggtctgcgaaaatccggaggtggtgaaccaccatctggcgaaggtctacggtcaggccgaagtgggcgcgccgccgatgtcggtgccgcacatcgatacccgtattatcgacggtaaacgcgtggtgctgttcggaccattcgccaccttctcgacccgtttcctgaagaacggttcgctgtgggatctgctggcctcgacgaatacctcaaatattttgccaatgctcaacgtcggcctggacaacttcgatctggtaaaatatctgattagccaggtgatgcagaaagataaagatcgtctggccgcgctgtgcgaatattatccggaagcgcggaaagaggactggcggttgtggcaggccggtcagcgcgtgcagatcattaagcgcgacgcgaagaagggcggggtactgcgcctgggcaccgaagtggtcagcgatgatgaaggcaccgtcgcggcgcttctcggcgcgtcgccaggggcctccaccgcggcgcctatcatgctgcagctaatggaaaaagtgtttaaagataaagtcaattcgccggaatggcaggccaagctgaaggcgatcatcccaacctacggtattcgtcttgacggcaacccggcggagatcgagaaagcgctggcgtggaccagtgaagtgctggaactgaaatatgagccagccggggcggtggatgaggtaccgcaggcggagctgaagccgctgagcggcggcaagccgatggcggatatcgcgctctga

SEQ ID NO: 209649 - DNA, 492 bp, Klebsiella pneumoniae
gtgaaaaaaatcactacgctagccgtttctctgctgaccgccgcctgcatgtccgctggcgcattggccgcagaccagccgctggaaaaagtcgcgccgttcccgaaagcggaaaaaggcatgaagcgtcaggttattcagctgccgcagcagcaggatgagtcggcgctcaaggttgagctgatgatcggccagacgctggaagtcgactgcaaccatcatcgtctcggcggggaactggaaagtaaaaccctggaaggctggggctatgattactatgtctttgagaagctgagcggcccggtatccactatgatggcctgcccggacggcaaaaaagagaagaaatttgtcactgccggcctcggggatgacggcatgctgcgctacaacagcaaactgccgatcgtggtatacacgccgagcaatgtcgatgtgaaatatcgcatctggcgcgccgacgagactatcggcaacgctgtcgtccgctaa

SEQ ID NO: 209650 - DNA, 1110 bp, Klebsiella pneumoniae
atgagagttaatggacttaccaaaggatttttcatccttatcgtcttcattgtaaccctggccttttttgatgttctctcaccctattattccgccatcctttgggctgcgatcctcgcggtgatttttaatccggtcaaaaacaagatccgtacccgcctcggcgagcgcaatggcctcgcggcgctgatgaccatcgtcattatctgtcttatcgtttttacgccgctggctatcattctctcctcgctggcctacgagctcaacctggtgtacagcaaactgcagcataacgacacccagtttccgacggtggtcgccagcctgttcgcccatcttcccggctgggccagaagcttcctcgccgatcataaccttgatagcgcgcagcagatccagcagcagctctctgatgccgctctgaaaggcggtcagtatctggccggcagcgcgtttctgattggcaaagggacttttggcttcaccgtcagcttcggcatcatgctgtatctgctgtttttcctgctgaaggatggaccttatctggtgctgttgatcctcgagtctctaccgttatcaagctatgtgaagcagcatttgttcgctaaattcgccgctgtggcccgcgccacggtaaaaggtaccgtcgccgtggcgctggcgcagggggcgctgggtggctttgccttctggatcgccggtctggacggcagcattctctggggagcgctgatggcgtttctgtcgcttatcccggcggtgggctcggccattatctgggtgccagcggccatctacctcttcgccaccggccagctgtggcagggcgcctttatcgtcggcttctttgtgattgtgattggcctggtggataacattctgcgtccactgctggtgggcaaggataccaggatgccggactatctgatccttatcgccactctgggcggcatggagatctacggtatcaatggcttcgtgatcgggccgctgatcgccgccctgtttatcgcctgctggaacctgctgtcgggacgagaacatgccggcaataccgatgaaatcgatgaagagtttattgaggaagcgaaaaatagccgtaatgaatag

SEQ ID NO: 209651 - DNA, 1761 bp, Klebsiella pneumoniae
atggtgactctacgtcagccctaccgagaaaaagtctcccagatggttagctgggggcactggttcgccctgttcaacatgttgttggccatggtgctcggcagccgctacctttttgtcgccgactggccgacgacgcttgccggacgactgttttcgtacgtcagtctcgtcgggcatttcagctttctggtgtttaccagctatgtgctgatcctctttccgttgacctttatcgtggtctcgcagcgcctgatgcgcttcctgtcggtgatccttgccaccgccgggatgacgctgctgctgatagacagcgaggtttttacccgcttccatctgcacttaaacccggtcgtctgggagctggtcatcaaccctgaccagaatgagatggcgcgcgactggcagctgatgtttatcagcgtcccggtcatctttttgattgaaatgctcttcgccacctggagctggcaaaagctgcgcagcctgacgcgccgccgccattacgcccgcccggtcgcctggttcttctttttgtcgttcgtcagcagccacctggtctatatctgggcggacgccaatttctatcgcccgatcactatgcagcgggcgaatctgccgctctcctatccgatgaccgcccgtcgtttccttgagaaacatggcctgctcgacgcccaggattatcagcgtcgtctggtggagcaaggggcgccggaggcggtatcggtccagtatccgcttagcaacctgcgctaccgtgacctcggcgcgggctacaacgtgctgctgatcaccgtcgacaacctgaactactcgcggtttgaaaagaccatgccggcgctggcggcatttgccaaagaaaacgttaactttacccagcatatgagctcgggcaataccgccgacagcggcctgtttggcttgttctacggtatttcgcctggctatatggacggtgtcctctcggcgcgtattcccgccgcgctgatcaccgccctcaaccagcagggctaccagctgggcctcttctcctccgatgggtttagcagcccgctgtatcgccaggctctgctctccgatttctcgctgccgagcgcgaagacccagagcgacgagcagacggccaatcagtggatcggctggctggaccgttacgcgcaggatgagaatcgctggttctcgtggatctcgctcaatggcaccaccctcgacgacacgcagcagcagggctttgtccgccgctacagcaaggcggctggcgacgttgatgcccagatcgatcgggtgctgactgcgctgcgcgaagccggcaaactcgataatacggtggtaattattaccggcggccacggcaagccgctgaatgcgaaacacgacgcgttcgactggtcgcgcgagcagctgcaggtgccgctggttattcactggccgggcacgccggcgcaggagattgccaccctgaccgataacaaagatgtgatgactacgctgatgcagcgcctgcttcacgtttcgacgccggccaatgagtactcgcagggagaagatctgttcagcgccgcgcggcgtcgtaactgggtcaccgcggccaacggcgatacgctggccatcaccaccccgaccatcaccgtggtcctcaaccataacggcacctataccacctggagccgcgacggcgagaaaattaaagatcagaaaccgcagctcagtctgttgctgcaggtcctgactgacgaaaaacgctttatcgctaactga

SEQ ID NO: 209652 - DNA, 264 bp, Klebsiella pneumoniae
atgttgccctttcacgaacaaacagattttgagtttatgccgcaaatttcccgctatagcgatcaacaggtcgaacacttgctcagcgagctgacgaacgtcctggaatcacacaaagccccggtggacctttcactgatggtgttaggcaatatggtgaccaacctgatcaacagtagcgtcgcgccggcgcagcgtcaggccatcgcccgttctttcgcgcaggctttgcaatcttcgattaacgacgatccagcgcattaa

SEQ ID NO: 209653 - DNA, 1008 bp, Klebsiella pneumoniae
atgagtctggatatcgaccagattgccctgcatcagttaatcaaacgtgatgaacaaaatctggagctggtgctgcgcgagtcactgctggagccgaacgcgacggtcgtcgagatgatggctgaactgcaccgggtctatagcgccaaaagcaaagcctatggcttgttcaatgaagagagcgaactggcccaggcgctgcgcctgcagcgtcagggggaagaagagtttctggcgtttagccgcgcggcgaccggtcgcctgcgcgatgagctggcgaaatacccgttcgccgaaggaggcattgtcctcttctgccagtatcgttaccttgcggtcgagtatctgctggtggcggtactcaataacctgagcagtatgcgcgtcaacgaagagctggatatccgctcgacccattatctggatattaaccatgccgatatcgtcgcgcgcatcgatctcaccgaatgggaaaccaacccggagtcgacccgctatctgaccttcctgaaagggcgggtagggcgcaaagtggccgatttctttatggatttcctcggcgccagcgaagggcttaacgccaaagcgcagaaccgcggcctgctgcaggcggtggatgacttcgccgccgatgcccagcttgataaatccgagcgacagaacgtgcgccagcaggtctacgcctactgcaacgaacagctgcaggctggggaagagattgagctggagtcgctgtccaaagagctcgccggcgtcagcgaaaaaagcttccaggaattcaccgctgagcagggctatgagctggaagagagcttcccggcggatcgcagcaccttacgtcagctgaccaagtttgccggcagcggcggcggattgaccattaacttcgacgccatgctgctgggcgaacgcgtattctgggatcccgccactgataccctgaccattaagggtaccccgccgaacctgcgcgaccagctgcagcgccggacgtcaggcggcaattaa

SEQ ID NO: 209654 - DNA, 762 bp, Klebsiella pneumoniae
atgctcgccagtcagagaaaacagcagatcctccagatcctcaccgaggaaaaacaggtgatgtccggggagctaagccagcggtttaacgtctccgaggactccattcgccgcgatctgcgcgagctggcggcggagggaaaactgcagcgggtccatggcggggcattgccggtatccgccgccattgcgccaattgaaacgcgcaaaagcgtgcagatcgcctccaagcaggcggtcgcccgcgccgccgccgccctgatccagccgggacaggtggtgattgtcgatggcggcaccaccaccgcggcgatgatcggctttttacccgccgacctcagctgcacggtggtcacccacagcccgggcatcgccgtggcgctggtggaccacccgcgaatcgaggtgatcctgctcggcggcagagtattcaaacattcggttgtcgccgtcggcgccgagacgctggcgggaatggcgcggatcaacgccgatctgttctttatgggggtgaccggcgtccacccgcgggcgggtttcaccaccggtgattacgaagaggcaggcatcaagcgcgcgctgacggccagggcggcagaaaccgtggtaatggcctcccgggagaagctcaacgccgcgtcggcctttgccatcggcgagctgagcctcgccagtacgctgattgtcgatggagaacccgacgccgcgctacgccaacagttggtgcagagcggcgtggagatcgtccccgttcagcggtag

SEQ ID NO: 209655 - DNA, 597 bp, Klebsiella pneumoniae
atgcaaacacacgcaccgcacgtccgccacgttcgcgagacgctgctctcggataactggtacacgttgaaaaaatataccttcgaactgctgcgtcgggacggtcgctggcaggagcagagccgcgaggcttatgaccggggcaacggcgcagtcattttactctacaaccgggaaaagcggacggtggtcctgacccgtcagttccgttttccggtatttactcatggccacgacggatatctcattgaggcggccgccgggctgttggataacgcctcgccggaggcgcggatcgttgccgaagcggaagaggagagcggctttcgcgtgacgcgtgtcgaacccgtcttcaccgtctttatgagccccggctccgtcaccgaaaaactctacttttttatcgccgaatatcaggccgatgaccgtcggggcgacggcggcggactggcggcggaaggtgaggatattgaagtactggagtggccgctgacgcgggcgctgcaggctattcgcgatggcgagatcatggatgctaaaaccattatcctgctgcaacacctggcgctgaatgccgacacgctcctcgccggctga

SEQ ID NO: 209656 - DNA, 1287 bp, Klebsiella pneumoniae
atgataagaaaaccactggccctggcgttaatattggcggcgctgccggcggcggcaatggcgcaacactgcggcagcctgacgctggatgtctgcccaacgccttacgatcaaacgctacccgcggccaaagacatgctcagctgggatcagacttcacgcgtgattggctttcgcaatgactatcgcaactatgccggcgatgtcttccgccacggcgcctcgacgccgctggagcgcgctgaaaaacaactgaccgatgcccgctatacgctcaacggccacacctggaatttgcaggattacctgaagcgcgagaacgtcagcggtatgctggtgctgaaagatggtaaagtcgcctggaaatatctcgccgaaggtaataccgacaccaccctgtggacctcgcgctcggtaggcaaatcggtggtctcgacgctggtcggtatcgccattcaacagggtaaaatccactcccttgatgacctgattaccgtttatgaacccgaactgaaaggcaccgcctgggacggcgtaacgctgaagcagttgattcaacacaccagcggggtggaatggaatgaagactacaccgacccgcagtcgcatttcgcccgcctgaccaagtgtgaagcgcacccgggcgcctatgactgcgtgcgtaaaatcgtcaccggcctggcgcgtcaacacccggcgggcgagcagtggtcctactcttccggcggcgcctggctgcttggggatatcctggagcgcgccaccggcatgtcgctggccgcctggcttgaacaggctctatggcagccggccgggatggcccacgacggcgtgtggcatgcttatcagcaagggaagcacgacgtcggcgcccacggctttaacgccacccttgaagactggggccgctttggtgaattcgtcgcccgtgacggtcggttaagcaatggcaaacagctggtgccgactggctggttcgatcaagccgccagctggaccaaggcgctaaactcggtctcggcagcgcatccggagggtatttacggctatcagtggtggaataacgcgattccggcgaatgcgcaaaacgtccagccgacgccgcaggaagggcttaaagggtcgctgtgggcgctggggatctacggccaggtgatcatggtgaaccgcgcggaacacctggtgatcgtccagtggtcgacctggccgcaggcggaaccttccttcaacgctcagccgttggaagcggcgctgatgtacagcgccattgcccgcgagctgcgttaa

SEQ ID NO: 209657 - DNA, 888 bp, Klebsiella pneumoniae
atgaaaaccctacagtactcattcgcacagattgaagccttcgcgacgattgctgagaccggcagcctgtcgcaggcggccattcgtttagctaaagaccggaccacgctgcgcgatctgctggactatctggaagatgcgctgggctaccggctgttcagccgtgaaggacgtagcctgacgctaactgccgagggcgagcagctgtttcgccaggcgcatctgctgttgcgtcaggcgcaggctttcgagtcttttgcgcaaacgctgccgcaaaccgccgggcaggcgctgcgtctggtgtacgatcccttcgtgccgcgtgaatttctctgtgcgctggccgataacctggcccgacggcagatccgcctgagctgctggagcgcctcgcgtcgcgaagccgagcaggcgctgagcgatggcgtggcggagatggcgatttgtcaggctaacaaccgcacgctggggagcgaaatggagtggcgggcgctcggcaccgtggatctgcgtttctacgcggcggacagcctgttccacgacgctccgcggccgctgacgctattgaatctttcgttgacgccgcagttagtgatgcaccggcgcagtgacgatcaaatcgcccgccggctgcagatttccggccatacgctgtatatgaatgaaattaccctgttgcgccatgcgctggagcaggggaggggctgggggtttttaccggaccatttgcggccaggcgagtggcagggagtcagtgaaatcgcgacggaggtcggcagtcaggggctgaacgtcactatggtgatgctctggctgcccggaatgaataagcatcggatgcttagcgacatcgtgcacgaggcgccggagctttggcagcgcagataa

SEQ ID NO: 209658 - DNA, 285 bp, Klebsiella pneumoniae; identical to SEQ ID NO: 137579

SEQ ID NO: 209659 - DNA, 1758 bp, Klebsiella pneumoniae
atgacttttacattacgtccttaccaacaagaagccgtcgatgccaccctcgcctggttccgtcgccataccgagccggcggcgattgtcctgcccaccggcgcgggcaaaagtctggtgatcgccgagcttgccaggctggcgcgcggccgcgtgctggtgctggcccatgtcaaagagctggtggcgcagaaccatgccaaatactgcgcccttggcctcgaggcggatatcttcgccgccggtctgcagcgaaaagagagccacggcaaagtggtgtttggcagcgtgcagtcggtggcgcgcaatctcgaccagtttcgcagcgaattttcgctactcatcgtcgatgaatgccaccgcatcagcgatgatgacgacagccagtatcagcagatcatcggtcacctgcggcaggtcaatccgcagatccggctgctcggcctgacggccacgccgttccgccttggcaagggctggatctatcagttccattatcatgggatggtgcgcggcgatgaaaaggccctgttccgcgactgcatctatgagctaccgctgcgctatatgattaaacacggctatctgacgccgccggagcgcctcgatatgccggtggtgcagtacgatttcagtcgcctgcaggcgcaaagcaacggcctgttcagcgaagccgatcttaaccatgagctgaaaaaacaacagcgtatcacgccgcatattgtcagccagatcgtggagttcgccgaaaaccgcaaaggggtgatgatctttgccgccaccgtggaacacgcccgggaagtgaccggcctgctgccggtaggccaggcggcgctgatcaccggcgaaacgcctgggccggagcgggatcgcatcatcgaggcctttaaagcgcaggcgtatcgctatctggtgaacgtcgcggtgctgaccaccggcttcgacgccccgcacgtcgacctgatcgccatcctccgccccaccgagtcggtgagtctttaccaacagatcgttggccgcggtctgcgcctggcgccggggaaaaccgactgtctgatcctcgactacgccggcaatccgcatgacctgtatgccccggaagtggggacgccgaagggcaaaagcgacaacgtgccggtgcaggtcttctgcccggcctgcggcttcgccaataccttctggggcaaaaccaccgccgacggcaccttgattgaacactttggccgccgctgccaggggtggttcgaagatgacgacggccaccgcgaacagtgcgacttccgctttcgctttaaaaactgcccgcagtgtaatgcggaaaacgacatcgccgcccgccgctgccgggagtgcgacactatactggttgacccggacgatatgctgaaggcggcgctgaagctgaaggacgcgctggtgctgcgctgcagcggcatggccctgcagcacggcggcgacgagaagggcccgtggctgaaaatcacctactacgatgaagacggggcggatgtcagtgagcgcttccgtctgcagacccccgcccagcgcaccgccttcgaacaactgtttattcgcccgcatacccgcacccccggggtgccgttgcgctggataacgccggcggatatcgtgacccagcaggcgctgctgcgccatccggactttgtcgtcgcccgcaagaaggggcagtactggcaggtgcgggaaaaagtgttcgattatcaggggcgttttcgtcgcgccaacgagctgcgttaa

SEQ ID NO: 209660 - DNA, 720 bp, Klebsiella pneumoniae
atgcgacttgataagtttatcgctcagcagctgggcgtcagccgggctattgccgggcgtgaaattcgcggcagccgcgttaccgtggacggcgacattgtgaaagatgcctcttttaagctccagccggagcacgaggtggagtatgacggaaatacgctgacccagcagaatggcccgcgttactttatgctcaacaagccgcaagggtacgtctgttccaccgacgatcccgatcatccgactatcctttatttcctcgacgagccggtggcgcataagctgcacgccgccggacggctggatatcgacaccaccgggctggtgctgatgaccgatgacggccagtggtcgcatcgcattacctcgccgcgccaccactgtgaaaaaacctatctggtggcgctggaaagcccgctggcggaagggaccgcggagctgttcgccaaaggcgtccagctgcataacgaaaaagatctcaccaaaccggcgttgctggaagttatcactccgaccgaagtgcgcctcaccatcagcgaaggccgctaccatcaggtgaaacgcatgttcgccgccgtgggcaaccacgtggttggcctgcatcgggaacgcatcggcgacatcctgctggatgaatcgctggcgccgggtgaatatcgtccgctgacggaagcggaaatcgccagcgtgggcgccccgcagccacggagtaaaacgtga

SEQ ID NO: 209661 - DNA, 1197 bp, Klebsiella pneumoniae
gtgacgctgaagcagaattcttcactggggattgtgtttatccttggcctgctggccatgctgatgccgctgtctattgatatgtatcttccggccctgccggtgatcgccgcccagtataacgtcccggacggcagcgcgcagatgacgctcagcacctatatcctcggctttgcgctgggtcagctgctgtacggcccgatggcggacagccttggccgcaagccggtgatcctcggcgggacgctggtcttcgcggcggcggcggtagcctgcgccctgtcgcaaaccgtcgatatgctgattgtcatgcgtttcttccacggtctggcagccgcggcggctagcgtggtgattaacgccctgatgcgcgacatctatccgaaagatgagttttcgcgcatgatgtcgtttgtcatgctggtcacgaccattgcgccgctggtggcgccgatggtcggcggggcggtgttggtctggttcagctggcatgccatcttttggatcctcgccctggtggccctgctggcctcgctgatgatcggcctgtttatccgcgaaacgctgccggctgaaaggcgtcagccgttccatctgcgcaccacgctgggtaactttgccactctgttccgccacaagcgggtactgagctatatgctggcgagcggctttagcttcgcgggcatgttctctttccttagcgccggtccctttgtctacatcaatataaaccacgtcgcgcctcagcactttggctactattttgcgctgaacatcgtttttctgtttctgatgaccatgttcaacagccggtttgtgcggcgggtaggggcgttgcgtatgttccgcgccgggctgtggatccagtttgccatggcggtgtggatggtggtctgcgcgctgctggatgtcggcttttggtcactggtgatcggcgtagcggcctttgtcggctgcgtatccatggtgtcgtctaacgccatggcggtgatcctcgatgagtttccgcatatggcaggcactgcttcgtcgctggcggggactttccgtttcggtatcggggcgattatcggcgcgctgctgtcgatggcgacgtttaccaccgcctggccgatgctgatctctattgccttctgcgcaacctgctctattttcttctcgctttacgcatcccggcggcgaaaaatcgcacgctag

SEQ ID NO: 209662 - DNA, 345 bp, Klebsiella pneumoniae
gtgaatacacaacaactctctatcgtacaccgtctgccgcagagctatcgctggctggccggttttgcgggttccagagttgaaccgattccgcaaaacggcgcgcagaacgagaacagtctcgttgccctgaaattgctgagcccggacggtgagaaagcctggccggtgatgcataagctcagccaggcgttaagcgacatcgaagtcgactgttccgtgctggagtgcgaaggtgaaccctgcctgttcgtaaacctgcaggatgagtttgccgccacctgtcgtctgaaaaactttggcgtggccatcgccgagcccttctccggcaataaccctttctga

SEQ ID NO: 209663 - DNA, 1590 bp, Klebsiella pneumoniae
atgacccacccgctattagctatcgacaatctctctattgcctttcgccagcagggtgagacgcagaccgtggtgcacaatctgtcgctcgaggtggcggtcggcgaaacgctggccctggtgggcgaatccggctccggtaagagcatctccgccctgtcggtgctgcggctgctccctacccccccggccagctaccccagcggtgacatccgttttcatggccagtcgctgctgcatgcggatgaggcgaccctgcgcggcgtgcgcggcaaccggatcgcgatgatctttcaggagccgatggtatcgctcaatcctctgcacaccctggaaaaacagctctacgaggtgctgtcgttacaccggggaatgcgcaaacaggcggcgcgcggggagatcctcgactgcctggagcgcgtcgggatccgtcaggcgccgcggcggctggcggactatccgcatcagctctccggcggcgagcgccagcgggtgatgatcgccatggcgctgctgacgcgcccggagctgctgatcgccgacgagccgactaccgccctggacgtatcggtgcaggcgcaaattctgcaactgctgcgcgagctgaagcaggagctgaacatggggctgctgtttatcactcataacctgagcatcgtccgccaactggctgaccgggtggcggttatgcagaacggccgctgcgtggaacacaatgactgtcgggcgctgttcagcgcgccagcgcatccctacacccaacgcctgctggatagcgagccggacggggagccggtgccgctggccgccgatgccccggtgctgctgcaggcggacgatttaaaggtggcgtttcccgttcgcaaagggatcctgcgtcgggtggtcgatcatcatcgggtggtcaacagcctcagctttcagctgcgcgccggcgagacgctgggcctggtgggggaatcgggttccggtaaaagcaccaccggcctggcgctgctgcgcctgatcccgtccgggggcaagataaccttcgccggccagccgattcaggggcgtaaccgccgacagctgctaccgctgcgccgacagatgcaggtggtttttcaggatccgaactcgtcgctcaatccgcgcctcacggcgcagcagatcattgaggaaggcttgcgcgtccaccagccgacgctgacggcggccgaacgcgaacaggcggtgatccttgccatgcaggaggtcggcctcgacccggccagccgccagcgctatccggcggcgttctccggtggccagcgacagcgtatcgccatcgccagagcgttgatcgtcaaaccgcagctgatcgtcctcgatgaaccgacctcatcgctggacaaaaccgttcaggcgcagatcctgaacctgctgaaagccttacagcgaaagcatcagctggcctatatttttatcagccatgatttaggcgtggtgcgggcgctgtgtcaccaggtgatggtgctgcgtcagggagaggtggtcgaacagggcgagtgcaagtccgtcttcagcgcaccccggcatgagtatacccgccagctgctggcgctaagctga

SEQ ID NO: 209664 - DNA, 1026 bp, Klebsiella pneumoniae
atgtctttcttcagtcccgttaatcaggcccgctgggcgcgctttcgccacaaccgtcgcggctactggtcgctgtggctgtttttaattctctttctttgcagcctgggcgccgagctgctggccaacgaccgcccgctgctggtgcagtaccggggccagctgtacgtcccggtgttaaaaaactacaccgagcaaaccttcggcggcgcgttcgccaccgccgccgactatcaggatccctggctgcagcagcagctggcgactcacggctgggcgctatggccgccagtacgcttcggcgcgacgacaattaattttgccagcacggttccctttccatcgccgccctcagccagcaactggctcggcaccgacgccaacggcggcgatgtgctggcgcggatcctctatgggacacgcatctcggtgctcttcggtctgctgctgacgctgttctccagcgtgctcggggtgctggccggggcgatacagggttactacggcggtaaaatcgacctgtggggacagcgctttatcgaagtctggtccggcatgccaacgctgttcctgatcatcctgctctccagcgtcgtgcagccgggcttctggtggctgctggcaatcaccgttctctttggctggatgacgctggtgggcgtggtgcgcgcggaatttctccgcacccgcaactacgactatgttcgggcggcgcaggcgttaggggttagcgaccggcagatcatcctgcggcatatgttgcccaacgcgatggtggcgaccctcacctttctgccctttatcctgtgcagctccattaccaccctgacgtcgctggattttctcggcttcggcctgccgctcggctcgccctccctcggcgagctgctgctgcagggcaaaaacaacctgcaggcgccctggctgggcattgccgcgtttctctccgtcgccgtgctgctgacgctactgatttttattggtgaagcggttcgcgacgcctttgatcccagtaaggcggtgtaa

SEQ ID NO: 209665 - DNA, 1095 bp, Klebsiella pneumoniae
atgggcagctacctgatccgccgtttgctgttagtcatccccaccctgtgggccatcatcaccattaacttttttattgtccagatcgcgcctggcggcccggtcgatcaggccatcgccgccatcgagtttaatcagcgcggcgggatgccgggggctggcgacggcggaatgggcgccagccatgcccgcaccggcgcaggcaatatcagcgagggtcactatcgcggcgggcgcggcctcgacccggaagtcatcgccgagatcacccaccgctacggcttcgataaacctctccacgagcgctatctgaagatgctgagcgattatctgcgctttgatttcggcgacagcctgtttcgcagcgcctccgtgctgcagctgattaaagacagcctgccggtctcggtgagcctcgggctgtggagcacgctgattatctatctggtctccattccgctgggcatccgcaaagcggtcagcaacggcagccgctttgatatctggagcagtacgctgattatcattggctatgcgatccctgcctttctgttcgccatcctgctgatcgtgatttttgccggcggcagctatttcgacctcttcccgctgcgcggtctggtctcgccaaatttcgacaccctcccctggtatcagaagatcctcgactacctgtggcacatcaccctgccggtgctggcgacggtaattggcggctttgctgcgctgactatgctgaccaaaaacagcttcctcgacgagatccgcaaacagtatgtggtcaccgcccgcgccaaaggcgttggtgagaaacagatcctctggggacatgtgttccgtaacgccatgctgctggtgatcgccggcttcccggccacctttatcagtatgttctttaccggctcgttgctgatcgaagtgatgttctcgctaaacggcctgggtctgctgggctatgaagcgacggtctcccgcgactatccggtgatgttcggcacgctctatattttcactctgattggcctgctgctgaatatcgtcagcgatatcagctatacgctggtcgacccgcgcattgattttgagggccgctaa

SEQ ID NO: 209666 - DNA, 1806 bp, Klebsiella pneumoniae
atgtatgcgcgcctctttctgattctgctggctctgtttagcctggacgctaaggcgcaaaccattcaggaaagcgtagccttcgcgattatcggcgaaccgaaatacgccgccggtttcagtcattttgattacgtcaatcccagggcgccgaaaggcggcaccctcaccctggcggcgatcggcacctttgataacttcaaccgttatgcgctgcgcggcaaccccgcggtacgcacggaggcgctctacgataccctgttcaccacctcggatgatgagcccggcagctactacccgctgattgccgagcgggcgcgctatgccgaggactattcctggatggagatcgcgctcaacccgcgcgcccgcttccatgacggtacgccgatcaccgcccgcgatgtggcgtttaccttcaacaagtttatgaccgaaggggtgccgcagtttcgcatgttttataaaggcaccaccgtgaaggccatcgcgccgttgaccgtgcgtattgacctcggccagcccggcaaagagaacatgctgagtctgctgagcctgccggtgatgcccgaggcgttctggcgccagcacaaactcagcgacccgctgtcgaagccgccgctggccagcgggccataccgcatcagcgcctggcgaatggggcaatatattacctattcccgcgtcgccgactactgggcggccgacctgccggtcaaccgcggtcgctggaatttcgatacgctgcgctatgactattatctcgacgacaatgtcgctttcgaagcctttaaagcgggagccgtcgatcgccgggaagagaccgtcgccaaaaactgggctacccgctacgtcggtcgcaacttcagccgcggctacatcattaaagatgagcataccaatacctcggcgcaggatacccagtggctggcgttcaatattcagcgcccgatttttgccgatcgccgggtgcggcaggccattaccctggcgttcgatttcgaatggatgaacaaggcgctgttttacagcgcctatcagcgcgccaacagctatttccagaacaccgaatatgccgcccgcagcctgcccgacgcagccgagctggccctgctgacgccgatgaaaaacgaactgccctcggagctcttcagccaggtttaccagccgccggtctcccgcggcgatggcttcgatcgcgccaacttactcaaagccgacgccctgctcaatgcggcgggctggacggtgaagaaccagcgccgggtcaacgccgccaccggcaagccgctgcgctttgagctactgctgctggccgggggcaatgaccgctgggtgctgccgtttcagcacaacctacagcgtctggggatcgtcatggatattcgtcaggttgataattcgcagtacagcaaccgccgccgcagccgggattacgacatgatgccaagcctgtggcgcgccatgccctggccggggaccgacctgcaaatctcctgggcgtccgactatattcactccagctacaacgcgccgggggtgcaaagcccggtagtggataagctgattgcgcagatcctgcagtggcagggcaataagcagaaactgatccctctcggtcgggcgctggatcgtgtgctgacctggaataactacatgttgccgatgtggtatatggcgcaggaccgcaccgcgtggtggaataagttctctttccccgcgacccgccccatctattcgtccggcctcgatacctggtggtacgacgtgaacaaagcggccaccctccctgcggacagacgctaa

SEQ ID NO: 209667 - DNA, 1563 bp, Klebsiella pneumoniae
atgcttactcgctacttttcgccccagcgtaaaacctggttaaccagcctgagcgtggggatcatcgtcgcgctgttggccgggagcattcagtttatggtgatctaccataaccgggccgagcgtttcgacgccattatcaacaatgttaatacctatctgaaaagctattttcacgacctgcgccagaccattgacggcctgcagccgctggtggaccagccctgcgagaatattgactccgggcttacctcccacgccgcgttcagccccaacgtccgcgctttcctgctggtcaaaaacggcatcgccttttgctcatcggctacgggagccatgaatacgcccctcagccagctgatcccggccatcgatatcagcaaacccgttgctatggcgattttaccaggcacgccgatgatgccgaagagcgcggcgctggcgctgtgggtaggtaaacccggcgatcaaaacagcggcattttcgtgtcgattaacgctaatctcacaccgtatatcctctattccgcgcggcaaaacgatttcagcggcattgcgctggccatcgatcacaccgctatctccaccttcagtaatcggctggtggatccgcaaacgctgcataacgcgccgatccgccaggcacagatcgagggcttaccgctgaaggtctatctgtatgccaacagctggctggcggaaaatacgcagtttgctctgctgctcggggtcgtctgcggcctgctggcggggctgctctgctattacgtgctgacgatcaaatcggatccgcgaaaatccattctgctggggatcaaaaataaccagttctacatcgtttatcagccggtggttaatgctcagactctacgtatcagcggcgtggaggtcctaatgcgctggcgccatccggtggttggtgaaattccgcccgacgtttttattaacctggccgaaacccagcagatgatcgtgccgctaacccatcacctgctcgcgctgatcgccagcgacgctgcggtgttgaagcgtattctgccgcgcggcgtgaagctggggctgaatatttcccctgcccatctgcaggccgacagcttccgcgacgatatgctgcgcttcgccgccgcgctgccagccgaccactttcacgtggtgctggaggtaaccgagcgggcgatgattgataaagaaaaatcgatggctaacttcgcctggctccaccgccagggattcgaaatcgcgattgatgatttcggcaccgggcatagcgcgctgatctatctcgaacgctataacttcgattatctgaagatcgatcgcggttttgtgcaggcgattggtactgaaacagtaacctcgccggtgctggatgcggtactgaccctcagccgccggctgaaattaatgaccgtcgccgaaggggtggagacccaggaacaggcggagtggcttcgcggccagggcgttcatttcctgcaggggtactggatcagccgaccgctgtcgctggccgggctggtggctgcgcacgatgaacccgcgaactatttcacaacgcgctaa

SEQ ID NO: 209668 - DNA, 570 bp, Klebsiella pneumoniae
atggtcaaatctcagccgattttgagatatatcttgcgggtagcccccgcgattgcagtagcggttctgctttccgcgtgtagttcaacaagtaccgccaggaatatgcattctgagacgcatgctgtgggtagtggcgatttatcatcactgcaagcctctcaggatgaatttgaaacgatggtccgtaacctggacgtaaagtcccgtttaatggatcagtatgccagctggaaaggcgtgcgttaccgcctcggcggcagcacccgcaagggtatcgactgctcagcgtttgtgcagcgcaccttccgcgaacaatttggtctggaactgccgcgttcaacctctgaacagcaggaaaccggaaaatcgatttcccgtgcccaactgcggacaggcgatctggttctgtttcgcgccggctctaccggccgccatgtcgggatctacctcggcaacaaccagtttgttcacgcctccaccagcagcggggtgactatctccagcatggatgagccatactggaaaaagcgctacaatgaagcgcgtcgagtcctgagccgctcgtaa

SEQ ID NO: 209669 - DNA, 708 bp, Klebsiella pneumoniae
atgatgaaaaaccgaattcctttaatcctgctgcttaacatcgcgggtgtagcgctattttgctcctggtatctgccagccaaccatggcgcgtggttgccggtcgactccgcgatcttccatttctttaaccatggcgtcagcgtcagccatgcttatgcctggctgctggcgatcatcaacaatcgcgccttcgacgcctgttcgctgctggcgatgggctgcctgatgctgagctattggctaaaggcgccgactgcaggccgtcgtcagatcgccatcatgggcctggtgatgctgctggcggcggtgatcatcaaccagctcgcacaacacctgatgccggtacagcgcgccagcccgtcgctgttttttagcgatattacccgcgtcagcgacgtcgttaacttccccactaaggatgcctcgaaggacagcttccctggcgatcatgggatgatgctgctgatcttcgcgagctttatgtggcgctattttggccgtcgcgcgctgggcgtcgcgctgattatctttgtggtctttgctttcccgcgggtaatgattggcgcccactggtttagcgatattgccgtcggctccctgaccgccgtgctgatcggcgcgccctgggtattgatgaccccgctgagcgataaattgatcgcctttttcgatcgctacttacccagcagaatatcggccaaataa

SEQ ID NO: 209670 - DNA, 978 bp, Klebsiella pneumoniae
gtgaccagaaccaatttgatcaccggctttctcggcagcggtaagacgacctcgattcttcatctgctggcgcagaagcctgcggatgaaaaatgggccgtactggttaacgagtttggcgaagtcgggatagacggcgcgctgctggccgacagcggcgccctgctcaaagagatccccggcggctgcatgtgctgcgtcaatggcctgccgatgcaggttgggctgaacaccctgctgcgccagggcaaacccgatcgcctgctgatcgaacccaccggtttgggccacccaaagcagatcctcgatatcctcaccgcggcggtgtatgagccctggatcgatctgcgcgccacgctgtgcatcctcgatccccgccagctgctggatgaaagagccgtcagcaacgacaacttccgcgatcagctggccgcggcggacatcattgtggcgaataaaagtgatcgggaaaccgccgaaagcgcccgggcgctggccgactggtggcagcgctggggcggcgagcgtcgcaaggtgtcggcaatccagggcaatatcgatctgaccctgctcgatgagccacgacggaacaccgccccgctgccggcgagcgcggagcacgcccaccgccatcccccctcttccggcctcgccgcgctcagcctggcggaacaccagcgctggcgccgccatctcaacaatggccagggctatcagggctgcggctggatcttcgacgcggagacggtttttgacaccatcggcctgctcgaatgggccaggctggcgccagtggggcgcgttaaaggcgtgatgcgcattgccgagggggcggtgcgaatcaaccgtcagggggaggatctccatatcgagaccctcagcgtcgctccgcccgatagccggatcgagcttatttccgcgaatgaagccgactggaacgcactccagacctcgttgttgaggcttcgtttaagttaa

SEQ ID NO: 209671 - DNA, 1467 bp, Klebsiella pneumoniae
atgacaacaattgcaaccgctacgctaccgaagaacgtgcaataccctcaatacgatcgcagccaactccgctcgcgtattgtccatttcggctttggcgcgtttcaccgcgcgcaccaggcgctgctcaccgatcgcgtgctgaataacgtcggcggcgactgggggatctgtgaaatcagtctgttcagcggcgacacgctgatgagccaacttcgcgaacaggaccatctgtttaccgtgctggaaaaaggcgccgacggcaaccagcccattgtgatcggcgcggtgcacgaatgtctgaacgccaggctcgattcgctggcggcgattatcgaaaaattttgcgagccgcaggtagcgattgtctcgctgaccattacggaaaaaggctactgcatcgatccggcgaccgggaaactggatccgacgcatccgcgcattattcacgatctggagaatccgacgctgccgcagtcagctcccggtattttagttgaagcgctggcccgccgccgggaacgaggccttccgccctttaccgtgctctcctgcgataatatccccgacaacggtcacgtggtaaaaaatgccatcctcggcatggcggaaaaacgcagcccggcgctggcggactggatcgccgacaacgtcagcttcccgggcaccatggtggatcgcattgttcccgcggccacaccggagtcgctggcggaaatcgccgccgtgctgggggtcgacgatccctgcgccatcagttgcgaacccttcattcagtgggtggtcgaagatcactttgtcgccgggcgacccgcctgggagacggcgggcgtgcagatgaccgatgacgtgttgccctgggagcaaatgaagctgcggatgctcaacggcagccactctttcctcgcctggcttggctatctggcagggcatgcgcacattagcgactgcatgcgggatgacgtcttccgccgcgccgcccgccagctgatgcttgacgaacaggctccgacgctgaccattaccggcgttgatctgctggcctatgccgacagtctcatcgcccgcttcagcaatccggcgctcaaacaccgcacctggcaaatcgccatggacggtagccagaagctgccccagcgcatgctcgatggcatccgcgtacatctggcgcgcgacagccgttggccactgctggctctcggcgtggccggctggatgcgctacgtcagcggcacggacgacgccggtcagacgatcgacgtgcgcgatccgctggtcgacaagatccggctgcgggtggcgcagagcgatgagcagcagcgcgtcgacgccctgctggggctggaggaaatatttggccgcgacctgccgcacaacgcccagtttgtcgccgggatccgcgccgcctggcaacagctggcgacgcacggcgcccgcgaggccgtcgcccgcgcgctgaattcttaa

SEQ ID NO: 209672 - DNA, 1191 bp, Klebsiella pneumoniae
atggagcaaacctggcggtggtatgggccgaacgatccggtatcgcttgatgatgtacggcaggcgggggcgaccggcgtcgtcactgcgctgcaccatattgcaaacggtcaggtatggccggtcgacgaaattaaagcgcgtcaggcgctgttagcggcaaaagggttgacctggtcggtcgtcgaaagcattcccgtccacgaggatattaaaacccacagcgggcagtatgcgacctggattgccaactatcagcagagcatccgcaacctcgcggcctgcggcatcgataccgtgtgctacaactttatgccgatcctcgactggacgcgcaccgatctggaatatgagctgccggacggctcccgggcgctgcgtttcgatcagatcgctttcgccgcctttgagctgcatatccttaaacgcccgggagcggaagcggattacagtgaagaagagcagcgtcaggctgaggtctatttcaaggcgatgagcgaagcagatatcgataaactgactcgcaatatcatcgccggcctgccgggagcggaagagggctacacccttgaccagttccgcgcgcgtctggcggagtacgaccacattgataaagcacagctgcgtgaaaatatggcctatttcctgcgcgccatcgtgccggtatgcgaagaggtagggatccgcctggctgtgcatccggacgatccgccgcggccgatccttggcctgccgcgtatcgtgtcgaccatcgaagatatgcagtggctgaaggagacggtggacagcattaataatggcttcaccatgtgtaccggatcgtatggcgttcgcgccgataacgatctggtgaagatggtggagacctttggcgatcgcatccattttacccatctgcgctctacctgccgtgaagcaaacccgaaaaccttccacgaggcggcgcaccttagcggcgacgtcaatatggtggcggtggtggatgctatcctgcgtgaagagcagcggcgtaaacaggccggcgatctgcgcccgatcccatttcgtccggatcatggtcatcagatgctcgacgatctgcgcaagaaaaccaacccaggctattcggcgattggccgtctcaaggggatggcggaagtgcgcggcgtcgagctggcgctgaaaatgaccaaataccctgaactgctgtaa

SEQ ID NO: 209673 - DNA, 573 bp, Klebsiella pneumoniae
atgccaagagcgaatgaaattaaaaaaggtatggtgctgaattacaacggcaagctgctgattgtgaaaaatattgatattcagtcacccagcgcccgcggtgctgcgacactgtataaaatgcgtttctccgatgtgcgcaccggcctgaaagtagaagagcgcttcaaaggcgacgatatcgtcgataccgtcaccctgacccgccgtttcgtcgacttctcctacgtcgatggcaacgaatacgtgttcatggataaagaagactataccccttacacctttaccaaagagcagattgaagaagagctgcagtttattccggaaggtgggatgccagacatgcaggtgctgacctgggacggccagctgctggcgctggagctgccgcagaccgttgacctggaaattatcgaaaccgcgccgggtattaaaggcgcgtccgccagctcccgcaccaagccagccaccatgagcaccggcctggtgattcaggtgccggaatacctgaccaccggtgagaaaatccgcattcatatcgaagagtgccgctatatgggccgcgcggattaa

SEQ ID NO: 209674 - DNA, 780 bp, Klebsiella pneumoniae; identical to SEQ ID NO: 137077

SEQ ID NO: 209675 - DNA, 1182 bp, Klebsiella pneumoniae
atggaaaaccgtagcgccgctctcccccgacgcgggttcgatgtcacctcttccgccttcttaatcgtcgcctttctgacgggcattgccggggcgctgcaaaccccgaccctgagcctgtttctgaccaacgaagtgcacgtccgcccggcgatggtcggtttcttttttaccggcagcgcggttattggcattctggtcagtcagttcctcgccggccgctccgaccgtcagggcgatcgcaagcagctgattgtcgtctgctgtctgctgggggtgctggcctgcgtactctttgcctggaaccgcaactatttcattttgctgttcatcggcgtttttctcagcagctttggatcgaccgccaacccgcagatgtttgccctcgcgcgggagcatgccgacaggaccggccgcgaagcggtgatgttcagctccattttacgtgcccaggtctccctggcatgggtgattggtcccccgctggcctacgccctggcgatgggatttggttttaccgcgatgtatctcagcgccgcggcggcgtttatcgtctgcgggatcatggtctggctattcttgcccagcatgcgcaaagcaaagccggtagcgaccggccggctggaagctccgcgcacgcaccgccgcgatgcgttgctgctgttcagcatctgcaccctgatgtggggtactaacagcctgtacatcattaacatgccgctgtttatcattaacgagctgcatctgccggagaagctggcggggctgatgatgggcaccgccgccggactggaaattccgaccatgctgattgccggttactacgcccggcgtttcggcaaacgctttctgatgcgtctttctgcagtggccggggtgctgttttacgtcggcatgctgacggtgcatacgccagcgctgctgctggcgatgcaggtgctgaacgccatctatatcgggatcctcgccgggatcggcatgctctatttccaggacctgatgccggggcaggcgggcgcggccaccaccctctataccaatactacccgcgtcggctggatcatcgccggttcactggcgggggtagtggcggagatctggagctatcacgcggtgttctggattgcgctggcgatgggcgttgtcactcaggcctgcctgtggcggataagagacgtgtaa

SEQ ID NO: 209676 - DNA, 1131 bp, Klebsiella pneumoniae
atgttccagttatctgtgcaggatattcatcccggccagcaggccggtaataaagaagaggccatccggcaggtcgccgccgcgctggtcagcgccggcaacgtggccgatggctacgtgaacggcatgctggctcgcgagcagcagacctcgaccttcctcggcaacgggatcgcgatcccgcacggcacgacggatacgcgtgaccaggtgctgaagaccggcgttcaggtgtttcagttcccgcagggcgtcacttggggcgaagggcagaccgcctatgtggcgatcgggattgccgccagctcagatgaacacctcggcctgctgcgtcagctgacccatgtgctgagcgatgacgcggtcgccgcgcagctgcagtccgccactaccgcggaagagctgcgcgcgctgctgatgggagagaagcagagcgaagcgctgaagctggataacgagaccctcagtctcgacgtcgcggccagcgatctgctgaccctgcaggcgctgaacgcggcgcgtctgaaagaagttggcgctgtcgatgccgccttcgttagccacgtcattaacgatacgccgctgaacctcggtcagggcgtctggctgaacgacagtgcggaaggcaatttgcgcagcgccgtggcggtcagccgcgcggctaacgcctttacccgcgacgagcagccggtttccctgctggtcacggtggcgatggccgacgagcagccgaccgcagtgctgaaccgtctgagcaagctgctgctggacaagaaagctgaacatttgctgaaagccgacgccgccaccgtgctggcgctgctgaccagcgacgacgccattgccgaagatgtgctgagcgccgaattcgtggtgcgcaatgaacacggcctgcatgcccgtccgggcaccatgctggtcaacaccattaaacaattttccagcgacatcaccgtcaccaatctcgacggttccggcaagccggctaacggtcgcagcctgatgaaggttgtggcgctgggtgtgaaaaaaggtcaccgtctgcgttttaccgcgcagggtgaggatgcgcaacaagcgctggatgcgattggcgaagcgatcgccgcaggccttggggagggcgcataa

SEQ ID NO: 209677 - DNA, 939 bp, Klebsiella pneumoniae
atgagcagacgtgtagcaacgattacgttaaacccggcatacgacctggtgggattcaccccggagattgaacgcggcgaagtgaacctggtgcgcaccaccggcctgcacgccgccgggaaaggcattaatgtggcgaaagtgctgaaagatctcggcattgacgtcaccgtcggcggtttcctgggtaaagacaaccaggacggctttcagcagctgttcagcgagctggggatcgccaaccgtttccaggtggtgcagggccggacccgtatcaacgttaagctgacggaaaaagatggcgaagtgaccgatttcaacttctccggctttgaagtcaccccgggcgactgggaacgctttgtcaacgactccctgagctggctcgggcagttcgatatggtctgcgtcagcggcagcctgccgtccggcgttagcccggaagccttcaccgactggatgacccgtctgcgcagccagtgcccatgcattattttcgacagcagccgcgaagcgctggttgccggactaaaagcggcgccgtggctggtgaaaccgaaccgtcgcgaactggaaatctgggctggccgcaagctgccggagatgaaagatgttatcgacgccgcccatgcgctgcgcgagcagggtatcgcccacgtggtgatctccctgggcgaagagggcgcgctgtgggtcaacgcctctggggagtggattgctaaaccaccttcagtggaagtggtcagcaccgttggcgccggcgattcgatggtcggcggcctgatttacggcctgctgatgcgtgaatccagcgagcataccctgcgcctggcgaccgccgtcgctgccctggccgtcagccagagcaatgtaggaattaccgaccgtacccagttggccgcgatgatggcgcgcgtcgacttacaaccctttaattga

SEQ ID NO: 209678 - DNA, 1695 bp, Klebsiella pneumoniae
atgaaaacgctgctgattattgatgccggactcggacaggcgcgcgcctacatggcgaaaaccctgctgggtgctgcggcgccgaaagcgcaccttgagctgattgataacccgaatgacgccgaactggccatcgtgctgggaaccgcgctgccggccgatagcgcgctgaatggtaaaaacgtttacctgggcgatattaaccgtgctgtcgcccatccggagctgttcctgggagaagcgaaagaccacgctaagccctacgttgcgcctgcggcggtagccgttccggccgccgctcaggggcagaaacgcattgtcgcggtcaccgcctgtccgaccggcgtcgcccacacctttatggcggcagaagccatcgaaaccgaagccaaaaaacgcggctggtgggtgaaggtggagacccgcggctccgttggggcgggcaatgccatcaccccggaagaggtggccgaggcggatctggtgatcgtcgctgccgatatcgaggtggacctggcgaaattcgccggcaagccgatgtaccgcaccaccaccggtctggcgctgaagaaaaccgcccaggagctggataaagcggtggcggaagccaaaccgtaccagccatccggcaaacctcaggcggctgctgaagggaaaaaagagtcggcgggcgcctatcgccacctgctgaccggcgtctcctatatgctgccgatggtagtggccgggggcctgtgtatcgcgctctcctttgccttcgggatcaaagcgtttgaagtgaaagacaccctggcggcggcgctgatgcagatcggcggcggctcggccttcgcgctgatggtgccggtactggcaggctttatcgccttctccattgccgaccgtccgggtctgactccgggccttatcggcggtatgctggcggttagcggcggctccggctttatcggcgggatcatcgctggtttccttgccggttatgtggcgaaagccatcagcacgaagctgaaactgccgcagagtatggaagccctgaagccaatcctgatcattccgctggtctccagcctgatcgtgggtttggcaatgatctatctgatcggtaaaccggtagccggtatcctcgcctggctgacccattggctgcaaaccatgggcaccgccaacgcggttctgctgggcgcgatcctcggcgcgatgatgtgtaccgacatgggcgggccggtaaacaaagcggcctatgcctttggcgttggcctgctgagtacccagacctatgcgccgatggcggcgatcatggcggccggtatggtgccaccgctggcgatgggtatcgcgacgctggtagcgcgcaataagttcgacaaagggcagcgggaagggggcaaagccgcgctggttcttggcctgtgctttatctcggaaggggcgattccttttgccgcccgtgacccgatgcgcgttctgccgtgctgtatcgtcggtggcgcggtaaccggcgctatctccatggcggtcggcgcgaaactgatggcgccgcacggcgggctgtttgttctgctgatcccgggggcgattacgccggtgctgggctacctgctggcgattgttgccggaacgctggtggcgggccttgcctacgccgtgctgaaacgccctgaggcgcaaacagcggaagttgaaaaagcggcataa

SEQ ID NO: 209679 - DNA, 855 bp, Klebsiella pneumoniae
atgaaatacgtaggagcgcacgtgagcgcctcaggtggactggccaatgccgccattcgcgccgccgaaatcgaagcaaccgccttcgccctcttcaccaagaaccagcgccagtggcgcgccgcgccgctcagcgacgagaccatcgccgaattcaaagccgcctgtgaaaagtatcactttggcccggggcagatcctgccgcacgacagctacctgattaaccttggccacccggtggaagaagcgctggaaaaatcccgtgatgccttcattgatgaaatgacccgctgccagcagctgggactgacgctgctcaacttccaccccggcagccatctgcagcagatcccggaggaggagtgcctggcgcgcatcgccgaatcgatcaatatcgcgctggcgaagaccgaaggcgttactgcggtgatcgaaaacaccgctggccagggcagcaacctcggctttaagttcgagcacctcgcggccatcatcgacggtgtggaagataaatcccgcgtcggcgtctgcatcgatacctgccatgctttcgccgccggctacgacctgcgcagcgccgaagcctgcgaaaaaaccttcgccgccttcgaacgcatcgtcggttttcagtatctgcgcggcatgcatctcaacgatgccaagagcgccttcggcagccgggtcgaccgtcaccacagcctgggggaaggcaacatcggccacgattgcttcagctggatcatgcaggacagccgcttcgacggtattccgctgattctggaaaccatcaacccggatatctgggcggaagagattgcctggctgcgggcgcagcagattgccgaagtggcgtaa

SEQ ID NO: 209680 - DNA, 1050 bp, Klebsiella pneumoniae
atgacagcactcactttacccaccaaacatcgttccctgtggcattttgtcccaggcctggcgctgaccgccgctctgaccggcgccgccctgtgggccggtagtttcccggccatcgccggcgcaggctttagcgccctgaccctcgctatcctgttcgggatggtcgtcggcaacacggtctacccgaaaatctggcagccctgcgacggcggggtgatcttcgccaagcagcatctgctgcgcctggggatcatcctctacggctttcgcctgacgttcgcccagattgccgacgtcggcgtgagcggtattttgattgacgttctgacgctctccagtaccttttttatcgcctgcttccttggccagaaagtgtttggtctcgataaacacaccagctggctgatcggcgccggcagcagcatctgcggcgcggcggccgtgctcgccaccgagccggtggtcaaagccgaagccagtaaagtgacggttgccgtcgccacagtggttatcttcggtaccatcgccatcttcctctacccggcgatgtacccgctgctggcgcactggtttaccccggagacctacgggatctatatgggctccaccatgcatgaagtggcgcaggttgttgccgccggccatgcggtcagcccggacgcggagaacgcggcggttatcgccaaaatgctgcgcgtcatgatgctggctccgttcctgctgttcctggcggcgcgtgttaaacagctgaccccggcaggcaacggcgagaaaagtaaaattaccattccgtggttcgccattatgttcatcctggtggcggtgtttaactccttccatctgctgccgaaagccgtggtggatatgctggtgacgctggataccgtcctgctggcgatggcaatggccgccctcggggtcaccacccacgtcagcgcgctgaaaaaagccggggcgaaaccgctgctgatggcgctgatgctgttcgtctggttgattgtcggcggcggggtcattaacgtcgctatccacagcctgatggcataa

SEQ ID NO: 209681 - DNA, 867 bp, Klebsiella pneumoniae
atgcatattacgctgcggcagctggaagtgttcgccgaagtccacaagagtgggtcgaccactcaggcgtcacagatgctggcgctttcgcaatccgcggtcagcgccgcgctgaccgatctggaagggcagctcggcgtgcagctgtttgaccgcgtcggtaaacgactggtggtgaatgagcatggacggctgctgtacccgcgtgcgctggcgctgctggagcgggccctggagatcgagcagctgtttcgcggcgataacggggcgatccgagtctacgccagcagcaccatcggcaactatattatgccggagattattgcccgctatcgtcatgacttcccggatctgccggtcgagctgagcgtcggcaacagcctggacgtcatcaacgccgtcgccgacctgcgggtggatttcggcctgattgaggggccgtgccatgccgccgatattattgccgagccgtggctggaggatgagctggtggtgtttgccgcgcccaactcaccgctgctggcgggggaggtgaccctgcagcaactggccgaggcgccgtggatcctgcgcgagcatggctccggcacccgggagattgtcgattacgttctgctgtcgcatctgccggcgtttcatctgggcatggagctgggtaattcagaggcgatcaagcacgcggtcaggcatggcctgggcatcagctgtctatcgcggcgggtgattgccgaacagcttgcctcgggcacgctggcggaactgaaagtgccattgccccggctgacgcgcacgctgtggcggatccatcaccggcagaagcatatttctaaagcattacaacgttttctgcactattgccaggtgtag

SEQ ID NO: 209682 - DNA, 1470 bp, Klebsiella pneumoniae
atggtttcggaaactaaaaccacagaagcgcccacgctacgtcgtgaactgaaggcgcgccacttgaccatgatcgccatcggcggttccatcggtacgggtctttttgttgcctctggcgcaaccatttcgcaagcaggtcccggcggggcgctgctgtcttatattctgatcggtttgatggtctatttcctgatgaccagcctcggcgagctggcggcgtttatgccggtatccggttccttcgccacctacgggcagaattatgttgaagaaggcttcggcttcgcgctgggctggaactactggtacaactgggcggtgacgatcgccgttgacctcgtggcctcacagctggtgatgagctactggttccccgacactccgggctggatctggagcgccttgttcctcggcatcatgttcctgctgaactggatctcggtgcgcggctttggcgaggcggaatactggttctcgctgataaaggtagccaccgtcattatctttatcatcgtcggcgtgatgatgattgtcggcatcttcaaaggggcgcagccagccggctggagcaactgggggatcgcggatgcgccgttcgccggcggtttctcggcgatgattggcgtggcgatgattgtcggcttctcgttccagggcaccgagcttatcggcatcgctgccggtgaatctgaaaatccggagaagaacattccgcgcgcggtgcgccaggtcttctggcgtatcctgctgttttacgtcttcgcgatcctgattatcagcctgatcattccgtataccgatccgagtctgctgcgcaacgatgtgaaggatatctccgtcagcccgttcaccctggtgttccagcatgctggtttgctgtcggcggcggcaatcatgaacgccgttatcctgactgccgtgctgtcggcgggtaactccgggatgtacgcctccacgcgtatgctgtacaccctggcctgcgacggtaaagcgccgcgcattttctcgaagctgtcgcgtggcggcgtgccgcgtaacgcgctgtacgcgaccaccgtgatcgcggcgctgtgcttcctgacttccatgtttggcaaccagacggtgtacctgtggctgctgaacacctccgggatgacgggctttatcgcctggctgggtattgcgatcagccactatcgtttccgtcgcggctacgtcctgcagggtaacgatattaataatctgccgtatcgttccgggttcttcccgctggggccgatcttcgccttcgtgctgtgcctgatcatcaccctcggacagaactacgaagcgttcctcaaggacaccattgactggggcggcgtggcggcgacctacattggtattccgctgttcctcgtcatctggtttggttacaagctggcgaaaggcacccgctttgttcgctacagcgaaatgaccttcccggaccgctttaagcgttaa

SEQ ID NO: 209683 - DNA, 1974 bp, Klebsiella pneumoniae
atgttcaggttaaacccttttatccgggcgggattgtctgcgtccgtcgtatcgttggcgtttccggctctggccgatgtgaatgaagaaacgctggtggtgaccgcctcggccactgaacagaatgtcaaagacgcgccggcgagcatcagcgtcatcacccaacaggatttacaacgcaagcctgttcagaacctgaaagacgtgctgcgcgatgtgcctggggtccagctcaccaacgaaggggataaccgcaagggcgttagcatccgcggtctgagcagcagctataccctgatcctggtcgacggcaagcgcgttaactcgcggaacgccgtcttccgccacaatgacttcgaccttaactggatcccggtggatgctattgagcgtatcgaagtggtgcgcggcccgatgtcctccctttacggctccgatgcgctcggtggggtggtcaacattattaccaaaaaaatcggccagaaatggaccgggacgctgagtgctgataccactattcaggagcaccgcgatcgcggggatacctataacggccagttcttcaccagcggcccgctgatcgacggcgtacttggaatgaaggcctacggcagcctggcaaaacgcgccaaggacgatccgcagtcatccagtaatgccaccggcgagacgccgcgcatcgagggcttcaccagccgcgatggcaatgttgaattcgcctggacgccgaacgaaaaccacgattttaccgcaggctacggctttgaccgtcaggatcgcgattccgattcccttgaccgcaaccgccttgagcgggagaactactctctgagccataacggccgctgggatatcggcaacagcgagctcaagttctacggcgaaaaggtggataacaaaaatccagggcagagcgggactattacctcggaaagcaatgccatcgacggcaagtatgtcctgccgctgggcatgattaaccagctggtgaccttcggcggcgaatggcgccacgacaaactgaaagatccggtcaacctgagcagcggcggccagtcaacgtcggccagccagtacgccctgtttatcgaagacgaatggcgcatcatcgagccgctggcgctgaccaccggcattcgtatggacgaccatcagacctatggcgatcactggagcccgcgcgcctatctggtgtataacgccaccgataccgtcaccgtcaaaggcggctgggcgacggcgtttaaagccccgtcgctgctgcagcttaaccccgactggaccaccaactcctgccgcggctcgtgcagcatcgtcggtaacccggatctgaaaccggaaaccagcgaaagcttcgagctcggtctctactaccgcggggaagagggctggcttgaaaatgtcgaaggcagcatcaccaccttccagaataatgtcgacgacatgatcgacgttctgcgcacttccagcgccagcgaagcgccgggctacccgaactttgtcggctggaaaaccgtcaacggcaagcgcgtgccgatcttccgctatttcaacgtcaacaaagcccgcatcaaaggggtggagacggaggtgaagatcccgtttggcgatgagtggaagctgacggtgaactacacctacaacgatggtcgcgatctgagcaatggcggcgacaaaccgctgcagacgctgccgttccataccgccaacggcacgctcgactggaaaccgctggacgactggtccttctacgtgacggccaactataccggccagcagcgcgcggtgagcgccaccggcaaaacgccgggcggctacaccctgtttgacgttggcgcggcatggcaggtgaccaaaaacgtgaaactgcgctccggggtgcagaacgtgggtgataaagatctgagccgggacgactacagctataccgaagaaggccgtcgctactttatggcggtggattatcgcttctga

SEQ ID NO: 209684 - DNA, 834 bp, Klebsiella pneumoniae
atggaactgcttgaagagcatcgctgttttgacggccagcaacaacgctggcgtcatcactcccctgtcctgaactgcgccatgacgttcagcatttttttaccccctgagcgcgaaacgccgccgccggtgctgtactggctgtcggggctgacctgtaacgatgagaactttaccaccaaggcgggtgcccagcgcattgccgccgagctgggcatcgcgctggtgatgccggataccagcccgcgcggtgacgaggcggccaacgacgacggttacgatctcggacaaggcgccggcttctacctgaacgccaccgaggcgccctgggcggcgcactaccgaatgtacgattacctgcgtgacgaactgcccgcgcttattcgtagcgagtttagcgtcggcgaacgctgcgccgtcagcggccactcgatgggcggccacggcgcgctcatcatggcgctcaaaaatcccggccgctacgccagcgtctccgccttcgcgccgatagtcaatccctcccaggtcccgtggggcaagaaagcgtttaccgcctatctcggcgcggatgaatcggcatggcactcctgggacagctgcgcgctgatgcaggccagccggccggaggacgccgtgccgacgcttatcgatcagggcgacaacgatccattccttgccggacagttgcagccggcggtactggcggaggtcgcgcggcagaaggcctggccgttaacgctgcgcatccagcccggttacgaccacagctattactttattgcctcgtttattgaagaccatctgcgcttccatgcgcagcatctctttggctaa

SEQ ID NO: 209685 - DNA, 669 bp, Klebsiella pneumoniae
atgtcatcactgagtaaagaagccgtcctcgttcatgaagcgctggtcgctcgtgggctggagacgccgatgcgtgcgccagtacaagaaattgataacgaaacacgcaagcgtttgattaccggtcatatgaccgagattatgcaactgctgaatctggatctgagtgatgacagtctgatggagaccccgcatcgcatcgccaaaatgtatgtcgatgagatcttctccgggctggattattctcgcttcccgaaaatcaccgtcattgaaaacaaaatgaaggtcgatgaaatggtcaccgtgcgcgatatcaccctgaccagcacctgcgaacaccatttcgttaccatcgatggtaaagcgacggtagcctatatcccgaaagattcggtgatcggcctgtcgaaaatcaaccgcatcgtgcagttcttcgcccaacgtccgcaggtccaggagcgtctgacgcagcagatcctgatcgcgctgcagacgctgctcggcaccaacaacgtggcggtatccattgacgcggtgcattattgcgtgaaggcgcgcggcattcgcgacgcgaccagcgccaccaccaccacctctctcggcggcctgtttaaatccagccagaatacccgccaggaattcctgcgcgcagtacgtcaccacaactaa

SEQ ID NO: 209686 - DNA, 1158 bp, Klebsiella pneumoniae
atggagagaaatgtcacgctggactttgtccgcggcgtcgccatcctcggtatcctgcttctcaatatcagcgccttcggcttgccgaaggccgcttatctcaatcccgcctggtcaggaagcgcgtcccttagcgatgcctggacctgggcgctcctcgacctgctggcgcaggtgaagtttctcaccctgttcgcgctgctgtttggcgccggtcttcagctattgcttccgcgagggaagcgctggatccagtcgcggctgacgctgctggcgctgctcggtttcattcacggtctttttttctgggatggcgatattctgctggcctatgccctggtggggctggtgagctggcgcatggtgcgtgaggcgcaccatgtcaaatcgctgttcaacaccggggtggtgctctacctcaccggcattgcggtgctggtcctgttggggctgatctccgggaccgcggcgaatcgctcgtgggcgccggacgcggcgaacctgcagtatgagcagtactggaagctgcacggtggcatggaggcggtcagcaaccgggcggatatgctatctgacaatctgctggcgctgggcgcgcagtatggctggcagctggcggggatgatgctgatgggcgcggcgctgatgcgcagcggctggctgaaggggcagtttagcctgcgtcactaccggcgtaccggcgcgctgctggtggcggccggcatggcggtcaatctgccggcaatattcgcccagtggtatctggcctgggactatcgctggtgcgcgtttttactgcaggcgccgcgcgaacttagcgccccgctgcaggctatcggctatgccgcgctggcctggggctactggccgcagctctgccgtttccgcctggtgggcgctatcgcctgcgtcggacgcatggcgctgaccaactacctgctgcagaccctgatctgcaccaccctgttttatcatcttgggctgtttatgcgcttcgatcgtctgcagctgctggcctttgtcccccccatctgggccgttaacctccttgtctcatcgctctggctgcgccgcttccgccaggggccggtggaatggctgtggcgtcagttaaccctgcgtgcgtcaggcacatcattgaaagatacatccagataa

SEQ ID NO: 209687 - DNA, 1023 bp, Klebsiella pneumoniae
atgatcaccattcgtgatgtcgcccgccaggcgggcgtttccgtggccaccgtgtcgcgggtgctgaataacagcgcgctggtgagtccggatacgcgcgacgtggtgatgaaagcggtgacccaactgggctaccggcccaacgccaacgcccaggcgctggccacccaggtcagcgataccatcggcgtggtggtgatggacgtctccgacgccttcttcggcgcgctggtgaaagcagtggataccgttgctcagcagcatcagaaatatgtgctgatcggcaacagctatcacgaggcggaaaaagagcgtcacgccatcgaggtgctgatccgtcagcgctgctcggcgctgatcgtccattcgaaagcgctgagcgatgatgaactgagcgactttatgcaacatatcccggggatggtgctgatcaaccgcatcgtgccggggtatgcccatcgctgcgtcggactcgacaacgtcagcggcgcgctgatggccacccgtatgctgctcaatcatggtcaccagcgcatcggctatctctcctcaaaccacggtattgaagatgacgatatgcgccgggaagggtggagcaaagcgctgcaggagcaaggcatcatcgccccggacagctggatcggttccggctccccggatatgcagggcggtgaagcggcgatggtcgaactgctggggcgcaatctcggcctcaccgcggtgtttgcctataacgacagcatggcggccggcgcgctgacgacgctgaaggacaacggcattgtcgtgccgcagcatctgtcgctgattggctttgatgatattcctatttcccgttacaccgatcctcagctcaccaccgtgcgctatccggtaatgtcgatggcaaagctggccaccgagctggcgctgctgggggcggccggcaagctggatcgcgaggcgacgcactgctttatgccgacgctggtgcgccgtcattccgttgcccagcggcaaactgtggggccgatcactaactga

SEQ ID NO: 209688 - DNA, 999 bp, Klebsiella pneumoniae
atgaataagaaggtgtttaccctgtctgctgtaatggctggtctgttatttggcgccgccgcacacgcagcagatacccgtatcggcgtgacgatttataaatatgacgacaactttatgtcggtagtgcgtaaggcgattgaaaaagatggcaaatccgcgccagacgtccagctattgatgaatgattcgcagaacgaccagtcgaaacaaaacgatcagattgacgtgctgctggcgaaaggcgtgaaggcgctggcgattaacctggttgacccggccgccgcaggtacggtgattgaaaaggcgcgcgggcagaatattccggtggtgttcttcaacaaagagccttcccgcaaagcgctggatagttatgacaaggcttattacgtcggtaccgactcgaaagagtccgggattattcagggcgatctgatcgccaagcactggaaagccaacccgaactgggatctgaataaagacggtcagatccagtacgttctgctgaaaggcgagccgggccatccggatgcggaagcgcgtaccacttacgttattaaagagctgaatgataaaggtctgaagacccagcagctgcagctggataccgcgatgtgggataccgcccaggcgaaagacaaaatggacgcctggctctccggcccgaatgccaacaagattgaagtggtgatcgctaacaacgacgccatggcgatgggcgcggttgaagcgctgaaagcgcacaacaagagcagcattccggtgttcggcgttgatgccctgccggaagccctggcgctggtgaaatccggcgcgatggccggtactgtgctgaacgatgccaataaccaggcgaaagcgaccttcgagctggcgaaaaaccttgccgacgggaaagacgccgcggcaggcaccaactggaaaattgacaacaagattgttcgcgtcccctacgtgggcgtcgataaagacaacctgagccagtttaccggcaaataa

SEQ ID NO: 209689 - DNA, 1521 bp, Klebsiella pneumoniae
atggtcagcaataatagcgaacggtcaggcgaatatttgttggagatgagcaacatcaacaaatcgtttcctggcgtcaaggctcttgataatgtcaacctgaaggttcgtccgcactccattcatgcgttaatgggtgagaacggcgccggtaaatcgacattattaaaatgcctttttgggatctatcaaaaagattccggtagcattctttttcagggaaaagagatcgatttccattcggcgaaagaagccctggaaaacggtatttcgatggtgcatcaggaattaaacctggtattacagcgttcggtcatggataacatgtggctcgggcgctatccaactaaaggcatgtttgtcgatcaggacaaaatgtaccgggataccaaggccatttttgatgagctggatattgatatcgatccgcgcgcccgcgtcggtaccttatcggtatctcagatgcagatgattgagatcgcgaaggcgttttcctatgacgccaaaatcgtcatcatggatgagccgacgtcatcgctgacggaaaaagaggtcaaccatctgtttaagatcatccgtaagctgaaagatcgcggctgcggtatcgtctatatctcgcataaaatggaagaaattttccagttgtgcgatgaaataaccatcctgcgcgacggccagtggatcgccacccagccgctggaagggctggatatggataagatcatcgccatgatggtcgggcgttcgcttaaccagcgttttccggatcgcgaaaacaccccgggcgaagtgatcctccaggtgcgcaatctcacctcgctgcgccagccctccattcgcgatgtctcctttgacctgcataagggcgaaattctcggtatcgccggcctggtgggcgctaaacgcaccgacatcgtggagaccctgttcggcatccgtgagaaggccagcggcaccatcacgctgcacggcaagaagatcaacaaccacagcgccaacgaggcgattaaccacggttttgcgctggtgaccgaggagcggcgctctaccgggatttacgcctatctggatatcgggtttaactcgctgatctccaatattaagaaatataaaaacagcgtcggcttgctggataactcgcgaatgaagagcgatacccaatgggttattgactcgatgcgcgtcaaaacccccggtcagcatacgcagattggctcgctttccggtggtaaccagcaaaaggtcattataggccgctggctgctgacccagccggagatcctgatgctggatgagccaacgcgcggtatcgacgtcggcgccaagtttgaaatctatcagctgattgccgaactggctaaaaaagacaaagggatcattattatttcttccgaaatgccggaactgctggggattaccgaccgcattctggtgatgagcaacggcctggtcgcgggcattgttgagactaaaaccaccacgcaaaacgaaatactgcgtcttgcgtcattgcacctttaa

SEQ ID NO: 209690 - DNA, 1011 bp, Klebsiella pneumoniae
atgagtgcgttaaataaaaagagttttctcacttacctgaaagagggtgggatatatgttgtccttctggtcctgctggccattattattttccaggatccgacatttttaagtctgctcaacctgagtaatattctgacccagtcctcggtgcgtattattattgccctcggcgtggccggacttatcgtcacgcaggggaccgacctctccgccggccgtcaggtgggtctggcggcggtgattgccgccaccatgctgcaggcggtggataatgccaataaggtattcccggatatggcgaccatgccgatcccgctggtgatcctgctggtgtgcgccatcggggcggtcatcggcctgattaacgggatcgtcattgcctacctgaacgtgacgccgtttattaccactctcggcaccatgattatcgtctacggcattaactcgctgtactacgacttcgtgggcgcgtcgccgatctccggcttcgacagccacttctcccatttcgcgcaggggtttgtggcgctgggctccttccgcctgtcctacattaccttctacgcgctgattgccgtcttctttgtctggatcctgtggaacaagacgcgctttggcaaaaacattttcgctatcggcggtaacccggaagcggcgaaggtctccggggttaacgtagcgttaaacctgctgatgatctatgccctctccggcgtgttctacgccttcggcggcctgctggaagccggacgtatcggttcggcgaccaataacctcggctttatgtatgaactggacgccatcgccgcctgtgtggtgggcggcgtatcgttcagcggcggggtagggacggtgtttggcgtggtgaccggggtgattatcttcaccgtcatcaactacggcctgacctatatcggcgtcaacccttactggcagtacattattaagggggcgattattatcttcgccgtggcgctggactccctgaaatacgcccgtaagaaataa

SEQ ID NO: 209691 - DNA, 717 bp, Klebsiella pneumoniae
atgttaaagcgtgcgttctacagcctgttagtcctgctcggcctgctgctgttgaccgtgctgggccttgaccgctggatgagctggaaaaccgcgccctatatctatgatgaactgcaggacctgccctaccgtcaggtcggtgtggtgctgggcaccgccaaatattaccgcaccggcgtcatcaatcagtattaccgctaccgcatccagggtgcgctgaacgcctacaacagcggcaaggtcaactatctcctgttgagcggcgataatgctctgcaaagctacaatgaaccgatgaccatgcgtcgggacctgattaaaggcggcgtcgatcccgcggatatcgtactggactatgccggtttccgtaccctcgactcgatcgtccgtacccggaaagtgttcgacaccaacgacttcattatcatcacccagcgcttccactgcgaacgggcgctgtttatcgccctgcatatggggatccaggcccagtgctacgcggtgccgtcgccgaaggatatgtggagcgtgcggctgcgcgagttcggcgcccgctttggcgcgctggcggacctctatatcttcaaacgggaaccgcgctttctcggccctctcatcccgattccggcgcagcagcatgacgtgccggatgacgcccaatcctacccggccgtcaccccggagcagctgctggagctgcagaaagaaaagtag

SEQ ID NO: 209692 - DNA, 885 bp, Klebsiella pneumoniae
atgcactcacgttttcaagctgctttgacgactctggcagcagatctgcaggcggccatcgccccgatgctcgccgacccgcatttcccggcgctgctcgaagccgatcaggtggcgacgctgcagcatgcgacaggtctggacgaagacgcgctggcttttgcgctactgccgcttgccgctgcctgcgcgcgccccgacctttctcattttaacgtcggggctatcgcccgcggcgtcagcggccgctggtactttggcggcaatatggagtttctcggcgctaccatgcagcagaccgttcacgcggaacagagcgccatcagccacgcctggctgcgcggcgagacctccctgcgcgctatcacggtgaactacacgccgtgcggtcattgccgtcagtttatgaacgaactgaacagcgggctggcgctgcgcattcatctgccgggtcgcgaagcgcatgccctggagcactatctgccggacgcctttggcccgaaagacctggagatcaaaaccctgctgatggatgaacaggaccatggcttcccggtcagcggcgatgccctgacccaggcagctattcaggccgccaaccgctgccatgcgccctacagccactcgccttccggcgtggcgctggagctgaaagacggtaccattttcagcggtagctatgcggaaaacgcagcgttcaacccgacgctgccgccgctgcagggggcgctgaatctcctgagcctcaacggctatgattatcccgctatccagcgggcaatcctggcggagaaagccgacgcggcgctgatccagtgggatgccaccgtcgccaccctgaaggcgctgggctgccacaatattgagcgcgtcctgttaggttga

SEQ ID NO: 209693 - DNA, 696 bp, Klebsiella pneumoniae
atgatgcatgaaatctggtggtcgctaccgctaaccctgatcgtcttttttctcgcccgcaaactggcggcccgctttaagttcccgctgctcaacccgctgctggtggcgatggtggtgattattccatttcttctgctgaccgggatctcctatgagcgttattttgccggcagcaaagtcctgaacgatctgctgcagccggcggtagtggcccttgcgttcccgctgtatgaacagctgcaccagatccgcgcccgctggaaatctatcattaccatctgctttatcggcagctgcgtggcgatgatcaccggcaccaccgtcgctctgctgatgggcgccacgccgcaaatcgccgcctctattctgcctaagtcagtcactacgccgattgctatggcggttagcggcagcatcggcggcattccggccatcagcgccgtgtgcgtaatttttgtcggcatcctcggcgcggtatttgggcatacgttgcttaacctgatgcgcattcgcaccaaagcgtcgcgcggcctgtcaatgggcaccgcctcgcacgccctcggcaccgcccgctgcgccgagctggactatcaggaaggcgcgtttagctcactggcgctggtgctgtgcgggatcatcacctcgttgatggcgccgttcttatttccgctgatcctcgcagtggtaggttaa

SEQ ID NO: 209694 - DNA, 399 bp, Klebsiella pneumoniae
atgagtaaatcgctgactattatctggcagtacctgcgggctttcgtcctgatttacgcctgcctgtacgccggaatttttatcgccgggctgctgcctatcactatccccggcagcatcatcggcatgctgatcctcttcgtgctgctggcgctgcaaattatgccgccgcaatgggtcaaccccggctgcaatatcctgatccgctatatggcgctgctgttcgtgccgatcggcgttggggtgatgcagtactgggatctgctgcgcgcccagctggggcctgtcgttatctcctgcgccatcagtacgctggtggtgtttgtagtggtgagctggagctcccatttggtgcatggcgaacgtaaagtgattggccaaaaaggaaaagaagaatga

SEQ ID NO: 209695 - DNA, 933 bp, Klebsiella pneumoniae
atgcgtgttctactggcgccgatggaaggcgtgctcgattcgctggtgcgcgagctgctgaccgaggttaacgattatgatctctgcatcaccgaatttctgcgcgtggtggatcaactgctgccggtaaaatcgttctacaggctatgcccggaactgcatcaccagagccgcacgccgtccggaacccgcgtacgcgtccagctgctgggacaatatcccgagtggctggcggaaaatgccgcccgcgcggtggcgctgggttcatggggggtggatttaaactgcggctgtccgtcgaagctggtaaacggcagcggcggcggggcaacgctgctgaaagatccagagttgatctatcgcggcgcgaaagccatgcgagaggcggttcccgagcatctgccggtgacggtgaaagttcgtcttggctgggacagcggtgaacggcgctttgaaatcgccgacgcggtgcagcaggcgggggccagcgaactggtggttcacggccgtaccaaagaagatggctacaaagccgaacgcatcaactggcaggcgatcggcgagatccgccagcgcctgactatcccggtggtcgccaacggtgaaatctgggactggcaaagcgcccaggattgtatggctgtcaccggctgcgattcggtgatgattggccgcggggcgctcaatgtgccgaacctcagccgggtgatcaaatacaatgaaccgcgcatgccgtggccgcaggtggtccagctgttgcaaaaatatacccgcctggaaaagcagggtgataccggtctgtatcatgtggcgagaattaagcagtggttaggctatttacgcaaggaatataccgaggcgctgaccctgtttaatgaaattcgcgccctgcaaacgtctgctgaaatagcggcggcgatcggccgctattaa

SEQ ID NO: 209696 - DNA, 1365 bp, Klebsiella pneumoniae
atgcataacaaaaaaataaatcagcttttgatcggcgctatgctggcggccatggcgcctgccgtgagcgccgcggacatcccggcgtggaacggcagcgcgctggggtttgaagccgggcagcaagggctgctgggcgatatgctaggcattcgtccgatccttgaagaaaacggctttcattataatctcggctatcttaacgagatggcctacaacgccggcggcggctataaccatgataaacatctggcctatattgaccaggtgtcattgacctttacccaggatctggagcgctggaccggcataccggacgtgcggcttgagggcaatatcgtcaaccgcaaccatgatgataacctcaccacgaaacggctgcaggatccgcgggtgagtttcaacgatctatcgcaggagagctggggcggcgggtcgattacccgccttggctggctcacctttgcccgcagctttgacgaccgccgcctgacctggcgcatcggcatgatgaacaaggtgcaaaccttcgaccagatcattccctgcgattttcagctgctgacccagtgcggtgggaaatcggccaactcgctgacctggaataactggaacattcacacctggggcaccaccctggagtacaagctgacgccgacggtcaccctgaaaggcggggtgatggagcaaaacccgcaggctaccgcgcgcagccacgcgtggagctggtcgacgaagggtagcaaaggcatcttactgccgatggagatcgaaacccgtccgctgattaatggcctgccgggagcctataaccttggcgtggtctggactaacgcgccgcagagcgacctctacagcggtaaatccggcggcgccggggcgaccgatccgcaaggttacgccgagcacgacagcacctggtttatgtacgccggcctgaaccagcagatcacccgccacgccgacgacccgctgcgggggatgagcgtctcactgagcggcagcctcagcgaccagcgcagcaactatatccactccgccgtcgccgcctccatgcgctaccgcggtctgtttgacgcccgcccggaggactggattggcttcggcctgacgtggatcgacatgagcagccactacgcacgtaatcagcgctatatgaatcagataagcggcgccaccgactataacgatccggcttaccagccggtggccggtcattcgctgaacggtgagctctattatcgcttccgcccggtctcctggctggagctgcagccgggcctgcagtactggcaccgtccgggcggcgtcgcgcagacccaggatgcgtgggtagtggagtggaaaaccgtcgtgaccttctga

SEQ ID NO: 209697 - DNA, 834 bp, Klebsiella pneumoniae
atgcaaatcgccaaagtactcaataacaatgtggtggtggttctcgacgagcaccggcgcgaacaggtggtgatggggcgagggctggcctttcagaaacgcccgggcgacgtgctggacgacagtaaaattgaaaaagttttcgccttacaaagcgatgagctggtcggccgcttaggcgagctgctcagtcagataccgttagaagtgatgaccacctgcgatcgcattatcgacctggcacgcggacggctgggcaagttacaggaaagtttgtacatcacattaacggatcactgtcattttgctatcgagcggcagaaaaagggcatcgcactgcgtaacgtgctgctgtgggagattaagcggctgtatccgaaggagttcgcgctgggccaggaggcaagggccatcattgccaaaaggctcggcgtggagctggcggaggacgaagccggatttatcgccctgcatctggtgacggcgcagctcaacagcgaaatgccggaggtcatgcacgtgacccgggtgatgcaggagatcctgcagctggtgaagtatcagctgcagcttaactacgatgaagagtcgctgagctatcagcgtttcgtcacccacctgaagtttttcgcccagcggatgctgacgcgcacggtggtggaagatgacgacgtctcgctgcacagcgcggtgaaagataactacgccaaagcgtggaagtgtgcggaaacggtggcgacgcatctgcaaaagcagtatcagcggtcgctgaccaccgaagaaattatgtttcttgccattcatatcgaacgggtaagaaaagaggggcgttaa

SEQ ID NO: 209698 - DNA, 1863 bp, Klebsiella pneumoniae
atggaatataaagcactcgcgcaggatattctcaaccgcgtcggcggcaaagagaacattgtgagtctggttcactgtgcgacacgtctgcgttttaaactgaaggataacggcaaagccgatgccgaagggctgaaggccaatccgggcgtgattatggtggtggagagcggcggccagtttcaggtggtgattggcaaccacgttcacgacgtctggctggcggtgcgccaggaggcggggttaagcgatgacagcgaaccggttgccgaggaaaaagcggccaaaggatcggtgttaagccagcttatcgacatcatctccggcatctttacaccgtttatcggcgtgatggcggcaaccggtctgctgaaaggcctgctggcgctggcggtgacctgcggctggcttacgccggagcaggggacttataaaatctggtttgccgccagcgatgcgctgttctttttcttcccgctgtttcttggctataccgccgggaagaagtttggcggcaacccgtttatctcgatggtgattggcggggcgttaacccacccgctgatgattcaggcctttgaggccagccaggcgccgggcgcggcggtggagcactttctcggcattccggtgacctttatcaactacagctcatcagtgatcccgattattctcgcctcatgggtctcctgctggctggagcgcaagagcaatgcgctgttgccgtcatcgatgaaaaacttcttcagcccggcgatctgcctggcggtggtggtcccgctcaccttcctggtgattggcccggtcgccacctggctgagccatctgctggccaacggctaccagttcatttatgcgtttgccccatggctggcgggcgcggtactgggcgccatgtggcaggtgtgcgttattttcggcctgcactgggggctggtgccgttgatgatcaacaacatgacggtacttggtcacgactccatgctgccgattattcttccggcggtgattgcccaggtgggggcggttctggggattttgctggccacccgcgatgcgcgtcagcggatgctggccggttccgccttctctgcggggctgtttggcatcaccgagccggctatctatggtctgaccctgccgctgcgtcgtccgtttatcttcggctgtatcgccggcgccatcggcggggcgatcaccgccttcagtaatagtcatgcttactcgttcggcgtgccgaatatctttttcccggcgcagatgatcccgcccggcgggattgacgccagcgtctggggcgggcttatcggcaccggcgtggctttcgtgctcgcctgcgtgctgaccttcttcgccggcctgccgcgcgccagcgctgcaccgggcgccgtgacggtagccccggcctcggcaaacgatattctggcgccgatgagcggcagcgttatcgccctcgagcaggtgccggatagcaccttcgccagcggcctgctgggtaaaggggtcgccattatcccggcggtgggccaagtgattgccccgttcccgggcgaagtggcctccctgtttcagactaaacacgccatcggcctgcaaagcgacagcggcattgagctgctgatccacgtcggcatcgacacggtcaaactcgacggcgtgccctttaccgcgcatgtgaaagagggcgacagggtacaggccggcgatctgctgattgagtttgatcgccaggcgattctggacgccggctacgacctggcgaccccgatcattatcagcaacagcgacgactaccgggagattgatacggtggcgtccagcaccgtcgaagccggtcagccgctgttgtcagtcagccattaa

SEQ ID NO: 209699 - DNA, 1395 bp, Klebsiella pneumoniae
atgaaaatattcccgacggattttttatggggcggcgcgaccgcggccaatcaggtggaaggtgcttatctggaagatggcaaaggcttatccacctccgatgtgcagccgcacggcgtgttcggcgaagtggtcgagcgcgtacccggcgacagcggcataaaagatgtggcgatcgatttttaccatcgctatccggaagatattgccctgtttgccgagatgggctttaactgcctgcgagtctccatcgcctggacccgcatctaccccaacggcgacgacgccgagccgaacgaagccggcctcgcgttctacgacaagctgttcgacgagatggcgaagcacagcatcaccccgctggtgacgctgtcgcattatgaaatgccatgggcgctggtaaaaaactacggcggctggggcagccgggaggtgattggcttctttgagcgctacgcccggacggtgttcagccgctataaaaataaggtcaaactgtggctgacctttaacgaaatcaatatgtcgctgcatgccccgatgaccggcgtcggcctgccggccggcagcagcaaaggcgaggtgtatcaggcgattcaccaccagctggtggccagcgcgctggcggtcaaagcctgtcatgagctggtgcctgagggcaaaatcggcaatatgctgctcggcgggctgatgtatcccctgagctgcaaaccggaggatgtgtttgagacgctgcaggagaaccgcagctggcagttcttcggcgacgtacaggcgcgcggcgcgtacccgggctatatgcagcgctatttccgtgacaacggcatcacgctcaccatcaccgacgccgatcgtgaagcgctaaaaaccaccgtcgactttatctccttcagctactacatgaccggctgcgtcaccgccgacgaggcgctgaaccagcaggcgcgcggcaatattctcagcatggtgccgaacccgcacctggcgagctcggagtggggctggcagatagacccgctgggcctgcgcacgctgctgaacgtgctgtgggatcgctaccagaagccgctgtttatcgtggaaaacggtctgggcgccaaagataaggtggaagccgacggcagcattaacgatgactaccgcatcagttacctgaacgaccacctggtgcaggcgcgggaagccattgacgatggcgttgagctgatgggctttaccagctggggaccgattgacctggtgagcgcctcaaaggcggagctgtcgaagcgctacggctttatctatgtcgaccgccatgatgacggtaccggcaccctggcgcgcagtaagaagaagagctttggctggtataaagaggtgattgccagccgcggcgccagcctgaaagcctaa

SEQ ID NO: 209700 - DNA, 1440 bp, Klebsiella pneumoniae
atgaaattgatattaaataaaagcgtgctggcggcattgcccctggccatcgcgctggctggctgcgcgccatctcatgaggttgctaatccgccgcagcagcaaattccggcctcccatgtttccatggatctccctgccgccgtgaaaaatggctggccgcagactgactggtggaaagattaccatgacccacagcttaataatctgattcagcgagcgttggccaacgcgccggatatgcagattgccgaacagcgcatcaggcttgccgaagcgcaggcgcgaatgtcgcaggcgaatcttggcccggagatggatttctccgccgatattgaacgccagcgcatgtcggccgaaggcctgatgggaccgtttgctaccgacaccgacggcaataccggcccgtggtacaccaacggtacctttggcctgaccgctggttgggatctggacctgtggggcaaaaaccgtgcgctggtgaaagcgcgtatcggcgagctgaaagcccaggttgctgaacaggcccagacccgtgagctgctctccggcagcgtggcgcgtctgtactggcagtggcagacggaagcggcgatcaaagcggtgctgcagcaggtgaaaaacgagcaaaataatatcgtgacggtcgacaaggccctgtatcagcgcgggatcactaactccgccgaaggggcggagaacgatattaacgtcagcaaaaccgaccagcagctggcggacgtgacgggcacgatgaaagagattgaagcgcggctgatggccctgaccaacagccagagccagtcgctaaacctcaaacccgccagcctgccaacggtcagcgcgcagctgccagataccctcggctatgagctgctggcgcgccgcccggatctgcaggtcgcccactggtatattgaggcgtccctgagcgaaatggacgcggcgaaagcggcgttttatccggacatcaatctgatggcgttcctgcagcaggatgccctgcacttaagcgatcttttccgccattcggcgcagcagatgggcgttactgccgggttgacgctgccgatctttgacagcggccgccttaacgccaacctggatatcgccagcgcgcagaatagcctgtcgatcgctcagtacaacaaagcggtggtggatgccgttaaccaggtggcgaaaaccgccagccaggtcgaaacattaatggccaaaagccagcagcagcagcaggttgaaaaagacgctcagcgggtagtagatctggcgcaggcccgaatggcggcggggatcttacctggctccagagtcagtatggcgaagctcccggcgctgcaggaacggatcaccgcattgcgcctgcacggccagtggattgacgctagcattcagctgacctcggccctcggcggcggctaccaccagacggtgaagtaa

SEQ ID NO: 209701 - DNA, 570 bp, Klebsiella pneumoniae
atggatatcaatcacctgatttcccagtatggctacgcggcgctgatcgtcggcagcatggcggaaggtgagaccattaccctgctgggcggcgtcgcggcgcatcaggggctactgaaatttcccctggtggtgatcgccgtcgccctcggcgggatgattggcgatcagctgctctatctggtcggtcgccgcttcgggggacgcatcctgcgccgtttcgccagtcagaaagcgcggatccgtaaagcgcagcgtatgatccagcaccggccgtggctgtttgtcatcggcacccgctttatgtatggcttccgggtaatcggccccctgctgatcggcgccagccgcctgccgccgcgcattttcctgccgctgaatattgtcggagcgctggtgtgggccctgctgtttaccaccattggctatctcggcggcgaggtggttggcccgtggctgcatcatctggacgcccatctgaagcactggatctggctgatcctcgcggtggtggtggtggtggccgcccactggtggctcaggcggcgcgagagtaagaagaaagactaa

SEQ ID NO: 209702 - DNA, 588 bp, Klebsiella pneumoniae
atgaaccatgtctgggggctcttcgctcatcccaaccgggaaatgagcgtgattaagagcgagaatgaaaccatttctcatcactatacgcatcatgtgctgctgatggcggcggttccggtaatctgcgcctttatcggcaccacgcagctgggctggaacttcggcgatggcaccgtgattaaactgtcgatgctgaccggactggcgctggcggtgctgttttacgccgtgatgctcgccggggtggcgatcatggggcgggtcatctggtggatggcgaggcagtatccgcagcagccttccctgaaacgctgcatggtgtttgccggctacgtcgccaccccgctgtttctgagcgggattgtggcgctctatccgctggtctggctgtgcgcgctggtcggtactattgcgctgttctataccgggtatctgctgtatctcggcattccgaccttcctgagcattaatcgggaagaggggttaagctttgccagctcgacgctagctattggggtactggtgctggaagtgctgctggccatcaccgtggtgctctgggggtatggctaccgactcttctga

SEQ ID NO: 209703 - DNA, 951 bp, Klebsiella pneumoniae
atgatgccgaaatttcgagtctctttgctcagcctgaccttgctgctggctgtgccttttgcgccccaggcgttagcaaaaaccccgacggcggtgaccgcctcgcagccggaaattgcctccggcagcgccatgatcgtcgatctggccacgaaaaaaatcatttatgccagccagccggatctggtgcgcccgatggcgtcgatcaccaaagtgatgacggccatggtggtgctcgatgcccatctgccgctggatgagatgctgacggtggatatcagccatacgccggaaatgaaggggatctactcccgcgtgcgcctcaacagccagattagtcgccgcgatatgctgctgctggcgctgatgtcttccgagaaccgcgcggccgccagcctggcgcatcactatccgggcggctacgacgcttttattcgcgcgatgaacgccaaagcccaggcgctgggcatgacccatacccgctacgtggagcccaccggcctgtcggtgcataacgtctccaccgcccgcgatctgaccaaactgctgatcgccagcgagcagtatccgctgatcggccagctgagcaccaccaaagaagagaccgccaccttcgcccatccggcctacagcctgccgttccgcaacaccaaccatctggtgtatcgcgataactggaacattcagctgaccaaaaccggcttcaccaacgctgccggccactgcctgattatgcgcacggtgattaaccaacgtccggtggcgctggtggtgatggatgccttcggcaaatatacccacttcgctgacgccagccgcttgcggacctggattgaaaccgggaaggtaatgccggtacccgcctcggcgctgagctataaaaagcagcgcgaagcgcagatggcggaggcgatgctgaaaggcggcgcgcagaccgcgcagaacgattaa

SEQ ID NO: 209704 - DNA, 555 bp, Klebsiella pneumoniae
atgcccgcagaggccccgttactcgacagtgatttagaaattcgcgaagcgctgcccgacgatgcgcacgccatcgccgcgctgtatgtctggcacgtacttaatggccgcgcctccttcgaagagatcccccccaccgttgacgaaatgcgtaaacggatccagaccgtgcgcgacaacgggctgccgtggctggtagcgctgtggcgcggggctatcgtcggctactgctatgccactttctatcgcccgcgtccggcctatcgctacaccctcgaggaatcgatatacgtggaatccggaatgggcggacgcggcatcggcagcgcgctgctgtccaggctaatcgctgagtgcgagaaaggcccgtggcggcagatgctggcgatcatcggcgatggccataacaatgccggctcgctggcgatccataaaaagttcggctttaccgtggcgggtcagctgcgcagcgtcggctacaagatgggcgactggcgggatacgttgattatgcagcgcgcgctgggtgacggcgactggacgctaccggagtga

SEQ ID NO: 209705 - DNA, 1746 bp, Klebsiella pneumoniae
atgtcatctgcacccactgacacccataaaacgtttctggctgacctggcgcgcctggttggcccttcgcatctgctgaccgacccggcaaaaacccagcgctaccgcaagggcttccgctccggtcagggcgaggccctggcggttgtctttcccggtaccctgctggagctctggcgcgtgctcaacgcctgcgtagacgccgataaaataattctgatgcaggcggccaacaccggcctgaccgaaggttcgacccccaacggcaatgattacgatcgcgagatcgtgattatcagcaccctgcgcctggacaaactgcatctgctggacaaaggcgagcaggtgctggcctggcccggcaccaccctctattcgctggaaaaagcgctcaaaccgctgggacgcgaaccgcactcggtgatcggttcgtcatgcatcggcgcatcggtcatcggcgggatctgcaacaactccggcggctcgctggtgcagcgcgggccggcctacactgagatgtcgctgttcgcgcagattgacgccgacggcaagctgaagctggtcaatcatctgggcatcgatctcggcagcacgccggagcagatcctcagccgcctcgatgacgaacggattagcgatagcgatgtgctgcacgacggccgccacgcccacgatcacgactatgtcacccgcgtgcgcgatgtcgatgccgacaccccggcgcgctataacgccgacccggaccgcctgttcgaatcctccggctgcgccggcaagctggcggttttcgccgtgcgtctcgatactttcccggcggaaaagcgccagcaggtgttttacattggcaccaaccagccgcaggtattgaccgagatccgccgccatatcctcgccgagttccagcatctgccggtggcgggggaatatatgcaccgcgatatttacgatatcgccgagaagtatggcaaagacaccttcctgatgatcgacaagctcggcaccgacaaaatgccgttcttcttcaccatgaaggggcgcaccgacgcgatgctggagaaagtctcgctgtttaagccgcactttaccgaccgctttatgcagaaactcggccacgtctttccggcacatttaccggagcggatgaaaacctggcgtgataaatatgaacatcatctgctgctgaagatggctggcgacggcatcgaagaagcgcagcgttggttgacggagtacttccagcaggccgagggggatttcttcgcctgtacgccggaggaaggcagcaaggcgttcctccatcgctttgccgccgccggcgcggcgatccgctatcaggcggtgcatgccgacgaagtcgaagatattctggcgctggatatcgccctgcgccgtaacgataccgagtggttcgaacatctgccgcccgaaatcgacagccagctggtgcataagctctactatggccactttatgtgccatgtgttccatcaagattacatcgtcaggaaaggggtcgacgcccacgcgctgaaggaaaaaatgctggagttactgaaagcgcgcggcgcccagtacccggcggagcataacgtgggtcatctgtatgaggccccggagagcctgcagcagttctatcgccagaacgatccgaccaacagcatgaacccggggattggtaaaaccagcaagcagaaatactggggtgaagcggccccgacgccagcctctccggcggatccgcaataa

SEQ ID NO: 209706 - DNA, 2298 bp, Klebsiella pneumoniae
atgaaatggctctgcactgtaggcgtcgccgtgagtctggcgctgcaacccgcgctggcggatgaactgtttggtaaccaccccctgaccccgcaggcgcgggatgcctttgtcaccgacctgctgaaaaaaatgacggtggacgagaaaatcggccagctgcgtctgataagcgttggcccggataacccgaaagaggcgatccgtgaaatgatcaagaacggtcaggtgggggcgatttttaacaccgttacccgcccggatatccgtgtgatgcaggatcaggtgatgcagcttagtcgcctgaagatcccgctgttctttgcctacgatgtgctgcacggtcagcgcaccgtgtttccgataagcctcggcctggcctcgtcgtttaaccttgatgcggtgaagaccgtgggccgcgtgtcagcttatgaagccgccgatgacggcttgaacatgacctgggcgccgatggtcgacgtctcccgcgacccgcgctggggacgcgcttccgaagggttcggggaagacacctatctgaccacgatgatgggccaggcgatggtggagtcgatgcagggcaagagcccggcggaccgctattcggtgatgaccagcgtcaagcatttcgccgcctacggcgcggtagagggcgggaaagagtacaacacggtcgacatgagcccgcagcgcctgttcaacgactatatgccgccgtacaaagccgggcttgatgccggcagcggcgcggtgatggtagccctgaactcgctgaacggcaccccggcgacctctgattcctggctgctgaaagacgtcctgcgcgaccagtggggctttaaaggcatcaccgtttccgaccacggcgccatcaaagagttgattaagcacggcgtggcctccgacccggaagacgcggtgcgcgtagcgctgaagtccggcatcaacatgagcatgagcgacgagtattacagcaagtacctgccggggctggtgaagtccggcaaggtgaccatggccgagctggatgatgccacccgacacgtgctcaacgtgaaatatgatatgggactgttcaacgatccctacagccacctgggaccgaaagattctgacccgcaggacaccaatgcggaaagtcgtctgcatcgtaaagaggcgcgcgaagtggctcgcgagagcctggtgctgctgaagaaccgtcttgatacgctgccgctgaaaaaatccggcactatcgcggtggttggcgcgctggcggacagcaagcgcgacatgatgggcagctggtccgcggccggggtggccgaccagtcggtgaccgtcctgaccggcatcaaagaagcgctgggcgataacggcaaagtgatttacgccaaaggggcgaacgttaccgatgacaaaggcattgtcgatttcctcaatttgtatgagaacgcggtgcaggttgacccacgctcgccgcaggaaatgatcgacgaagcggtcgcggcggcgaagcaatccgatgtggtggtcgccgtggtgggcgaggcgcagggcatggcgcatgaggcctccagccggaccgatatcaccctgccgcagagccagcgcaatctgattgccgctcttaaagccaccggcaaaccgctggtgctggtgctgatgaacgggcgtccgctggcgctggtgaaagaggatcagcaagccgatgcgctgctggagacctggtttgctggcaccgaaggcggccacgccatcgccgacgtgctgtttggcgactacaacccgtcgggcaagctgccgatgtctttcccgcgctcggtggggcagatcccaacctactacagccacctgaataccggccggccgtataatccggagaagccgaacaagtacacctcgcgttacttcgatgaagccaatggcccgctgtatccgtttggttacggcctgagctacaccacctttagcgtctccgatgtcaacatgtcgtcggccaccatgccgcgcgatggcagcgtgaccgccagcgtgcaggtgaccaacaccggcaatcgcgaaggggcgacggtgatccagctctacctgcaggacgtcaccgcctccatgagccggccggtgaaaatgctgcgcggctttaaaaaggtcaccctcaaaccgggcgaaacgcaaaccgttagcttcccaatcgacgtcgacgcgctgaagttctggaatcagcaaatgaaatacgttgctgagccgggcaaattcaatgtctttatcggcgtggactccgcccgcgtgaagcagagcgagtttgagctgctgtaa

SEQ ID NO: 209707 - DNA, 918 bp, Klebsiella pneumoniae
atgaagatggcaacgacatggtccggcgcgctggcgctggccgccctgataagtttaccgctgcaggcggcggagccggtgaaggtcggctcgaaaattgataccgaaggcgcgctgctgggcaatatgatccagcaggtgctggaaagccacggcgtaaaaacgattaataaaatccagctcggcaccacgccggtggtgcgcggggcgattgtcgccggcgagctggatatctacccggaatataccggcaatggcgccttcttcttcaaagatgaaaacgacccggcgtggaagaatgcccaacagggctatgagaaggtgaagcgcctcgatcaggagaaacatcagctggtatggctcaccccggcgccggccaacaacacctggactatcgccgtgcgccaggacctggcggagaaaaataagctgacctcgctggccgacctcagtcgctacctgaagcagggcggcgaatttaagctggcggcttcggcggaatttattgagcgcccggacgcgctgccggcgtttgaaaaagcgtatggcttcaacctcaaccagaaccagctgctgtcgctggccgggggcgatacggcggtgaccatcaaagcggcggcgcaacagacctccggcgttaacgcggcgatggcctacggcaccgatggcccggtggcggccctggggttacagacgctgagcgacccgcagggcgtgcagccgatatatgccccgacgccggtggtgcgcgaggcggtgctgaaggcctacccgcagatcgccgactggctgcagccggtcttcgccagcctcgatgaaaaaacgctgcagcagctgaacgcccgcattgcggtggagggccaggatgcgaagcgcgtggcggcagattatctgcagcagaaaggcctgctgaagtaa

SEQ ID NO: 209708 - DNA, 1158 bp, Klebsiella pneumoniae
gtgaccattcgctgtactcaccgcgtcggcctgctgctgacaggtctgctgctggttacgctggcgctgccgtttattacttacgcgccgaatcgcttactctccggcgaagggcgcgggctgtggcaggtaatgccctggctcgccggcgttcagctggcggcggcccttgccgggatgctgctttgctggctgccaggcagggccgcgccgcttctccacctgctgctggccgaactgctcttcccgctgcttatctggggcagcggccaggcggcgcttgagctctcccgccacggctcgccgctggcgcgcacctcgcccggcagcggcctgtggttgtcgctggcgctttgtctgctgctggccagcgaggccatccgtcatcttaccgtccggccgctctggcgctggctgctcaatgcgcaagtctggctgttgcccatcatcctgctcgctatcggggcgctcgatcagctctccttgctgaaggagtatgccaaccgtcaggaggtatttgatgacgccctgcgccagcatctgcttctgctgttcggcaccctgctgccgggcctgctgattggcctgccgctgggggtatggctgtggcggcgtccgcgctggcaggcgccggctttcaccgcgctcaatgtgatccagactattccgtcggtagcgctttttggcctgctgattgcgccgcttgccggtctggcgcgttatttcccgacgctgggcgagctgggcgtctccgggaccggcgtggcgccagccctgatcgctctcactctctatgcgctactgccgctggtgcgcggggtggtgaccggcctgcagcaggtaccgcaggatgccctggaaagcgcgacggcaatgggcatgagcgccgggcagcgctttcgtcaggtgcagcttccgctggcgatgtcggtactgctgcgcagcctgcgggtggtcagcgtgcaaaccgtcggcatggcggtagtggccgcgctgatcggcgccggcggctttggcgcgctggtttttcaggggctgctgagcagtgcgctggatctggtgctgctgggcgtggtgccgaccattgccctggcggtggtggtggatgccctgttcgccctgtggggcgcctggctaaaaggagaggccaatgattga

SEQ ID NO: 209709 - DNA, 948 bp, Klebsiella pneumoniae
atgattgaatttcaaggggtcagcaaagtgtttgccggccacccggcggtgaaggacctgaccctggagctgcgcgaaggcgctttctcggtgctggtggggacttccggctcgggcaagtcgacgacgctgaagatgatcaaccgtctgctggagccggaccggggcaccattcgctttgccggcgaggacattcgccagcagccggtcctgaccctgcggcggcggatgggctatgccatccagtccatcggcctgtttccccactggacggtggcgcagaatatcgccaccgtgccgcagttgcaaagatggccgcgggcaaggatcgccgaccggatcgacgagctgatggcgctgctggggctggaggcgacgctgcgcgaccgttacccgcatcagctctccggcggccagcagcagcgggtgggggtggcgcgggcgctggcggcagatccggaggtgctgttgatggatgagcccttcggcgccctcgacccggtgacccgcgaggcgctgcagcaggagatgctgcgcatccaccgtctgctgggccggacgattgtgctggtgacccatgatattgacgaagcgctgcgtctggcggaccacctggtgctgatggacgggggcgaggtggtccagcagggggcgccgctggagatgctcctgcgaccgaaaaatagctttgtacagaccttttttggccgcagcgagctgggtgtgcgcctgctgtcgctgcgcgaggtgggggactatttgcgtcccgacgaacggctggcgggcgaggggctgaccgtcaccatgaccctgcgggaagcgctgtcgcagtttgtcgcccggcgctgcgagacgctgccggtggtcgatgccgaaggcaggccctgcggtacgctgcattttgccgatctgctgcgtcaggagatgagccatgaaggcgcttcgtga

SEQ ID NO: 209710 - DNA, 738 bp, Klebsiella pneumoniae
atgaaggcgcttcgtgagccgctgtggtggcttatcgcgctgtttatcggcctgctggcagggctgccctacagcgcgccgctgttcagtcggctgttcccggaactgccgcggccggtctaccagcaggagagcttctgggcgctcactctcgatcacggctggctggtggtggcgtccagcctcgcggcaacggcaatcgggctgggggctggggtggcggtcacccggcccgccggcagcgcgtttcgtccgctggtggagaccatcgccgctatcgggcagacctttccgccggtggcggtgctggcgatggcggtgccggtgctgggctttggctggctgccggcgctgatagccctcgcgttgtatggcatactgccggtgctgcaggggacgctggccgggctgggttcgataccgcctggggtgtcaggcgtggctgaagggatgggaatgaccggctggcagcgtctgtataaggtggagcttccgctggcggccccggtgatcctggcggggatccgcacctcggtcatcgtcaatattggtaccgcgaccattgcctcgacggtgggggccagtacgctcgggacgccgatcatcatcggcctgagcggctttaataccgcctatattgttcagggggcgctgctggtggccctggcggcgattatcgtcgaccgcgcgtttgagcgtctgacccgctggatcagccgacaccgccacgcacaataa

SEQ ID NO: 209711 - DNA, 1725 bp, Klebsiella pneumoniae
atggtacgcgctttcaggcatgtgtggtttgcgggtatgtacgagtttgatctggtgttgctgctgcttcagcagatgtgcgtatttttggtcatcgcgtggttgatgagcaaaacccgactgtttatccccctgatgcaagtcaccgttcgcctgccgcacaagctgctgtgctacgtcaccttctccattttctgcattatggggacctatttcggtctgcatatcgaagactccatcgccaacacccgcgccatcggcgccgtgatgggcggcctgctcggcgggccggtggtcggcgggctggtagggctcaccggcggcctgcaccgctactcgctggggggaatgaccgccttaagttgcatggtctccaccatcgttgagggactgctgggcggtctggtgcacagcgtgctggtcaaacgcggccggccggacaaagtctttagcccgctgaccgccggggcgatcaccttcgtggccgagctggtgcagatgatgatcattctgctgattgcccgcccgttccaggacgccctgcatctggtgcagagcattgccgcgccgatgatggtcaccaataccgtcggagcggcgctgtttatgcgcattctgctggataaacgggcgatgttcgagaagtacacctccgccttttccgccacggcgctgaaggtggcggcgtccaccgaggggatcctgcgtcagggattcaacgaagagaatagcatgaaggtggcccaggtgctgatccaggagctggacatcggcgcggtggcgatcaccgatcgcgacaagctgctggcgtttaccggcatcggcgacgaccaccatctgccgggcaagcctatttcctcctcgtatacgcaacgggcgattgagaccggggaggtggtctacgccgacggcaacgaggtgccttaccgctgctcgattcatccgcactgtaagctggggtcgacgctggtgatccccctgcgcggcgagaatcaacgggtgataggcaccattaaactgtatgaggcgaaaaatcgcctgttcagttcgatcaaccgcaccctcggggaggggattgcccagctgctgtcggcgcagatcctcgccggacagtacgagcggcagaaggcgctgctgacgcaatccgaaatcaagctcctgcacgcccaggtcaacccgcacttcctgtttaacgcgcttaacacgctgaaggcggtgatccgccgcgacagcgatcaggccggccagctggtgcagtatctatcgaccttctttcgcaagaacctgaaacggccgacggaaattgtcactcttgccgatgagatcgagcatgttaacgcctatctgcagattgagaaggctcgctttcaggctaacctgcagatccagatggcggtgccggaagggctggcgcatcaccagctgccggcctttaccctgcagccgatcgtggagaacgccattaagcatggtacatcgcaacatcttggcgtcggcgaaattaccatccgcgccagccaggacgatcgctggctgcagctggatatcgaagataacgccgggctgtaccgggccaacccccaggccagcgggctggggatgaatctggtggacaggcggctgcgggcgcgttttggcgccgactgcggcatcagcgtcacctgcgagccggagcgctttacccgtgtcaccctacgtctgcccctggaggagaatgcatgctga

SEQ ID NO: 209712 - DNA, 720 bp, Klebsiella pneumoniae
atgctgagagtattgatcatcgatgatgagccgctggcgcgggaaaacctgcgcattttgctggagacacagcgcgatatcgagatcgtcggcgagtgcggcaacgcggtggaggccattggcgcggtgcataagctgcgtcccgacgtgctgtttctcgacatccagatgccgcgcatcagcggtctggagatggtcgggatgctcgacccggagcaccgcccctatatcgtgtttctcaccgcctttgatgaatacgcggtgaaagcctttgaggagcatgcctttgactatctgctgaagccgattgaagctgcccggctggagaaaaccctcgcccgcctgcgccaggagcgtaatctgcaggatgtgtcgctgctggatgatgctcagcagacgctgaaatacattccctgtaccggccacagtcgtatctggctgctgcagatggaggatgtggccttcgtcagcagccggatgagcggcatctacgtgaccgaccgcgagggaaaagagggctttaccgaactgaccctgcgcacccttgagagccgcacgccgttgctgcgctgccatcgccagtatctggtgaatatggcgcacctgaaggagattcgcctggaggagaatggtcaggcggagctgctgatgcgcgccgggcaaacggtgccggtgagccgacgctatttaaaaagcctgaaagaggcgattggcctgtaa

SEQ ID NO: 209713 - DNA, 471 bp, Klebsiella pneumoniae
atgctcagtaatgatattcttcgtagcctgcgctacaccctgaaagtcaataataacgatatggtgcgcattctcgcgctctccgctatggaatccaccgccgccagcttcgacacctggacgacgaaagaggatgaagagggctttgttcgctgcccggacattatcctgtcgggtttccttaacggccttatctatgacaagcgcggcaaagatgattcggccccggagctggcgctggagcgtcgggtgaataacaacacggtgctgaaaaagctgcggatcgccttctcgctgaaaacggacgatatccaggcgattatgagcgagcagaaataccgggtgtcggtgccggagatcaccgccatgatgcgctcgcctgaccacaaaaactaccgcgagtgcggcgaccagtttttgcgcaatttcctgcgcggactgacccagcgggtgcataacccgaaggcatga

SEQ ID NO: 209714 - DNA, 2043 bp, Klebsiella pneumoniae
atgctcactatgactcaagtcgcgaagaaaattctggtaacgtgcgccctgccgtacgccaacggctccatccacctcggccacatgctggagcacatccaggctgatgtctgggtccgttaccagcgaatgcgcggccacgaggtcaacttcatctgcgccgacgacgcccacggcacgccgatcatgctcaaagcgcagcagctcggtatcacaccggagcagatgattggcgaaatgagtcaggagcatcagaccgatttcgccggcttcgacatcagctatgataactatcactcgacgcacagcgacgagaaccgcgagctgtcggagcttatctacacccgcctgaaagagaacggttttattaaaaaccgcaccatctctcagctctacgatccggaaaaaggcatgttcctgccggaccgttttgtgaaaggcacctgtccgaagtgcaaatctccggaccagtatggcgataactgcgaagtgtgcggcgcgacctacagccctaccgagcttatcgacccgaaatcggtggtctccggcgccacgccggtgatgcgtgactccgagcactttttcttcgacctgccgtcgttcagcgaaatgctgcaggcgtggacccgcagcggcgccctgcaggagcaggtcgcgaacaagatgcaggagtggttcgaatccggcctgcagcagtgggacatctcccgcgatgcgccgtacttcggcttcgaaattcccaacgcgccgggcaaatatttctacgtctggctggacgcgccgatcggctacatgggctccttcaagaacctgtgcgacaagcgcggcgacaccaccagcttcgacgaatactggaagaaagattctacggccgagctgtatcactttatcggcaaagacattgtctacttccacagcctgttctggccggcgatgctggaaggcagcaacttccgtaagccgactaacctgttcgtgcacggctacgtgacggttaacggcgccaagatgtccaagtcgcgcggcacctttatcaaggccagcacctggttaaatcatttcgatgccgacagcctgcgctactactacaccgccaagctctcttcacgcatcgatgacatcgacctgaacctggaagatttcgtgcagcgcgtgaacgccgacatcgtcaacaaggtggttaacctcgcctcacgcaacgccggctttatcagcaagcgtttcgacggcgtgctggccgctgagctggccgacccggcgctgtacaaaaccttcaccgacgcggcggaaagcatcggcgaagcatgggacagccgcgagttcggtaaagccatccgcgaaatcatggccctcgccgacgtggctaaccgctatgtcgatgagcaggcgccgtgggtggtggcgaaacaggaaggccgcgacgccgacctgcaggccatctgcaccatgggcctgaatatgttccgcgtgctgatgacctggctgaagccggtcctgccgcagctggccgcgcgtgcggaagcgttcctcaacagcgaactgagctgggacgccattcagcagccgctgctggcgcataaggtcaatccgttcaaggcgctgtacaaccgtatcgagatgaagcaggttgaagccctggtagaagcttctaaagaagaggtgaaagccaccgcggcgccggtcaccggtccgctggcggacgatccgattcaggagaccatcacctttgacgatttcgccaaagtcgatctgcgcgtggcgctgattgaaaacgcggaattcgtcgagggctccgacaagctgctgcgcctgacgctggatctcggcggcgaaaaacgtaacgtcttctccggcatccgctccgcctatccggatccgcagccgctgattggccgcctgacggtgatggtcgccaacctggcgccgcgcaaaatgcgcttcggcatctccgagggcatggtgatggccgccggccctggcgggaaggatatcttcctgttaagccctgacgacggcgccaagccgggtcagcaggtgaaatag

SEQ ID NO: 209715 - DNA, 1110 bp, Klebsiella pneumoniae
atgaattcgcaatcccaggccaaatcccctgagcgcctacgtgcgatggtcgccgggacgctggccaatttccagcacccaaccctgaagcataatctcaccgcccttaaggcgctgcaccatgtcgcctggctggacgataccgtccatattgaactgcaaatgccgttcgtctggagcagcgctttcgaagcgctgaaagagcagtgcagtgccgaactgctgcgcatcaccggcgcgaaggccatcgactggaagctgacccacagcatcgcgaccctcaagcgggtgaaaaaccagcccggggtcaacggcgtgaaaaacattatcgccatcagctccggcaaaggcggcgtcggtaaatcttctactgccgtaaacctggcgctggccctggcggcggaaggggcgaaggtgggcattctggatgccgatatctatggtccgtcgattccgaccatgctgggtgcggaagacagccgcccgacctcgccggacggcacccatatggcgccgatcatgaaatatggtctggcgaccaactccatcggctacctggtgaccgacgacaacgccatggtctggcgtgggccgatggccagcaaggcgctgatgcagatgctgcaggagaccctgtggccggatcttgattacctggtgctggatatgccgccgggcaccggcgacatccagctgaccctggcgcagaacattccggtgaccggcgcggtggtggtcaccacgccgcaggacatcgcgctgatcgacgccaaaaaaggcatcgtgatgttcgagaaagtggaagtgccggtgctggggatcgtggaaaacatgagcatgcatatctgcagcaactgcgggcatcacgagcctatcttcggcaccggcggcgcgcaaaaactggccgagaaataccacacccagctgctgggccagctgccgctgcatattacgctgcgggaagatctggataacggcacgccgacggtggtggcgcgtccggacagcgaatttaccgacatctaccgccagctggcgggccgggtggcggcccagatgtactggcagggagaagtgatcccgggtgagattgccttccgcgccgtttaa

SEQ ID NO: 209716 - DNA, 462 bp, Klebsiella pneumoniae
atggcgagatcttctatcaccgctgatccgcgcaatctccacgtccgccccggcgagccagcggactctccggcgctgcgccagatcttcctgcgggcgcgcagtttatcgtggacctggcttcccgccgcggcgtggcggctggaggatttcgatgccgccaccgcggatgaacagctgtgggtcgcggaatgcgacggccagccggtgggctttgccgccgtatggaccgccgataatttccttcaccatctgtttgtcgaccccgactggcagggcaaacatatcggcagcgcgctgctggcgcaggtcgaacggagctttaccgccagcggaacgctgaaatgcctgatggaaaataaaaacgccctgcgcttctaccagcgtcatggctggaccattgaagcacagggcgcgtcgcccgagggcagatactggctgatgcgctcgccgcggccttaa

SEQ ID NO: 209717 - DNA, 318 bp, Klebsiella pneumoniae
atgcgtaaaacaaaaatgatgcttctgggcgtacttcttgccaccgctggcgccagctggacggctactgccgcggggatcgatcagtatgcgctgaaagagttcaccgccgatttcacccagtttcacatcggcgacaccgttccggcgatgtacctcaccccggaatacaacatcaaacagtggcagcagcgtaacctgcctgcgccggacgccggcagccactggacctatatgggcggtaactacgttctgatcaccgataccgaaggcaaaatcctcaaagtgtacgatggcgagatcttctatcaccgctga

SEQ ID NO: 209718 - DNA, 900 bp, Klebsiella pneumoniae
atgttcaggctggaagatctgaccttatttgtccgcgccgcggcgctgggcagttttagcgacgcggcgcgcgaggccgggcagcagccggcgcaggtcagcgcggcaattaagcgtctggagacgatcctcaatattcgcctgtttgcccgttcgacccgcagcctgcgcctgacgccggagggggagacctggctgccctacgccacccagatgctcgataccctcgaggccggtctgcagaagatccagaccccggacgatgaagttcgcggcatgttgcagattgccgtgccgtcggacctcgggcgtaacctgctcctgaccctgttccgcgatttccgccaacgccacccggcgctgcgcctgcggctgctcttttccgatcaactgaccgacgtgtttaaagatccggtggacgttgcgtttcgctatggcaataacgacgatgcctcgtttatctcactgccggtggcgccggaaaatcgtcgggtgctggtggcctcgcctgagtggatcgcccgccatggcgaaccgcagaccctcgaggaactcagccagcacaatgcgttgatctacattttgcgcggccgtccgttcgaccgctggtcgctgagcctcgacggcgtggttcagcagcagaaggtttccggcacggtgatgagcgacgacgccgaggtgatccgtcggctggcgatctccggggagggcattgcctataaatcgatgctcgacgtcagcgacgatctgcgggcggggcgcctgcggcgcctgctgccgcgttatcagggggatgtagtgccgttgaatctgatttgtccgcaccgcaaacagctctctgccgcggtgcgtttgttatatgaagaggtgaaatcacattgtgaagggcttaatgcctga

SEQ ID NO: 209719 - DNA, 1344 bp, Klebsiella pneumoniae
atggccgataacacacttcactcttccgcccgcgctaactggctggagcgccgctttgcgctgcgctcgcgcggcggcacgcttcgcaccgaatgcctggccgggatcaccggctttctcgccgccgcctatttactggtggttatcccggggctgctggcgatcggcgggatggataaaggcgccgccaccaccggcaccattctggtcttcgtcgtcggctcgctgctgatggcgttttatgccaacctgccgtttatcgtcggcccgggcattggcggctcggtgctggtgggggtgacgctggccggtagcgaagggattggctggcagactggcctcggaattgcctgctggtcggggatcctcttcttcctgctgacccgctttggcctgcgcgaagtggtcacccgctcggtgccgcagtcgatcaagctgggattgacggcctccatcggcctgtttgtcgccgtcctcggttttcgcaatgccgggctggtgctggccaatgcgaaaaccaacgcgctgatgctcggtgactttctcgcccccggcgcgctggtggcgctgtgcggcctgttcctggcgatagccctgcaggcgcgtaaggttccgggcgccattttgtgggccattctgtgcgctaccctggtgggtatcccgttcggcgtgactaaactgccgacgcattttatcgatgccccccactcgctggcgccggtgctgggacaggttgacctgctgggggcgttaaacatcgccttcctgccgttcctgttcgtctttttcgcatctgagtttttctccactatggggacaacgctggcggtgggcggcgaggcgggtctgctggatgaagaaggcaacatgccgcagattaatcgcccgttcatggtcgattcgattgccgccgcgctcggcccgtgggtgggcattccggcggcgacggcgctgattgaatcttcggcggcagcggaagcgggcggcaaaaccggcctcaccgcgctgtcagcggcggtaatgttcctgctgatgctgctgttcacgccggtggcgttgatgatcccgaaagaagccaccgccccggcgctgatcctgattggcctgaacatgttcagtggcctgcgcaaagtggatcttgccaacttcaccgacgggctgccggtgctgatgatggtgatgatcacccttatcgccaacagctttggcaccgggattgccggcgggctgctgttttacattgtgatcaaggctatcgccggtaagtggcgggagatcccgattggcctgtgggtattggccgtcccgctggtgtattacttcgcgaccttagtcaggcattaa

SEQ ID NO: 209720 - DNA, 1812 bp, Klebsiella pneumoniae
atgtccagcaatgctcaagtccgccgtcgcgccgtgcaggccgcgcgcggtgaatccccgtttgatctgctgctgatcgatgcgcagatcgtcgatatggccacgggcgaaattcgcgccgctgacgtcggtatcgtcggcgagatgatcgccagcgtccacccgcgcggcagtcgcgaagacgcccatgaagtgcgttccctggccggtggctacctgtcccccggcctgatggacacccacgtgcacctcgaaagctcgcacctgccgccggagcgctatgcggaaatcgtcctcacccagggcaccaccgcggtgttctgggatccgcatgagctggccaacgtcctcggcgtcgctggcgtgcgctatgcggtggacgccagccgccatctgccgctgcaggtgatggtcgccgccccgtccagcgtcccctccacgccgggtctcgaaatgtccggcgctgatttcgccggcgcggagatggagaccatgctcggctggccggaagtgcgcggcgtggcggaggtgatggatatgcacggcgtgctgcacggtagcgagcggatgcaggagattgtccaggccggtctcaacagcggcaaactgattgaaggccacgcccgcggcctgagcggcgctgacctgcaggcctacctcgccgccggcgtcacctccgatcacgaactgacctcggcggacgacgcgctggaaaaactgcgcgccgggctgacgatcgagatccgcggctcgcacccctatctgctgccggatatcgtcgcggcgttaaaaacgctgccgcacctctcctcgcagatcaccgtctgcaccgatgacgtgccgccggatatactactggagaaaggcggcatcatcgccctgcttaatctgctgatcgagcacggtttaccggcggtcgatgcgctgcgattcgccaccctcaacgccgctattcgcctgcagcgccacgatctcgggctgattgccgccgggcggcgcgccgatctggtggtgtttgattccctggagaaactggtggcccgcgaagtctacataggcggtaagctgctggcccgcgcgggcaacctgctgacaccgatcgcgcccgccgcgggcgtcacgccgccgcgcgatactttgcagatcgcccccctccgcgccgatgactttattctgcgcgtccagggcattcgtcacggcatcgcccgcctgcgccatatccgcggcgcgcgcttcacccagtggggcgaagtggaagtgcaggttcgtgacgggaaagtccagctgcccgccggcttcagtctgatctgggtcaagcaccgccacggccgccatcaggcgacgccgcaaatcgccctgcttgaaggctggggtgagctgcgcggcgccatcgccaccagctactcccacgactcgcataatctggtggtgctcgggcgcgacgctaatgatatggcgctggcggccaaccagcttatcgcctccggcggcgggatggcgctggcgcaacagggcgagatcctcgcccatgtggcgatgccgattgccggcatgctgtcggatctcccagccgcggaactggcgcgtcagttccgcgagctgcgcgatctgagcagccaagtcgccgactgggagccgccgtaccgggtcttcaaggccattgaaggcacctgccttgcctgtaacgccgggccgcatttaaccgatttgggtctgaccgacggcggcagccgccagatagtcgacccgttgatagcctgccgggagatcccggagccaaccgatcacaacaataatcctcagggagcctga

SEQ ID NO: 209721 - DNA, 915 bp, Klebsiella pneumoniae
atgatgaacgaaccctggcagcggctgcccgcgctctctcttaaacaacttcagtatttcgtcaccctggcccagctgcgccattttaccgataccgccagtcggctggcgattagccagccggcgctgagcagcgccctgcggcagattgaaacggtactcggcggtaagctggtcaaccgtaccgctgcgacggtcactctgactgaactgggggcggcgattttaccccacgcccagcggatcctcagcgtggcgcaggcggccttttccgatatgcagcagattgtcgaggcgggcggcgacgggacggtgcgtatcggtctggtgccgtcggtcagttcgctgctgtttccgttgctgccgcagaccctggctgaggcctttccgcgtctgcgcattgaatttcacgatcagaccaacgatgcgcttatccaggcgctgcagcgcggcgagattgatttcggcatcggtgcgatcgacagctcactgcccgcagaactgctggtctatccgctgcgcgaagatcccttcgtggcggtgctgcaccgcgacgatccgctggccgcgcaggcgcatctgccgtggaaacagctggtggggcgggatattgctgtgttctcgaagggcaatatccagcggctggtggcggcattagtggagagccatcgcctgacgctgaccacccgctaccaggtggactatatcgaaaccctgtatggcctggtgcgctcgcgcttagcggtggcgatactgccggcgctgtacaccacccatctgcaggacccggcgctcagggtcgcccagctgcagcagccggcgctcgcccgcacagtggccctgatgcgcggcccgcaggcgctgcccccgcttattgaagactgtttttccctgctgcaggccgccttgcgctag

SEQ ID NO: 209722 - DNA, 423 bp, Klebsiella pneumoniae
atggccgtttatcaccatgcgctggtactgattaacagcagtcaggacggcgtcccgctgctccagcatgccgccagaatggcagaagagaacggcatgcgcatcaccatcgcccacatcagcaccgattaccgggcgctgaactatgtttccgacagcctgcgcgacgatcgggtctcgcaggaggtgatccaggccaaagccctgctcaacgagctggcctgcaccgtctccctgccggtggataccctctcgctggtgaccacccgccggtttgaagacgtggaaacctgcgttcggcagcggcagatcgatttaattattgccgggcaccataaccggctgctgggcgtcctctcctcacactcgctggagtacatcaaccacttaaacctggacgtgctgatcaagcacctgccctag

SEQ ID NO: 209723 - DNA, 774 bp, Klebsiella pneumoniae
atgcctgagctgttgaatcccgcgcctgtcgcgcacctgcgccatctgctgcgcgcccattccccccttgtgcactgcatgactaatgacgtggtgcagacctttaccgccaacgttctgctggccgtcggcgcctcgccggcgatggtgatcgatccccgcgaagcggcgcagtttgccgctatcgccgatgcgctgttaattaacgtcggtaccctgaccgaagatcgcgccgtggcgatgcgcgccgcggtggagcacgcccgtcaggccggcaagccctggacgctggatccggtggcggtcggcgccctgaccgtgcgcactgccttttgtcacgagctactggccctccagccggcgaccattcgcggcaatgcctctgaaattctggcgctggccgggatgagcgccggcgggcgcggggtggataccaccgatacggccgctgcggcgctgccggcggcccaggcgctggctcgtcggctggctaccgtggtggcggtcactggcgaggtggactacgtcaccgacggcgagcgggtgctcagcgtggcggggggcaatccgctgatgacccgggtggtgggcaccggctgcgcgctgtcggcggtggtggcggcgagcgcggcgctgccgggagaccggctggaaaacgtggccgccgcctgcgggctgatgaagcaggccggggagatcgccgcccgtcagggaggcccaggcagctttattccggcgtttctcgacgcgctgtatcaggaggtgcagggatga

SEQ ID NO: 209724 - DNA, 801 bp, Klebsiella pneumoniae
atgaaacgcatcaacgccctgaccatcgccggcaccgatcccagcggtggggccggtatccaggccgatctgaaaaccttctccgcgctgggggcctatggctgctcggcgatcaccgccctggtggcgcagaatacccgcggcgtacagtcggtctatcgcatcgaaccggattttgtggccgcgcagctcgactcggtgttcagcgatgtgcgtatcgataccaccaaaatcggcatgctggcggagaccgatattgtggaagccgtggccgagcggctggcgcgctaccgggtggccaacgtggtgctggataccgtcatgctggcgaaaagcggcgatccgctgctgtcggcctcggcggtggagaccctgcgtcaacgattgttgccgcaggtgtcattgatcaccccgaacctgccggaagcggccgcgctactcgatgccccccatgcgcgtaacgaacgagaaatgctggagcagggacgggcgctgctggcgctgggctgcggcgcggtattgatgaagggcggccatctcgacgatgccgaaagcccggactggctcttcacccgcgaaggggaacagcggttcaccgcgccgcgagtgcagaccaaaaatacccacggcaccggctgtacgctctccgccgcgctggcggcgctgcgcccgcgtcacgcggactgggcggccaccgttatcgaggcgaaggcctggctgtcggcggctctggcacaggccgactctctggaggtaggccacggtatcgggccggtgcaccatttccacgcctggtggtaa

SEQ ID NO: 209725 - DNA, 1053 bp, Klebsiella pneumoniae
atgactgatattacgcagttgctgggcaaagatgccgagagcctgttgcagcaccgttgtataaccattccgtccgaccagctgtatctgcctggcgcagattatgttgatcgggtgatggtggataacaaccgaccaccggcggtgctacgcaatatgcagaccctgtacaataccggacgcctggggggaaccggctacctttccattctgccggttgaccagggcgtggagcactcggcgggcgcctcctttgccgccaacccgctgtactttgatccgaaaaatatcgtcgagctggcgatcgaagccggctgtaactgcgtggcgtcgacctacggcgtgctggcctcggtgtcgcgccgctacgcgcatcgcatccctttcctggtgaagctcaaccataacgaaacgctgagctaccccaccgaatacgaccagaccctctacgccagcgttgagcaggcgttcaatatgggggcggtggccgtgggagcgacgatctatttcggctcagaacaatcgcgtcgtcagatagaagagatttccgccgcctttgagcgggcccatgagctgggcctggtcaccgtgctgtgggcctatctgcgcaattcggcgttcaagaaagacggcgtcgactatcatgtttccgctgacctgaccggtcaggccaaccacctggcggccaccatcggcgccgatatcgttaagcaaaagatggcggagaataacggcggctacaaagcggttaacttcggctataccgacgaccgggtgtacagcaaactgaccagcgataaccccatcgatctggtgcgctaccagctggccaactgctatatgggccgcgccgggctgatcaactccggcggcgcggcgggcggggagaccgaccttgccgacgcggtgcgcacggcggtgatcaataaacgcgccggcggcatggggctgatcctgggtcgcaaagcgtttaagaaatcgatggccgacggcgtgaagctgatcaatgccgtgcaggatgtttatctggatggcaaagtgactatcgcataa

SEQ ID NO: 209726 - DNA, 1284 bp, Klebsiella pneumoniae
atgtccgttaataacaaacagtggtacggtctaccgctcaacctcatctggggatatgtcgccatcgccgtgtttatgaccggcgacggctttgagctggcttttctgtcgcactacatcaaagcactcggattcaccccggcgcaggcttcctttgcctttactctctacggtctggctgccgccctgtcggcgtgggtctccggcgtggtggcggaaatcattaccccacgtaaagccatgctgattggcttcgtgctgtggtgtgtgttccacgtactgttcctcgtcttcggcctcgttcgcgccaactatgcgctgatcctgctgttttatggcatccgcggcctggcctacccgctgttcctctactcctttatcgtcgccattatccacaacgtccgcagcgacagttccagctccgcgctgggctggttctgggcggtctactcggtgggtatcggcgtgttcggcagctatattccaagctttaccattccccacattggcgaaatgggcaccctgtggctggcgctgctcttttgcgccaccggcggcattattgcgctggtgtcgatgcgtcataccgaaacgccgcgccatatgcagaacctgaccactcgtgaaaaattcgccgaactggggcgcgccgcgacgctgctctataccaaccgcagcattctgttctcgagcattgtgcgcattatcaacaccctgtcgctgtttggttttgcggtgatcatgccgatgatgtttgttgatgagctgggatttaccacctcggaatggctgcaggtatgggcggcattcttcttcaccacgatcttttcgaacgttttctgggggattgtggcggagaaaatgggctggatgaaggttatccgctggttcggctgcatcgggatggcgctttccagcctggcgttctattacctgccccagcacttcggccataattttgccatggcgctggtaccggctattgccctggggatttttgtcgccgcgtttgtgccgatggcggcggtgttcccggcgctggagccgaaccataaaggcgcggcgatttcggtctataacctgtcagccgggctgtcgaactttctggcgccggcgattgccgtggtactgctgccctacttcagcactatcggcgtggtaatagcctataccgccttatatattctggccttcttcctgtgcccgttaatccgcgttgaacagcctggctttaccagcgatcagcatgcgaaaccgtttaccgccaacgcggcagagtcttaa

SEQ ID NO: 209727 - DNA, 1608 bp, Klebsiella pneumoniae
atgcaaaacgatacgcaaaacattattggcgtggatgtcggttcgggcagcgtgcgcgccgggatattcaatctacggggcgagctcctcgcccacgcgacccgggaaataaccctgtttcgcagcgccggaaataaggtcgagcagtcgagccgtgagatctggcaggcggtgtgctactgcattaaaacggcggtggccaacgccggcgtttcgccgtcgtcgatagccgggatcggcttcgatgccacctgctcgctggtggtgattggcgataacgatgcgccgctggcggtcgggccttcggacgatgcggaccgcaacattattgtctggatggatcatcgcgccaccgggcaggcggaaaagatcaatgccacgggccacccggtactgcggtacgttggcggcaaaatctcgccggagatgcaaacgccgaaaattttgtggctgaaggagaatcgcccgcacatctatcagcaggcgcgccacttcttcgacctcgccgattacctcacctggcgctcaaccggcgatgaagcccgctcggtctgcacggtgacctgtaaatggacctacctggcgcatgaacaacgctgggatgccggttacttccgccagattggcctcgcagagctggcggatgaagattttgtccgcatcggccagcggattgtcgatccaggcaccccctgcggcgagggcctttgcgccacggcggcagaggagatgggcctgccgatcggcacgccggtggcggtggggatgattgacgcccacgcgggcggcatcggtaccgtcggcgtgcttaacggcgcggtcaacaatatggcctatgtcttcggtacttcttcctgcaccatgaccaccactcaggaagcggtattcgtcccgggcgtctggggcccttactattcggcgatggtgccgggctactggctaagtgaaggcgggcaaagcgccgccggcgcggctatcgaccagctgctgagcttccatccggcggcggcggaagcgcgcgagcaagcgaaagccgcaggcgtccctctgccggtctggctggcggatcgcgttctgacgcaagttgcttcgccttctgaagcggtaacgctggccgccggtctgcacgtcgttccggagtttctcggtaatcgcgcgccgcttgccgatccccacgcgaaagcgctgattgccgggctggggatggagcgggacctggataacctgaccgcgctgtacgttgccggcttatgcgggattggctatggtctgcgacagatcattgacgcccagcgcgcctgcggaattgagagtgaaaatatcgtcatcagcggcggagccgggcagcatccgctggtgcgtcagctgttggccgacgcctgcggcgttagcgtcgtgagcaccgccagccgcgagccggtgctgttaggttccgccatcctcggcgcggtggcgggcagagtcgcggcttcgctgccggaggccatgaagcagtttactcaggtggatgccacctatcacagcgagactgcgtttagcccgcttcatcagcgcaggtatgcggcctataaggcgctacaacaggccggcaggctgattcgcgaataa

SEQ ID NO: 209728 - DNA, 750 bp, Klebsiella pneumoniae
atgaaccactctgtctcctctatgaatacttccctcagcggtaaagtcgccgcgatcaccggcgcggcgtccggtatcggcctcgagtgcgcgaggaccctgctgggagctggcgcaaaagtggtactgatcgaccgcgaaggcgaaaagctcaacaaactggtcgccgaacttggcgaaaacgccttcgccctgcaggtcgacctgatgcaggcggaccaggtcgataacctactgcagggcattttgcagcttaccgggcgtctcgatatcttccacgccaacgccggcgcctatatcggcgggccggtggccgagggcgacccggacgtctgggaccgcgtgctgcaccttaatatcaacgccgccttccgctgcgtgcgcagcgtcctgccgcatctgatcgcgcaaaaatccggggatattatcttcaccagctcgatcgcgggcgtggtgccggtgatctgggagcctgtctataccgcgtcgaaattcgcggtgcaggcatttgtgcacaccactcgtcgccaggtggcgcaatatggcgtgcgcgtcggcgccgtactgccgggcccggtggttaccgctctgctggacgactggccaaaagccaaaatggacgaagcgctggccaacggcagcctgatgcagccgattgaagtggcggagtcggtgctgtttatggtgacgcgttcgaaaaacgtcaccgtacgcgacattgtgatcctgccgaacagcgtggatctctga

SEQ ID NO: 209729 - DNA, 1002 bp, Klebsiella pneumoniae
atgaagaagataacgatttacgacctggcggaactttccggcgtttcggcgagcgcggtgagcgctatcctcaacggtaactggaaaaagcgccgcatcagcgccaagcttgcggaaaaggtgacgcggattgccgaggagcagggctatgcgattaaccgtcaggccagcatgctgcgcagtaaaaaatcacacgtcatcggtatgattatccccaaatatgataaccgctacttcggttccatcgccgaacgctttgaggagatggcccgcgagcgcggcctgctgccgattatcacctgtacgcgccggcgtccggaactggagatcgaagcggtaaaggcgatgctctcctggcaggttgactgggtggtcgcgaccggggcgaccaatccggataaaatttccgcgctatgccagcaggcgggcgtgccaacggtcaatctcgacctgccgggctctctctcgccgtcggtgatttcggataactacggcggcgcgaaagcgttgactcataagatcctggctaatagcgcccgccgccgcggagagctggcgccgctgacctttatcggcgggcgcagcagcgaccataacaccagcgagcgtttacgcggcttccacgatgcgcatcgcgagctggggcttagcgtgccgcaggcgaatattctggctcccggctattcgaaaggccacgttgaggactgcctgcaggagcggtttggcagcgagaagacgctgttgcaggggatatttgttaactcgacgatatccctggaaggggttgtgcgctggctgtcgcaggtgggtctgaccggcagcgagcagccgccgatgggctgcttcgactgggatccttttgtctacctgctggggcacgatatcgacatggtgcagcaggacgtgccggcgatgctggacgctgttttttcgattattgacgccggcgaagccagccagcagcggattgaaattcccccgcgactgatgagcagcagctga

SEQ ID NO: 209730 - DNA, 942 bp, Klebsiella pneumoniae
atgagtaaagaagacgatatccggttggatcagaaggtgcgtgccgcatggatgtactacatcgccggccagaatcagagcgagattgccagccagctgggcacctccagaccggtggtgcaacggctgatcgccgccgcgaaagaagaagggattgtgtcgattaatctgcaccatccggtagcgaactgcctcgattatgcgcagttgctgcaggaaaaataccgcttgatcgagtgcaatgtggtccccgcctttagcgaagaaagcaccctcgacagtgtgtcatttggctgctatcagctgatggctcgctatctgcaggatgataaagagaaaatcatcggtctgggctcgggcctgaccctgaaaaaagcgctgcagcgcatcgattttgacagcctgaatacccgctgcgtggcgctgatcagcgccatgaacgccgacgggcagtgcaattattacgatgacgtgcccctgctgctgacccgcaaaattaaggccaagtactatcagtggccggcgccgcgctacgcccagagcgcggaggagcatgagatgtggtgcaccaaccgcttattccgcagcgtctccggcgtcgcccaagaggcggacgtgatttttgtcggcattggtccgctgggcacgcaaagtccgatctttaaagacggctttatcaatcaggcgcagatggatgagctaaccgcccgcggcggcattggggagatcctcgggcggtttattgatgcgcaaggcgacgtggtagacagcgagatcaaccgcatgatcaccagctatgatatccgccagagccactgcccgcggattgccgctgcctgtggagaacataaacgaccggcgatcctggccgcccttaaaggcggctggattaatggcctggtgaccgatgagcataccgcccgctggctgctgacgcggtaa

SEQ ID NO: 209731 - DNA, 1368 bp, Klebsiella pneumoniae
atgaacaatcaattcacatggcttcatatcggtctgggttcttttcatcgcgcgcatcaggcgtggtatctgcatcgtctgattgcctccggggataatcgctggcgcatcgcggcggggaatattcgcaacgacgccgagcaggtggtccaggcgctggcggcgcagggaggacgttacgtcctcgagaccgtcagcccggaaggggagcgcgaatatgaagagatcacctcaatccagaaactgctgccgtggcaggccgggctacagccgctgattaacgaaggggcaaacccgcagaccaaagttatcgcctttaccgtgacggaaggggggtactacctgaacactcgccatcggctggaaaccagcaaccccgatctgcaggccgacctgcaaggcgagtgcaaaaccatttacggcaccctcgcgcggatcctggaaaagcgcatggccgacaacgccgggccgctgaccctgctcaactgcgataacgtgcgccataacggcgagcgtttccacgacggtatggtcgagttcctgcagctcaccggcaaacaggcggtgattgactggatggcggccaataccacctgtccgaacaccatggtggaccgcatcaccccgcgtccggcggccgatctgccggcccgcatcaaagcgcaaaccggaattgatgacaaagcgccggtgatgggggagacctttatccagtgggtagtggagaacaacttccgcgatgcccgcccgaatctggaggcggtcggcgtggagatggtggagtcggtcatcccgtatgaagaggcgaaaatccgtattttgaactcgtcgcacagctgcattgcctgggcgggaaccttaatcggccagcagtatattcatgaaagcacgctgaccgatgttatctacgccattgccgaccgctacgttacggaggacgttattccgtgtctcggcgataacggcattgatctgccgacctaccgggatgtggtgcttaagcgctttaccaacccctatatccaggacaccaaccagcgcgtcgccgccgacggcttctcgaaaattccggcgatgatcgcgccaaccttgcaggagtgctaccagcgcggcgtccgccctgaggcgaccgccatgctgccggcgctgttcttcgtctttatggagcagtggcacaagggaactctgccatatcagtaccaggacggcatcctggatgcgcaggcggtgcatgagatgttcgaggctcaggatccggtggctgtcttcgcccgtgataaagccctgtttggtgatctcgccaacaacgcggatttcctggcgctgatgcgcgagaaagtcgccgccgtttacacgctgattaactaa

SEQ ID NO: 209732 - DNA, 1464 bp, Klebsiella pneumoniae
atgtatctgggtatcgatctcggcacatcggaagtcaaagcgctggtcattgatgagaaccatgaggttatcgccagccatagcgcgccgctgagtattcagcggcctcatccgcactggtcagaacaagcgccagagctatggtgggaggcgacggagtacctgatggccacgctacgggaaaaatgcgcgcagcattggccggccattaaggcgattggcctctccgggcagatgcacggcgcggtgttgctggatgcagaggggaaggcgatccgtccggccattctgtggaacgacacccgctgcgccgcagagtgcgccgagctggaggcgatggcaccggagctgcatcaggtggcgggcaacctggcgatgccgggctttaccgcgccgaagctgttgtgggtgcgccgtcatgagccgcagcactttcagcgcaccgccacggtgctgctgcccaaggattatctgcgctaccggatgaccgggaagaaagtctccgatatgtcggacgccgccgggacgctgtggctggacgtggcgaagcgcgactggtccgacgctctgctggacaagtgcggcctgtcgcgtagccaaatgccgacgctggtcgaaggctgcgaggtttccgccacccttgacccgcaggtggctgcgcgctgggggctgaacgcctcggtggtggtggccgggggcgggggggataacgcggtcagcgccattggcgtcggcgcggtctcgccgggagatgcgtttatttcgctcggcacctccggggtgctgtttgtggtgaccgacgcctatcgtccggcgccgcagtcggcggtacatgcgttttgtcacgtgctgccgaacctgtggcaccagatgagcgtcatgctgagcgccgccagctgtttgcagtggttctgccgcctgaccggcaccacggaggtggcgctgctggcggagattgccgagctaagcgaggaggataaagccaacgcgccgttcttcctgccctatctctccggggaacgaaccccgcataacgatcctgacgcgcgcggcatcttctggggcatgacccatgccagcctgcgcgcgcagctcggctacgcggtgctggagggggtgagctttgggatcaacgacggcctgcaggcattgaaagagagcgggacgccgatcgcgcagtgctcgctggtgggcggcggcgcccgcagtccgttctgggcccagctgctggccgatattctcgctatgccggtggtgacccacaaaggcggagagaccggcggcgcgctgggcgcggcgcggctggcctgcctggctgcgggcaaaccggttgccgcggtgtgtgaaaaaccggaagtctggcagacctggcgtgcggatcccattcgccaccacaccctgatgcaacgctacgcgcagtttaaagccctgtatttaaacgatctgcactatcgacagcactga

SEQ ID NO: 209733 - DNA, 1278 bp, Klebsiella pneumoniae
atgtctatcaataataaacagtggctcggtttacccctgaacctgctctggggatacatcgccattgccgtatttatgaccggcgacggttttgaattagcctttctgtcgcactatatcaaagcgctcggcttttctccggcggaggcctcctttgcctttaccctctacggcctggccgccgcgctgtcggcgtggatttccggggtggtggcggaaattatcaccccgctgaaaacgatgatgattggcttcgtgctgtggtgcgtattccacgtgctgttcctcgttttcggcctaggtcacgctaactatgcgctgatcctgcttttctacggcatccgcggcttcgcctatccgctgttcctctactcgtttatcgtggcgattgtccataacgtcaaaagcgacaacgccagctcggccatcggctggttctgggcggtgtattccatcggcatcggggtcttcggcagctatattccgagctttaccattccgcacattggcgaaatgggcaccctgtggctggcgctggccttctgccttaccgggggcgtgattgccctggtttccctgcgccatattcaaacgccgcagcatatgcagaatctcaccacccgtgagaagttttccgagctgggacgcgccgcgacgctgctctataccaaccgcaatattctgctgtcgagcatggtgaggattatcaataccctctcgctgttcggctttgcggtgattatgccgatgatgtttgtcgatgagctgggtttcagcacttcagaatggctccaggtatgggcagtcttcttcttcaccaccattttctctaacgtgctgtgggggatcctcggggaaaaactgggctggatgaaggtggtgcgctggttcggctgcatcgggatggcgctctccagcctggcgttttactacattcctcagcactttggccatagctttgcgatggcgctgatccccgccatcgccctcgggatctttgtcgccgccttcgtaccgctggcggccgtgttcccggcgctggagccgaagcataaaggcgcggccatttcggtctataacctgtcggcggggatgtcgaactttctcgcaccggcgattgccgtggtgctgctgccgttcttcagcaccatcggggtggtgatcgcctataccgcattgtacgtggtggcctttttcctctgcgcctttatccgcgtggagcagccggggttctcccacaaggaagcaaccgcccgcgagcaggttgaattctcatag

SEQ ID NO: 209734 - DNA, 663 bp, Klebsiella pneumoniae
atgagtatgcaggcggttatttttgacatggatggcgtgattattgattccgaggcgctgtggcgtcaggcgcagattgacgccctcgcgcagtggggggcaacggcgagcgttgctgaatgtgaaaccctgaccaagggcaagcgcctcgacgacattgccggcacctggtgccgctattttcagcttgatctcgctccacagcggcttgaagacgcgatcctgcagcgcatcacccgtctgattgccgcgaaaggcgaaacgatgcgcggggtgcaggaggcgttacgctattttcgcgaagcgggttataagattgcgctcgccacgtcatcatctcgtcaggttattgccgctgtgctgaacaagctttcgctctggcacttttttgacgcgatctccagcgcggatgatgaaccacgcggcaaaccgcacccggcggtgtacctcacgacgctgcggaagctcaatctcaacgccagccagtgtctggtgattgaggatagctttaccggcttttgcgcggcccagtcggcggggattgccacgatagtgattgcagaagatatccagcacgcgcgttttcaggccgccgctggccgctatcaaaccttacctgaactgctgcaagcgcttagcgcggagccagcggcggcggtttaa

SEQ ID NO: 209735 - DNA, 1155 bp, Klebsiella pneumoniae; identical to SEQ ID NO: 136170

SEQ ID NO: 209736 - DNA, 1671 bp, Klebsiella pneumoniae
atgccgccatccggcaacatgtaccctacagtacaggcaaacagagatatgaaaaaaacctccttactgggagcgtgtattctcgcgctcgccatgtcgatggggagcggggaggcggtggcgaaaacgccgcccgaccagctgatcatcggcatgaatatgaataacctgctcacccttgacccggcggcgatgaccggtaacgaagtggtggggatcgtggtcaacctctacgactcgctggtggagcttgaccctgagcagctcaccaccgtcaggcccgcgctggcgaaatcctgggatatcagccccgacggcaaaaccctgacctttcatctgcgcgatgacgttaagtttcactccggcaacccgctgaccgccgccgacgtcgtgtggtcaatgcggcgcatcctgcacctcaacctggcccaggcctcagtatggaaatcctatggcttcagtaagaaaaatattgacagccaggtcagcgcgccggaccgcttcacggtgcaaatcgtattacccaaagataacgatccgcagctggtgatttactcgctggcggcgctgggcaacctcggagtgctggacagtaaaacggtgcaaagccatcagcaggataacgactggggtaaccgctggctaaccacccatgaagccggttcagggccgtttatcctcgaaacctggcaggcgaaagatgtgctgcgcatgaagcgcaaccctgactactggcgcggcgaggcgaaaatgagccacgtggtactgcatcatttccaggagtcgcaaactctgcgcctgatgatcgaaaaaggcgaccttgatattgccaacaatatggcggtttccgatatcaacgccctgcgcagcgatccgcagctgaccgtcgatgcggtgcagcgcggcaccatgtactacgtggcgatgagcatgaaagaggcgcacttcgccaatccgaaagtgcgcgaggcggtgcgctttctgattgattaccagggtatcaataaagcgctgatgccgggctatggcgtgctgcaccagcggcctatcaaagcgggaatgccgtccacgctacccgatcccggctacaggctggatgtggcgcgggcgaaaaagctgctggcggaagcgggatatcccaacggctttgataccacgctgcgggtactctccgatcagccatttcttaacatcgctatcgccgtgcagtcgacgctgatgcaggcggggattaacgccaaaatcatcaccggcactggtaaccagatctacggcgcaatgcgcgagcgtaaatttgacctgctggtaggtcgcggcggcagcgggatggagccgcatccgcactccagcctgcgcgcgctggtctataacccggataacagcgataaggcgcgcctgaccaacttccagggctggcgtaccggtttttacgacccgcaactgaatacgatgattgaccaggccctgctggaacgcgatccgcaaaaacaggtggctgactaccaggccatccagacacgctacgaccagctggttccggctttaattccgctttcgcagatggttgattcggtcgtcgtgcgcaacgaggtacgggagtatcagccgcacccctccgccaccacttttctgcgtgacgtctataaagtccgcgaaggagagaaaggatga

SEQ ID NO: 209737 - DNA, 1038 bp, Klebsiella pneumoniae
atgagtaccgcaatccttgcgcccggctcacgcggccggcgcttatcaaaacggctactgcaggtggtgattacactgttcggcctgctgctgctgacctttaccattggccgcgtcatgcccatcgacccggtgctggcgattgtcggcccggatgctgaccagagtacctatcagcaggtttaccagcagctggggtttgataaatcgctgaccacccagtttggcatctatttcgtcaacctgttgcacggcgatctgggcaacgcgctgctgaccgggaaaccggtggtggacgatattatccgcgtcttcccggccaccatggagctggcaacgatggcgattattgtcggcgcgggtcttggtattccgctgggcgtgttggcggcagcgcggcgcaatagcgtctccgattatgtggtacgcattatcagcctggcgggctactcgacgccgatcttctgggtcgggatgatggggctgctggtgttctatgcctggcttggctgggtaggcggcgccgggagggtagatctcgggctggatggtgtggtgccgcgccgcaccgggctgatcaccgttgatgcgctgctggccggcaacggccaggtgttctggaacgccattaatcatctgattcttcccgcctcgctgctgggttttcactcgctggcttatatcagccgtatgacccgcagctttatgctggcccagctgtcgcaggagttcattattaccgcccgggtgaaagggctgaccgagcgccaggttatctggaaccatgcgtttcgtaacatcctcgtgcaactgctgacggtggtggcgctggcctacggcgcgctgctggaaggcgcggtgctgattgaaaccgtcttctcatggccggggtttggctcctaccttaccggaagcttgctgctgggcgatatgaatgcggtgatgggctgcgtgctgctggtgggggtgatcttcgtgatgctcaacctgctctccgacatgctgtatcaattctttgacccgaggacaaaatcatga

SEQ ID NO: 209738 - DNA, 906 bp, Klebsiella pneumoniae
atgaccgtttctctggattcgccgctttcgggtggtgcgggcgaaggccgtcagcggctgcaacgcgcggcggcgcgggccgtcgggtttatcggcaaaatggcgcgcaatccgctcacggccatcggcggaggaattatctttctgctgctggtggtggcgattttcgcgccgctgattgcgccttataacccgctggtacaggacctgaatagtgcgctggtcgcgccgaatgcgcagcactggttcggcaccgatgagtttggccgggatatctttagtcgcctggtgtacggctcccgcatcacgctctatatcgtgctgctggtctcagtgaccgtcggtccgctcggactgctgctgggcgtcagcgccggctatttcggcggtaaagtcgatatggtgctgatgcgcgtcaccgatattttcatctccttcccgagtctggtcctggcgctggcgtttgtcgccgctttaggaccggggctggagcacgtggttatcgccatcacgctgaccgcctggccgccgatagcccgtctggcgcgcgccgaaacgctctctctgcgccaggccgattttatctccgccgtgcgtctgcagggcgcttcatcggcccgcgtcctctggcgccatatcgtgccgctgtgtctgccctcggtcattatccgtatcaccatgaatatggctgggatcattctgacagcggccggcctaggctttctcggcctcggcgcgcagccgccagagccggagtggggagcgatgatctccagcgggcgcacttatatgatggagtgctggtgggtcgtaaccattccggggctggcgattctgatcaatagcttagcgttcaacttcttaggagatggcctacgtgacatcctcgatccccgtagtgaataa

SEQ ID NO: 209739 - DNA, 864 bp, Klebsiella pneumoniae
gtgacatcctcgatccccgtagtgaataatgctccgctgctcgacgtgcgcgatttgtgcgtcgactttgttaacggtagcgcggtgacccacgccgtgcgcggcgtttccttccagctggggcatgagaagctggccattgtcggcgaatccggttcgggtaagtccaccgttgggcgcgcgctgctgcagctgcatccgaaaaaggcccgcgtcagcgccagccggatgcagtttgccgacctcgatctgcagcatcttagcgaagcgcagatgcgcggcgtacgcggcaaacgtatctcgatgattatgcaggatccgaaatattcgctgaatccggtggtctgcgtgggtaagcaaatcgccgaggcctggcttactcatcatcccgggcgtaaagatgaggcgaaagccagggcgctggagatgctggaggtggtgcgtattcgccagccggagcgcgtttatcagctttatccgcatgaaatatccggcggacagggacagcgcatcatgatcgccatgatgctgattaccgacccggagctgatcattgccgatgagcccacctccgcgctggacgtgtcggtgcgcctgcaggtgctgggcctgctggatgacctggttcagtcgcgcgggttggggctgatttttatcagccacgatatcaacctggtgcgcagcttctgcgaccgggtgctggtgatgtacgccggacgggtagtggagtccatcgccgctaaagatctcgatcacgcccgtcacccctacactcagggattgattaactcgctgccggatatgcagcatcgtcgcccgatactgccggtgctgcagcgtcaggccagctggttaacggattaa

SEQ ID NO: 209740 - DNA, 774 bp, Klebsiella pneumoniae
atgattgaagttcaacatctcaacctcgcgtttggcgagggggagaagcgtaaccaggtgctgtatgacgtcagtttccacgttaagcccggcgagatctacggtctggtaggagagtccggttccggtaaaacgacggtgctcaagtgcctggcggggctgtttacccactggcagggggaactgaccatcgatgctcagcccttagagcatgaaattagccgcgagcgctgccgtcaggtgcagatggtatttcaggacccctacggatcgctgcatccccgtcacaccattggcgatatcctcgaagagccgctgcagatccatcgtatcaacgaccgcgaccggcggatcaatgtgctgctggataaagtaggcctcaaccgcgcctttcgcgagcgctatccgcatcagctctccggcgggcagcggcagcgcgtggcgatagccagagcgctgattcttgagcctcaggtgctgctgctggatgagccgacgtcggcgctggatgtgtcggtgcaggctgagatccttaacctgctggcagaattgcagcgggaggctaagctcacttacctgatggtcacccacgatcttggggttattgcccacttatgccagaaagtggcggtgatgcagtacgggaagatcctcgaaaccctgacggtcgatgcgctggtcagcggccaggcgcagatggcctatacgcagatgctggttaacgccagtcggcaatatacgcgcgaaatggcgcgcgaggtggcggaatactaa

SEQ ID NO: 209741 - DNA, 897 bp, Klebsiella pneumoniae
atgatgtctacgtttcctgccagcttactgatccttaacggcaaaggtgccaatgaaccgcagctacgcgaagcggttaacctgttacgcgatgaagggattgatattcacgtccgcgtgacctgggaaaagggcgatgccgctcggtttatcgatgaagccctgcagctgaacgttgaaacggtgatcgccggcggtggcgatggcaccattaatgaagtggcgaccgcgctggtggagcgcggcggcaagatggcgctggggattttaccgctgggcacggctaacgactttgccaccagcgtcggtattccgcaggatctggccagcgccctcaagctggcgatcgtcggccgcgatgtgccgatagatatcgccagggtgaatgataaaaccggctttattaatatggcgaccggcgggttcggcacccggatcaccaccgaaacgccggaaaaactcaaggccgcgctcggcggtgtctcttatttaatccacggtctgatgcgcatggataccctgaagccggaccgctgcgagatccgcggggagaactttcactggcagggcgatgcgctggtcatcggcatcggcaacggccgccaggccggcggcggccagcagctgtgcccggaggcgttgattaacgatggtctgctgcatctgcgcattttcaccggcgaagagctgatccctgccctgttcagcaccctggcgaatccggaaaactcgccaaatattgttgacggtgtctcctcgtggtttgaaataaccgcgccccatgagatgacctttaacctcgacggcgagccgctcagcggcaaaaccttccgtatggagctgttaccggcggccctgcgctgccggctgccgcccgactgcccgctgctacgctga

SEQ ID NO: 209742 - DNA, 1362 bp, Klebsiella pneumoniae
atgtttaaaccagaactcctctccccggcgggaacgctgaagaatatgcgttacgctttcgcctatggcgccgatgccgtttatgccggccagccgcgctactcgctgcgcgtgcgtaacaacgaattcaatcacgaaaatctgcagctcggcatcaatgaagcccacgcgctgggtaaaaaattctatgtggtggtcaacatcgccccgcataacgccaagctgaaaacgtttattcgcgatctgaagccggtggtggagatgtgtccggacgcgctgatcatgtccgatccgggtttaatcatgctggtgcgggaacacttcccggagatgccgatccatctttcagtgcaggccaacgccgtcaactgggcgacggtcaaattctggcagcagatggggctcacccgcgtgatcctgtcgcgtgaactgtcgctggatgaaatcgaagagattcgccgccaggtgccggagatggagatcgagattttcgtccacggcgcgctgtgcatggcctactccggccgctgcctgctctccgggtatatcaacaagcgcgacccgaaccaggggacctgcaccaacgcctgccgctgggaatacaacgtggcggaaggcaaagaggacgacgtcggcaacatcgtccacaaatatgagccgatcccggtgcagaccgtggagcccaccctcggcatcggcgcgccgaccgataaagtctttatgattgaggaagccaaacgtccgggcgagtacatgaccgcctttgaggacgagcacggcacctacatcatgaactcgaaagatctgcgggctatcgcccacgttgagcgtctgacccagatgggcgttcactcgctgaagatcgaaggccgcaccaaatccttctactactgcgcgcgcaccgctcaggtttaccgcaaggcgatcgacgatgccgccgccggcaaaccgttcgataccagcctgctggagaccctggaggggctggcccaccgcgggtacaccgaaggcttcctgcgccgccatacccatgacgattatcagaactacgagtacggctactccgtctccgagcgccagcagtttgtcggcgaattcaccggagagcgtaacggcccgctggcggccgtggcggtcaaaaataagttcagcgtcggcgacagccttgagctgatgaccccgcagggtaacgtcaacttcacccttgagcatatggagaatggcaaaggcgaaaccatgccggtggccccgggcgatggctataccgtctggttgcctgtgccggacgacctgcccctgcagtatgccctgctgatgcgcaactttactggtcaaacaaccagaaatccgcacggtaactag

SEQ ID NO: 209743 - DNA, 723 bp, Klebsiella pneumoniae
atgactgaattgcctggagatgaaaacaccccacgcatccttatcgtggaagatgaaccgaagctcggccagctgctgattgattatctgcaggccgccggctatgcgcctgccttgattaaccacggcgacaaggtcctgccctacgtccgccagacgccgccgcacctgatcctgctggatctgatgctgcccggtaccgacggtctgacgctgtgccgggaaattcgccgcttctccgatgttccggtggtgatggtgacggcgaaaatcgaagagatcgaccgtttgctggggctggaaataggcgccgacgactatatctgcaagccctacagcccccgggaagtggtcgcccgggtaaaaaccatcctccgccgctgcaagccgcagcgcgatctgcaggcgctggacgcccagagcccgctgattgtcgacgaaggtcgttttcaggcctcctggcgcgacaagctgctggacctcactcccgccgagttccggctgctgaaaaccctctcccaggagccgggcaaagtgttctcccgcgaacagctactcaaccatctgtatgacgattatcgggtagtcaccgatcgcaccatcgacagccacatcaagaacctgcggcgcaagctggaggcgctggacgccgagcagtcgtttatccgcgcggtgtatggcgttggctaccgctgggaagcggacgcctgccggctggcgtag

SEQ ID NO: 209744 - DNA, 1479 bp, Klebsiella pneumoniae
gtgaaattttggcgcccgggtattaccggcaagctgttcctcgctatattcgccacctgcatcgtgctgctgatcagcatgcactgggcggtgcgcattagttttgaacgcgggtttatcgactatatcaagcgcggcaatgagcagcgcttaaccatgctcagcgacgcgctgagcgagcagtatgcccagcatggcagctgggcgtttctgcgcaacaatgaccgctttatcttccagctgctgcgcaccttcgaacgggataacgacgaccgctcgccgccggggcacgccatgaagccggactccgccccggacgggccgccgccggatggcccccctgacggcccgcgcccgaggccggaaatgccgccccacggctggcgcaccatgttctgggtggtggatcagtcggggcgcgtgctggtggggccgcgtgagcgcgtcccggaggacggcacccagcgcagcatcgtggtcaacggcgcggaggtgggcaaagttatcgcctcgccggtagagcggctgacgcgcaataccgacattaacttcgaccggcagcaaaagcgcaccagctggctgatcgtcgcccttgccaccctgcttgccgcgctggccactttcccgttggcccgcggtctgctggcgccggtgaagcggctggtggaaggcacccataagctggcggcaggcgacttttccacccgcgtgacggtgaccggcggcgatgagctcggccgcctggcgcaggattttaaccagctcgccagcaccctggagcggaaccagcagatgcgtcgcgatctgatggccgatatctcccatgagctgcgcaccccgctggcggtgctgcgcggcgagctggaggcgattcaggacggggtccggcgctttacccccgagtcgattccttctctgcaggccgaggtggctaccctcaccaagctggtggacgacctccatcagctgtcgatgtccgacgagggggcgctggcctaccagaaaacctcactggatatcatcaccctgctggaagtggcggcgggcgcttttcgcgagcgcttcgccagccggcagctaagcattcaggtgtcgctcgcggagcaggcgatgatcttcggcgaccgcgaccgcctgatgcagctcttcaacaatctgctggagaacagcctgcgctataccgacagcggcggcagcctgcacatcaccgcccgccgcagcggccggatgctggtgattgacttcgccgacagcgcccccggcgtcagcgatgagcagctggcccgcctgtgcgaacgcttttaccgggcggaaggatcgcgcaaccgcgccagcggcggctccggcctcgggctggcgatttgcctcaatatcgtagcggcccacggcggcaccctgcgtgccgaccattcgccttttggcggggttagcattaaagttgagttacctctggaacatgatttaccgagagacgtatga

SEQ ID NO: 209745 - DNA, 1416 bp, Klebsiella pneumoniae
atgacagacctcccggccagcgtgcgctggcagctatggatagtggcgttcggcttctttatgcagtcgctggacaccaccatcgttaacaccgccctcccctcgatggccaaaagcctcggggagagtccgctgcatatgcatatgattatcgtctcctatgtgttaacggtggcggtgatgctgccggccagcggctggctggccgaccgggtcggggtgcgcaatatcttcttcaccgccatcgtgctgtttaccgccggatcgctgttttgcgcccaggccagcaccctcgaccagctggtgatggcgcgggtgctgcagggagtcggcggcgcgatgatggtgccggtcggccgcctgacggtgatgaagatcgtcccgcgcgatcagtatatggcggcgatgaccttcgtcaccctgccgggccaggtcggcccgctgctcggcccggcgctgggcggggtgctggtggagtacgcctcctggcactggatcttcctcatcaacatcccggtggggatcgttggcgcgatcgccaccctctgtctgatgcccaactacaccatgcagacccggcgcttcgatctctccggctttctgctgctggccgccggaatggcgaccctgaccctggcgctcgacggccagaaagggctcggcatttcccctgcctggctggcggggctggtggccgtcggcctctgcgccctgctgctctacctgtggcacgcccgcggcaacgcccgggcgctgtttagccttaacctgtttcgcaaccgcactttctctctcggcctcggcggcagcttcgccggacgcatcggcagcggcatgctgccgtttatgaccccggtgtttctgcagatcggcctcggcttctccccctttcacgccgggctgatgatgatcccgatggtgctcggcagcatgggcatgaagcggatcgtggtccaggtggtcaaccgctttggctaccgtcgggtgctggtcgccagcaccctgggcctggcggcggtcagcctgctgtttatgtttagcgccctggccggctggtattacgcgctgccgctggtcctgtttctgcaggggatgatcaacgccagccgcttctcctcaatgaataccctgacgctgaaagatctcccggacgatctggccagcagcggcaacagcctgctgtcgatggtgatgcagctgtcgatgagtatcggcgtgaccatcgccgggctgctgctggggctgtatggccagcagcatatgagcctcgacgccgccagcacccatcaggtctttctctacacctatctgagcatggcggcgatcatcgccctgccggcgctcatcttttcccgggtaccggatgacgtcggcagcaataccgtcctccgtcgacgcaacaggagtggatcgtga

SEQ ID NO: 209746 - DNA, 3078 bp, Klebsiella pneumoniae
gtgaagtttttcgccctcttcatttaccgcccggtggcgacgatcctcatctcgctggccatcaccctgtgcggcattctcggcttccggctgctgccggtagccccgctgccgcaggtggacttcccggtgatcatggttagcgcctcgctgccgggagcctcgccggagaccatggcctcgtcggtggccaccccgctggagcgctccctggggcggattgccggggtcaatgagatgacctcctccagctcgctgggcagtacgcgcatcattctcgagtttaacttcgaccgcgatatcaacggcgcggcgcgcgacgttcaggcggcgatcaacgccgcgcaaagcctgctgccgagcggaatgcccagccggccgacctatcgcaaagccaatccgtcggatgcgccgatcatgatcctgacgctgacctcggacacctactcccagggtgagctgtatgatttcgcctccacccagctggcgcagaccatcgcgcagatcgacggcgtgggcgatgtcgacgtcggcggcagctccctgccggcggtgcgcgtcgacctcaacccacaggcgctgtttaaccagggcgtgtcgctggacgcggtgcgcaccgccatcagcgacgccaacgtgcgcaaaccgcagggggcgctggaggacagcgcgcaccgctggcaggtgcagaccaacgatgagctgaagaccgccgccgactatcagccactgatcgtccactatcaaaatggcgccgcggtgcggctgggagatgtcgctaccgtctcggattcggtgcaggacgtacgcaacgccgggatgaccaacgccaaaccggcgatcctgctgatgatccgcaaactgccggaagccaatatcattcagacagtggacagcatccgcgcccgcctgccggagctgcagcagaccattccggcggctatcgacctgcagatcgcccaggaccgctcgcctaccatccgcgcctcgctggaggaggtggagcagacgctggtgatttcggtggcgctggtgatcctcgtggtgttcctgttcctgcgctcggggcgcgccacgctgatcccggccgtcgccgtcccggtttccttaatcggcaccttcgccgcgatgtatttgtgcggcttcagcctcaataacctgtcgctgatggccctgaccatcgccaccggcttcgtggtggatgacgctatcgtggtgctggagaatatctcccgccatctggaagcggggatgaaaccgctgcaggcggcgctgcaggggagccgtgaggtcggctttaccgtgctctcgatgagcctgtcgctggtggcggtgttcctgccgctgctgctgatgggcggcctacccggccgcctgctgcgcgagttcgccgtcaccctgtcggtggcgatcggcatctcgctggcggtctccctcaccctgacgccgatgatgtgcggctggctgctgaaaagcggcaagccccaccagccgacgcgcaaccgcggctttggccgcctgctggtggccgtgcagggcggctatggtaaatcgttaaaatgggtgctgaagcatagccgcctgaccggcctggtggtgctgggcaccatcgccctcagcgtctggctctacatttcgatcccgaaaaccttcttcccggagcaggacaccggggtgctgatgggcggcattcaggccgaccagagcatctccttccaggcgatgcgcggcaagctgcaggactttatgaagatcattcgcgaagatccggcggtggataacgtcaccggctttaccggcggctcgcgggtcaacagcgggatgatgtttatcaccctcaagccgcgcgaccagcgccacgagacggcgcagcaggtgatcgaccggctgcgcaaaaagctggccaacgagcccggggccaacctgttcctgatggcggtgcaggatatccgcgtcggcggccggcagtcgaacgccagctatcagtacaccctgctgtccgacgacctgtcggcgctgcgcgagtgggagccgaagatccgcaaagcgctggcggcgctgccggagctggcggacgtcaactcggatcagcaggacaatggcgccgaaatggacctggtctatgaccgggataccatgtcgcgcctcggcatcagcgtccaggacgccaacaacctgctgaacaacgcctttggccagcggcagatctctaccatctaccagccgctcaaccagtataaggtggtgatggaggtggatccggcctacacccaggacgtcagcgccctggataagatgttcgtcattaacagcgacggcaagccgatcccgctggcctacttcgccaaatggcagccggccaatgccccgctgtcggtgaaccaccaggggctgtcggcggcatccactatctcctttaacctgcccaccggccgctcgctgtcggaagccagcgaggccattgaccgcgcgatgacccagctcggggtgccgtcgagcgtgcgcggctcctttgccggtaccgctcaggtgttccagcagaccatgaacgcgcaggtgatcctgatccttgcggctatcgccacggtctatatcgtgctgggggtgctatatgagagctatgtgcatccgttgaccatcctctcgacgctgccctccgccggggtgggcgctctgctggcgctggagatcttcgatgccccgttcagcctaatcgccctgattgggattatgttattaattggcatcgttaagaaaaacgccatcatgatggttgattttgccctggaggcgcagcgcaacggcaacctgacgccggaagaggcgattttccaggcctgcctgctgcgtttccggccgattatgatgaccaccctcgccgcgctgttcggcgccctgccgctggtgctctccgggggcgatggctctgagctgcgccagccgctggggatcaccatcgtcggcggtctggtgatgagtcagctgttaacgctctacaccacgccggtggtctatcttttctttgaccgtctgcggctgcgtttttcgcgtcactcctctcaaccggtaagcgaataa

SEQ ID NO: 209747 - DNA, 3123 bp, Klebsiella pneumoniae
atgcaggtgttacctccaggccgcaccggcggcccgtcccggctgtttattatgcgtccggtggccaccactctgctgatggtggctatcctactggccgggatcatcggctaccgctttctgccggtctccgccctgccggaggtcgattacccgaccattcaggtagtcaccctctatccgggcgccagcccggacgtggtgacctccgccatcaccgccccgctggagcgccagttcggccagatgtcaggcctcaagcagatgtcgtcgcaaagctccggcggcgcctcggtagtcacgctgcagttccagctgaccctgccgctggacgtcgccgagcaggaagtgcaggcggccattaacgccgccaccaacctgctgccgagcgatctgcccaacccgccggtctacagcaaggtgaacccggcggatccgccgatcatgactctcgccgtcacctcctccgccatcccgatgacccaggttgaggacatggtggagacccgggtggcgcagaagatctcccaggtttccggcgtcggtctggtgaccctcgccggcggccagcgcccggcggtgcgggtgaagcttaacgcccaggccatcgccgccctcggcctgaccagcgaaaccgtgcgcaccgctatcaccagcgccaacgttaactccgcgaaaggcagcctcgacggcccggcccgcgcggtgacgctttccgctaacgatcagatgcagtccgctgaggattatcgccggctgattatcgcttatcagaacggggcgccgatccggctcggcgatgtcgccagcgtcgaacaaggggccgaaaacagctggctcggggcatgggccaaccagcagcgggccatcgtgatgaacgtccagcgccagccgggggccaacatcatcgacaccgccgacagcattcgccagatgctgccgcagctcaccgagagcctgccgaaatcggtgaaggtgcaggtcctctccgaccggaccaccaacatccgcgcctcggtgcgcgacacccagtttgagctgatgctggccatcgccctggtggtgatgatcatctacctgtttctgcgcaacgtgccggcgaccattattcccggcgtcgcggtgccgctgtcgctggtgggcactttcgcggtgatggtgttcctcgacttctcgatcaataacctgacgctgatggccctgaccatcgccaccggcttcgtggtggatgatgccatcgtggtgatcgagaacatctcgcgctatatcgaaaaaggcgagaaaccgctggccgccgcgctgaagggcgcgggggagatcggcttcaccatcatctccctcaccttctcgctgatcgcggtgctgatcccgctgctgtttatgggcgatatcgtcggccgtctgttccgcgaattcgccgtcacccttgccgtcgctattcttatctcggcggtggtctccctgaccctgacgccgatgatgtgcgcccgcatgttaagccacgaatcgctgcgcaagcagaaccgattctcgcgggccagcgagcgtttcttcgaacgggtgatcgccgtctatggccgctggctgagccgggtgctgaaccatccgtggctgacgctcggcgtcgccctgagcaccctggcgctgtcgattatcctgtgggtctttatcccgaaaggctttttcccgatccaggataacggcattatccagggtaccctccaggcgccgcagtcggtctccttcgccagcatggccgagcgccagcggcaggtggccagcattatccttaaggatccggcggtggagagtctgacctccttcgtcggcgtcgacggcaccaacccggcgctgaacagcgcccgtctgcagatcaacctcaagccgctggatgaacgcgatgaccgcgtccagacggtgattagccgcctgcagcaggcggtggacggcgtcccgggcgtggcgctctacctgcagccgacccaggatctcaccatcgacactacggtgagccgcacccagtaccagttcaccctgcaggcaaactccctcgaggcgctgagcacctgggtaccgccgctgctcagccgtctgcaggcccagccgcagctggccgacgtcagcagcgactggcaggacaaaggcctggccgtctatatcaaggtggatcgcgacagcgccagccgcctcggtatctcaatggccgatgtcgataatgcgctgtacaacgccttcggccagcggctgatctccactatttacactcaggcgaatcagtatcgcgtggtgctcgagcaggataccgaggcgacgccgggcctggcggcgctggagaatatccgcctcaccagcagcgacggcggcatcgtgccgttgaccgccatcgccacggtggagcagcgctttaccccgctgtcagtgaaccacctcgatcagttcccggtgaccactatctcgtttaacgtcccggacaactactcgctgggcgaagcggtggaggcgatcctcgccgccgaacagtcgctggatttcccgaccgatattcgcacccagttccagggcagctcgctggccttccagtcggcgctcggcagcaccgtctggctggtggtcgccgcggtggtggcgatgtatatcgtgctgggggtgctgtacgagagctttatccatccgattacgattctctccaccctgcccaccgccggggtcggggcgctgctggcgctgtggctggcgggcagcgagctggacgtgatcgccatcatcggcatcattctgctgatcggcatcgtgaagaagaacgccatcatgatgatcgacttcgcgctggccgctgagcgcgagcagggcatgccgccgcgggaggcgatctaccaggcctgtctgctgcgttttcggccgatcctgatgactaccctcgccgccctgctcggcgccctgccgctgatgctgagcaccggcgtcggcgccgagctgcggcgtccgctggggatcggcatggtcggcggtctgatgctcagccaggtgctgaccctgttcaccaccccggtgatctatctgctgttcgaccgcctgtcgctgcacctgaagcgccgcttcccgcgtcaggaagaggaggcgtaa

SEQ ID NO: 209748 - DNA, 1239 bp, Klebsiella pneumoniae
atgaaaggcagtaacatacgtcgttggggcgccgcgctggcggtagtgattatcgccggggccgcctactggttctggcacgatcgcgggacgagcggcagcggggctcccgccgccgggcagggcccgcaggggccgggcggcgcacgccatggccgctttggcgccgcgctggcgccggtgcaggcggccaccgccaccgaagaagcggtcccgcgctatctcaccgggctgggtacggtgacggcggccaacaccgtcaccgtccgcagccgggtcgacggccaactgctgagccttcacttccaggagggtcagcaggtcaaagccggcgacctgctggcgcagatcgaccccagccagtttaaagtcgctctcgcccaggcgcagggtcagctggcgaaagatcaggccaccctcgccaacgcccgccgcgatctcgctcgttaccagcagctggtgaagaccaacctcgtctcccgccaggagctcgacactcagcagtcgctggtggtggaatccgccggcacggtgaaagctgatgaagcggccgtcgccagcgcccagctgcagctcgactggacccgcattaccgcgccaattgacggccgcgtcggcttaaagcaggtcgatatcggcaaccagatctccagcggggataccaccgggatcgtggtccttacccagacgcacccgatcgacgtggtctttacccttccggaaagcagcatcgccacggtggtgcaggcgcagaaagcgggcaaaacgctcagcgtcgaagcctgggatcgcaccaataagcagaaaatcagcgtcggcgagctgctgagcctcgataaccagatcgatgcgaccaccgggaccatcaagctgaaggcgcgctttagcaatctggacgacgcgctgttccccaatcagttcgttaacgcccgcctgctggtggacacccagcagaacgcggtggtgatccctgccgccgcgctgcagatgggcaacgaagggcatttcgtatgggtgctgaacgatgagaataaggtcagcaaacacagcgtgacgcccggcatccaggacagccagaaagtagtcatcagcgccgggctttccgccggagatcgcgtggtcaccgacgggattgaccgcctgaccgagggagcgaaggtagaagttgtcaccgccagcagcggcgagcagacgcagcccgccccgcgccagagcggtaaacacggagcgcgttcctga

SEQ ID NO: 209749 - DNA, 1275 bp, Klebsiella pneumoniae
gtggcaaacgcaaacaaactcacgctcttcatcgtcgtttttatgctgatggggatcctctccggcgcggctatccatgcctacgcgacgccaaccaccgtttccgcctgggcggacaacattacgctgcttaccgatctgtttctgcggttgatcaaaatggtcatcgcgccgttggtgttcagcaccctgacggtcggcattatgcgcctcggcgagacggcgaccatcggccgggtaggcggcaaggcgatggtctggttcatcacctcctcggtattatccattctcgtcgggctggtgatcgtcaccttccagcacccgggcgccgggttaaacctggcggtgccgaaagaggcggtggataccggcctggcggtcagcggcatgagcctgaaagggttcctgtcgcacaccatccccaccagcatcaccgaggcgatggccaacaacgagatcctgcagatcgtggtgttctcgatgttcttcggcatcgccggcgcgtcgctgggggagaagtttaatgctccgctggtggcggcccttaacgtggtgtcgcacattatgctgaaggtgacgggctatgtgatgtacgttgcgccgctggccatcttcgccgccatctcgtcggtgattgcctcccaggggctggggatcctgctcaactatgcttcattcatcggcggctactacctggcggtgctgttgaccagcgcggtgctgattgccgtcggctatatggtgctgaaaaaagaggttttccgcctgctgaacatgctgaaagatccggtgctggtggcctttaccaccagcagctcggaagcggcctatccgaagacccttgagcgactggtgaagtttggctgctcgcgcaatatcgtctcgttcgtcctgccgattggctactcgttcaacctcgttggctcgatggtctactgctccttcgccgcgatgtttatcgcccaggcctataacgtgccgctgagctttagcgagattacggtcatgatgctgaccctgatgctggcctcgaaaggtatcgccggggtgccgcgttcggcgctggtggtgctggcggcgacgatccccagcttcaatataccggtcgccgggatcctgctgctgatgggtatcgaccatttcctcgacatggggcgctccgccatcaacgtgctgggtaatggcatcgccaccgcgatgctgtcgaaaaatgaagggttgctgaccgacgaggaagcgcagccggactgggaagtggagaaagcggaagcctga

SEQ ID NO: 209750 - DNA, 612 bp, Klebsiella pneumoniae
atgagaaacattaatgtcaccatcaacacccgcaacgcctttgtccgtgaatcgctggtagccatggtcaatgacctcacccggggcgatctgcgggcgcgtttttcctggcgtaacaccgatctgtcagctgaagatatcattatctgcgaagtgatccccggggaaatatacctatgtaataccctgattaagaacagaaaaagaggaagctcgctgattattctccatagctatgaccagctgccggaagatgagttcatgattaattgcctgaaaggggtcatttttgtttcgctaaaaacggccagtattccgcaattgctgacgatcattaaaagcgagctccagcattgtatgacccccacggctaccgacgccgcaggccgggaactcagctgcgccagctgtccgcatcgcgtgttatcgcgatcgcagaccgccgtagcgcacggtattctcgaagggctggatatgagtaaaatcgccgccctgcagcgtgtgagtccccgcaccgccgcctatcataagaataagatcatggaaaaatacagcctgaataataatcatgaatttttccagtttatgaatcttttacgtgagcgctggtag

SEQ ID NO: 209751 - DNA, 141 bp, Klebsiella pneumoniae
atggccatgcaaacgtggttagttttattgctatgcatttttttcttcagcatctctgtatacagttttatttcctatctgaaagacaggaggcggcagaaatttacttttaacgataagcgttcgatgcgtcgtaaataa

SEQ ID NO: 209752 - DNA, 702 bp, Klebsiella pneumoniae
atggctttacggctggcgataattgaagataacgccgatctgctggatgaactgctggcctggctgggctatcgcggcttcgaggtgtgggggacgcgcagcgccgaagccttctggcggcaactgcacagccatccggtggatatcgtgctggttgatatcggcctgcccggcgaggatggcttcagcgtactgaactatctgcatgagctggggcactacggtctggtggtggtcagcgcccgcggtcagcaacaggataaactgcaggcgctgagccttggagccgatgcctatctgatcaaaccggtaaacttcgcccatcttgccgagaccctcaccgccctcggcgcgcgtctgcgccaggaccgtccggcggctccgcctgcggaggcgatcggcacgccgccggccgtctcccccggcagctggcgtctgcaagaggataaactgatttcacccgacgcccggacgctggaattaacccagcaggaatatcgcctggtagagctcctgatgcgcaatcgcaacgaagtgtgcagcaaactggatctccatgcctgcctgttttcccatgaaagcgagcctgacctgcaccggatcgacgtggtggttagccgcctgcgtcacaaggcacgtcagcaggggatccacctgcccgttcgcgcaatctttggtaagggactggcctttatttcctga

SEQ ID NO: 209753 - DNA, 1857 bp, Klebsiella pneumoniae
ttgctgctggtcgccccgcaggcgcaggcggcgacgcgccaggtggggattgatattccggtccagtggtacgccgacgacagcggccagatgaccctcgatcgctttgccgccctgcccacagaccagctcgccaccacccggcagatcccctcctttggttattcgcgaaaaacctggtggctgcgcagcgagctgccgggcacgtggtttgccggggagccgcgttggctgcagctgggccccactttcgtcgaccatctgaccatttactaccggccgctgggcagcgatggcccgtggacgcagcgcatctttggcgatcgcgacggcgcccgcggaagcgatctgcattatcgggaaagggtgctgatactgccccctccgccaaccgccgccggctatgagctggtctttcgcctgcagagcaccagcaccctgatcctgctggcctcgctctcctctgcgcaagcgtttgtgcagcgggccaccgctgacaccgctttctggagcttctacttcggcctggccgctgtcgccagcggcgtggcgctttggctggcgctggccctgcgccggcgtctgctatgggggatctgtcttttctcgctcaattatccgctggtggccgccctgcacggcttcccggagtggttcttcggccacgccgcgctgcccttccaggattttatgatcagtagcctctcgctgttcagctatgccaccgccctctggctgcacagcgagatttttgatctgaagaagaatatgccgcgacttcatcagctgctgatcgccgccgtgatactcaacctggtgctgcaggtcagtattccactcgggttttacggcttcgcgatgcagattgaaggggtagtattcatcattatcaccccggtgctgctgttcacctcctggtggctgtggcgcaaaaaagctatcgaccgtaccaccctgctgctgggtctgctgccgccgttctatgtcgtcgccgcggtgctggtgcagttgtcgatccatgggattatcccgttccatatggcgatctattccctctggcagtacgcgctgatcgtccacatcattacggtgctgatcattgccatcctgcgggtgcgtgctgaaaaccgccagctggagcagaagcagcgcctggcgcgcgaactgcagattgagcgtgaggccagcttccaccagcggcagtttatgggcatggtggcgcacgaatttcgcaccccgctggcggtgatccaggcggcgctggagaatcttcgcctctcggcggcctcgaccagccaggaggcgcgcttcgatcgcatcggccgcgccgccacccgcctggtgcagctcaccgataactgccttgccgacgcccggctcgcctcccacgatctgcacgtcgagcgccagcagaccgccctgctgacggtgatcaacatggccgcctcggtggtggccatctcccatgatcactacctgaacatccgccagcacggagcggtggaaagcccgcagctgcaggccgatgccggcctgctgtgcatcgccatcgctaatctgctggataacgccgtcaagtattcgccccccggtgaaatcgccatcgatattcattccgatgccgggcaaacggagctacgcattcgcgaccacggcccgggactccccgccggacaggcggaactgatctttgagcgctaccgccgcggcgagcacacatcgccggtgccaggcggcaccggtctcggactgtatgttgcgcgtcagatagtgcaggctcatgatggcaaactgtggctggccgagcatggcccggacggctgcacctttattctcaccctccccacggttgcttaa

SEQ ID NO: 209754 - DNA, 1353 bp, Klebsiella pneumoniae
atgtttattggttttgactacggcaccgccaactgttcggtggccgtgatgcgggaaaataccccccagctgttaacgctggaaaacggcagcgccctgctgccctccatgctctgcgcgccgacgcgcgaagcggtcagcgagtggctctatcgccatcatgatgtccccacccacagcgacgaaaaccaggcgctgctgcgtcgggccatcgccgccaaccgcgacgaagacatcgaggtgctgcgcaacagcgtgcagttcggtctcgcctccctgcagcagtatgttgaagatccagaagaggtctacttcgttaaatcgcccaaatccttcctcggcgccagcgggctgaagccgcagcaggtggccctgtttgaagacctggtctgcgccatgatgctgcatattaagttgcaggccgaaagccagctgcccgagcagatcgaccaggcggtgattggccggccgattaacttccagggcctcggcggcgatgaggcgaacgcccaggcgcaggggatccttgagcgggccgcccaccgcgccggtttccgcgatgtggtctttcagtttgaaccggtggccgccgggctcgatttcgaagcgaccctcagtgaagaaaagcgggtgctggtcgtcgatatcggcggcggaaccaccgactgctccctgctgctgatgggcccgcagtggcgggagcgcgccgaccgccagcagagcctgctcggccacagcggctgccgcatcggcggtaacgatctcgacattgccctggccttcaaatgcctgatgccccttctcggcatgggcggcgaaacggagaaaggcaccgcgctgccgatcctcccgtggtggaacgcggtggcgatcaacgacgtgccggcgcagagcgatttttacagcaccgccaacggccgcctgctgaacgatctgctgcgcagcgcccgggatgccgacaaggtggctctgctgctgaaggtctggcgccagcgtctcagctatcgtctggtgcgcagcgccgaagagagcaaaatcgccctctccagcgccgccagcgtcgaaaccgcgctgccgtttattcaggacgatctggccaccgccatcgcccagcagggtctggaagccgcgctggatcagcccctgacccgcattatggaacaggtgcggctcgcgctcgacagcagccagaccaccccggatgtgatctatcttaccggcggcagcgcccgttcgccgctgatcaaaaaggcgctggccgctcagctgccgggtattccgctggccggcggcgatgattttggctcggtgaccgccgggctggcccgctgggcgcaggtagttttccgctag

SEQ ID NO: 209755 - DNA, 849 bp, Klebsiella pneumoniae
atggtgctgttaccctggaccccgccctatgactgggcgtggatggttggttttctgcaggcgcgcgcggttgccggcgtcgagcgttttcacgatgggggctacagccgcagctttggcgtggaaggccaccgcgggctgattcatctgacgccggacgaagaggcgcagggcctgcgggtgagcctttccccgggactgcagccggtagcggagatctgctatgcgcgaattggccagctgtttgatttagcctgcgacccacgacaggtcgctcgcacgctgggcgatctggcgcaggcgcggccggggctgcgcctgccgggagcgctggatgccttcgagcaggcggtgcgcgcggtgctgggccagctggtgagcgtggcgatggccgcccggctcaccgccaaagtggcggctggctggggcgaaccgctggcggaggcgcctggatatgtcttgttcccgacgccagaggcgctgtcccgggccgatccgcaggcgctgaaggcgctggggatgccgctgcgacgcgcggaggcgctgatccacctcgcccgggcggcgctcagcggcgagctgcccctgacggcgccggcggatatcgacgccgggctgcgtcaactgcagaccctgcccgggattggccgctggacggcaaactactttgccctgcgcggctggcaggtgaaagatatctttttgccggatgattacctgattaaacagcgctttccgggaatgaccccggccgccatcgcccgctatgcccgccgctggcagccgatgcgatcctacgcgctgttgcatatctggtataccgatgactgggcgccggcggcggaatag

SEQ ID NO: 209756 - DNA, 642 bp, Klebsiella pneumoniae
atgactgatatgtcccatcagtgcgtcattgtaggcatcgccggcgcatcggcttctggcaaaagtcttatcgccagtactctctatcgcgaattgcgtgaacaagttggcgacgaacatattggcgtcattccggaagacagctattacaaagatcaaagccatctgtcgatggaagagcgcgtcaaaaccaactatgaccacccgagctcaatggaccacagtctgttgttccagcatttgcagatgctgaaaagcggccagccgattgaactgccggtctatagctacgtcgagcatacccgcacgccgaacaccattcacgtcgagccgaagaaggtgattatccttgaagggatcctgctgctgaccgacgcgcgcctgcgtaacgagctcaacttctctattttcgtcgacaccccgctcgatatttgcctgatgcgccgtattaagcgcgacgttaatgagcgcggccgctccatggactcggtgatggcccagtatcagaaaaccgtgcgcccgatgttcctgcagtttattgaaccgtcgaagcagtatgccgacatcatcgtgccgcgcggcggcaaaaaccgcatcgctattgatattctgaaggccaaaatcagtcagttctttgaataa

SEQ ID NO: 209757 - DNA, 582 bp, Klebsiella pneumoniae
atgcgtctgtgtgaccgagatatcgaagcctggttggatgaagggcgactcgccatcaatccgcgtccgcccgttgagcgtattaatggcgcgacgattgatgtacggctgggtaataaattccgcaccttccgtggccacacggcgccgtttatcgatttaagcggcccgaaggccgaggtcagcgccgcgctggaccgcgtgatgagcgaagagatcgtcctgccggaaggggaggcctttttcctgcatccgggcgaactggcgctggcggtgacctacgagtctgtcaccctgcctgccgacctggtaggctggctggacggacgctcctcgctggcgcgcctggggctgatggtgcacgttaccgcgcaccgtatcgatccaggctggtccggctgcatcgtgcttgagttctacaactccggcaagctgccgctggcgctgcgcccggggatgcccatcggcgcgctgagctttgaaccgttatcgggcccggcggcccggccgtataaccgccgtgaagacgccaaatatcgcgaccagcagggtgcggtggcgagccgaatcgacaaggattga

SEQ ID NO: 209758 - DNA, 1848 bp, Klebsiella pneumoniae
atgagacgaatactgacaacgctgatgatcctgctggcggtcattgtcgccgggcttacctcgttggtattgctggtcaatcccaacgattttcgcgcctatatggtgcatgaggtggcagagcgcagtggttatcagcttgaccttgatggcccgctgcgctggcacgtctggccgcagctcagcattctcagcggacggatgacgctgaccgcccgaggcgccgaagagccggtgatccgcgccgacaatatgcgcctcgacgtggcgctgctgccgctgctctcgcatcagctgcaggtgaagcaggtgatgctcaagggcgcggtgatccagctgaccccgaaaaccgaggcggttcgcgacagctcagcgccggtggtgccgcatgataacaccctgccgctggccccggaggatcgcggatggtcctacgatgtgcgtcagctgcaggtggccgacagcgtgctcttcttccagcacgagaacggcgagcaggtgaccgtgcgcgatatccgtctgcagatggagcaggatgagaatcaccgggccaccgtggatttctccggccgggtgaaccgcgaccagcgcgacctggcgctgagcttctccgccaccgtgcagggcggcgattatccgcactccttaaaagccgactttacccagcttagctggcagctgcgcggcgccgagctcccaccggacggcattaatggtcagggaagtctgcaggccagctggcaggaagatgacaagaccctgcgttttgacaacctgaatctgatggctaaccgcagcaccgttaccggcagcggcagcgtggtgctgggggatcgcccggactggtcgctggatttgcacgccaccactctcgatctcgatagtctgctggcgcaaaggtcgccggcgacggacagtagcgccagtcagcagggccagagtcagacgcgaccgctgcgcccggtgatcgccgacagcgatgagcgcgaagattaccagagcctgcgcggcttcaacggccgaatggccctgagcgccgaccagctgcagtggcgcggtctgaactttacccaggtgcagagcgaaatcagcaaccagcaggggctgctgacggtcagcaaaatgcagggcaatcttgatggcgggcagctctctctccctggcaccctggatgcccgcggcgacacgccgctggcgacgttccagccggcgctgcagaatgttgagatcggttcgctgatcaaagcctttaactattccttaaacctgaccggcaagctgtcgctgagcggcgaattttccggaacgcgcattgacgccgatgatttccgtcgccactggcagggacaggctcagctccagatggccgatacccgcaccgaagggctgaacttccagcagctggtgcagcaggccgtggagcgcagcaccaacgtgcgggcgcaggaaaattacgacaatgccacccgcctggattccgtgagcagccggctgacgctggataacgggctggtgacgctgaaccgcctgcaggggcagtccgacgtgatggcgatgaccggcgaaggacagctcgatctgcagaaagagaactgcgatatgcgcttcaacgtgcgcgtgctcggcggctggaaaggggagggcaagcttatcgaccgcctgaaacagaccgctatcccgctgcgcatctacggcgagtggcaatcgctgagctacagtctgcaggtcgaccagatcctgcgcaaacagctgcaggatgaagcgaagcagcgcctcaacgactgggttgagcgtaataaaggcagcaaagacggcaacgatgccaaaaagctgctcgataagctgtaa

SEQ ID NO: 209759 - DNA, 1584 bp, Klebsiella pneumoniae
atggaatggattgccgatccgtcaatctgggcaggtctcgtcacgctggtggttatcgaactggtgttgggtatcgataacctggtctttatcgctatcctcgccgagaaactccctcccgcccagcgcgaccgcgcgcggatcactggcctgatgctggcgatggtcatgcgtcttctgctgctggcctctatctcctggctggtcaccctgaccaaaccgctgattgtttttcacgacttcagctttagcgcccgcgatttgattatgctgtttggcggcctgtttctgctgtttaaagcgaccgtcgagcttaatgagcggctggaggggaaagacagcgataaccccacccagcgcaaaggggcgaaattctgggccgtcgtggcgcagatcgtggtgctcgacgccatcttctcgcttgactcggtgatcaccgccgtcggcatggtcgatcacctggcggtgatgatggccgccgtggttatcgccatcagcctgatgctgatggccagcaaggcgctgacgcgcttcgttaacagccacccgaccatcgtgatcctctgtctgagcttcctgctgatgatcggcttcagcctgattgctgaaggcttcagctttatcattccgaaaggctatttatatgcggccattggcttctcggtcatgattgaagcgcttaaccagttggcgcagtttaaccgccgtcgcttcctctccgccaatatgacgctgcgtcagcgcactaccgaagcggtgatgaatttgctgagcgggcagaaagaaaaagctgaactggatgctgacacggcgtcgctggtcgccgatcaggatcaacatccactgtttaatccgcaggaacgactgatgattgagcgggtgctgaaccttaatcagcgcagcgtcagcagtattatgacgtcgcgccatgatatcgagcgcatcaaccttagcgcgccggaggaagagatccgcagcctggtggagaaaaatcagcatacccggctggtggtcaccggcgggaaagataatgaagatctgctgggcgtggtgcatgttattgacctgctccagcagtccctgcgccaggagccgctggatctgcaggcgctggtgcgtcaaccgctggtcttcccggagggcctgccgctcctctcggcgctcgagcagttccgccaggcccgcacccattttgcctttgtggtcgatgagtttggctccgtcgaggggattgtgaccctcagcgacgtgatggagaccatcgccggcaatctgcccaatgaggtggaggagatcgatgcccggcacgatattcagcatcatcaggacggttcatggacggtcaatggccatatgccgctggaggacctggtgcagtacgttccgctgccgctggatgataaacgtgagtatcacaccgttgccggtctgttgatggagtatttgcagcatgtgccgcaggtgggggagaccattgagattgacggttatacgctgcgcacgctgcaggtcgacagccatcgggtgcagaaggtgcagatcgtcccgccggtaaagcaggatgagctggattatgaggtgtaa

SEQ ID NO: 209760 - DNA, 897 bp, Klebsiella pneumoniae
atgaatatggcgaatttgaaagcggttattccggtcgcaggactaggcatgcatatgctgccggccacaaaggcaattccaaaggagatgctgccgatcgttgataagccaatgattcagtacatcgttgacgaaatcgtcgccgccgggatcaaagagattgttctggtgacgcactcctcgaagaacgcggtggaaaaccacttcgacacctcctacgagctggaagccctgctggaacagcgcgtgaagcgccagctgctggcggaagtgcaggccatttgcccgccgggcgtgaccatcatgaacgtgcgtcaggcgcagccgctgggcctgggccactccatcctctgcgcccgcccggttgtcggcgacaacccgtttgtggtggtcctgccggatatcatccttgacggcggcaccgctgacccgctgcgctataacctcgccgctatgatcgcccgctttaatgagaccggccgcagccaggtgctggcgaaacgcatgccgggcgatctctccgaatactccgtcatccagaccaaagagccgatggtggctgaaggccaggtggcgcgtatcgtcgagtttattgaaaaaccggacgagccgcagaccctggactccgatctgatggcggtggggcgctacgtgctgtcggcggatatctgggccgaactggaacgtaccgagccgggcgcatggggccgtatccagctgaccgacgccattgccgaactggcgaagaagcagtccgtcgacgcgatgctgatgaccggcgaaagctacgactgcgggaagaaaatgggctacatgcaggccttcgtcacctacggcatgcgtaacctgaaagaaggcaccaaattccgcgaaagtattaaaaaaatgctggcctga

SEQ ID NO: 209761 - DNA, 630 bp, Klebsiella pneumoniae
atgaactggcaactcatctcattttttggcgatagcactgttttgctgcccagcgcagcggcgctgtttattgtcctgatgctgcgtaaaacgtcgcggttgctggcgtggcaatggagtttgctgttcggcatcaccggcgctatcgtctgcgcctccaaactggcctttatgggctggggtctgggtattcgcgagctggattacaccggcttcagcggccactccgcgctctccgcggccttctggcctatcttcctgtggctgctcagcgcccgtatctccgtcggtctgcgtaaagtggccgttattaccggctatgttctggccgccgtggtgggctattcgcggctggtcatccatgcgcattccgtctcggaagtgattgccggcctgctgctgggcgctgctggcagcgctttgttcctggtgttgcaaaaacgtacctctgatccggaaagcgtgaatatctcatggggcggtgtcgcatgcctggtgatggttccacttatccttttacatagcggcagcaaagcgccgactcagtccctgctgggacaaatcgccaccgcggtggggccgctggataaaccctttacgcgtaccgatctgcacaagcaggcctggtaa

SEQ ID NO: 209762 - DNA, 1434 bp, Klebsiella pneumoniae
atgataaaaattgcgcgcattgccgtgacgctgggcttgctttcctcactgggagtccaggcttacgcggccgggttagtagtaaatgataatgatctccgtaacgacctcgcctggctttccgatcgcgggatcatccatctgagcttgtcgacctggccgctgagccaggaagagatcgcccgggcgctaaaaaaggccaaaccttcctattcctctgagcaggtagttctggctcgtatcaatcagcgactgtcagcgttaaaagccgatttccgggtcaccggctatacctcgaccgaccagccgggcaccccgcaggggttcggtcagacgcagccggcagataactcgttaggcctggcgttcaacaacagcggcgagtggtgggatgtccatctgcagggcaatgtcgaagggggagagcggatcagcaacggctcgcgcttcaacgccaacggcgcctacggtgcggtgaagttctggaaccagtggctctcctttggtcaggtgccgcagtggtgggggcctgggtatgaaggtagcttgatccgcggggatgcgatgcggccgatgaccggtttcctgatgcagcgggcagagcaggcggcgccggaaacatggtggctgcgctgggtaggcccgtggcagtaccagatctccgccagccagatgaatcaatataccgctgtgcctcatgccaaaattatcggcggtcgtttcactttctcacctttccagtcactggaattaggcgcgtcgcgcattatgcagtggggtggggaagggcgaccgcaatcacttagtagcttctgggatggctttacagggaaagacaataccggaacggataacgagccggggaaccagctggccggctttgactttaagtttaaactggagccaactctcggctggccggtcagtttctacggacagatgatcggtgaggatgaatctggttacctgccatcggcaaatatgttcctcggtggagtcgaagggcaccacggctggggaaaagatgccgtaaactggtacctggaagcacatgatacgcgcaccaatatgagccggaccaattacagctataaccatcatatctataaggatggttactatcagcagggctatccgctaggggatgcgatgggcggggatggtcaactcgttgccggtaaggtcgagctgataacggaggataaccagcgctggagtacgcgcatcgtttacgccaaggttaacccggagaaccagtcgatcaacaaagcattcccacatgccgataccttgaaaggtgtacagctaggctggagcggggatgtgtatcagtcggttcgtctgaatacctccctgtggtacaccaacgctaacaacagcgacagcgatgacgttggggccagcgcagggatagagataccatttagtttataa

SEQ ID NO: 209763 - DNA, 1134 bp, Klebsiella pneumoniae
atgaagaaaaaaattgttagattttcggcattagcgttggcaattgggtttttatcgggttgtaccattatccctggtcagggattaaacagtctgcgcaagaatgtggttgagctaccggacagcgactacgatctggataagctagtcaatgtttaccctatgactccagggctgatcgatcagcttcgtccagagaccgttcttgctcgtcccaacccgcagctggataacttacttcgtagttatgaataccgtattggagtgggtgatgtgctgatggttaccgtatgggaccatccggaactcacaacgcctgcaggtcaataccgtagcgccagtgacaccggtaactgggtgaactcagatggcaccattttctatccttatatcgggaaggtgcaggtggcgggaaaaacattaagccaggtacgccaggatatagcgagtcgcttgactacttatattgaaagccctcaggttgacgtgagtattgctgcattccgctcgcaaaaagcctatgtgactggggaggttgctaaatcaggacagcaaccgattacgaatattccgttgactgtcatggatgcaatcaatgctgcaggtggcttatcagaagacgctgactggcgtaatgtggtgctgacgcataatggtaaggacaccaaaatctcgctatatgcccttatgcagaaaggtgatttgacagaaaaccgcttgctgtacccaggggatattctgtttgtccctcgtaatgatgatcttaaagttttcgtgatgggtgaagttggtaaacaaagcacgatgaaaatggatcgtagtggtatgaccttggcagaagctttgggtaatgcagaaggcatgtcacaagctttcagtgatgcaacaggtgtttttgttatccgtcagctcaagggtgataaaaaaggcaaaatagcgaatatttatcaacttaatgcccaagatgcatcagctatggtattaggtacggaattccagcttcagccttatgatatcgtgtacgttactacagctccgctggtccgttggaatagagtaatatcacaattagtaccgacaattacaggagtacatgatattaccgaaacagttaaatacgttaaggatatgtga

SEQ ID NO: 209764 - DNA, 2157 bp, Klebsiella pneumoniae
atgtcatctctcattaataaaacttcatcgcgagactcagaaggtattgatctgggtcgccttctaggcgaatttatcgatcatcgcaaattaattatttcggtgacatcactttgtacattaatagcattaatttatgcaatatttgcaactcctatatatcaagctgatgctttaatacaagtagagcaaaaacagggaaatgcaatattaagcaatcttagccagatgcttcctgatagccagccacaatcagcaccagaaatagccttaattcagtcaagaatgattctagggaaaacagtagatgatcttaacttacaggcaaacattactcagaaatatttccctttatttggtcgtggttttgctaggataagtgatgccaaacctgcagagattactatatcacgattgttcgtatcgggaagcgataatgaaacgcccgagttgttattatctgttacgggggaaaaggatttcctaatcaatttcgacggtcattcttttaaaggtaagctaggtgagttaatcgaaagaaatggtatttcgcttaaaatagatgatattaacgctcctcctggaactgaatttataatcaaatatgtttcaagattaaaagcaatttcagaattacaggacaaactaacagtaaacgatcagggtaaagatacgggaatactgaatatatcattgactggggataatccagtattaattgaaaaaattgttaatagtatcgctgacaactatttagcacaaaatatagcaaggcaagcagctcaggatgcaaaaagtcttgatttcctgaataaacagttaccagaagtacgaagtgaattagatatagcagaaagtaaactaaatgaatatcggagacagagcgattcagtagatttatcgcttgaggcaaaatctgtacttgatcagatagttaatgttgataatcagcttaatgaacttacatttagagaatcagagatctcacagctttatacaaaagaacatccaacttacaaggcgttacttgaaaaacgaaagaccttgcaagatgaaaaggccaaactaaataaaaaagtatcaagcatgccagaaacgcagcaggaaattttgcgtttaagtcgtgatgttgagtcaggtcgagctgtatatatgcagcttttaaatcgacaacaagagcttagtattgctaaatcaagtgccatcggtaatgtaagaattattgataacgcagttactcaacctaaacctgtaaagcccaagaaaatattagttttattgattggagtagttattggtttaataatctcaatcggtcttgtactgttacgtgttttcttacgcagaggtattgaatctcctgagcaattggaagagttgggtatcaatgtttatgcgagtattcctgtatctgaaacatttgcaaaaaaaacaactcaaaagaattcatggaaaggaaaagacgatatacaaggctttttagcaattgagaatcctgctgatcttgcaatagaagcaataagaggattaagaactagtctgcacttcgctatgctagaatcaagaaataatattctgatgatttcaggggcaagtccaaatgcgggtaagacctttgttagttctaacctggcagctataattgctcaaactgggaaaaaagtacttttcattgatacagatatgcggaaaggttatacccataagctatttaatattcctaatgataatggcttatccgatgttttatcaggtaaaaaggatttttcctcttcagtcaaacatataccgatgcttggttttgatgtaataccgagaggcatggtgcctccaaatccggcggaattgcttatgcataaaagatttggagagttaatgtcatgggctgatcaaaattatgatatggttatattagatacacctcctattttagcagtaacagatgctgcaattattggtaattacgctggaactacgctattagtttcacgctttgaacttaatacggctaaagaaattgacatcagtattaaacgcttcgaacaaagcggtgtcccagtaaaagggtgtatactcaatggcgtagtaaaaaaagcaagtagctactatggctatggctataattattacggctattcttataaagataataagtaa

SEQ ID NO: 209765 - DNA, 1428 bp, Klebsiella pneumoniae
atggcgctcctcagtaggaattttttagttagcataatgcttgcattgtctgactttgctagttttgttatttccatgtatatagcaatggggattttatttttatcaataaataaccatgatgcatttgttgatactcaacaaatacaaggttggatagcactacattggttgcttgctgcttgttgtgtttgttggtattcaatgagattacgacattatttttaccgtaaaacattttggtttgaattaaaagaaatccttaggactttagtcatttttgctataattgaaatagcagtcgttgcctttacgacatggtcgttttcgcgatatatttgggtgctaacttgggctttagtactcatattagttccgatatcaaggatgctaacgaaacgaatattaaatacattaaatctttggcaacgagatacttggataataggtagcagtacaaatgcgaatgaagcttacaaagccataacaagtgagaggaatcttggtttaaatattgttggtttcattacgtgtgatggcggtgttcctgctggtggtaaaattgatggaataaatgttttaccaaatgatttgtcgtggctaccggctattgatgttaagacacaatttatagttgcggtggaatcgcatcaaagtgatatccgaaatgcatggttaagaaattttatgatcaaaggttatcgctatgtatctgtaattccgacattgcgtggtatgcctttagatagtactgatatgtcctttatttttagccatgaagtaatgatatttcgtgtacaacacaatttggcgaaatggtcttctcgtgtactaaaacgattatttgatatcgttggttcccttgtgattctttctatattgtctcccgctttattgtatattagtcgtaaggtcaaacaagatggtggacctgctatatatggacatgaacgaataggcaaaggtggaaaatcatttaaatgtttgaaattccgttcaatgataattaattctaaagaagttttggaagaattactcgcgaaagatgaagatgcaagaagggaatgggaatcaacctttaaattgaaaaatgatcctcgtattacaaaaattggtgcatttcttcgtcgaacaagtcttgatgagcttccacaactttttaatgttttaaaaggtgaaatgagtttagtcggtccacgtccaattataactgctgaattagttcgttataatgaagaagtggattattatcttttaagtaaaccaggaatgactggcctttggcaggtaagcggtcgtagcgacgttgactacgagactcgtgtttatcttgatgcgtggtatgtcaaaaattggtcaatgtggaatgatatagctattttatttaaaacaataagtgttgtgttaagaaaggacggggcatattaa

SEQ ID NO: 209766 - DNA, 909 bp, Klebsiella pneumoniae
atgaaatattatatcgcgattccaacatacaatggtggtgatatttggcgtgaagtggtgtcaaatattaaaaagtattcgacagatgaattgtttgttcatgttattgactcaggaagcgtcgattccacaaagttaattgctgaggaagctggttttgatgttacatgcatatcgagtaaggatttcaaccacggggggactcgaaatcaagcggtatacaaatacattaatgaatttgatatagtaatttttttaacacaagacgccattcctgaagatggcttcattgacaatataatttctgtatttaaaaatgaaaaggtggcatgtgcttacggtcgacaattgcctcatttttcggccaatcccctagcccaacatgcccgtgcgtttaattacccgaataaaagctatgtatgtggcaagaataatgtcagtgccttaggcttaaaatctgtatttatgtccaactctttttctgcatacaggctatcggctttcaaagaattagaaggatttccttcaaatactatcctctgtgaggatatgttttatgcagcaaaagcaatccttgcaggttatcaggtggcctatgcagctgatgccgtagtgcggcattctcacaattacaagccactggaagagttcaaacgttattttgatattggtgtttttcacgctcaagaaaaatggatacgtgaaaaaattggtggtgctggcggggaagggaaaaaatttattttatctgagatgaagtttttggttaaaaacgcgcctttatggattccattagcttgtattaataattgcatgaaattctttggttacaaattaggtcagaactatgcatccatcccattaaagttagtgagaatgttaagtatgcataagcgttactggtcgtaa

SEQ ID NO: 209767 - DNA, 897 bp, Klebsiella pneumoniae
atgcatcctgatgtttttgctattatagttacttataatcccgatgatggacttgaaggccgattgttggcgattcaaaaacaggtacgtaatatttgtataatcgataattcagaaaatcctgatgttatcaataatattaaatctattgctgaaagaaataatttatcataccaaggcgatggtattaatcatggcattgcatattctttaacacagggtgcaattactgctaaatcaaaaggttttaattattatttaacttttgatcaagattctacaattcctgatttatatgttgataacatgaaagaggctattaacactgacccaatgattggtattattggtcctgtatattatgacattaatgatgggaggtattcaagatttccagtcatgcataataaacttctggtcagaagagaagtgttttctgataatgaaggcataaaagatgcaatgtgtattataacatcgggcgcattatgtagaacttctatattcgatgaagtaggctattttttaaatgaatactttatagattatgttgataacgaattttgtctcaggctacttatttctggttacagagtgtgtgtgtatccgaaagttgttattcaacatgctcttggtaacaggaagaaaaaatttggtttttcgccaacgaattatccatactatagaaagtactatgtgacgagaaatcgtctacatgtatggaagaaatattttaaatattaccctgcatttattgcttatgatttttctgcgtttttgttagatctattcagggttgtttttcttgagaaggataaatttataaagattaagtcgatttttcttggtgtgaaagattttcttcatggcagatatggaaagatgaataatatataa

SEQ ID NO: 209768 - DNA, 762 bp, Klebsiella pneumoniae
atgaataaatatgttgtttatactgctctgtttggtgattatgatgatcttattgaacccaaaaacattgattataaatgtgattttatatgttttactaatcaggaaaacataacttcagataaatggaaaatcatttatgttaaagatgtcaacgacactgttttaaaaaatcgagaatataagtttctgccacatctttttctctcgcaatatgatgcaagtgtatatgtggattcaaatataaaaataattcaagatccagtaactctaatagaaaaatatattgagatctctcctgtttcggttcccaaacatttttcaagaaattgtatctataaggaagttgaacagtgtgttcttgagaagaaaatcactgaagaaaatggaagggatatgcttaatcttttaagtgctcattcctttccaaaagaatacgggcttggtgagaataacattatcattcgtaagcataatcataaagatgttattcgtcttatgaattattggtgggagtattttaatcaaggagctaaaagagatcaattaaccttattctttttatcatggaaacatggggtcccaatccagctcatggatgagacgtcaagaaataaaaataattactttagatatcatttgcataaaaacgaaaaaaaattacccctcatgaaaaggagctatctttttatgaaggcaaacagacaacgagtttatttttatgattgcctatgcaagctttatttgtttttgaaaaaataa

SEQ ID NO: 209769 - DNA, 1407 bp, Klebsiella pneumoniae
atgtccaagcaacagatcggggtagtcggtatggccgtgatggggcgtaaccttgcgctgaacatcgaaagccgtggttataccgtctccgttttcaaccgctcccgtgaaaagaccgaagaagtgattgccgaaaactcaggcaagaagctggtcccttactatacagtacaagagttcgttgaatcccttgaaacaccacgccgtatcctgttgatggtgaaggccggggctgggaccgacagcgccatcgattccctgaagccttacctcgacaaaggcgacatcatcattgatggcggcaacaccttcttccaggacaccatccgtcgtaaccgtgaactgtctgccgaaggttttaactttatcggtaccggtgtttccggtggtgaagagggcgctctgaaagggccttccatcatgcctggtgggcagaaagaagcctatgagctggtcgctccgattctgaagcagattgctgcagttgctgaagacggtgagccatgtgtgacctatatcggtgctgacggtgctggccattatgtgaagatggttcataacggcatcgagtatggcgacatgcagctaattgctgaagcttatgcgctgttgaaaggcggtctggctctttccaacgaagagctagcgcaaaccttcaccgaatggaacgaaggtgaactgagcagctacctgatcgatattaccaaagatatcttcaccaagaaggatgacgagggtaaatacctcgtcgatgtcattcttgatgaagcggcaaacaaaggtaccggtaagtggaccagccagagctcactggatctcggcgaacctctgtctctgatcaccgagtccgtgtttgctcgttatatctcttcgcttaaagaccagcgtgtagccgcgtcgaaagtgctgagtggtccgcaggctcaaccggccggtgataaagcggaatttatcgaaaaagttcgtcgcgcgttgtacctcggtaaaatcgtttcctatgctcagggcttctcccagctgcgagctgcttctgatgaatacaactgggatctgaactacggcgagatcgctaagattttccgcgctggctgcataattcgtgcgcagttcctgcagaagatcaccgatgcttatgcgcaaaacgctgacattgctaacctcttgcttgcgccgtacttcaaacagatcgctgatgactatcagcaagcgctgcgtgatgtcgtggcttatgccgtgcagaatggtattccggtaccgacgttctctgccgcaattgcctactacgacagctaccgttccgcagttctaccagctaatctgattcaggctcagcgtgattactttggtgcgcacacctataagcgtaccgataaagaaggcgttttccatactgagtggttagattaa

SEQ ID NO: 209770 - DNA, 1065 bp, Klebsiella pneumoniae
atgaagattcttgtcaccggtggcgcaggctttatcggctctgctgtagttcgtcatatcattgaaaatacccaggatgaagtccgagtggtggactgcctgacctacgccggcaacctcgaatccctggcgccggtggccgggagcgaacgctactcgttttcccagactgatatcacggatgctgctgccgtggccgcccagttcagcgagttccgcccggatatcgtgatgcacctggcggcagaaagccatgtggaccgttccattgatggcccggcagccttcatccagaccaacgtgatcggcaccttcactctgctggaggcggcccgtcactactggtccggccttggggaagcgcagaagcaggccttccgcttccaccacatctccaccgatgaggtgtacggcgacctgcacggcaccgatgacctgttcaccgaagaaaccccgtacgcgccgagcagcccgtactccgcctccaaagcgggcagcgaccatctggttcgcgcctggaaccgcacctacggcctgccggtggtggtgaccaactgctccaacaactatggtccgtatcacttcccggagaaactgatcccgctgactatccttaatgccctggcgggtaaaccgctgccggtatatggcaacggggagcagatccgtgactggctgtatgttgaggaccatgcccgtgcgctgtacaaagtggcgaccgaaggcaagagcggcgagacctacaatatcggcggtcataacgagcgtaaaaatatcgatgtggtgcgcaccatctgcgccattctcgacaaggtggtggcgcagaagccgggcaacatcacccactttgctgacctgatcacttttgtcaccgaccgtccgggacacgacctgcgctacgccattgatgccgcgaaaattcagcgcgatctgggctgggtaccacaggagacgttcgaaagcgggattgaaaaaaccgtgcactggtatctgaacaaccagacctggtggcagcgcgtgctggacggctcctatgccggtgagcgccttggcctcaataactga

SEQ ID NO: 209771 - DNA, 870 bp, Klebsiella pneumoniae
atgaaaggtattgttctggccggcggctccggcacgcgtttatatccgatcacccagggcgtctccaagcagctgctgccaatctatgacaagccgatgattttctacccggtgtccgtcctgatgctggcgggcatccgcgacatcctgatcatctctacaccggacgatatgccctccttccagcgcctgctgggtgacgggtcgcagttcggagtgaacttcagctacgccatccagccgtcgccggacggcctggcgcaggcctttatcattggcgagaagtttatcggcaacgatgcctgcgccctggtgctgggagataatatctactttggccagagcttcggtaaaaagctggaagcggcggcggcgaagacctccggtgccacggtgtttggttaccaggtgctggatccggagcgcttcggggtggtggaattcgatgagaactacaaggcgctgtccatcgaggagaaaccgctgaagccgaaatccgactgggcggtgaccgggctctacttctacgacaataacgtggtggagatggcgaaggacgtgaagccttctgaacgcggcgagctggagatcaccaccctgaaccagatgtatctggagcgcggcgatctgcaggtggagctgctggggcgcggtttcgcctggctggatacgggcacccacgacagcctgatggacgcgtctcagttcattcacaccattgagaagcgccaggggatgaaggtcgcctgcctggaagagatagcctatcgtaatcagtggctgtcggcggaaggggtggcagttcaggcggaacgcctgaagaaaactgagtacggtgcttatctgaagcgcctgctgaacgagcgttaa

SEQ ID NO: 209772 - DNA, 891 bp, Klebsiella pneumoniae
atgaagattttactgattggcaagaatggccaggtgggctgggagctgcagcgttcactgtccaccctcggcgacgtggtcgcggtggactactttgataaactgctgtgcggtgacctgactaacctggaaggcatcgcgcagaccgtccgtaccgtccgcccggacgtagtggtgaatgccgccgcgcacacggcagtggacaaggccgaaagcgagcgggaactctccgacctgctgaacgacaaaggggtggcggtgctggcggcagagtcggcgaagctgggtgccctgatggtgcattattccacggactatgtgttcgacggagccggcagccattatcgccgggaagatgaagcgaccggcccgctgaacgtctacggtgaaaccaaacgtgccggtgaactggcgctggagcagggtaacccgcgtcacctgattttccgtaccagctgggtgtatgccacccgcggcgccaactttgccaaaacgatgctccgcctggcgggtgagaaagagacgctctccatcattgacgaccagcacggggcgcccactggcgcagagctgctggcagactgcacggcgacggcaatccgtgaaacgctgcgtaatccggcgctggccggcacctatcatctggtggccagcggcgagactagctggtgtgactacgcccgctatgtgtttgaggtggcgagagcgcacggtgcagagctggcggttcaggaagtgaagggcattccgacgacggcctatccgacgccggcgaagcgtccgctcaactcacgcctgtcgaatgaaaaattccagcaggcatttggggtgactctcccggactggcgtcagggtgtggctcgcgtggtaacagaagtcctcggcaaataa

SEQ ID NO: 209773 - DNA, 555 bp, Klebsiella pneumoniae
atgaacattattaaaacagatattcctgacgtgctgatttttgaaccacgcgtgtttggtgatgcgcgaggcttcttctttgagagcttcagcagcaaggtgtttaatgaggcggtgggccgccaggtggattttgttcaggacaaccactcccagtcccagaaaggcgtattgcgtggactgcactatcagctggatccgcacgctcagggcaaactggtccgctgcgtggaaggtgaggtatttgacgtggcggtggatatccgtcgttcatcgccaacctttggcaaatgggtgggcgcggtgctcagcgcagagaataaacgtcagctgtggatcccggaaggattcgcccacgggtttatggcgctgagtgacacggtgcagtttgtctacaaggcgacgaactactacgcgccacagtcagagcggagcatcatctggaacgatccggagatcgggattgactggccggcgctgggcgactgcgcgctctcgctgtcggagaaagatctgcaggcacatactttggccactgcagaagtatataaataa

SEQ ID NO: 209774 - DNA, 1167 bp, Klebsiella pneumoniae
atgaaaattactatttccggtacaggttatgttggtttatcgaacggtgtcctgattgcgcaaaaccacgaagtggtggccctggatatcgtacaggccaaagtggatatgcttaaccagaagatctctccgattgtcgataaagagattcaggaatatctggcagaaaaaccgttaaatttccgtgccaccacggataagcacgacgcataccgtaatgccgactacgtgatcattgcgacgccgaccgactacgatcccaaaaccaactacttcaacacctctacggtggaagcggttattcgcgatgtcacagagatcaacccgaacgcggtaatgatcattaaatcgaccatcccggtggggttcacccgcgacatcaaagaacgtttagggattgataatgttattttctctcctgagttcctgcgtgaaggacgtgcgctgtacgacaacctgcacccgtcgcgtattgtcatcggtgagcgctctgcgcgtgccgaacgttttgctgatctgctgaaagaaggcgcgatcaagcaggatatcccaaccctgtttaccgactccaccgaagcggaagcgatcaaactgttcgctaacacctatctggcgctgcgcgttgcctatttcaacgagctcgacagctatgctgaaagccaggggctgaacagcaagcagattatcgaaggggtatgcctggatccgcgtatcggcaaccattataacaacccgtcctttggctacggcggctactgcctgccgaaagataccaagcagctgctggcgaactacgaatcggtcccgaacaatatcatcgcggctatcgtcgatgctaaccgtacccgtaaagactttatcgcggattctattctcgcccgtaagccgaaagtggtgggtgtgtatcgcctgatcatgaagagtggttcggacaacttccgcgcctcttctattcagggcattatgaagcgcatcaaggcgaaaggtattccggttattatctatgaaccggtgatgcaggaagatgagttctttaactctcgcgttgtgcgcgacctggctgccttcaaacaagaggcggatgtgatcatctctaaccgtatggcggaagagctggcggatgtggcggacaaggtttacacccgcgatctgtttggtaatgattag

SEQ ID NO: 209775 - DNA, 1002 bp, Klebsiella pneumoniae
atgaaatttttagtcactggtgcggctggttttatcgggtttcatgtcagcaaacggcttttgaatgatgggcatcaagttgttgggattgataacattaatgattattatgatgtaaagttaaaagaatctcgtcttgaacaattagagtctccctcttttactttttacaagttagatctcgctgaccgtgatggtatggctaaactgttcgaaacagagcagtttgaacgtgttatccatcttgcggctcaagcgggtgtacgttattcactcgaaaatccatatgcttatgcagactccaatttaacgggctacctgaatattttggaaggttgccgtcacaataaagtgcaacatctattatatgcctcatccagttctgtctacggtctaaaccgtaaaatgccgttctcaacagatgattcagtcgaccaccccgtttcgttgtatgctgccacaaaaaaagctaatgagctgatggcacatacttattcccatctgtacagcatcccgacgacaggactgcgcttctttacggtctatggtccctggggccgtccggacatggcgttattcaaattcacgaaagcgatgctggaaggtaaaagcattgatgtttataactacggtaaaatgaagcgtgattttacctatatagatgatattgtcgaagctattgttcgtatccaggatgtaatccctcagcctgatcctgaatggacagtcgaggaaggatctccggctaccagctccgcgccatatcgggtctacaacattggtaacagctcaccagtggaactgatggattatatcaatgctttggagcaggcattaggattagaagcgaagaaaaacatgatgccaattcagcctggtgacgtcttaaatacaagtgctgaaacggtagctctatataaaattatcaatttcaagccggcgactcctgttaaaaaaggagttaaacagttcgtggaatggtataaagagtattatgaataa

SEQ ID NO: 209776 - DNA, 1236 bp, Klebsiella pneumoniae
atgtttaataagagaaaaacattaaaaaacttagcttcgcttggctttatgcaaattataaattatgctctacctattattttaatgccgtatctaataattaagattggaatatcaaatgttggtttgattgccaccattaccgcaatcacagcttatatacaactttttattgattacgggtttaatctgtctgcgactagagatatagcaaaaaatggttatgatgattataaggcatcaataataagtagttcagtctttgctataaaatcaatgatatcggtattttttttattttcttcaattgtcgtattcttgatacattcagttcctgaagaatataagtctgttttttttctaacctttggcattgctgtttttcagtcaatgttcccttcatggcattttcaagctgctgaaaaaatgcattttataactggttgcaatagtatccctaagctaatttttacaggaatgatatttattgttgtaaacacacctaacgatgtatggaaagtgcaagcatgtttgtttgcaggtgcatttgtatcctttgcaactgcaattgtagttctgagaacgaaatttaacttcaagttggaaatttcttttaaagatattaataaacagcttaaggatggttattcaatatttgtcgcaagaatagcatcaggtttgtataagaatttcaatgtattgattcttggtttctttgcaggtactgcggcagtaggggcatattctatagctgagagaatccttagaagtgcacaaatggttcagaacgtaattggggacactttgtatccatcttttgcaaaagggtttactggtgatccaggtttctttaaaaaatcttcgcaaaaatataaatggcacatcatagtaacttatactgccgcatcgttgatattattttatctttctgacttcataggacatgttattggcagaacatcttctgtagaagttgcatcatgtctaaaaatcatggctccggcatttttatttggcggcttaaattatgtttgtgcgatacttggcatgacgtcatgtggttattcaaaacaattttcactatgtgtgattgcaacgggtatttttaatgttgtttgttcgactgttctttcatatttatattcatatcatggtacctcattggctttaacattaagtgaattatttcttttatgtttggttttgttattttctaaaaggattggtgttttatga

SEQ ID NO: 209777 - DNA, 222 bp, Klebsiella pneumoniae
atgaaaaagtatttaatcgtggcgctgctggcctctctactggcaggctgtgcccatgactctccctgcgtaccggtttatgactcgcaaggccgcttagtccataccaatacctgtatgaaaggcacaacagaagacaactgggaaaccgcaggcgcaatcgccgggggtgcggccgcggtagccggcctcacgttagggatcgttgctctgacccgctaa

SEQ ID NO: 209778 - DNA, 3111 bp, Klebsiella pneumoniae
atgtctaagttttttattcatcgaccggtcttcgcctgggtgctggctatcattatgatgattgccggcggcctggccatcctgcagctgccgatagctcagtacccgacaatcgcccctcctgcggtagcgatctccgccacctaccccggtgcagatgcccagaccgtacaggatacggtcactcaggttatcgagcagaatatgaacggcatcgacaatctgatgtatatgtcgtcgaccagcgactctgccggttcggtaaccattacgctcacctttaaatcgggtaccgatcccgatattgcccaggtacaggtgcaaaacaaactgcagctggccacgccgctgctgccccaggaagtacagcagcaggggattagcgtcgagaaatccagtagcagcttcctgttggtcgccggctttatctctgataacccgaccaccacccaggacgatatttctgactatgtcgcctccaatgtcaaagatcctattagccgcctcaacggcgtgggcgatgtgcagctgttcggcgcgcaatacgccatgcgcgtctggctggatggcaacctgctgaataaatacaacctgacgccggtggacgtcatcaatgcgctgcaggtccagaacgatcagatcgccgcgggtcagctcggcggcacgccagcgctgaaaggccagcagttgaacgcgtcaatcatcgctcagacgcggctcaaagatccgcaggagtttggcaaggtcacgctgcgggtcaatgccgatggctctgtcgtccatctgaaagacgtcgcccgcattgagctggggggagagaactataacgttgtcgccagaattaacggtaaacctgcctctggtctgggtattaagcttgcgaccggcgccaacgccctggataccgccaccgcgattaaagcgaagctggccgagctgcagccctacttccctcaggggatgaaggtggtctatccgtatgatacgacccctttcgtcaaaatctccattcacgaagtggtcaaaacgctttttgaagcaattattctcgtctttcttgtcatgtatctgttcctgcagaacatgcgcgcaacactcattccaaccattgccgtacccgtggtgctgttgggaaccttcgcggtattgtcgatgtttggctactccatcaacacgctgacaatgtttggcatggtgttggcgataggtctgctggtcgatgacgctatcgtagtagtggaaaacgtcgaacgtgtgatggttgaggagaagctctcgccaaaagaagcgacggaaaaatctatgtctcagatccagggagcgctggtgggtatcgccatggtgctctccgcagtatttgtcccgatggcctttttcggcggctcaaccggcgcgatttatcgtcagttttcaatcaccatcgtctccgccatggcgctctccgtgctggttgcgctggtactgacgccggcgctctgcgccacgttgttgaagccagcctcagctgaacaccatgagaaaaaaggatttttcggctggtttaacgcccgcttcgaccagagcgttaaccactataccaacagcgtcagcggtattttacgtggaactggccgttatctggtgatctacctgctgatcgtcgtggggatggccgtgctgttcatgcgcttgcacacgtcctttctgcccgacgaagaccagggcgtcttcctgaccatgatccagctgccgtccggtgctacccaggagcgcacgcagaaggtcctggatacggtgactgattactacctgcataacgagaaggccaacgttgaaagcgtctttaccgttaacggcttcagcttcagcggccagggacaaaactccggtatggcgtttgtcagcctgaagccctgggaagcgcgcagcggcgatgaaaacagcgtggagtccatcatcaagcgggccaccgtagcctttagccagatcaaagacgccatggttttcccgttcaacatgccagccattattgagctgggtaccgccaccggcttcgactttgaactgatcgaccagggcggactcggtcataccgctctgacccaggcgcgcaatcaactgctgggcatggtgaaacagcatccggatcagctggttcgggtacgccctaatgggctggaagatacccctcagttcaaactggatgtcgatcaggaaaaagcgcaggcgctgggcgtatcgctctccgatatcaatgaaacgatatcagccgcgctgggcggatactacgtcaatgactttattgaccgcggccgcgtgaaaaaagtgtacgttcaggctgatgcccacttccgtatgctgccgagcgacattaacaacatgtatgttcgtagcgccaacggcgaaatggtgccgttctccgcctttgtcacttcacgctggatatatggctcgccgcgcctggagcgctacaatgggttgccatctatggagatcctcggtgaagcttcgccaggcaaaagtaccggggaagccatggcgctgatggaaacgctggccagtaaactgccgagcggcatcggttatgactggaccgggatgtcttaccaggaacggctctccggcaaccaggcgcctgcgctctatgccatctcgctgatcgtcgtcttcctgtgtctggcggcgctgtatgagagctggtcgatccccttctcagtcatgttagtggttccgctgggggtcattggcgcgctgttagccgccacgctgcgtgggctgaataatgacgtttacttccaggtcggactcttgaccacgatcggtttgtcggccaagaatgcgatcctgatcgtcgagttcgccaaggatctgatggagaaagaagggaaagggatcattgaggccacgctggaggcatcgcggatgcgcctgcggcctattctgatgacctctctggcctttattctcggggtcatgccgctggtgattagccatggtgccggcagcggggcgcagaatgcggttggcaccggcgtgatgggcgggatgctgaccgcgacgctgctggcgatcttctttgttccggtcttctttgtggtcgtcagacgacgttttacccggcacgctgaataa

SEQ ID NO: 209779 - DNA, 1140 bp, Klebsiella pneumoniae
atgacgactcacgccagagtgacacttttatccggtttaattatctcggccttattgctaaccggttgcgataattctgacaaccagcaaccccatgcgcaggcgccgcaggtgacggtccatgtcgtgaacagcgcgccgctatcagtcaccaccgaactgccgggccgaacctctgcttttcgcgtagcggaagtccgcccccaggtgagcggtatcattctgaagcgtaactttgttgaaggaagtgatgtcgaagcaggccagtcgctctatcagatcgatccggcgacctaccaggcggcgtggaacagcgccaaaggcgatgaggccaaagccgaagccgcggccgctatcgcccatttgacggtgaaacgctacgttccactgctgggtactaaatatatcagccagcaggaatacgatcaggcagtggccaccgcccgccaggccgatgccgatgtcatcgccaccaaagctgccgtagaaacggcccgtatcaacctggcctacaccaaagtaacctcccccattagcgggcgcatcggtaaatcgagcgtcaccgaaggggcgctggtcaccaacggccagtcggatgccctggctaccgtccagcagctcgatcccatctatgttgacgtgacggagtccagtaatgacttcatgcgccttaagcaggaaagcctgcagcgcggcggtgataccaaaagcgttgagctggtcatggagaacggccaggcctatccgctcaaaggttcactgcagttttctgacgtcactgttgatgaaagtacgggctcaattactctgcgcgctatcttccctaacccgcagcatgtcctgctgccagggatgttcgtccgcgcccgcatagacgaaggcgtcgatccgcaggctatcctggtaccgcagcaaggggtgacccgcacgccgcgtggtgatgcctccgtgatgctggtgaatgacaaaaaccaggttgaaacccgggaagtggtcgcgactcaggccgttggcgataagtggcttatcaccagtgggctgaagccgggcgataaagtgattgtcagcggcttacagaaagtccgtccaggcgtcactgtcaaagcggaagcggagcgtgcggcgccggccgtgcaataa

SEQ ID NO: 209780 - DNA, 651 bp, Klebsiella pneumoniae
atggcaagaaaaacaaaagaagaggcgcagcgcacgcggcagctcctgattgagtccgcaatccagcagttcgccctgcgcggagtaaccaacaccaccctgacggatatcgccgatgcggcgggagtgactcgcggcgcggtgtactggcattttgccagtaagacggagctgtttaatgaaatgtggcagcagcagccgccgcttagagatttgattcagcccagtcaggccatagagtacgaacatgagccgctaaatgctttacgcgagcggtttattgcaggcctgcgctatattgctgcgaatcctcgacagcgcgctctgatgcaaattctttatcagcgctgtgagttttccagtgatatgctttcggaatacgaaattcgccaacgtattggttttaattattcactcattggcggcatcctgcagtgctgcgtgcgtaacaatatattgccagccgaaacaaacattgagatgatattaattgttttacacagtgctttttccgggctgattaaaaactggctgctcgatccgcaacgcttcgatctttatcagcaggcgcctgcgctggtggataatataatggcggtggtctgtgctgcgcgtttatcgggagggcctgcgctacggctggtgaattag

SEQ ID NO: 209781 - DNA, 1227 bp, Klebsiella pneumoniae
atggctggcgaacttaacaaactgagcgacaggaagttaaagggattacatggcatcccggccagtaagattgagttttatgctgatggtgccgggttgagcgctaaggtaacgaaagctggtggtattagctgggtgtttacttaccggctcgacgggcagaagctgcatcggctaactctggggcgataccctgatatgagtctcaaagaggcccgttcctcgcgtgataaatgtcgccagtggctggcctcaggtaaagacccaaagcaccagttggcgctaactactcaggaaacgcttaaaccggtcacggtgcaggaagctatcgaatactggatacgcgaatatgcggaagaaaaccgtgcgaacgttgagcggcataaagcggagctacgcaagcatatttacccttacattggaaaaatggcgctcgctgactgcgaaacccgatactggcttgactgctttgacaggatgaaaaagaaaacgccagttgctgcgggttatgtatttcagatgtgtaagcaggctctgaaattctgccgcgttcgccgttacgccgtcagtaccgcccttgaagatttgagtattcccgatgttggtaaaaagcaggcgaaaaaagatcgggtactgaaagataaagaggttgggggattatgggctgctatatcgtccggcgatacttttctgccttactacacaaacttgctcaggatcaccactttgtttggttgccgcacccaggaggccagattgtcagagtgggccgaatgggatatggaggcatgggtgtggacagtaccaaaagcgcatagtaaaggcggtgaaaagattgtgcgtccagttccagaggcgatgcgttcatttattgaaatgctccacgatgaaacaaaatcatccggctaccttcttggggttgtgaagaatagcgaagcggttagccagtggggccgtagtgtttataaaaaactgaggcattctgaaccctggacattgcatgatctacggcgaacgcttgcaacgcatatgaataatatgggtatagctccgcacgttgttgaacagttgctgggccactcaatgccaggggttatggcgatttataaccgtagtctgtatctgccggagaaactggacgcgctgaataagtggtatgatcgcttagaacttcttgcgggtaatcatcaaaatgtggttctgttaactgtagcgaatagagattaa

SEQ ID NO: 209782 - DNA, 942 bp, Klebsiella pneumoniae
atggcagaaaaagaaataaagattccattttcatattgtagattgtccagaggtgcatcatttctgggggttgaaccgtcagatttgatcaaccttgctattgaaaataaaatcgaaataagcatgatgctgaaaaggtttcactgccgaatccttcttcgtgaagattttagtgatgtaaaggattggtattcatcactatattttcctcgtacttttaattctatgtcagggcaaacccgcgcgataacgaatcactcttttattgaatttactaatggccgttattttgaacctgataaactattatctggttcagacatctttacggaacaagaaagtaaagggttccttgtcggatatggctttgcattaggtctgtggcgggtaatgcccgatcagtttgagtcatctttacctgtgaaggattttttccccggatttttcccgtgcctcacgggcggtgaaactccagtaattcagattctgccagcccaaccttttatcgatcaggctaatggcaagaggtttaatttcgacccttatgagtttgaagccgggtatgatgatttatgggttactaattatgatattaaacggcttatggaaagcggccttgatttcgataagctgccaatgctcaatgatattgaacgacctgatttagactctgattcaaaaaatagtattaataaacgctcagaaagtgcaaaagaaaaacatgcacgaaatgaactattaattttaagtgctgcaataaaattcaaagaaacaagttctgatattttcaatgaaaagtgcttgaaaaaagatgggagctacaatttctcagcatgggccagagaactttccgacagagtgcacttatttcctgacggacaatgcccggtcaagagcgttgacacaattacctcatacattagtaggcactttaagttttaa

SEQ ID NO: 209783 - DNA, 285 bp, Klebsiella pneumoniae
atgtcaaatactcgttttaccccgccaacaccagaacaacgccgcaccattctcgcagaatatggcattaagtttgatcgccgtattcgtgaaagtgaatgcttcgaaataaccagcctttcccgttccacccgctggtatatggagaacgaaggtaaattcccgccacgctgccactttggccgtaatagttgcgcatggcttctgtcagatgttctttggtgggttcgcaatccacctgctgttgagaacgtcaacaccccttacaaccgtaaatccgcgtaa

SEQ ID NO: 209784 - DNA, 780 bp, Klebsiella pneumoniae
atgcaaaaattaaatgagttggttccggttaaccccggaaatattggcggcgtgacggtatcgctggtcagtgcaaaaaaactccatgagtttctcggcgttgggcgtgatttcaccacatggattaaggggcgtatcagccagtatggttttactgctggtgtagattttacggtggttgaaaatttgagcgcccccgtttcggggagcgcaaaatatcgccaacaaattgcacatgattacctgatcaccatcgacatgggtaaagagctggcaatggttgagcgcaacgaaaaagggcgggaggtgcgccgctatttcatcaactgcgaacgccaggcaaaagccgccgctaatatcccccagacgttaccggaagccctgcgccttgctgctgatctggccgaaaaggcaagcgaacttgaaaaccggctggtggccgctgcgccaaaagttgatttcgctgatcgcgtggcggagatcagtaaggggatttccattccaaactatgccaaagccgtagggcttggccccatcaaattattcggctggatgaggcaacaggggattctcatcaatggtggccagcgccacaacctgcctatgcagcgttatatcgatagcggttattttgccgttcgccagggaacgtatgaaacgaatggcgaggtaagagcctcattcacaacgatgctgacggggaagggtgagcagtggttaacgaaaagactgatcgctggtggtgtattgccggaggtgccgaatgctgacgctgaataa

SEQ ID NO: 209785 - DNA, 738 bp, Klebsiella pneumoniae
atgctgacgctgaataaaacaaaggcagctttgcagagctgccaatgtcactacgaaaaaccgaaacagattaagcataccagggttaatgctggtggtcaaagaatgagccagcgcaattctgcgcccgctgattttattcagccttttggctcaatacctttctttcggagggcttcccggcctaattccttcatccaatttgcgaggctaacactctctgcttgggcttctttttcaaattgctctttaagttcgggggggattcgaatctggaacgctggtgctttccccgctccttttggttgccgatctcgtttaatgggtgttgacatgtgcgtacctattggcgtactgttttctttaataggtacacaccttaacacggtgctatctaaaaaaacaacgccccggactgttcgagcagtaccgaggcgtctcaccaaaccgttaagtgaggtaacagttatggctgacaatcagtctacccaaactcgcccggaatttacatggttattcctggcaaccccagatcacactcctgaatgcaccccagtagtgcttcgctttgatgctgacacggaagctaaagcccgcgccgctttccccggctgggatttagtttttgccgccaaaatccgcgctcaggctccttgccgcgttgcgttcttcgattacaccacccgccgcgggtgggagttcgacagcgccgcgattcaggaggtgcgtcatgcgtaa

SEQ ID NO: 209786 - DNA, 189 bp, Klebsiella pneumoniae; identical to SEQ ID NO: 207395

SEQ ID NO: 209787 - DNA, 315 bp, Klebsiella pneumoniae
atgcgtgatatttaccatcagcttgttaagagcactcctgattttaaaaacttcactgatgaggctttggctgaatccagcgatttatattctgctggcgcatttgccatcaatagtgcgctcacactgatcggcaatctggcgtttgatgcaaccaatgcagaggactattccgatgaagatgcccggcgtgatttgatccttgtaagccatgcattgcgtcaccttcccagaatggcgcaagcactcaatcagagtagtgatgctgcggattatgtgcgtacccagcgtaataacgcgggggagcaatcatga

SEQ ID NO: 209788 - DNA, 369 bp, Klebsiella pneumoniae
atgatcagtctcttgaaatttaacgagctggaaaaccgtgtcgatttgctggttaaccgcgtcctggagttagaacagcaggtgcgcacactcaccgaaagccaggggggagatattcctcccggtatggctccggtcgccacgctggcggctgagttcggcatatcgacgaaaaaagccgaagagctggcaaaaaacacgggcgtgatgctggtcagaatgaaagctggtggctttatcgcgccggataacaagttcagagaggtggcgaggcaggttctgcgcagcgcgaagcgcaaatatggatcggcgtactggtatcacccattacttggcaaatttcagatgagcggaggtatcccgcaatga

SEQ ID NO: 209789 - DNA, 366 bp, Klebsiella pneumoniae; identical to SEQ ID NO: 152375

SEQ ID NO: 209790 - DNA, 2136 bp, Klebsiella pneumoniae
atgaagatgaagaatgccccgaatatcaaatttctgccgaaagataaatttactgaggcgattatctttgcgggtgaagatgcctattcacatgtgcagcactggatcgagagcgaaggtaaaagggcgtgggatgatgtaccgcctgtttatctgggcaaaaggcaactggcagaactggaacgattaaacatcgttgataacggccgtcgcagtgttcgtgtgatccgagctggcgagctttccgaaatgcagataagcactatcgcaaccaaattggcgctggcggatgtgaaagaggcccggctgtttaatggcatgtttgagcctcagccgaaggaggactggacgggcaggcttccacgtctcaaagaagaggccgaacgcggggaaagtattgtggtgaacctgcctgtgaaaaaacgggagccaaagcctgaaccgggcgatgaactcaaaccccgcgtggaaagccgcagcgatggcctgtactggatcacgccaaaggtggacaaggatagtggcgagatcatcaataacgaaacgtggctgtgctcgcctcttgaggtggtcggctccggtagtgacggggcagagcgctatcttgttttgcgctggcgttcgccgcgtggccatgaagatattaccagggcgatcccctgtgctgatatcggtgagcgcgacggctggcgctcacttaaagctggtggggtgaatgtgaccactaaaagcaccttccgggcgattctggccgactggttgcagcaaagcggcactgatcgggaatggattatcacccataccactggctggcatcatggcgcatatatcatgcctgatggtgaagtgattggtgatccagagacgcccattctctttaacggtcgcagcgctgcatcttccgggtatgccattgctggtactgctgctacctggcgggattccgtcgcccgtctggccgggggcaatccgtccatgatgctgggcgtggcagcggcattatccgcgccgcttattggcctggtgggtgctgatggtttcggcgtccatttgttcgagcagtcgagcgccggtaagaccactaccgccaatattgcgagcagcctgtggggtgagcctgatgcgttgcggcttacctggtacggtactgcgcttggcatagcaaacgaagcggaggcgcataacgacagcctgttaccgcttgatgaggtaggacagggcagcagtgccaaagatgttgccacgtctgcttacaccctgtttaacggcgccggaaagttgcagggagccaaagagggcggcaatcgggagcttaaacgctggcgcactgtggcgatcagtaccggggaaatggatattgaaaccttcctggctgctggtgggctgaaagtgaaagcgggccaactggtgcgcttgctcaacatccctatggagaaatcgacggcctttaacggtctgccaaacggcaaggctcatgctgacgcattgaaagaagcctggattgataaccacggggcggcggggcgtgagtgggttaaatggctggcagctaaccagcaggaggctaaacaggcggtacgtgacgcgcaaacgcgctggcgcggcctcatcccggcggattacggtgagcaggtacaccgcgtggccgaacgctttgcaatcctcgaagccgcgctggtaactggtgcatcaatcaccggatggagtgaacaggccagccgtgacgctatccagcatagctttaacgcctgggtgaaagagttcggcactggtaacaaagagcaccagcagatcatcgagcagtgcgaggcgttcctgaatgcctacggtttaagccgctttgcaccgttgccctatgatccctccagtatgccgattcgcgatctggccgggtatcgaaagcgcaaaagcagccatgatgatgcgccgctggtgttctatacgttccccgcaacgtttgagaaggagatagctcagggctttaacgccaggcagtttgcccgcgtgcttgccgctgctggcttgctttctgagccgtccagcgggcgtggataccagcagaaatccccgcgtattgatgggcgtcaaatcaacgtttatgtgcttcaccaggttgcggaaggtggagaagaataa

SEQ ID NO: 209791 - DNA, 336 bp, Klebsiella pneumoniae
atgaaactgattggcaaagataacgggcatatgagcgatctcaagtttctctacagcgccgttgatgagctttcaaataaagatgagattacggtgacggattttctggctctgagcgcttttgtcacttctgaaaaacttgatctggaatcgtaccagtctgggctggaagaaggggggcaagagttgtcgaaagacgccagcgcttacctcgatcttctacagaggattgcggctgatttgtcgtacccaacctctggccttgagaacgctatccatagcgcacaatcaacagcaagctgggctttctatcagtgggggctggataaagaataa

SEQ ID NO: 209792 - DNA, 513 bp, Klebsiella pneumoniae
atggacttcgattttgacgatatggcatacccggatatttttttaatttccggcgaggagtttaaaggaagcaggaacacaggaaaaaatcaggtagatatcccgtttactgacgaaccgcaaattgaattgggtgatattctgattcagaagattggaagccgcgagttaagtcttaaagttgtcgatctttcaatatcaaagaacggaacgctgaacgcaggtacaacgcatcctcacttacttacgttatccgtagagaatctttcttccgacgcacacaggacagcaaagagcatgaatacttttaatattggctccgtcagtggtgagcaagttcaaataggtgaaagtaatcatatgctggtgaatatcagtattactgaacttgtcgagaaagtagctaaatctggcgatccacaggctaaatcaatgttgaaacagttactggaaaatagcaccgttgccagtatcgttggcgctggcgcttctgcgctgttaggtctgctttaa

SEQ ID NO: 209793 - DNA, 1167 bp, Klebsiella pneumoniae
atgaagaaattacttgaattacgccagcagaaagccgcactcaaaacccagatgcgttccatgctggaaaaagctgacagcgaaaagcgaagcctgaacgatgaagagggcaagcagttcgatgaactccgcgcccaggctgatgcgcttgaagttgaaattacccgccttgaggccgtcgccgacgatcagcgcaatctgcctggtacttctgttgaaggtaaaggtgtaagcaacgatgagctgcgccactacatcatgaccggcgatacccgctctctctccacgttggtgcaggctgacggcggctataccgttatccctgagctggacaaagagatcatgcgccagttgcaggatgacagcgtgatgcgctccatcgctacggtgaagaccaccaaaaccaacgaataccagaagctggtatcagtgggtggcactaccgttaagcgcggcaccgaaggcgaagcgcgtaccgaaaccagcacacctaagatggagcgcgttgatatcaaactcaacccgatctacgcctacccgaaaaccactcaggaaattctcgacttctccgaagttgatattctgggttggctgtcttccgaaatcaccgacaccttcactgctaccgaagaaaccgactttgtgaacggcgacggtgataaaaaatccaaagggttcctgtcctatccgcgtgcggccaccagcgataaaacccgtccgttcggaacgctggagaaaatggaagctgctgccgtttcctctgatggcttgatcgacctgctgtataagctgaaagccaaataccgtaaaaatgccgtatgggtgatgaactccaatactgccgctacgctgcaaaagctgaaaaacggcaacggggattacatctggcgtgatcgtctcgtcgctgactctcccgataccctccttggccgtccggttcaatatctggaaaccatgcctgatgcggctgcgggtgaagcgttcctggcagtcggggactttaagcgcggttactttatcgtggatcacactactggcgtgcgtacccgccccgacaacatcaccgaacctggtttctacaaggtgcataccgataaatacctgggcggtggtgtggtggactccaacgccatcaaggtgcttgagctttccggttcaggttcctga

SEQ ID NO: 209794 - DNA, 561 bp, Klebsiella pneumoniae
atgaaaacaatcgattttgaaatccgtacctccgaactgagcgccagcaacaaaaagctggtgggctatgccgtgcgctggaacagcctgtcagaggtgatctgggatgagttccgcgagcagtttgcgccgggggcgtttaaagacagcctggcatccggtagcgatgtgcgtgcactgtacgagcataactatacccaactgctggggcgtaccaaatccggcacgctggtgttgtccgaagatgataccgggctgcgtttcgagctgaccccgccaaacacccaacttggcaatgatgtgctggagctggtggagcgtggagacatttccggcatgagcttcgggttccgtgcgctgaaagagtcctgggatattactcctacaccgtatattcgcactgttaccgctgccgagctgcgggagatcaccgttacttctatgcctgcttaccctgagtccggcgtggaaattgcgcaccgttctctgttctcccaacatcctgaactgcgccgtgctggtgataaccgccgacgctgggctgacttagcggggctgtga

SEQ ID NO: 209795 - DNA, 1242 bp, Klebsiella pneumoniae
atgtggaatatctggccttttggccgtaaatctgagccatccgaacagcgcagcatgacgattgatgagtttctggcgatggcagggattccaaataccggatcaggcgaatatgtgtctgccggtactgcggaatccctgccggcggtgatgaatgccgtgtcagttatcagtgaggcagtggcaacaatgccctgctatctctaccgcgtgcacaacgataacgggcaagaagcgcgagagtggttgagtaatcatccggtagattttctcctgaatgagcaacctaacgattgccagacgccttaccagttcaagcgcacgatgatgcgccattgtctgctgaacggtaacgcctatgcggtgatccagtggggccgcgacggtcagccggaatccctgcatccgtatgcgccgggggaggttgttcctgagcgtatcggccagcataagtacaaatacactgttactgagccgtttaccggggcagtgcgcacctacttgcaggaagagattctgcacctgcgttactcgaccgatgatggttttctggggcgctcgccgatcaccatctgccgtgaagcgctggggttaggtctggcccagcagcgccacggtgccagcattatgaaagatggcatgatggcggcgggcgtagtcactactgctgaatggctcgatagtgtgaagggtaagcaggcgctggacgcgcttgagcgctacaaaggtgccagaaatgccggtaaaacaccgatccttgaaggtggcatggactataagcagcttggcatgagcaatcaggatgctgagtggctggcctcccggcgcttcaccatcgaagatattgcccgcatgtttaacgtttctcccatcttcctgcaggaatacagcaacagcacctacagcaattttagtgaggcgagccgcgcctttcttaccatgacaatgcgcccgtggctggcgaactttgagcagcagattaaatccgcgttgctggtggcatcgcctgtacccggaattcgttatcaggtggagttcgactctgccgatcttcttcgagccactccaaccgaacgttacgcaacttatgagcgcggtatcaagaacgggatcatgaacccgaacgaagcccgcgaacgcgaagggatgccgccgcgtgaagggggcgacgaatacagccaggcatggaagcaggaagtgaaggtcagtaccggttctgagaataaggaggatgcgtcatga

SEQ ID NO: 209796 - DNA, 336 bp, Klebsiella pneumoniae
atgaggccgggaggattaaggcaacgcgttacgattcagaattttactaccagccgaaccccttctggtggcgtcattcaggaatggtacgacgttgcgacagtctgggcagaagttaaggggatcagtggccgtgagctgattgctgcgggtgctgaaatgtccgaggttacatttcgtatgtgggtacgttaccgctctgacgtaaccagcgccagccggatcatctggaaacagaaaggacatgatgcaaaagcatttgatattcagtcggcaattcctgatgaaaaggctaccaggctggagttgctttgtaagggagggcttaagccgtga

SEQ ID NO: 209797 - DNA, 300 bp, Klebsiella pneumoniae; identical to SEQ ID NO: 192650

SEQ ID NO: 209798 - DNA, 444 bp, Klebsiella pneumoniae
atgccgtggcaaccaatgcgccggtgcactgagccgggatgcaataagcgggtgaagtctggtaagtgctatgagcacaagcgcgaagcctggcgggcggaagatgccagacgcggccaccgtcgcgcccgtggttactcagcatcatgggagaagtaccgcgctcagtatctgaaacgtcagccgctatgtgtcgagtgccagaagttgggcctctacgttcctgcaaagattgtcgatcacatcatccctatcgacggcggtgatgatgttctgttctggcctgagtggaatcaccagccgttatgccagacgcatcataaccagaagaccacacagcaagaccctatcaccaaagccaaccgcaaagcggggatgtaccacgagcaggaagagcgggcagcacagcgcaataactggatgtatgaggttgatcatgaatga

SEQ ID NO: 209799 - DNA, 153 bp, Klebsiella pneumoniae; identical to SEQ ID NO: 28735

SEQ ID NO: 209800 - DNA, 192 bp, Klebsiella pneumoniae
atgcttccgcaaccgctgacaggccgcaccgatggggtgggggaggttttcaggacgaacacgagggcgccaggcaccacccgccccctcaaatttttacgcacggtgatttttttgaaaataaaacgcgatggaaacgagaaatttttatggcaagaccaccaaaaccgccagcttaccttgatgagttag

SEQ ID NO: 209801 - DNA, 357 bp, Klebsiella pneumoniae
atggcaagaccaccaaaaccgccagcttaccttgatgagttagccgcgcagcagtggaaagcgaaagcgaagcaactggccgagcgtggcgatctgacacccgccgactggaacaaccttgagcttttttgcgtcaactattcgatgtaccgcaaagccgtggaagaccttgccagccgtgggttcagcattgttaacagccagggtggcgagagccgaaatccggcactgagtgcaaaggccgatgctgaaaaaatcatgattaaaatgtcgtcgctgctgggctttgatccggtaagccgtcgccgtaacccggtggaaacggaagaggaggacgagcttgaccgtctggaatga

SEQ ID NO: 209802 - DNA, 1662 bp, Klebsiella pneumoniae; identical to SEQ ID NO: 192654

SEQ ID NO: 209803 - DNA, 192 bp, Klebsiella pneumoniae; identical to SEQ ID NO: 192655

SEQ ID NO: 209804 - DNA, 297 bp, Klebsiella pneumoniae
atgttcgaacaacgcgtaaattctgacgtactgaccgtttctaccgttaactctcaggatcaggtaactcaaaagcccctgcgtgactcggttaaacaggcactgaagaactattttgctcaactgaacggtcaggatgtgaatgacctgtatgagctggtactggctgaagttgaacagcccctgttggacatggtgatgcaatacacccgtggtaaccagacccgcgctgctctgatgatgggcatcaaccgcggtacgctgcgtaaaaaactgaaaaaatacggcatgaactga

SEQ ID NO: 209805 - DNA, 966 bp, Klebsiella pneumoniae
atgcgcatcggacaccaccagctcagaaatcgcctgatcgcagcgcccatggctggcattactgacagaccattccggacgctgtgctacgagatgggagcgggtttaaccgtttccgagatgatgtcttctaacccacaggtgtgggagagcgacaagtcccgtttacggatggtgcatatcgatgagcccggtattcgtaccgtgcaaatcgccggtagcgtgccggaagagatggctgccgccgcgcggattaacgtggaaagcggcgcccagattattgatatcaatatgggatgcccggcgaaaaaggtgaatcgcaagcttgcaggttcagccctcttgcagtaccccgaccaggtgaagtcgatcctgacggcggtcgttaacgcggtggacgttcctgtgactctcaagattcgcaccggttgggaaccggaacaccgtaactgcgtagagattgcccaactggccgaagagtgtggcattcaggctctgactattcacggacgcacccgcgcctgtttgtttaacggagacgctgagtacgacagtattcgggcagttaagcagaaagtttccattccgattatcgcgaatggcgacattactgacccgcttaaagccagagctgtgctcgactatacaggggctgatgccctgatgataggccgtgcagctcagggaagaccctggatctttcgggaaatccagcattatctggacactggagagctgctgcccccgctgccgctggcagaggtgaagcgcttgctttgtgcgcacgttcgggagttgcatgacttttatggtcaggcaaaagggtaccgaatcgcgcgtaaacacgtctcctggtatcttcaggaacatgctccagatgaccagtttcggcgcacattcaacgccattgaggatgccagcgaacagctggaggcgttggaggcatacttcgaaaattttgcgtaa

SEQ ID NO: 209806 - DNA, 882 bp, Klebsiella pneumoniae
atgccatggatccaactgaaactaaataccaccggcgcgaacgctgaagatcttagcgatgcgctgatggaggccggatcggtctcgatcaccttccaggatacgcacgatacgccggtatttgagccattgcccggggaaacccgcctgtggggggataccgacgtaatcggcctgttcgatgctgaaaccgatatgaaagcggtcgttgcccaactggagcagcatccgctgctgggcgccgggttcgcgcataagatcgagcagctggaagataaagactgggaacgggaatggatggataacttccaccccatgcgcttcggggagcggctatggatctgcccaagctggcgcgatgttccggatgaaaatgccgtcaacgtgatgctcgatccgggtctggcctttggcaccggtacgcatccgacgacatccttgtgtctgcagtggctggatggactcgacctcaacggaaaaacggtgattgatttcggctgcggctccggcatcctggcgattgccgcactgaagctgggggcggcaaaagcaatcgggattgatatcgacccgcaggctattcaggccagtcgtgataacgcgcagcgtaacggcgtttctgaacgcctggagctctatcttcctcaggaccaaccggagtcgatgaaagccgacgtggtggtcgcgaatatcctggcaggcccgttacgtgagctggcgccgttaatcagcgtcctgcccgtttcaggcggtttgctggggctttccggcatccttgccagccaggcggagagcgtctgtgaagcctatgccgatctcttcgcccttgacccggtggtcgagaaggaagagtggtgccggattaccggccggaaaaactaa

SEQ ID NO: 209807 - DNA, 1452 bp, Klebsiella pneumoniae
atgcagtttgaggtcattattcccctgatcgcctacctggtggtggtgttcggtttatccctctacgccatgagaaaacgcgcctcaggtagctttcttaatgagtactttctcggcagccgctcgatgggcggcttcgtgctggccatgacgctaaccgccacctatatcagcgccagctcatttatcggcggacccggcgccgcctataaatacggcctgggctgggtgctgctggcgatgatccagctccccgccatctggctgtcgctgggcgtgctggggaaaaaattcgccatccttgcgcgtcgctataatgctgtcaccctcaatgacatgctgtttgctcgctatcagagtcgcctgctggtctggctggccagcctgagtctgctggtggcctttgtcggcgccatgaccgtccagtttatcggcggcgcccgcctgctggagacggctgccggtattccttacgataccggcctgctgatcttcggggtcagcatcgcgctgtataccgcctatggcggctttcgcgccagcgtgctcaacgacacgatgcagggcatggtaatgctgatcggcacgatcgtgctgctggtgggcgtgatccacgccgccgggggggttggccatgcggtagagacgctgcagtcgatcgacgtcaagctggtgtccccgcagggcgcggaggatatcctctcgccaacctttatggcctcgttttgggtgctggtctgcttcggcgttattggtctgccacataccgcagtgcgctgtatctcctacaaagacagcaaagccgtgcatcgcggcatcattatcggcaccatcgtggtggcgatcctgatgtttggcatgcatctggctggggcattaggccgggcggtgatccccgatttaaccgtgccggatctggtgatcccgacgctgatggttaaagtgcttccgccctttgccgccgggatcttccttgccgcgccgatggcggcgattatgtcgacgatcaatgcccaacttctgcaaagttccgctacgatcatcaaagatctgtacctgaactggcggccggatcaggcgactaacgaaaagcggcttaaacgcatgtccgccggcatcacgctcctgctgggggtcttgttgctgctcgcggcctggcggccgccggagatgataatctggctgaacctgctggccttcggcggcctggaagccgtcttcctgtggccgctggtgctgggcctttactgggaacgcgccaacgcggctggcgcgctgagcgcgatgatcgtaggcggcgtcctgtatgccgtactggccacgctgaaagtgcagtttctgggctttcacccgatcgttcccgcgctgctgctgagtttgctggcgtttgtgacggggaacagtttcggtcgtcccgccccacagtcccccattttgactactgataaataa

SEQ ID NO: 209808 - DNA, 243 bp, Klebsiella pneumoniae; identical to SEQ ID NO: 139133

SEQ ID NO: 209809 - DNA, 1350 bp, Klebsiella pneumoniae
atgctggataaaattgtcatcgctaaccgtggcgagatcgcactgcgcatcctgcgtgcctgtaaagaactgggcatcaagactgtcgctgtgcactccactgcggatcgcgatctaaaacacgtattgttagcggatgagacggtctgcatcggtccggctccgtccgtaaaaagctatctgaacattccggccattatcagcgccgctgagatcactggcgcggtagcgattcacccgggttatggcttcctctctgagaacgctaattttgctgagcaggttgagcgttccggtttcatcttcatcggcccgaaagccgacactatccgcctgatgggcgacaaagtgtccgccatcaccgccatgaagaaagctggcgttccgaccgttccaggttctgatggcccgctgggcgacgacatggacgctaaccgcgcccatgccaaacgcatcggctatccggtgatcatcaaagcctccggcggcggcggcggtcgcggtatgcgcgttgtacgtagcgacgctgaactggcgcaatccatctccatgaccaaagcggaagccaaagcggctttcaacaacgacatggtctacatggagaaatacctggaaaacccacgccacattgaaattcaggtgctggcggatggtcagggtaacgcgatctatctggctgaacgcgactgctccatgcagcgccgtcatcagaaagtggtcgaagaagcgccggcgccgggcatcaccccggaactgcgtcgctacatcggcgagcgttgcgcgaaagcctgtgtggatatcggctaccgcggggcgggtacctttgagttcctgttcgaaaacggcgagttctacttcattgaaatgaacacccgtatccaggtagagcatccggtaactgaaatgatcaccggcgttgacctgatcaaagagcagctgcgtatcgcagccggccagccgctgtccatcaagcaggatgaagtggtagttcgcggccatgcggtggaatgccgtatcaacgccgaagacccgaacaccttcctgccgagcccgggcaaaatcacccgtttccacgcgccgggtggctttggcgtgcgctgggagtcacatatttacgccggttacaccgtaccgccgtactatgactccatgatcggtaaactgatctgctacggcgaaagccgtgacgtggcgattgcccgcatgaagaatgcgctgcaggagctgatcatcgatggcatcaaaaccaacgtcgatctgcagatgcgcattatgagcgacgagaatttccagcatggtggcaccaatatccactatctggagaaaaaactcggcttgcaggaaaaataa

SEQ ID NO: 209810 - DNA, 468 bp, Klebsiella pneumoniae
atggatattcgtaagattaaaaaactgatcgagctggttgaagaatcaggtatctccgaactggaaatttctgaaggcgaagagtctgttcgcatcagccgctctgcaccggccgcaagctatccggttatgcagcaggcttatgctgcgccgatgatgcagcctcaggcgcctgccgccgcgactgccgcaccagctgctgcggctgaagcgccggcgaaagcggaaatcagtggtcacatcgtacgttccccgatggttggtactttctatcgtacgccgagcccggacgcgaaagcgtttgtggaagttggccagaaagttaacgtgggcgacaccctgtgcatcgtcgaagcgatgaaaatgatgaaccagatcgaagccgacaaagccggcgtggtgaaagccattctgatcgaaagcggccaaccggtagaattcgacgagccgctggtagttatcgagtaa

SEQ ID NO: 209811 - DNA, 453 bp, Klebsiella pneumoniae
atggcagtgaagtttcacattttgcttttgaatggtccaaacattaacatgctcggtacccgcgagcctgagaagtatggccctctcacgctggctgaaattgttaaccgtttaacatctgaagcggcggcgctgaatgtgagtctggatcacctgcagtccaacgcggagcatgcgttaatcgaccgaattcatcaggctaaagacaacgtggactatatcctgattaatccggccgcgttcacgcataccagcgtagcaatccgtgacgctttgctcgccgtgaacatcccgtttatcgagattcacctgagcaatgtgtatgcacgcgaacccttccgccagcactcgtatctgtcagatgtcgccgctggcgtcatttgcgggctgggggcggatggttattcatacgctttacagacggcggtaaaacgcctgtcacaatcacactaa

SEQ ID NO: 209812 - DNA, 609 bp, Klebsiella pneumoniae
gtgcgtttcaccgtcaaacagatcgtctggctgaaggttttacttcaccttgcggggtttttgccgctggtctggttattctgggccgggcaccagggctactttagcgccgatccagccaaggatatccagcactttaccggcagaatggcgcttaagtttctgctggcgacgctgctggtctctccgctggcgcgctatgcgaagcagccattattgattcgcgttcgtcggctgttaggtttatggtgttttgcctgggcgacgctgcacctgaccagctataccctactggagctgggcattaacaatctggcgctgctgggctcggagattatcacccgcccctatctgacattgggcatgatcagctgggcgattctgctggcgctggcggtgacctccacgcaagcgatgcagcgaaaactggggcgtcgctggcaacttttacacaacttcgtctatctggtggtgatcctcgcgccgatacactacctgtggtcagtgaagatcgtctcgccgcagcccgttatatatgccctgctggcagcggggctattgacatggcgttacaagaagttccgccagtggtggcgcgcaatccggtaa

SEQ ID NO: 209813 - DNA, 1002 bp, Klebsiella pneumoniae
atgaaaagaaaaaaactgacggaagccgacgtcacggccgaatccgtttttatgctcaagcggcgccagatgctgaaaatgctgggcatcagcgcgaccgcgctttcccttcccgccgccgcgcaggccgacctgctggactggtttaaaggccacgaccgcccaccagcgccagcgggcaaggccctggagtttgctaaacccgccgagtggcaggctaatttgacgcttaccccggaagataaggtcgccggttacaataatttttatgaattcggcctcgataaagccgatccggcggcgaacgcgggtagcctgcgcaccgatccctggacgctcaccatcggtggcgaagtggcgaaacctctgacccttgaccatgacgatctgaccaaacgcttcccgctggaagagcgcatttatcgtatgcgctgtgtggaagcctggtcgatggtggtcccctgggtcggcttcccgctgcataaactgctggcgctggtggagcccaccagcagcgcgcgctatgtggccttcaaaaccctctatgctccggatcaaatgcccggccagaaagaccggtttatcggcggggggctcgcttacccttacgtggaggggctacggctggatgaagcgatgcacccgctgacgctactcaccgtcggggtgtatggcaaagcgctgccgccgcaaaacggcgcgccggtccgcctgaccgtgccgtggaagtacggttttaaaggcataaaatccattgttagtatcgagctgacccgcgagcggccgccaaccacctggaacctggcggcgccggacgaatacggcttcttcgccaacgtcaatccgcacgtcgatcacccccgctggtcgcaggctagcgagcggtttatcggcgccggcggcgtgctcgatgtgaagcgtcaaccgacgttgctgtttaatggctatgccgacgaagtggcgtcgctgtatcgcggcatgaatctgcgggagaacttctag

SEQ ID NO: 209814 - DNA, 1941 bp, Klebsiella pneumoniae
atgcgattaacgacgaagttctcagcctttattacgctgctaactagcctgaccatctttgtcacgctgattggcgcttcgctgagtttttataacggcattgagaacaaggtcgaaaaccgcgttcaggcggtggcgaccatgctggataaccggctcatcaccacctctttcgataagcttgaaccgcagttggatgagctgatgacgccgatcgagatcgtgcatatcgatttcatgctcaacggcaaaccgctctacagccattcccgacccgatagctatcgcccgctcggcagccatgagcaattccgtgagatcacggttcagtcgcttaaacatcctggtattacgctgcatctggtctacgttgacccgatggtgaactatttccgttcgctgtcgatcactgccccgctgtcgatctccattggcttcatggtggtgattattttcttcgccgtccgctggatccgccgccagctggccggccaggagctgctggagctgcgttccacgcgtatcctgagcggcgagcgcgggccgcaggtgcgcgggtcggtctatgaatggccggccagcaccagtagcgcgctggatatgctgctgtcggagctgcagttcgccagcgatcagcgcagccggatggatacgcttattcgctcctacgcggcgcaggattcgaaaaccggactgaataaccgcctgttttttgacaatcagctggccacgctgctggaagaccaggagaaggtgggagcctacggcatcgtgatgatgatccgtctgccggagtttgatctgctacgggacaactggggacgggcggcggccgaagaacattactttacgcttatcaacctgctctctacctttattatgcgttaccccggcgcgctgttagcgcgctatcaccgtagcgacttcgccgtgctgctgccgcaccgtacgttgaaagaggcggatagtatcgccggcctgttgctgaaggcgatggatgcgctgcctccaacgcgtatcctcgatcgcgacgatatgatgcatatcggcatctgttctttccgcagcgggcaatcggcggcgcaggtgatggaacatgcggaagcggcgacgcgcaacgcggtgctgcagggcagcaacagctggtcggtctatgatgacacccttccggagaaaggtcgcggcaacgttcgctggcgaacgctgatcgaacagatgctgagccgcggcgggccgcggttgtaccaaaaacctgctgtcacccgcgacgggcgggtacatcatcgtgaactgatgtcgcggatgtacgacggtaaagaagaggtgattgcagcggaatacatgccgatggtgctgcagtttggcctggcggaggagtatgaccgcctgcaggtaacgcgcctgctgccgtttttaggcttctggcccgaggagaatttggcgctccagctgtcggtggagtcgctgatccgtccgcgtttccagcgctggctgcgcgatgccttgatgcagtgtgaaaaatcgcagcgtcagcggattatttttgaacttgcagaggcagatgtttgtcaatatatcggccgtctgcagccggttatgcgattggttaacgctctgggcgttcgggtggcagtggttcaggcggggttaaccctggttggaaccagctggatcaagcagctggatgcggagctgatcaaactgcatccgggtctggcgcgcaacatcgaaaagcgcagcgagaaccaactgctggtgcaaagcctggtggaagcctgtaaaggcatgcctatgcaagtttttgcgacgggcgtacgcagccgcagcgagtggttggtactgtcccaatgcggtgtcacgggcgggcagggggaattttttgccgcctcacagccacttgacacaaatgtgaaaaaatattcgcaaagatactcggtttga

SEQ ID NO: 209815 - DNA, 1044 bp, Klebsiella pneumoniae
atgttaaaaaaatttcgtggcatgttttccaatgacctgtccattgacctgggtaccgcgaatacccttatttacgtaaaaggacaaggcatcgtattgaatgagccttccgtggtggccattcgtcaggatcgtgccggatcgccgaaaagcgtcgccgccgtgggtcatgaagcgaagcagatgctcggccgtaccccgggtaatatcgcggcgattcgcccgatgaaggacggcgttatcgctgacttcttcgtgacggaaaagatgctgcagcactttatcaaacaagtgcacagcaacagctttatgcgcccgagcccgcgcgtgctggtgtgtgtaccggttggcgcaacccaggtcgaacgtcgcgctattcgtgaatccgcgcagggcgcaggcgcccgtgaagtcttcctgatcgaagagccgatggcggcagcgattggcgcaggcttaccggtttctgaagcgaccggctccatggtggtggatatcggtggcggtaccactgaggtggcggttatctccctgaacggcgtggtctattcctcttctgtacgtatcggcggtgaccgcttcgacgaagccgttatcaattacgtgcgtcgtaactacggctccctgatcggtgaagcgaccgctgaacgtatcaagcatgaaatcggttcggcttacccgggcgatgaagtgcgcgaaattgaagtgcgcggtcgtaacctggcggaaggcgtgccacgcggcttcaccctgaactcaaacgaaattcttgaagcgctgcaggagcctctgaccggcatcgtgagcgcggtcatggttgcccttgagcagtgcccgccggaactggcgtctgatatctctgaacgcgggatggttctcaccggcggtggtgcgctgctgcgcaacctggaccgtctgttaatggaagaaaccggtattccagtcgtggttgctgaagatccgctgacctgcgtagcgcgtggcggcggcaaggcgctggagatgatcgacatgcacggcggcgacctgtttagcgaagagtag

SEQ ID NO: 209816 - DNA, 993 bp, Klebsiella pneumoniae
atgaagccaatttttagccgtggcccctcgctacagattcgccttattctggcggtgctggtggcgcttggcgtgattatcgccgacagccgcctgggtacgttcagtcaaatcagaacgtacatggatacagccgtcagccctttctactttgtctctaatggtccccgggaactgctcgacagcgtatcgcagacgctagctacccgcgaccagctcgaactggaaaaccgcgcgctgcgccaggagctgttgctgaaaaacagcgatctgctgatgctgggccagtacaagcaggagaacgcgcgcctgcgtgaactgcttggctcgccgctgcgccaggacgagcaaaaaatggtgacgcaggtcatctcaacggtcaacgacccttacagcgatcaggtggttattgacaaaggcagcgtgaacggcgtctatgaaggccagccggttatcagcgataaaggcgtcgtggggcaggtcgtggccgtggcgaaaatgaccagccgggtgctgctgatctgcgatgccactcatgcgctgccgatccaggttctgcgtaacgacattcgcgtcattgccgccggtaacggctgcacggacgatctccagcttgagcatctgccggcgaataccgatattcgcgtcggcgacgtgctggtgacctccggtctcggcggtcgtttccctgaagggtatccggttggggtagtctcctcggtgaaactggacacccagcgcgcctataccgtgattcaggcgcgtccgacggccgggctgcagcgcttgcgctatctgttgctgctgtggggcgccgatcgtaatggcgctaacccgatgaccccggaagaggttcatcgggtggctaacgaacgtctgatgcagatgatgccgcaggtactgcctgcgccggatgcgatggggccgcagatgccggcgcccgccaccgggttgacgccgcctcagccgtcgcagcctgcaggggggcaatag

SEQ ID NO: 209817 - DNA, 489 bp, Klebsiella pneumoniae; identical to SEQ ID NO: 138512

SEQ ID NO: 209818 - DNA, 582 bp, Klebsiella pneumoniae
atgacaactctgtatctcgcttctggttccccgcgtcggcaggaactgctgactcagcttggtctcgctttcgagcgtctggttcctggtattgaggagcagcgccagccgcaggagagcgcccagcactatgtcgtccgcctggcgcgcgaaaaagcgcaggccggggtggcgatggccacccgcgatttgccggtgctgggagcggatacgattgtcattttgaacggcgaagtgctggaaaaaccgcgcgacgccgaacacgctgcagcgatgctgcgtttgctttccggccacacccatcaggtcatgaccgcggtggcgctggcggataagcagcaaacgctggactgtctggtggtcacggaagtgaccttccggcggctcagcgagcaggatatcgccgattatgtggccagcggcgagcctttagataaagcaggtgcatacggtattcaagggttgggtggttgcttcgtcaggaagattaatggcagctatcacgccgtagtcggcttaccgctggtggaaacgtatgagttgctcagtaactttaactcactgcgtaaaggaaagggataa

SEQ ID NO: 209819 - DNA, 1470 bp, Klebsiella pneumoniae
atgacggctgaattattagttaacgtaacgccatccgaaacgcgcgttgcgtatattgatggcggtattctgcaggaaatccatattgagcgtgaagcgcgacgcggaatagtaggcaatatctacaaaggtcgtgttagccgagtgctgccgggaatgcaggcggcttttgtagatattggtctggataaggcggcgttccttcacgcctccgatatcatgccgcataccgagtgcgtcgccggtgaggagcaaaagcagtttaccgtgcgcgatatttcggagctggtgcgccagggccaggacctgatggtccaggtggttaaagatccgctgggtaccaaaggcgcgcgtctgaccaccgatattaccctgccttcccgctatctggtctttatgccaggcgcctcccacgtgggggtctctcagcggattgaaagcgaagccgagcgcgagcgcctaaaaaaggtcgtcgcagaatattgcgatgagcagggcgggtttatcattcgcaccgctgcggaaggcgttcacgagcaggagatggccgccgatgccgcttatcttaagcgcgtatggaccaaggtgatggagcgcaaaaagcgcaaccagacccgctatcagctgtatggcgagctggctctggcccagcgcgtgctgcgtgattttgccgatgcgcaactggatcgcattcgcgtcgactcgcgcctgacctatgaggcgttgctcgaattcaccgccgaatatatcccggaaatgaccagcaagctggaacactacagcggccgtcagccgatattcgatctctttgacgttgagaacgaaattcagcgcgcgctggagcgtaaagtcgagctcaaatccgggggctatctgatcatcgaccagaccgaggcgatgaccaccatcgatatcaacaccggggcctttgtcgggcaccgcaatcttgacgatacgatcttcaataccaacatcgaagccacccaggcgatagcccgccagctacgtttgcgtaatctcggcggcattatcatcattgatttcatagacatgaacaatgaagatcaccgtcgacgggtgttgcactctttagagcaggcgctgagtaaagatcgggtgaagaccagcattaacggcttctcccagctgggcctggtggagatgacccgtaaacgcacccgtgaaagcgtggagcatgtgctgtgcaacgagtgcccaacctgccacggacgtggaacggtaaagtcggtggaaacggtgtgctatgagattatgcgtgagatcgtccgcgtacatcatgcttatgattccgatcgcttcctggtctatgcttcccctgcggtggcggaaaccctgaaaggggaagagtcgcatgcgctggcggaagtggaaatctttgtcggcaagcaggtgaaggtacaaattgagccgctctataatcaagagcagttcgatgtggttatgatgtaa

SEQ ID NO: 209820 - DNA, 3798 bp, Klebsiella pneumoniae
gtgaggcgactgcccgggattttattgctcaccgtggcaacattgattgttatcgtcgcgctgctggtgagtggcttgcgtctcgtgttgccacagctcgacgcctggcgtccgcagctgctggagaagatctccaccctcaccggtacgccggtggacgcctcgcagatcaccgccagctggcagacttttggtccgacgttagacgcccgcgatatccatgtcgggctgaaagatggcggcacaatggcggtcaagcgcgtaaccctggcgctggatgtctggcagagcctgctgcatatgcgctggcagttccgcgacctcaccttctggcagctgcaggcccataccaatacccctattcagaccaatgacggtggcgaaagcctgaaaaccgaccgcatcagcgatctctttttacgtcagttcgatcactttactctgcgcgacagccatttgagcttcctgaccctttccggtcagcgggcggagctggcggttccgcagctgacatggcttaacggcaggaaccgtcatcgcgccgaggggcagctcagcctctccagcctcaccggccagcatggcgtcatgcaggtgcggatggatcttcgcgatgaggatggcctgctgaataaaggccgggtctggctgcaggcggatgatatcgacgtcaaaccgtggctgggacgctggatgcaggacaatatcgccctgaaaagcgcccgcttcagcctcgaaggctggatgaccattgaaaaaggcgatgtggccagcggcgacgtatggctgaaaaaagggggcgccagctggcagggcgataacgaagtccatcatttgtcggtggataacctgacggcgcatctctcccatgataagcaaagctgggccttttatattcccgatacgcggatcgctatcgatgataaaccctggccaagcggagccctggcgatggcatggatcccggcgcaggacgttggtggcgacgatcgtcagcgtagcgatgagttacgtattcgcgccagcaatttggccctcagcggcctgagcgggttacagccgtttgctgataagctggcgccttctctgggcgaactctggcgtaccacgcagcctggcggcaaaatcaatttgctggctctcgatatccccctgcaggcgacggagaaaacgcgttttcaggcgcagtggagcgatctggcgtggaagcagtggaaactcctgccgggggcagagcacttctccggcagtctgaatggcagcgttgagcacggggaattacgcgcccatatggcgaaggcgctgatgccgtatgccggcgtcttccgcgcgccgctggagatagccgctggcgaagccacgctcagttgggtgaaaaacgacaaagggtttatgcttgatggccgcgatatagacgtgcaggcgacaggcgtacgcgcccgcggcggcttccgctatctgcaaccgcagggggacgatccctggctgggcattctggcgggcatcagcaccaatgacggtggccaggcatggcgttatttcccggaaaatctgatgggcaaagcgctggtggactatctcagcggcgcgattaaagcggggcaagccagcgatgcgacgctggtgtatggcggcaatccgcatctatttccttatccgcataatgaaggccagttccaggtttatgttccgctgaagaacgccacttttgccttccaaccggactggccggcgctaaccgggctgaacatcgacctcaattttatcaacaacggcctgtggatgcgggcggataaagcgatgcttggcaacgtgaccgccagcaatctcgatgccgcaatcccggactatgcgcaggaaaaactgctgattgatgccgatatcaaaggcccgggcaaagaggttggaccttactttaatactacgccgctgaaagagtcgctcggggcggcgctggattccctgcagctggatggggatgtgagcgctcgcttacatctgaatatccccctcgacggcgagatgaccaccgcgaaaggcgatgtgcgcctgcagaataatagcctgtttatcaaaccgttagatactacgctgcagaacctgagcggtaatttcagctttgtgaatggcgatctcaatagtcaaacgttgagcgcgacctggtttaatcagccgctgaacctcaatttttccacccgcgaaggtgaaaaagcgtttctggtggatgtcgggatgaatgccaactggcagccgtcgcgcaccgggctgctgccgaaagccgtgagtgaggcgttgagcggtagcgtcccgtgggatggcaaggtcgccatcgaactgccgtaccatggcaatgccagctataaggtcgatatcaacggcgatctgaagaatgtgagcagtcgcttaccttcgccagtcagtaagcccgccggcgaaccccttccggtcaaaattaacgtcgccggcggcctgagcagcttcgacctgaccggctccgtcggggcgaagaatcatattaacagccgctggttgctcaatcataagctgacgctggatagagcgatccttaccactgacagcaaagggcactctccgctgcccgatcagcccggtatcgagcttaatctgccgccgatggatggcgcgcagtggctggcgctcttcgagaacggcgcggcaaatgaagtgagcagcagcgtgctctttccaccgcgcattgtgctgcgtacgccgtcgctggcccttgcggggcaacagtggaacaacgtcagtctgatgtcccagccggtcgccggcggctcgcaggttgaggcgcaggggcgtgagatcaatgccacattgacgatgcgcgacaatgctccgtggctggcaaatgtgcgttatctctatttcaatccggccagcgccagcggccagaacgcaacagagaatgtggccccccagacggcgacgcggctggatttccatggctggcccgatctgcagctacgctgcgcggaatgctggctgtggggacaaaaatatggccgcatcgatggggatgtggcgatcaaaggggataccttaacgctctccaacggcctggtggataccgggtttggccggctgacgaccaacggcgtgtgggtgaacgccccttcaggggttcgaacctcgctgaaaggcagactgcacggcaataagacggatgcatttgcggatttctttggcgtctccacgccggtgaaggattcgccgtttgatatcgactacgatctgcactggcgcgcgccgccctggtcacccgatgtcgcgtcgctcaatggcatcattaaaagccacctgggcaaggggcagtttaccgacctgagtaccgggcacgctggccagctgctgcgtctgctgagtgtggatgccctgctgcgtaaactgcgtttcgatttcagcgataccttcagcgaaggcttttacttcgattcgattaacagtacggcatggattaaggatggcgtactgcataccgatgatacgctggtagatggccttgaagcggatattgctatgaaagggtcggtcgatctggtgcgtcgccagctggatctgcaggcggtggtggcgccggagatctccgcgaccgtcggcgtggcggcggcctttgccgtcaaccccatcgtcggcgcggcggtatttgccgccagcaaagtgctgggtccgctgtggaataaagtttcgattctgcgctaccgcatcaccggcccgattgaccagccgcagatcaatgaagtgctgcgccaggcgcgcagcaataaaaagcaatga

SEQ ID NO: 209821 - DNA, 1446 bp, Klebsiella pneumoniae
atgagtctgaacctggtaagtgaacaattactgtcggcaaatggcctgaatcatcaggacctgtttgccattcttggtcaactgaccgagcgccgcctcgattacggcgatctctattttcagtcgagctatcacgaatcctgggttctggaagacagcatcattaaagatgggtcgtacaatatcgatcagggcgtaggcgtgcgcgccgtcagcggcgaaaaaacgggctttgcctacgccgatcagatcagcaaactggcgctggagcagagcgcccaggcggcgcggaccattgtgcgcgacaccggcaatggcaaagtgcagaccctcggcgccgtagagcatcgtgccctgtacaccagcatcgacccgctgcagagtatgacccgggaagagaagctggatattctgcgccgggtagacaaagtcgcccgggcggcggaccagcgggtgcaggaggtttcagccagcctgagcggggtgtatgagctgatcctgatcgccgccaccgatggcactctggccgccgacgttcgtccgctggttcgtctttccgtcagcgtgctggtggaagaggatggcaagcgtgagcgcggcagcagcggcggtggcgggcgttttggttatgactatttcctcgcctcccaggagggcgacgtgcgggccgatgcctgggcgaaagaagcggtgcgcatggcgctggtcaacctctcggcggtcgccgcccctgcggggatgctgccggtggtgctcggcgccggctggcctggcgtcctgctgcatgaagcggtcggccatgggctggaaggcgatttcaaccggcgtggcacctcggtctttagcggccatatgggggaattagtcgcctctgaactgtgcaccgtagtggatgacggcaccatcgccgatcgccgtggctcggtggccattgatgacgaagggacgccggggcaatacaacgtgctaatcgaaaacggcattctgaaaggctatatgcaggataaactcaacgcgcgcctgatgggcgtcgcaccgaccggcaatggccgacgtgagtcgtatgcccatctgccgatgccgcgtatgaccaacacctatatgctggcgggccagtcgacgccacaggagattatcgaatcggtcgactacggtatctttgcgcctaacttcggcggcgggcaggtggatatcacctccggtaaattcgtcttttccacttccgaggcctatctgatcgaaaaagggaaggtcacgaaggcggtgaaaggggccacgctgattggctccggcattgagaccatgcagcagatttcgatggtgggcaacgacctgcgcctggataacggcgtcggcgtctgtggcaaagagggccagagcgtgccggtgggcgtcggccagccgaccctgaaggtcgataaccttaccgtcggcggcaccgcctga

SEQ ID NO: 209822 - DNA, 930 bp, Klebsiella pneumoniae
atggaacgattaaaacgcatgtccgttttcgccaaagtggtcgaattaggttcattcaccgcagcggcccgccagcttcagatgagcgtttcctcgatcagtcagaccgtcgccaaactggaagatgaactgcaggtaaagctactcaaccgcagcacccgcagccttggcttaactgaagcaggtaaaatctattaccagggctgccgtaggatgctgtttgaagcgcaggatgtccatgagcaattatacgcatttaacaatacccccatcgggacgctgcgcatcggctgctcttcaactatggcacagaatgttctggcgcgcataacggcgaaaatgctcaaagaataccccgggctctctgttaatctggtcacaggcatacctgcgccagacctgatcgccgacggccttgacgtggtgatccgcgtgggcgccctgcaggattccagccttttttcccgccgcctgggctcaatgccgatggtattatgcgccgctaaaagctatctggcgcaggctggcaatccagagaaaccggccgaccttgccggacatgcctggctggaatatagcgtgcggccggacaatgagtttgtcattatcgcgccggaagggatctcgacccgcctgaccccgcaggggcgcttcgtgaccaacgaccctatgacgctggtgcgctggctgaccgccggggtgggtatcgcctatgtacccttaatgtgggcgatcgaagagatcaaccgcggtgagcttgagatcctgctgcccagctatcagtccgatccgcgaccggtctacgccctgtatacggaaaaggataaactgccgctgaaagtgcaggtctgtatcaactatctgacggagtattttgtcgacgtggcgaagatctatcagggcatgcacgggcgcgggatcgcccggtga

SEQ ID NO: 209823 - DNA, 204 bp, Klebsiella pneumoniae; identical to SEQ ID NO: 138542

SEQ ID NO: 209824 - DNA, 933 bp, Klebsiella pneumoniae
gtgaaaacactaacaagaaatatcctccgtactgccattaccgtgatactggtcattctggccttcgtggcgattttccgcgcctgggtttattacaccgcctcgccgtggacgcgtgatgcgcgctttagcgccgacattgtggcgattgcccccgacgtctccgggctgatttctcaggtaaacgtcaaggataaccaactggttaagaaagaccaggtattgttcgttattgaccaacctcgttaccaaaaagcgctggcgcaggcggaagctgatgtcgcctattatcagacgttagctcaggaaaaacgcgtcgaagccggtcggcgtaataagcttggcgtacaggcgatgtcgcgggaagagattgatcaggcgaacaacgtactgcaaaccgttgaacatcagctggcgaaagcggtggctagtcgcgacctggccaggctagatctggagcggacggtcattcgcgcccctgcggatggctgggtgactaaccttaacgtctacactggggaatttatcacccgtggctccacggcggtggcgctggtgaaagagaatacgttttacgtcatggcctatctggaagagaccaaactggagggcgtccgtccaggctatcgtgcggagattaccccgctgggcagcagcaaaaccattaaagggacggtggacagtatcgctgcgggggtgaccaacgccagcagcagcagcgactcgaaagggatggcctcggtcgactccaaccttgagtgggtgcgtctggcgcagcgtgtgccggtgcgtattcgcctcgatcaccagcaggggaatctgtggccatcgggcaccacggcgacggtagtgatcaccggtcaagaagatcgtgataccagccaggccaacttcttccagaaactggctatgcgcctgcgcgaatttggttaa

SEQ ID NO: 209825 - DNA, 1968 bp, Klebsiella pneumoniae
atggggacatataccattgctccccggcatctccgctttgccattaagcttgcatgcgcggtggtgctggcgctgtttgtcggtttccattttcagctcgaaacgccgcgctgggcggtactgacggcagcgatcgtcgccgccgggccggcctttgctgctggcggcgaaccgtactccggcgcgatccgctatcgcggtatgttgcgtattgccgggacctttattggctgtattgcggcgctggttatcatcatcctgatgatccgcgcgcctctgttgatgatgctggtctgctgtctgtgggccgggttttgtacctgggtttcgtcgctggtcaaggtcgaaaactcctatgcctgggggctggccgggtacaccgcgctgattatcattattaccatccataccaatccgatgctggcgccgcagtttgctgtcgaacgctgcagcgaaattgtcatcggtattgtcagcgccatcgtcgccgatctcctgttttcgccgcgttcgattaaaaaagagatcgacctcgagctcgataatctgctaattgcacagtataagctgatgcagttatgcgtcgcgcacggtgaaaaagaggaagtggatcaagcctggggagcgctggtacgccgcactacggcgctggaaggtatgcgtagtaacctgattatggaatcctcacgctgggcaaaggccaatcagcgcctgaaggcgatcaacaccctttcgctaacccttatcacccaggcttgcgaaacctatctgattcagaactcacgcccggaaatggtcacggacgactatcgcgagctgttcgccgagccggttgagacggtgcaggatgttcaccagcagctgaagcgcatgcgccgcttcctgacctggaaaggcgagcataataccccggtcacgatttatagctgggtgggcgccgccacgcgttacctgctgcttaagcgcggcgtggtggggaatactaaaatcagccgtatcgaggatggcgtgttgcgcggcgaaacggtggttaaagtggaatccgccgaacgtcatcacgcgatggtgaacttctggcgcacctctgtctcctgtattctcggaacgctattctggctgtggacgggctggacctcaggcagcggcgcgatggtaatgatcgccgtggttaccgcgctggcgatgcgcctgccaaacccgcgtatggtggcgatagacttcctctatggcaccctggcggcgttaccgttgggcaccttgtacttcctggtgatcatgccggcgacgcagcagagcatgctgttgctctgcatcagcctggcggcgatggcgttctttatcgggatcgaagtgcagaaaaggcgtctcggatcgctgggggcgctggcgagcaccatcaacattcttgtgctggataacccgatgcagttccagttcagccagttcctcgatagcgcgctggggcagatcgtcggctgtttcctcgctctgatggttattcttattgtcagggataactcccgggccagaaccggtcgggtgctgctgaaccagtttgtctccgcggcggtctcttcgctgaccaccaactcggcgcgtcgcaaagagaatcatctgcccgcgctctatcagcagctgtttttattactcaataaattcccaggtgacgtcgcccgtttccgtctggccttgacgttaatcatcgcccatcagcgcttgcgcgatgcgcccgtgccggtgaacgacgatctctccgccttccatcgtcagctgcgacgtaccgcggaccatgtgatctccgccggcagcgatgataagcgtcggcgctattttacccagctgctggcggagcttgatgtctatcaggagaagctgcgggtctgggaggcctcgccgcaggtcaccgagccggtacggcgactggttgagatgttgcataagtaccagcatgtgctgaccagcagctaa

SEQ ID NO: 209826 - DNA, 276 bp, Klebsiella pneumoniae; identical to SEQ ID NO: 138539

SEQ ID NO: 209827 - DNA, 267 bp, Klebsiella pneumoniae
atgaaacgcgcaatgatcatcgcatcccttggcctggcttcccttctctctttcggtgccagcgcggctgtccagcaagtgaacgcagaacaagcccaaaatctgcaatccatgggcaccatctccgtatcccaggtaggtagtgcgccaatggacatgcgtcaggaactggcggctaaagccgagaaagaaggcgccagcagctaccgtattattgaagcacgtaccggcgatagctggcacgccaccgctgagctgtacaaataa

SEQ ID NO: 209828 - DNA, 264 bp, Klebsiella pneumoniae
atgaaaatcaaaaccactgtagctgctatcagcatcctgtccgtcgtgtcgtttggcgctttcgccgctgatattatcaacagcgagcaggcccagggccgcgaggccatcggcacggtttccgtcggcgcggtagcatcttccccgatggatatgcatgaaatgctgaacaaaaaagcgcaggaagaaggggcttcttcttaccgcattattgaagcccgcactggcgaccactggcatgccactgctgagctgtataaataa

SEQ ID NO: 209829 - DNA, 471 bp, Klebsiella pneumoniae; identical to SEQ ID NO: 138764

SEQ ID NO: 209830 - DNA, 939 bp, Klebsiella pneumoniae
atgaaagttgcagtccttggcgctgccggtggtatcggccaggcgcttgccctactacttaagacccaactgccttcaggttcagagctctcgttgtacgacatcgctccggttacgccgggcgtggcggtagatctaagtcatatccccacagatgtaaaaattaaaggattttccggtgaagacgctactccggcgctggaaggcgcggatgtagtgctgatctccgcgggcgtggcgcgtaagcccggcatggatcgttccgacctgtttaatgtgaatgcgggtatcgtgaagaacctcgtgcagcagattgccaaaacctgcccgcaggcctgcatcggcattatcaccaacccggtgaataccaccgtggctatcgccgccgaagtactgaaaaaagccggcgtgtacgataaaaacaaactgttcggcgttaccacgctggacatcatccgttccaatacctttgtggcggagctgaaaggtaaatcggcaaccgaggtggaagtcccggtcattggtggtcactccggggtcaccattctgcctttactgtcgcagatccccggcgtcagctttagcgatcaggaaattgccgacctgactaaacgtattcagaacgccggtaccgaagtcgtggaagcgaaagcgggcggcgggtcggcgaccttgtcgatgggccaggcggctgcccgttttggtctctctctggttcgcgccatgcagggggaaaaaggcgtggtggagtgcgcctacgtggaaggcgacggccactatgcgcgtttcttctcccagccgctgctgctggggaaaaacggcgtggaagagcgacagtctatcggcaaactcagcgcctttgaacagcaggcgctggagggcatgctggacaccctgaagaaagatatcgcgctcggcgaagacttcgtcaacaagtaa

SEQ ID NO: 209831 - DNA, 1059 bp, Klebsiella pneumoniae
atgcctggaaagttattacgttcagtactcatcggtttgcttgtcgggggtctgctgctggccctgatgccctcgctgcgccagtggcagttggcgccgactacccagaacgatacggcagacgactccccggcgagctataacgccgcggtgcgccgcgcggcgcccgccgtggtgaacgtctataaccgcgcccttaacagcaccagccataatcagctgacgcttggctcaggggtgattatggatcagcgcggctatatcctgaccaacaagcatgttatcaacgatgccgatcagattatcgtcgccctgcaggacggccgcgtcttcgaagcgctgctggtaggatccgattccctcaccgatctcgccgtgctcaaaatcaatgctaccggcgggctgccggtgatcccgatcaatccgaaacgcacgccgcacatcggcgacgtggtgctggcgattggcaacccttataacctggggcagaccatcacccaggggattatcagcgccacagggcgcattggcctcaatccgaccggccgccagaacttcctgcagactgacgcctcgatcaaccacggtaactccggcggggcgctggtgaactccctcggcgagctgatggggattaacaccctctcctttgacaagagcaatgacggcgaaacgccggaaggcattggctttgcgatcccgttccagttagcgaccaaaattatggataaactgatccgcgatggccgggtgatccgcggctatatcggcattagcggccgggagatcgccccgctgcacgcgcagggcggagggatcgatcagattcaggggatcgtcgttaacgatgtcgccccggacggtccagcggcgcaagccgggatccgcgccaacgacgtaatcatctccgtgaatgacaaacccgccgtctcggcactggagacgatggatcaggtggccgagatccgcccgggatcggaaattccggtggtcatcatgcgtgatgataagaaaatcacgctccatatcgccgtccaggaatacccggccaccaactaa

SEQ ID NO: 209832 - DNA, 1368 bp, Klebsiella pneumoniae
atgaagaaacagactttgctgttgagtgcgttagcgttaagcattgggttatcgttgtcggtcctgcctccggcagcggcatccttaccgactcaggtgcccggccagggcgcgttaccaagcctggcgccgatgctggaaaaggttctgccggcggtggttagcgtacaggtggaaggcactgcctcgccgacgctcaatatgccggaagagctgaaaaaatattttggcgataacgccccgcaggagcaggcgcagccgtttgaagggctcggctccggcgttatcatcgacgcggcgaaaggctatgtgctgaccaataaccacgtcatcaatcaggcgcagaagatcagcgtccagctgaacgatggccgtgagttcgatgccaaactggtcgggagcgatgaacagagcgatatcgctctgctgcagctgattaagccagaccacctgacgcaaatcgccattgctgactctgataaacttcgcgtcggcgacttcgccgtcgccgtcggcaacccgttcggccttggccagaccgccacatccggcattatctctgcccttggccgcagcggcttgaaccttgaagggctggagaatttcattcagaccgacgcctcgattaaccgcggcaattccggcggcgcgctgctgaacctcaacggcgagcttatcgggatcaacaccgcgatcctcgcgccgggcggcggcagcatcggcatcggctttgccattccaagcaatatggcgaaaaccctcgccgaccagcttattcagtttggcgaaatcaagcgcggcctgttgggcattaaaggcatggaaatgagcgccgacatcgccaaagcgatgaatctcaacgttcagcgcggcgccttcgtcagtgaagtcctgccaaactccggctccgccaaagcggggattaaatccggggacgtcatcgtgagtctgaacggcaaaccgctgaacagtttcgccgaactgcgttcgcggatcgccaccaccgagccgggtaccaaggtcaaactgggcctgctgcgcgatggaaagccggtcgatgtcgaagtgaccctggataagagcacctcctcaaccgccagcgcggaactgattatcccggcgctgcagggggcctcgttcagcgacggccagatgaaagatggcaccaaaggagtggtgatcggtaatgtggataaaggcagcgccgccgcccaggtcggtctgcataaggatgacattatcattggccttaaccggcagcgtattcactcaattgccgaactgcgcaaagtgctcgaaggcaaaccgccggtcatcgccctgaacgtgatccgcggcaacgaaagcatctatctgctgctgcgctga

SEQ ID NO: 209833 - DNA, 399 bp, Klebsiella pneumoniae
atgacctgggaatacgcgctaattgggttagtcgtcggtatcatcattggtgccgtcgccatgcgtttcggcaaccgcaaactgcgccaacagcaggcgctgcagtacgaactggaaaagaataaagccgagcttgaagagtaccgtgaagagctggtgagccactttgcgcgtagcgccgaactgctggataacatggcgcacgactatcgtcagctatatcagcatatggcgaaaagctctaacaacctgctgccggactcgatggcagacgccaacccgttccgcaaccgtctggaagagtctgaagccagtaacgatcaggcgccggtccagatgccgcgcgactactccgagggcgcatccggtttactgcgcggaggcgcaaaacgcgattaa

SEQ ID NO: 209834 - DNA, 1128 bp, Klebsiella pneumoniae
atgcaaagcctgtctccaacatcgcgttaccttttagccctgaaagagggcagccatcaacccgacgacgtccagcaagaagcggtgagccgccttgataccatttaccaggaactgcagacgcagcccgcgccggtcgcgtcaggcggcggtttgcgcgcgaaattcggcaaactgctgggtaagcgcgagccggctgccgggacggcacctgtccgcggcctgtatatgtggggcggcgtggggcgaggcaaaacctggctgatggacctgttttaccagagcctgccgggcgagcgtaaacagcgcctgcatttccatcgtttcatgctgcgcgtacacgaagagctgaccaccctgcagggacatagcgacccgctggagatcgtcgccgaccgctttaaagcggaaaccgacgtgctctgtttcgacgagttttttgtctccgatattaccgacgccatgctgttgggcgggctgatgaaagccctgttcgcccgcggcatcaccctggtggcgacctccaatattccgccggatgaactctatcgtaatggcctgcagcgggcccgttttctgccggcgatcgatgccatcaagcagcattgcgatattatgaacgtcgatgccggcatcgattatcgactgcgtaccctgacgcaggcgcacctgtggctgtcgccgctgaataacgacacccgcgaacagatggataaattgtggctcgcgctggcgggcgcgccgcgcgctgccgggccgacgctggagattaaccatcgcgagctgcctaccctcggcgtagaaaaccagacgctggcggcgtcattcgccacgctatgcgtggatgcgcgcagccagcatgactatatcgcgctctcccgactgttccatacggtgatgctgttcgacgtgccggtgatgaccgcgcagctggagagcgaggcccgccgctttatcgctctggtggatgagttttacgagcgccatgtaaagctggtggtcagcgcggcagtaccgctgtacgacatttaccagggcgagcggctgaagtttgagttccagcgctgtctctctcgtctgcaggagatgcagagcgaagagtacctcaaacgtccgcatatgccctga

SEQ ID NO: 209835 - DNA, 429 bp, Klebsiella pneumoniae
atgaaaacttttacagctaaaccagaaaccgtaaaacgcgactggtatgttgttgacgcgaccggtaaaactctgggccgtctggctactgaactggctcgtcgcctgcgcggtaagcacaaagcggaatacactccgcacgttgataccggtgattacatcatcgttctgaacgcagaaaaagttgctgttaccggcaacaagcgcgaagacaaaatgtactaccaccacaccggccacatcggtggtatcaaagaagcgacctttgaagagatgattgcccgccgtcctgagcgtgtgattgaaatcgcggttaaaggcatgctgccaaaaggcccgctgggtcgtgctatgtaccgtaaactgaaagtttacgcgggtaacgagcacaaccacgcggcacagcaaccgcaagttcttgacatctaa

SEQ ID NO: 209836 - DNA, 393 bp, Klebsiella pneumoniae
atggctgaaaatcaatactacggcactggtcgccgcaaaagttccgcagctcgcgttttcatcaaaccgggcaacggtaaaatcgttatcaaccagcgttctctggaacagtacttcggtcgtgaaactgcccgcatggtagttcgtcagccgctggaactggtcgacatggttgagaaactggatctgtacatcactgttaaaggtggtggtatctctggtcaggctggtgcgatccgtcacggtatcacccgcgctctgatggagtacgacgagtccctgcgttccgaactgcgtaaagctggcttcgttactcgtgacgctcgtcaggttgaacgtaagaaagtcggtctgcgtaaagcacgtcgtcgtccgcagttctccaaacgttaa

SEQ ID NO: 209837 - DNA, 639 bp, Klebsiella pneumoniae
atggctgtcgctgccaacaaacgttcggtaatgacgctgttttctggtcctactgacatctatagccatcaggtccgcattgtgctggccgagaagggtgtcagttttgagatagagcacgtggagaaggataacccgcctcaggatctgattgacctcaacccgaatcaaagcgtaccgacgctggtggatcgtgagctcactctgtgggaatcccgcatcattatggagtatctggatgagcgtttcccgcacccgccgttaatgccggtttatccggtggcgcgtggtgaaagccgcctgtatatgcaacgtatcgagaaggactggtattcgctgatgaacaccatccagagcggtaccgcagcgcaagctgatgctgcgcgtaagcagctgcgtgaagaattgctggccatcgcgccggtcttcacccagaaaccttacttcctgagcgatgagttcagcctggtggactgctacctggcgccgctgctgtggcgtctgccggttcttggtgtggagctggttggcgctggtgcgaaagagctcaaaggctatatgactcgcgtatttgagcgtgattccttcctcgcttctttaactgaagccgagcgtgaaatgcgcctcggtcggggctaa

SEQ ID NO: 209838 - DNA, 495 bp, Klebsiella pneumoniae
atggatgtatcacagctgacgccgcgtcgcccgtatctgttacgggcgttttatgactggctgctggataaccagctgacgccgcacctggtggtggatgtgacgctgccgggcgtgctcgtgccgatggagtacgcgcgcgatgggcaaatcgttctcaatattgccccgcgtgcggtaggcaatctcgagctggcgaacgacgaagtgcgcttcaacgcgcgctttggcggggtaccacgcaacgtgtctgtcccgctggctgcggtactcgccatctacgcccgtgagaacggcgctggtacgatgttcgaaccggaagcggcctatgacgaagacgtcagcagcctcaacgatgatgacgtcgcgccggagagtgaaagcgaaacggtgatgtcggtgatcgatggcgataagccggataatcacgacgacgatcctgacgacacgccgccgccgcgcggtggtcgcccggcgctgcgcgtggtgaagtga

SEQ ID NO: 209839 - DNA, 705 bp, Klebsiella pneumoniae
atgtctttactcgcacaactggaccagcgtatccgtcatcatggcggattaattgtctcctgccagccggtgccgggcagtccgctggataatcccgctatcgtcgcggcaatggcgctggcggctgagcaggcgggagcggtagcgctgcgcatcgaaggcctggccaacctgcaggccgttcgtccgttagtgacggtgcccgttattgggttgataaaacgcgatttgcccgatagcccggtgcgtattacgccatggctggaagatatcgacgcgctggcgcagggcggagcggatattattgctattgacggcacccagcgtcagcgtccggcgtcagtgtcggcgctattagcagaaattcatcagctgggaaaagtggcgatggccgattgctcatctctcgacgatgctctcgagtgctggcagttgggggctgagattgtcgggacgactctctccggctataccgcagaggagacgccggatgagccggatctggcgctggtgcaatgcctgagcgcggcgggctgcagagtgattgccgaagggcgctataacacgcctgcccaggcggcggaggcgatgcgctgcggcgcgtgggcggtgaccgtcggctcggcgattacccgcctggagcatatctgcggctggtataatacggcgctgaaagcggcggtttgcccggcgaatgagcaataa

SEQ ID NO: 209840 - DNA, 1419 bp, Klebsiella pneumoniae
atgagtcagaacgtttatcaatttatcgacctgcagcgcgttgatccgccaaagaaaccgctgaagatccgtaaaattgagtttgtggaaatttacgagccgttttcagaaggccaggccaaggcgcaggcggatcgctgcctctcctgtggcaacccgtactgcgaatggaagtgcccggtgcataactacatcccgaactggctgaagctggccaacgaggggcgtatttttgaagcggccgagctgtcgcatcaaaccaacactctgccggaagtctgcgggcgcgtctgcccgcaggaccgcctgtgtgaaggctcctgtacgctgaacgatgagttcggcgcggtgaccatcggcaacatcgaacgctatatcaacgataaggcattcgagatgggctggcgtccggatctctccgacgtgaagccgaccggtaaaaccgtcgcgatcatcggcgctggcccggcgggcctcgcctgcgccgacgtgctgacccgtaacggcgtcaaggcggtggtatttgaccgccatccggaaatcggcggcctgctgaccttcggtatcccggcgttcaagctggaaaaagaggtgatgacccgccgccgggagatcttcaccggcatgggcattgagttcaaactcaataccgaagtgggccgcgacgtgcagctcgatgacctgctgaaggagtacgatgcggtgttcctcggcgtcgggacctatcagtcgatgcgcggtggactggacaacgaagacgccccgggtgtttacgacgcgctgccgttcctgatcgctaacactaagcagatcatgggctttggtgaaaccgccgatgagccctatgtcagcatggaaggcaaacgcgtggtggtgctcggcggtggcgacaccgcgatggactgcgtacgcacctccgtccgtcagaatgcggcgcacgtgatctgcgcctatcgccgtgacgaagagaacatgcccggctcaaaacgcgaagtgaaaaacgcgcgcgaagaaggcgttgagttccagtttaacgtccagccgctgggcgtggaagtgaatgccaacggtaaggtttgcggcgtgaagatggcgcgcaccgaaatgggccagccggatgcgaagggccgccgccgcgcggagatcgtccccggctctgagcacgtggtgccggctgacgccgtagtcatggcgtttggcttccgtccgcacagcatggagtggctggcgaagcacagcgtcgagctggactcccagggccgtattatcgccccggaaggcagcgaaaacgccttccagaccagcaacccgaaaatcttcgccggtggcgatatcgttcgcggttccgatctggtggtcaccgcgattgccgaaggccgtaaagcggcggacgggatcctcaactaccttgaagtctga

SEQ ID NO: 209841 - DNA, 4461 bp, Klebsiella pneumoniae
atgttgtacgacaaatcccttgagagggataactgtggtttcggcctgatcgcccacatagaaggcgaacctagccacaaggtagtgcgaaccgcaatacacgcactggcccgcatgcagcaccgtggcgcaatccttgccgatggtaaaaccggcgacggttgcggtctgctgctgcaaaaacccgatcgtttcttccgcatcgttgccgaagagcgcggctggcgtttagccaaaaactacgccgttgggatgctgttcctgaataaagatcctgagctggctaaagcggcgcgccgcatcgttgaagaagaacttcagcttgagaccctgtcgattgtcggctggcgcgatgtgccgaccaacgaaggcgtgctcggtgaaatcgccctctcctcgctgccccgtattgagcaaatctttgtcaacgccccggctggctggcgcccgcgcgatatggagcgccgtctgtttattgcgcgtcgtcgcattgaaaaacgtctgcaggaagacaaagatttctacgtttgtagcttgtccaatctggtcaacatctataaaggtctgtgtatgccggcggatttgccgcgcttctacctggacctcgcggacctgcgcctggagtcggctatctgcctgttccaccagcgcttctccaccaacaccgtaccacgctggccgttggcgcagccgttccgctacctggcgcacaacggtgaaattaacaccattaccggcaaccgccagtgggcccgcgcccgtacctataagttccagaccccgctgatcccagacctgcacgacgccgcgccgttcgttaacgaaaccggctccgactccagttctatggacaacatgctggagctgctgctggccggcgggatggacatcgtgcgcgccatgcgtctgctggtgccgccagcctggcagaacaacccggatatggatccggagctgcgttcgttcttcgactttaactccatgcatatggagccgtgggacggcccggcgggcatcgtcatgtccgatggccgctacgcggcctgtaacctcgaccgtaacggtctgcgcccggcgcgctacgtcattaccaaagataagctcatcacctgcgcctccgaagtcggcatctgggattaccagcctgacgaagtggtcgagaaaggccgcgtgggcccgggcgagctgatggttatcgatacccgtgccggacgcattctgcactcagcggaaaccgatgacgatctgaagagccgccatccgtataaagagtggatggagaaaaacgttcgtcgcctggtgccgttcgaagatctgccggacgaagaggttggcagccgccagctggatgacgacacgctcgccagctaccagaaacagtttaactacagcgcggaagagctggactccgtcctgcgcgtgctcggcgaaaatggccaggaagcagtcggttcgatgggcgatgacacgcctttcgccgtgctctccagccagccgcgcattatctacgattacttccgtcagcagttcgcccaggtgactaacccgccgatcgacccgctgcgcgaagcgcacgtcatgtcgctggctaccagcatcggtcgcgaaatgaacgtcttctgcgaagcggaaggccaggcgcatcgtctgagcttcaaatcgccgatcctgctgtactccgattttaaacagctgacgacgatggaagaagagcactatcgcgccgacgtcctcgatatcacgttcaacccggcagaggcctccctcagcgagacggtgaaagcgctgtgcgataaagcggagcaaatggtgcgcgacggcaccgtgctgctggtgctctctgaccgcaacatcgccaaagaccgtctgccggtaccggcgccgatggccgttggcgcgatccagacccgtctggtcgataaaagcctgcgctgcgatgccaacatcatcgttgaaaccgccagcgcccgcgatccgcaccacttcgccgtgctgctcggctttggggcgacggctatctatccatacctcgcctacgaaacgctggcgaagctggtcgacagcaaagccatcgataaaccgtaccgtgcggtgatgctgaactatcgcaacggtatcaataaaggtctgtataagatcatgtccaagatggggatctcgaccatcgcctcctaccgctgctcgaagctgttcgaagcggtcggtctgcatcgcgatgtctccgagctctgcttccagggcgtggtcagccgcatcggcggcgccagcttcgacgacttccagcaggatctgctgaatctgtcgaaacgcgcctggctggcgcgtaagccactggcccagggcggtttgctgaaatatgtgcacggcggcgaatatcatgcctacaacccggacgtggtgcgcaccctgcagcaggccgtgcagagcggcgaatacagcgattatcaacaatacgcgaaattggttaacgaacgtccagcggccacgctgcgcgacctgctggcgctcaacccaggcgaagacgctatcagcatcgacgaagtagagccggcgaaggagctgtttaaacgcttcgataccgcggcgatgtcgatcggcgccctgagcccggaagcgcacgagtcgctggcggaagcgatgaacagcatcggcggcttctccaactccggtgaaggcggtgaagacccggcgcgctacggcactaataaagtgtcgcgcatcaagcaggtcgcttccggccgcttcggcgtcacgccagcctacctggtcaatgccgacgtcatccagatcaaagtcgcccagggggcgaaaccgggtgaaggtggccagctgccgggtgataaagtcaccccgtacatcgccaaactgcgctattcggtaccgggcgtcacgctgatttccccgccgccgcaccacgatatctactctatcgaggatctggcgcagctgattttcgacctcaagcaggtcaatccgaaagcgatgatttcggtcaaactggtttctgagccgggcgttggcaccatcgccaccggcgtggccaaagcctatgccgacctgatcaccatcgccggctacgacggcggcaccggggcgagcccgctctcttcggtgaaatatgccggctgcccgtgggagctcggcctggtggaaacccagcaggcgctggttgccaacggtctgcgtcataagatccgtctgcaggtggatggcggcctgaaaaccggcctcgatatcatcaaagcggcgatcctcggcgcggagagcttcggtttcggtaccggcccgatggtcgcgctgggctgtaaatacctgcgtatttgccacctgaacaactgcgctaccggcgtggcgacccaggatgacaaactgcgtaagaatcactatcacggtctgccgttcaaagtgaccaactactttgaatttatcgcccgtgagacccgcgagctgatggcccagctgggcgtcaagcgtctggtggatctgattggccgcaccgatctgctcaaagagctggatgggttcaccgccaagcagcagaaactagatctgggtaaactgctggagaccgcagagccgcatccgggcaaagcgctgtactgcaccgagaacaacccaccgttcgataacggcgtgctcaacgcccagctgctgcagcaggcgaaaccgtacgtggatgaaaagcagagcaagacgttctggtttgatatccgtaacaccgaccgctccgtgggggcctcgctgtccgggtatatcgcccagacccatggcgaccagggactggcgggcgacccgatcgtcgctcactttagcggcaccgcgggccagagcttcggcgtgtggaacgccggcggcgtggaactgcatctgactggcgacgccaacgactacgtcgggaaaggcatggcgggcggtctgctggccattcgtccgccggtgggctctgcgttccgcagccatgaagccagtattatcggcaacacctgcctgtacggagcgaccggtggtcgtctgtacgccgcaggccgcgcgggcgagcgtttcgccgtgcgtaactccggcgccatcaccgtggtggaaggcatcggcgacaacggctgcgaatatatgaccggcggcatcgtctgcgtgctcggaaaaaccggcgtcaactttggcgcagggatgaccggcggctttgcctatgtcctggatgaagatggcgacttccgcaaacgcgtgaacccggagctggtggaagtgctggacgttgattctctggccatccatgaagagcacctgcgcggtttaatcaccgagcacgtacagcttaccggttcgcaacgcggcgaagagatcctcgccaactggccggccttctccgcgaagtttgcgctggttaaaccaaagtccagcgatgttaaagcactgttgggtcaccgtagtcgttccgcagctgagctgcgggtgcaggcgcagtaa

SEQ ID NO: 209842 - DNA, 933 bp, Klebsiella pneumoniae
atgcagttacagaaattagtcaatatgtttggtggggatcttatgcgtcgctatggcgaaaaggtccataagctaacgctgcacggcggttttagctgcccaaaccgcgacggcacgctgggccgcggcggttgcactttctgtaacgtggcatcgtttgccgatgaggcgcagcagcatcgctctatcgccgaacagctcgctcatcaggcgcagctcgtcaaccgggcgaagcgctatctggcctattttcaggcctacaccagcaccttcgctgaagtgcaggtgctccgttcaatgtatcgtcaggccgtcagtgccgcaaatatcgttggcctgtgcgtcggcacccgcccggactgcgttccgcaggcggtccttgacctgctgagtgaataccatcagcaagggtatgaggtatggctggagctggggctgcaaactgctcatgacaagaccctgcatcgcattaaccgtggacacgatttcgcctgttatcagcgtaccgcgcgcctggcgcgagagcgggggctgaaagtctgtgcgcatctgatcgtcggtctgcccggagagagccaggggcattgtctgcagacgctggagcaggtagtggcgaccggcgtggatgggatcaaattgcatccactgcatattgtgaaaggcagcattatggccaaagcgtggcaggccgggcgtctcgatggcattgagctggaggcgtataccgtcaccgctggagagatgatccgccatacgccgccggaggtgatctaccaccgtatttccgccagcgcccgtcggcccacgctgttggcgccgctgtggtgtgaaaatcgctggaccggcatggttgaactggatcgttatctgaatcagcagggcgctcagggctcggcgctgggccgtagctgggttgctccccaggctgagtga

SEQ ID NO: 209843 - DNA, 1284 bp, Klebsiella pneumoniae
atgggaaaaaatatccgctggattatcgtcctgttattatttttagtatatatgataaattatctggaccgggtggcattatccattacggtcccgatgattgaaaaggaccttgcacttaacgctgaacaattcggcattattttcggcagctttttcttcggctacgcggtatttaattttattggcggtttggccgtggataagtttggcgcaacgctggtaatgggcctggcggtcggtctgtggtcgctgttttgcggcttaaccgcggtagccaccggcttttattccatgctggtgctgcgggtgcttttcgggatggcggaaggcccgatctgcgcatcggcgaacaagatgatcaacggctggtttcctaaaaagcaagcggctaccgccgtcggctttctcagcgcaggctctccgctgggcggcgcggtcgccggccccatcgtcggttacctggccctggcattcggctggcgcccggcttttatgattattttcgctatcggtattgtatggatgatagcgtggtttttcattgccgctaattcgcccgaaaagcacaaaaaagtcagccaggaagaacttaagctgattaataaaatgaaagaagaagaagtcgcgctggaaacaatagaaaatcaaacagctcactcgctgggttattatttgaaacagccaattattctggtaacggcctttgccttcttctgctacaactatattctgtttttctttctcagctggttcccgtcctatctggtacaacagcaccatctggatattaaacagatgagccttaccactatgatcccatggatagtcggctttgtcggtctggcgcttgggggctatatttccgataaaatttttaaactcaccgggcgcctgctgctgtcgcgcaaaattgtgctggtggtatgcctgctgatggccgctatctgcgtgggactggcgggtaccgtcagcagcgtcgtgcctgccgttctgctgatgtcggtctccatctttttcctctatgtaaccggggcgatctactgggcgattatccaggacgtggtgcataaatcccgcgtcggcggcgccagcggctttatccatcttatcggcagcgtctccggcatcgtggggccgattgttaccggctatatcgtgcagtctactggtaaatttgacagcgctttcgttctcgccggcactatcgccgcgcttggcgccctgctggtgctgttcgtgatcaaaactccgcgtgtgacgatgaaagccagccaggcataa

SEQ ID NO: 209844 - DNA, 1017 bp, Klebsiella pneumoniae
atgagaagcgtcgtcgtcaaagagccaggccaactgaacattgaatcacgtccggttccagttccgggcgcccatgaagtacgggtgaaaattgcttttgccgggatctgtggttccgatgtacacatctatcacggccacaaccctttcgcgaaatatccccgcgtcatcggccatgaattctatggcatcatcgacgccgtcggcgagcaggtatctccggcacgcatcggcgagcgtgtcgcggtggaccccgttgtcagctgcggccattgttatccttgctcggtaggaaggccgaatgtctgtacgcagctccaggtcataggagttcaccgcgacgggggatttagcgactatgcctgcgtgccggcgaaaaatgcctggcgcatccccgaggctatcagcgaccgtcaggcaacgatggttgagccttttaccatcgcggcaaatattaccgcccagctgcagcccacggcgcaagatattgccctggtttacggcgctggcccgatggggctgacgatcattcaggcgctaaagggggtatatggcgttaagcaggtgatcgtcgtggatcgcattgccgaacgtctgcagatggcccgggaaaacggcgccgatctgacgctcgataacactgaccagccgctcgcggaacagctggcgcagcggcagcttgcccccacgctggtcattgatgccgcctgccacccggcgatcctgcaggaagccattctcctcgcctcccccgccgcccgcatcggtatactcggtttctccggcgaggcctcgaccctcactcagcaaagcatcaccagtaaagaaatttctattttctcctcccggctgaacagcgggcgttttccgctggtcatcgactggatggagaaaggccttattcgtccggaggcgttaatcacccattgtatgccgctggagcaggtgaaagaggccatggagatttttgctaacgaccgtaagacctgctgcaaagtgctgctgcagctgggttaa

SEQ ID NO: 209845 - DNA, 1065 bp, Klebsiella pneumoniae
atgcagatgacaatgcgctggtttggaccagaggaagacaagatttcattagaacatattcgccaggtgcctggcgttgagggggtggtcggcgcgctctacgacgtcgcggtgggcgaagtatggccggtggataaaattgagcgtctggtcggtcaggcccatgccgcaggcctgaaaatggaggtgatagagagcgtcaacatccatgacgacatcaaaatcggcctacctacccgtgagcgctatattgccaactaccagcagaccatccgcaaccttgcccgctttggcgttaaagtcatctgctataacttcatgccggttttcgactggatgaagacggatatgaactacgtcctgccggatggctcgctgacgatggcgtttgagaagaaagatatcgataagcggctggaagacgtggtgaaggaggtgcttgagaattcaaacggcttcgccttgccgggctgggagccggaacggctggcggaggtgcagaccctgtttgccaaatatagcgcggtggatgatcagaagctgcgggagaacctggtttattttctgcaggcggtgatcccggtttgcgaagaggttggggtgaaaatggcgatccacccggacgacccgccgtactccatttttggcctgccgcgggtggtcaaaaaccgcgacgatctggactggatctgccgggccgtcgattcacccgccaacggcattacgctctgcaccggctcgattgccgaagatcctgataatgacgtgtacgccatcctggccgaatttacgcggcgtaagcgaattcattttgcccacgtccgcaatataaagctgatgcaggataaagacttttacgagtgcgcccatccgtcagagtacggctccctggatatgtacaaagtgatgcaagcgctgtatgacaacggattcgacggctatattcgcccggatcatggtcgctttatctggggagagaccggacggccgggctatggcctgttcgaccgcgcccttggcgtgacctacctgaaaggactctgggaggcgttaagcaagcgttaa

SEQ ID NO: 209846 - DNA, 2340 bp, Klebsiella pneumoniae
atgaagcaaattcgtatgctggcgcagtattatgtcgacctgatgatgaagctgggtctggtccgcttttcgatgctgttggctcttgcgctggtggtgctggccatcgtggtacagatggcggttaccatggtgctgcatggccaggttgaaagtatcgacgttatccgctctatcttctttggcctgctgatcacgccttgggcggtctactttctctcggtggtggtggagcagctcgaagagtcccgtcagcgtctttcgcggctggtggacaagctggaggagatgcgtgagcgcgatctaaagctgaacgtccaactgaaagataacatcgcgcagttgaatcaggagattggcgaacgtgaaaaagcggaagccgagcgcgagaccaccctcgagcagttgaagattgagatgaaagagcgtgaagagacgcagatccagctcgaacagcaatcctcctttctgcgctctttccttgatgcttccccggacctggtcttctatcgcaatgaggataaggagttttcaggctgtaaccgggcgatggagctgctgaccggcaaaagcgagaaacagctgatccacctcaaaccgcaggacgtctatagcgaagaggcggcggaaaaggtactggagaccgacgagaaggtgttccgccataatgtatcgctgacctatgagcagtggctggactatcccgatggccgcaaagcgtgctttgaaatccgcaaggtcccctactacgatcgcgtcggtaagcgtcgcggcctgatgggcttcggccgcgatatcaccgaacgtaaacgctatcaggacgctcttgagcgcgccagccgggataaaaccacctttatttccaccatcagtcatgagctgcgtaccccgctaaacgggatcgtcgggctgagccgaattttgctggataccgaactgaccagcgagcaggaaaaatacctgaaaactatccatgtctcggcggtgacgctggggaatatcttcaatgatattatcgacatggacaaaatggagcgccgcaaggtgcagctcgataaccagccggtggacttcaccagcttccttgccgaccttgaaaacctatccggcttgcaggcacagcagaaggggctgcgctttgtgctggagccgagcctgccgctgccgcataaggtaatcacggatgggacccgcctgcggcagatcctgtggaatcttatcagtaacgccgtgaagtttaccccgcagggcggaggggtgaacgtccgcgtgcgctatgacgaaggcgatatcctgcacttcgaagtggaagactccggaattggtattcctgaagcggaacaggacaaaattttcgccatgtattaccaggtcaaagacagccacggcggcaaaccggccaccggaaccgggattggtctcgccgtctcgcgtcgcctggcgcgtaatatgggcggtgatatcagcgttaccagccagccgggtaaaggggcgacctttacgcttaccgtccatgcgcctgccattgcggaagaagtggaagatacgctggcggaagacgacatgccattaccggcgctcaacgtgctgctggttgaggacattgagctcaacgttattgtggcccgttcagtgctggaaaaactgggtaacagcgttgatgtggcgatgaccgggaaagccgcgctggagatgtttgagccaggcgaatatgaccttgtgctgttggatattcagttaccggacatgaccggactggatatttcccgggaactgaaacagcgctttgccgctgacgagctaccgccgctggtcgccctcaccgccaacgtgctgaagaataaaaaagagtatctcgacgccgggatggacgatgtgttgagtaagccgctatcggtgccagcgctaacggccatgatcaagaaattctgggatgcaccggatgaggaagcgcaggaagcgccggcggccgatctgcataaagccgacgcggtgctggataccgatatgctggagcaatatatcgagctggtgggaccgaagcttatcaacgatggtctcgcggtgtttgagaagatgatgccgggctacatgtccgttctggagtctaatctgaccgcccgcgaccaaaaagggattgtcgaagaggggcataagatcaaaggggcggccggttctatcggactgcgccacatccagcagctgggccagcagatccagactccggatctgcctgcctggtctgataatgtcgctgaatgggttgaagagatgaaatccgagtggcaaaacgatgtagcggtactgaaggcgtgggtggcgaaagccagcaaaaaatga

SEQ ID NO: 209847 - DNA, 654 bp, Klebsiella pneumoniae
atgaaaaaaattggtgtggtactgggcggctgcggcgtgtacgacggcagtgaaatccatgaggcggtgattaccctgctggcgatcgcgcgcaacggcgcgcaggcagtgtgctttgcgcccgataaaccgcagcgcgatgtcatcaaccatctgaccggggaggcgatgccagagcagcgcaatgtgctggtggaagcagcgcgtatcgcccgcggcgacatcctgccgctggcgcaggcgcgtgcggagacgctggacgcgctgatcgtccctggcggcttcggcgcggcgaaaaatctaagcagcttcgccgccgagggcagcgaatgccaggtggatcccgatctgcgggccctggcgctggcgatgcatcaggccggcaagccgctgggctttatgtgcattgccccggcgatgctgccgaagatctttgcgtttccgctgcggatgaccattgggaccgatcttgataccgccgatgtggtggaagagatgggggcagagcacgtgccttgcccggtcgacgacatcgtggtggatgaagacaacaaagtggtcaccactccggcgtatatgctggcggaggacattgcgcaagccgccaccggaattgagaagctggtggcccgcgtgctggcgctgagcgcatga

SEQ ID NO: 209848 - DNA, 726 bp, Klebsiella pneumoniae
atgaggctccgcgttgcgccctttgcgctgctgaaacgtctggcattgcgtctgctgctgatcgccgccgtcctctggggcggggggatcgcgctgtttagcgtgctgccggtgccgttttcggcggtgatgcttgagcggcaggtgagcgcctggctgtccggtgatttccattatctggcgcattccgactgggttgccatggataagatctccccatggatggggctggcggtgattgccgccgaagatcagaagttcccggaacactgggggttcgacgtgtcggcgattgagaaagcgctggcgcacaatgagcggcatgatacccggattcgcggcgcgtcaacgctgtcgcagcagacggcgaaaaacctgtttttatgggatggccgcagctggctgcgtaaggggctggaagccgggctgactgtcgggatcgaaaccgtgtggagtaaaaagcggatcctgaccgtctacctgaatattgccgagttcggcgatgggatatttggtgtggaagcggccgcccagcgctattttcataaacccgccagtcagctgacgccgggggaagcggctctgctggccgcggtgctgccgaacccgatccgctatcgcgccgatgcgccgtcaggctatgtgcgcagtcgtcaggcctggatcttacgccagatgcgacagctgggcggggaagggttcatgcgcgagcataagctctattag

SEQ ID NO: 209849 - DNA, 273 bp, Klebsiella pneumoniae; identical to SEQ ID NO: 136515

SEQ ID NO: 209850 - DNA, 855 bp, Klebsiella pneumoniae
atggtactgatgatcgtcagcggccgctcgggctcggggaaatccgtcgctctgcgagcgctggaagatatgggcttttactgcgtggataacctgccggtcgtgctgctgcccgacctggcgcggtcgctggctgaccgtaatatctccgcggccgtcagcatcgacgtgcgtaacatgccggaatccccggagatcttcgagcaggcgatgcagaatctgccggaatgtttttctccgcagctgctgttccttgatgccgaccgcaataccctgatccgccggtacagcgatacccgtcgcctgcacccgctctccagcaagaatctgtcgctggaaagcgccatcgacgaagagagcgatctgctggagcccctgcgctcccgcgccgatctgatcgtcgatacgtcggaaatgtcggtgcatgagctggccgagatgctgcgtacccgactgctgggtaaacgcgagcgtgaactgacgatggtcttcgaatccttcggcttcaagcacggtattccgatcgatgccgattacgtctttgacgtgcgctttctgcccaacccgcactgggatccgaaactgcgtccaatgaccggtctggataaaccagtggccgccttcctcgatcggcacactgaagtgcacaactttatttatcagacccgaagctatcttgagctatggttaccgatgctggagaccaacaatcgcagctatctgacggtggccattggctgtaccggcggtaaacatcgttcggtttatattgctgaacaactggctgactacttccgctcgcgcggcaagaacgtgcagtctcgtcatcggacgctggaaaaacgtaaatcatga

SEQ ID NO: 209851 - DNA, 489 bp, Klebsiella pneumoniae
atgatgaacaacgattcggctctacaactgagcaacgtcctgaaccaggaatgtacccgtagccaggtgcactgccagagcaagaagcgtgctctggaaatcatcagcgaactggccgccaaacagttaagtttgccgccgcaggtggtgttcgaagcgatcctcacccgcgaaaaaatgggcagtaccgggatcggcaatggtatcgccattccccacggaaaactggaagaggatacgctgcgtgctgtcggcgtttttgtccagctggaaacccccatcgccttcgacgcgatcgacaatcaacctgtcgacctgctgttcgcgctgctggtgccggccgaccagacaaaaactcacctgcatacgctctccctggtggccaaacggctggcggacaaagcgatttgtcgtcgcctgcgcacggcgcagagcgatgaagagttgtatgagatcatcaccgaagcaggaagcagcgatgacgcataa

SEQ ID NO: 209852 - DNA, 288 bp, Klebsiella pneumoniae; identical to SEQ ID NO: 136512

SEQ ID NO: 209853 - DNA, 1434 bp, Klebsiella pneumoniae
atgaagcaaggtttgcaattaaggcttagccaacagcttgccatgacgccgcagctgcagcaggcgattcgtttgctgcagttgtccacgttagaactccagcaagagctccagcaagcgctggaaagtaacccgttgcttgagcaaaccgatcttcacgacgaggtagaggcaaaagaggtggaggaccgcgagtccctcgataccgtcgatgcgcttgagcaaaaagagatgcccgacgaactgcctctcgatgccagctgggatgaaatctataccgctggcacgccgtcgggtaacggcgtcgactatcaggacgacgagcttccagtctatcaaggcgagaccacccagacgctgcaggactatctgatgtggcaggttgagctgacgcctttcaccgacaccgaccgcgctattgccacctctatcgtcgacgccgtcgacgatacgggctacctcacgattcagattgaagatattgtcgacagcatcggcgatgacgagatcggcctggaggaggtggaagcggtcctcaagcgaatccagcgttttgatccggttggcgtcgcagcgaaagatctgcgcgactgcctgctgatccagctgtcgcaatttgctaaagagacgccgtggctggaagaggcgcggctgattatcagcgaccatcttgatctgctggccaaccatgatttccgcactctaatgcgagtcacccgcctgaaagaagaggtgcttaaagaggcggtcaacctaatccagtccctggatcctcgccctggccagtccattcagaccagcgaaccggaatatgtcatcccggatgtgctggtgcgcaaggtgagcggccgctggaccgtcgagctcaacgccgacagcattccacggttgaaaataaatcagcagtatgcggcaatgggcaacagcgcccgcaatgacgccgacggccagttcattcgcagcaatctgcaggaagcccgctggctgattaaaagtctggaaagccgcaacgataccctgctgcgcgtcagccgctgcatcgtagagcagcagcaggcttttttcgaacagggtgaagagtatatgaagccgatggtgctggctgatatcgcccaggccgtcgagatgcatgaatcgacgatttcccgtgtcaccacgcaaaaatatctgcacagtccgcgcggtatttttgaactgaagtatttcttctccagccatgtgaataccgaaggcggaggcgaagcctcgtcgacggcgattcgcgcgctggtgaagaagctcatcgccgcggaaaaccccgcgaagccgttgagcgacagtaagctcacctccatgctgtccgagcagggtattatggtggcgcgccgcactgtcgcgaagtacagagagtctttatccatcccgccgtcaaaccagcgtaaacaactggtctga

SEQ ID NO: 209854 - DNA, 726 bp, Klebsiella pneumoniae
atggcaaccttaactgcgaagaatctcgctaaagcgtataaaggccgccgcgtggtggaagatgtcagtctcaccgttaactcgggcgagattgtcggcttgctcggcccgaacggcgccggtaaaacgaccaccttctacatggtggtcgggattgtgccccgcgacgcaggcaatatcatcatcgatgacgaagacatcagcctgctaccgctgcacgcgcgcgcgcgacggggcatcggctacctgccgcaggaagcgtcgattttccgtcgcctcagcgtctatgacaacctgatggcggtcctgcagatccgtgacgatctaaccagcgaacaacgggaagatcgcgctaaagagctgatggaagagtttcatattgagcacctgcgcgacagcctcggtcaggcgctctccggtggtgaacgccgccgcgtcgaaatcgcccgcgcgctggcggcgaatccgaaatttattcttctagatgaaccctttgccggcgtggatccgatctccgttatcgatattaaacgcatcattgagcacctgcgcgacagcggtctcggcgttctgattaccgaccataacgtccgtgagaccctcgcggtctgcgaacgcgcgtatattgtcagtcagggacaccttatcgctcatggtacaccgcagcagatcctcgaagatgagcaggttaagcgcgtgtatcttggggaagacttcagactctga

SEQ ID NO: 209855 - DNA, 546 bp, Klebsiella pneumoniae
atgaaattcagaacaaacaaactcagccttaagattgcgctcgccggcgcgttactggccgccagcctgccggccctcgccaagacgggcgataccgatcagccgatccatatcgagtccgatcagcagtcgctggacatgcagggcaatgtcgtcaccttcaccggtaacgtggtcgtgacccaggggacgatcaagattaacgctgataaagtggtggtcacccgtccgggcaacgagaaaggcaaagaggtgatcgaaggtttcggtaacccggctactttctatcagatgcaggataacggcaagccggtaaaaggccgggcgtcgaaaatgcgctacgagctgcagaacgattacgtcgtgctgacgggcaacgcttatctggaacagctcgacagcaacatcaagggcgacaagatcacctatctggtgaaagagcaaaaaatgcaggccttcagcgacaaaggtcgacgcgtcaccaccgttctggtgccgtccgagctgcaggacaaaagcggcaaccagcaaaagaagagtaactaa

SEQ ID NO: 209856 - DNA, 576 bp, Klebsiella pneumoniae
atgagtaaaaccagacgttgggttatcattttactgtcgctgctcgcgctgatccttatcggcctgaatctggcgaatacggacgacacggcccagccggaggtcaatcctaacgaccctacgtataaaagcgaacataccgacaccgtggtatacagtccggaaggcgccctgagctatcggctgattgccgagcacgtggaatatttttccgatcaggaggtctcctggtttaccaaaccggtgatgaccacctttgatactaacaaggtgcctacctggtcggtcagagcagacaaagcgaagctgacgaatgaccggatgctctatctttacgggcacgttgaggtgaatgcgctcgctccagattctcaactgcgcaaaattacgacggataacgcccagataaatctggtaacgcaggacgttacctccgatgacatggtgacgttatacggcaccacatttaattccagcggcctgaaaatgcgtggaaaccttcgcagcaaaaatgccgagctgattgaaaaggtgagaacctcttatgaaattcagaacaaacaaactcagccttaa

SEQ ID NO: 209857 - DNA, 567 bp, Klebsiella pneumoniae
atgaataatgctgatgctcagttagcgacctgctacgggccggtaagccaggcgtttgtcgatcgcgcggcgaagatccgtctactgatccttgatgtcgacggtgtattatccgacgggcttatctatatgggtaatcacggcgaggagctgaaagcgtttaacgtccgcgatggctatggtatccgctgcgcgctgacctcgggtattgaagtggcgattattaccgggcgaaaagctaaactggtagaagatcgctgtcagacgctgggcattacgcatttgtaccaggggcagtcggacaagctgctggcgttccgcgatctgacggacaaactgcacgtgcggccggaagaagtcgcctacatcggcgacgatcttattgactggccggtgatggccgaagtgggccttagcgtcgccgtcgccgatgcgcatccgctgctgctaccgcgggcgaattatgtcacgcgaattaacggcggacgcggcgcggtacgcgaagtctgcgatttgttactattggcgcagggcaagctggatgaggccaaagggcaatcaatatga

SEQ ID NO: 209858 - DNA, 1005 bp, Klebsiella pneumoniae
atgattcgggataacatcatgtcgcaaatagatttgcccacggattttgactttcaacaggcaggccgtcaggtgctggaaattgaacgtgaaggtctggcccagctcgatcaatacataaatgaagactttacccatgcctgcgaaacgattttccgctgcggcgggaaagtcgtggtgatggggatgggcaaatccggccacatcggccgcaaaatggcggcaaccttcgccagtaccggcacctcggcattttttgtccaccccggcgaagcggcgcacggtgatttaggtatggtcacgccgcaggatgtggtaattgcgctgtcgaactccggcgaatcgaatgaaatcctcgcgctgatcccggtcctcaagcgccagcaggtgaagcttatctgtatcaccagccggccggagagcagcatggcgcgcgcggcggatatccatctgtgcgtgaaagtgccgaaggaggcctgcccgttaggactggcgcccacgtcgagcaccaccgccgcgctggtgatgggtgatgccctcgccgtcgccctgctggaagcccgcggctttaccgctgaggatttcgccctgtcgcatccgggcggcgcactcggccgtaagctgttgctgcgggtcaatgatattatgcataccggtgatgaaatcccgcacgtcggcctgcaggcgaccctgcgcgatgcgctgctggaaatcacgcgtaaaaatttaggcatgaccgctatctgcgatgacgatatgaacatcatcggtatttttaccgacggtgacctgcgccgggtcttcgataccggcgttgatatgcgcgatgccagcattgccgacgtcatgacccggggaggtatccgcatccgccccggcactctggcggtggatgcgttaaacctgatgcaatcccgtcatatcacctgcgtgctggttgccgatggcgaccatctgctgggtgtggtacatatgcacgatctgctgcgcgcgggcgtagtgtaa

SEQ ID NO: 209859 - DNA, 978 bp, Klebsiella pneumoniae
atgctcttagcgacggctctgttaattattggtttattgctggttgtctacagcgccgatcgtctggtctatgccgcctccatcctgtgtcgtatgttggggatcccgccgctgatcatcggcatgacagtggtcagtatcggcaccagcctgcctgagatcatggtcgccaccgcggcctcgctgcacgggcagaccgatctggcggtcggcaccgcgctcggatctaatatcaccaatatcttattgatcctcggtctcgccgccttactcaggccatttaccgtgcattctgatattctgcgccgcgaattaccgctaatgttgctggtcagcgtgctggcgggactggtgctctacgatggacaactgacccgtctcgacgggctatttttactggcgttagcgcttctgtggctgctgttcaccatcaaaatcgctcgcctggcggagcgccagggaagcgatagcctgacccgcgaacagctggcggagctgccacgcgaagggtcgctgccggtcgccctgctctggttaggggtagcgatgatcgtcatgccgatggcgacccgcatggtggtggataacagtacagtgctggcaaactatttcgccatcagcgaactgaccgtcggcctgacggtggtggcgataggcaccagcctgccggagctggccaccgccatcgccggggcgcggaaaggggaagatgatattgccatcggcaatatcatcggcgccaatatccttaatatcgcactggtgctgggtttaccggcgctgatcgcgccggggagctttgcgaccgaagccttcactcgcgattatggcgtgatgctgctggtcagcctgatcttcgcagtgctgtgctggcgccgtcagcagcagccgggacgactggttggcgcgctgctggtcggcggctttgtggtttggttggcgatgctgttttggacagcaccgctcttcgttgaatga

SEQ ID NO: 209860 - DNA, 813 bp, Klebsiella pneumoniae
atgagccaaactcaggcgaatttagttgaagtgcgcggtatccgcttttcacgcggcgatcgtgtgatcttcgacgacatctcgctgtcggtgccgcgcggtaaaattactgcgatcatgggaccttcggggatcggcaagactaccctgttacgcctgatcggcggccagatcccgccggacaggggagagatcctgtttgatggcgagaacgtgccgcagatgacgcgttcgcgtctttatacggtgcgtaagcggatgagcatgctgttccagtccggcgcgctgttcaccgatctcaatgtctttgacaacgttgcctatccgctgcgcgaacatacgcatttgccgcctgcgctgctgcatacgacggtgatgatgaagctggaagcggtggggctacgcggtgcggcgaagttaatgccttctgagctttccggtgggatggcgcgccgcgccgccctggcgagagccattgccctggagccggatctgattatgttcgacgaaccgttcgtcgggcaggatcccatcactatgggcgtgctggtgaagctgatttctgaactcaacagcacgctgggtgtcacttgcatcgtggtttcgcacgatgtgcccgaggtgcttagcatcgcggactacgcgtatatcgtggcggataaaaagattgtcgcccacggtagcgcccagtcgctacgggagaataccgatcctcgggttcgtcagttcattgatggtattgccgacggtccggtgccgttccgttatcctgctggcgactatcaccatgatttattaggcatagggagttga

SEQ ID NO: 209861 - DNA, 783 bp, Klebsiella pneumoniae
atgctgtttaatgcgctggccgcgctaggtcatcgcggtattaaaaccaccgcgacgtttggacgcgccggattaatgcttttcaacgccgttgtcggcaaaccagagtttcgcaagcacgcgccgctgctggttcgtcaactctataacgtcggcgtcctgtcgatgctgattatcattgtatcgggcttgtttatcggtatggtgctcgggctgcaggggtatctggtgttaaccacctacagcgcagagaccagtcttggcatgctggtggcgctgtcgctgctgcgtgagctggggccggtggtcgccgcgctgctgtttgccggccgcgccgggtcggcgctgaccgccgagattggcctgatgcgggccacggaacagctctccagtatggagatgatggcggtggatccgctgcgtcgcgtcatttccccacgcttctgggccggtgtcatttcgctgccgctgctgacgattatcttcgtcgcggtagggatctggggcggtgcgctggtgggggtgagctggaaaggcattgacggtggttttttctggaccgcgatgcaaaatgccgtcgactggcgaatggatctggtgaactgcctgattaagagtctggtgttcgctattacggtaacctggattgcgttatttaatggttatgacgctatccccacttccgccgggattagccgggcgacaacgcgtaccgtggtgcatgcgtcgctggcggttctggggctggattttgtgctgactgcgctgatgtttgggaattga

SEQ ID NO: 209862 - DNA, 552 bp, Klebsiella pneumoniae; identical to SEQ ID NO: 136502

SEQ ID NO: 209863 - DNA, 636 bp, Klebsiella pneumoniae
atgtttaaacgcttactcatggtcgccatgctggtgattgccccgctgaccgccgtccaggccgcagatcagtccaatccgtataagctgatgaatgaagcggcgcagaaaaccttcgatcgcctgaagaatgaacagccgaagattaaagctaatcctaactatctgcgcgacatcgtcgaccaggagttattgccgtatgtacaggtgaaatatgccggcgcgctggtgctgggccgctattacaaagaagcgacccctgcgcagcgtgaggcctattttgccgccttccgtgaatacctgaagcaggcctacggtcaggcgctggcgatgtaccatgggcagacttaccagattgctccggagcagccgctgggcagcgcaaccatcgttccgatccgcgtcactatcatcgacccgaacggtcgtccgccggtacgtcttgacttccagtggcgtaaaaatacccagaccggcaactggcaggcctacgatatgatcgcggaaggggtgagcatgatcaccaccaaacagaatgagtggagcgatctgctgcgcaccaagggcgttgatggcctgaccgcgcagctgaaagcgatctctgcgcagccgatcaccctggaacagaaaaaataa

SEQ ID NO: 209864 - DNA, 291 bp, Klebsiella pneumoniae
atgagcgggcagctgagctggactagcgagggcgagacgctggcgctgcacggggagctggatcaggatctgctggtcccgctctgggaggcgcgcgcccaggcgacggcgggaacggcgatcatcgatctcagtcagaccacgcgcgtggacactgcgggcctggcgctgttagtgcattttgtggcgctgattcgccgtcagggccgggaagcgcagctggtcggcaagagcgaaaacctgcaaacgctgatcggtctttacaacctgcctgccgatctgatctcataa

SEQ ID NO: 209865 - DNA, 255 bp, Klebsiella pneumoniae
atggaaaatcatgaaattcagaccgtgctgatgaacgcactccccctccaggaagtccacgtctctggcgatggcagccactttcaggttattgctgtgggtgagatgttcgatggcatgagtcgggtgaaaaagcagcagagcatctacgcgccgctgatggaatatattgccgacaaccgcatccatgcgctgtcgatcaaggcctttactccgcaggagtgggcgcgagaccgcaaactcaatggcttctaa

SEQ ID NO: 209866 - DNA, 1260 bp, Klebsiella pneumoniae
atggataaattccgtgttcaggggccgactcgccttcagggtgaagtcaccatctccggggcaaaaaacgccgccctgccaatcctcttttccgcgctgcttgccgaagagccggtagagatccaaaacgtacctaagctgaaagacatcgataccaccatgaagctgctgagccagctgggcgcgaaggtcgagcgcaatggttcggtatggattgacgccggcccggtcgatgtattctgtgctccgtacgatctggtgaaaaccatgcgcgcctctatctgggcgctgggcccgttggtggcgcgtttcggtcagggtcaagtttctctgcctggcggctgcgctatcggcgcgcgtccggtcgatctgcatattagtggtctggagcagctaggcgccgagatcaaactggaagaaggttatgtcaaagcctcggtcagcggtcgcctgaaaggcgcgcatattgtgatggataaggtgagcgtcggcgccaccgtaaccatcatgagcgcagcgacgcttgcggagggaacgacgattattgaaaacgccgctcgcgagccggagattgtcgataccgccaacttcctgaacgcgctgggcgcaaaaatcacaggccagggtagcgatcgcattaccatcgaaggcgtgcagcgcctgggcggcggcgtctaccgtgtgctgcctgaccgtattgaaaccgggactttcctggtggccgcggcgatttccggcggcaagatcctctgccgtaacgcgcagccggataccctggatgccgtactggcgaagctgcgcgacgccggggctgacatcgaaacgggcgaagactggatcagcctcgatatgcacggcaaccgtccgaaagcggtcaacgtgcgtaccgcgccgcacccgggcttcccgaccgatatgcaggcccagttcacgctgcttaacctggtagcggaagggaccggcgtgatcaccgaaacgatctttgaaaaccgcttcatgcacattccggagctgatccgtatgggcgcgcacgcggagatcgagagcaataccgctatctgtcacggcgttaagcagctttctggcgcgcaggtgatggcgaccgatttgcgcgcgtcggcgagcctggtgctggccggctgtatcgctgaagggaccaccatcgtcgatcgcatctatcatatcgatcgcggctatgagcgtatcgaagataaactgcaggccctgggcgccaatattcaacgcgtgaagggcgagtaa

SEQ ID NO: 209867 - DNA, 273 bp, Klebsiella pneumoniae; identical to SEQ ID NO: 136497

SEQ ID NO: 209868 - DNA, 972 bp, Klebsiella pneumoniae
atgaatttagaaaaaatcaatgagttaaccgcgcaagatatggcgggtgtcaatgcgacgattcttgagcaactcaactccgatgttcagcttatcaatcagttaggctattacatcgtcagcggcggcggcaaacgcattcgcccgatgattgctgtgctcgccgcacgcgcggtgggctatcaggggagcgcgcatgtcaccattgccgcgctgattgaatttattcataccgccaccctgctgcatgacgacgtcgtcgatgagtctgatatgcgtcgcggcaaagccacggccaatgcggcgtttggcaatgccgccagcgtgctggtcggcgattttatctatacccgcgcctttcagatgatgacccagctgggctcgctgaagatccttgaggtcatgtcggaagcggtgaacgtcattgccgaaggcgaagtgctgcagctgatgaacgtcaatgacccggatatcaccgaagagaactacatgcgcgttatctacagtaagacggcgcgcctgtttgaagctgcctcgcagtgtgcgggactgctggccgactgcactgcggaagaagagcgcgcgttgcaggattatggccgctatctcggcaccgctttccagctaatcgacgatttactcgattatagctctgacggcgagcggctcggtaaaaacgtcggtgacgacctgaacgaaggtaaacccacgctaccgctgctgcacgccatgcaccatggcacacccgatcaatcagcgatgatccgcggtgcgatcgagcaaggcaacggccgccatctactggatgctgtgctggaaacgatggcgacctgcggttcgctggaatggacgcagaagcgtgccgaagacgaagctgacaaagccattgccgcgctgcagatcctcccggacacgccctggcgcgaagccttgattgggctggcgcatattgcagtccagcgcgatcattaa

SEQ ID NO: 209869 - DNA, 312 bp, Klebsiella pneumoniae
atgtacgcggttttccaaagtggtggtaaacaacaccgagtaagcgaaggtcagaccgttcgcctggaaaagctggacatcgcaactggcgaagctgttgaattcgctgaagtgctgatgatcgcaaacggtgaagaaatcaagatcggcgttcctttcgttgagggcggcgtaatcaaagctgaagttgttgctcacggtcgtggcgagaaagttaaaatcgttaagtttcgtcgtcgtaaacactatcgtaagcagcagggccatcgtcagtggttcactgatgtgaaaatcactggcatcagcgcctaa

SEQ ID NO: 209870 - DNA, 258 bp, Klebsiella pneumoniae; identical to SEQ ID NO: 138992

SEQ ID NO: 209871 - DNA, 966 bp, Klebsiella pneumoniae
atgaagcagcaggctgggattggcattattctggcgcttaccaccgcaatgtgttggggagcgttgccgattgcaatgaaacaggttctcgaggtgatggcgccgcctacggtggtcttttatcgcttcctgatggccagcattgggcttggcgcgatcctcgcgatcaaaggcaaactgccgccgatgcgaatttttcgcaagccgcgctggctggtgttattagcgattgccaccggcggtctgttcggtaacttcatcctgtttagttcttccctgcaatacctcagccccacggcttctcaggtcatcggccagctatcgccggtggggatgatggtggctagcgtcgtaattctgaaagagcgcatgcgcggcacccaggtggtgggcgcgttgatgctgctctgcgggctggtgatgttcttcaataccagtctgattgaaatctttacccgcctgacggactacacgtggggggtaattttcggcgttgctgccgctacggtgtgggtaagctacggcgtcgcgcaaaaggtgttattgcgccgtctggcatcacagcagatactatttttgctgtacactttgtgtacgattgcattactgccgcttgctgagcccggagtgatttcccggttaagcagttggcaattggcatgcctgattttttgcgggctgaataccctggtcggctacggggcgctggcggaagccatggcgcgctggcaggcggcgcaggtcagcgcgttaatcaccttgacgccactgtttacgctactgttttctgatttattatcaatggcctggcccgatgttttcgccagaccgatgttaaacctgattggttatctcggtgcgtttgtcgtggttgcgggcgcgatgtattccgccatcggtcatcgtctttggggacgttggcgtaagcgagaggcggtagtaccgctgccccgctcaggcgaatga

SEQ ID NO: 209872 - DNA, 1179 bp, Klebsiella pneumoniae
atgaagtttgtagatgaagcaacgatcctggtcgtagcaggtgacggcggcaatggttgcgtaagcttccgccgcgaaaagtatattccgaaaggcggtccggacggcggcgatggcggtgatggcggcgatgtctggctggaagcggacgagaacctgaacaccctgatcgactaccgttttgaaaaatcgttccgcgccgaacgtgggcagaatggtcaaagccgcgactgtaccggtaagcgcggtaaagacgtgacggtaaaagtgccggtcggcacccgggttatcgatcagggcaccggcgagaccatgggcgatatgaccaaacacggtcagcgtctgatggtggcgaaaggcggctggcacggtttgggcaacacccgtttcaaatcgtccgttaaccgtacgccgcgtcagaaaaccatgggtaccccgggtgataaacgcgacctgcagctggagctgatgctgttggccgatgtcgggatgctgggcatgccgaacgccggcaaatccaccttcatccgtgcggtctccgccgccaagccgaaagtggctgactatccgtttaccaccctggtgccaagcctgggcgtggtgcgtatggacaatgaaaagagcttcgtagttgccgatatcccggggctgattgaaggcgcagcggaaggggcaggcctcggtatccgcttcctcaagcacctcgagcgctgccgcgtactgctgcacctcatcgatatcgatccgatcgacggctccgatccggttgagaatgcgcgcattatcatcggcgagctggagaaatacagcgagaagctagcctccaaaccacgctggttagttttcaacaagattgacctgatggacaaggccgaagccgaagccaaagccaaagcgattgccgaagcgctgggttgggaagagaaattctacctgatctccgcggccagccagcagggcgtgaaagagctatgctgggacgtgatgaccttcatcatcgaaaacccgatcgtgcaggcggaagaagagcagaagccggagaaagtcgagtttatgtgggacgactatcaccgtcagcagcttgaagaggccgaagccgaagcagaagatgacgaagactgggatgacgactgggatgaggacgacgaagaaggcgtcgaattcatctacaaacgctaa

SEQ ID NO: 209873 - DNA, 1434 bp, Klebsiella pneumoniae
atgcgatttcccagatttatcatcggattgaccgccggtatagcgcttagcgctcaggcggcgaatattgacgagtacatcaaccagcttcccgccggtgcgaaccttgcctttatggcgcaaaaggtcggcgcatcgacgccggaaatcgactatcacagccagcaaatggcgctcccggccagtacgcaaaaggtcatcaccgcgctggcggcactgctgcaactggggcccgattttcgctttaccaccacgctggaaaccaaaggttcccttgacggcggcgtgctgaaaggcgacctgattgcgcgcttcggcggcgatccgacgcttaaacggcaggatattcgcaatatggtggcgacgctgaaaaaagccggcgtgcagcgtatcgaaggcaatgtgctcatcgatacctcggtcttcgccagccatgacaaagcgcccggctggccgtggaacgacctgacgcagtgcttcagcgccccgccggcggcggcgattgtcgaccgtaactgcttctctgtctcgctgtatagcgcgcagaaaccgggcgatgtcgccttcattcgcgttgcatcctattatccggtcaccatgttcagccaggtgcgaacgctagcgcgtggctcatcggaagcccagtattgcgagctcgacgtggtgccgggcgatctcaatcgctatactctcaccggctgcctgccgcagcgtagcgagccgctgcctctggccttcgccattcaggatggcgccagctatgccggagcgatcctcaaagcggagctggcccaggcgggaatcacctacagcggcacgctgctccgccagacgctggccaatgagcccggcaccgtgctggcaaccagccagtcggctccgctgcacgatctgctgcggatcatgctgaagaagtcagacaacatgattgccgacaccgtctttcgcaccatcggccacgcccggttcggcgtacctggcacctggcgggcgggctccgatgccgtacggcagatcctgcgtcaacaggctggggtcgatctcggcaacactatcatcgccgacggctctggcctgtcgcgccacaacctgatcgccccggcgaccatgatgcaggtgctgcagtatatcgcccagcacgataccgagctcaacttcatctccatgctgccgctggcgggccatgacggatcgctgcagtatcgcgccggtcttcatcaggcgggcgtcgatggtaaagtttcggcgaaaaccgggtcgctccagggggtttataacctcgcaggcttcatcactaccgccagcggacaaaagatggccttcgtgcaatatctctccggatacgccgtggagccagctgatcagcgcaatcgccgcatcccactggtccgctttgaaagccgcttgtataaagatttgtaccagaacaattaa

SEQ ID NO: 209874 - DNA, 477 bp, Klebsiella pneumoniae
atgcaagcgattccgatgaccttacgtggcgctgaaaaactgcgcgaagaactggattatctgaagtctgtgcgtcgtcctgaaatcattgccgctattgctgaggcccgtgaacacggcgatctgaaagagaatgccgagtatcacgccgcgcgtgagcagcagggtttctgcgaagggcgtatcaaggatatcgaagcgaagctgtctaatgcgcaggttatcgatatcaccaaaatgccgaacaacggccgggtgatttttggttctaccgtcagcgtgctgaacctcgataccgacgaggaacagacctaccgcatcgtgggcgatgacgaagctgattttaagcagaatctgatctccgtgaactcgccgatcgcccgcggtctgatcggcaaagagcaggatgacgtcgtgactatccgtaccccgggtggggaagtggaatacgaaattaccaaggttgaatacctgtaa

SEQ ID NO: 209875 - DNA, 333 bp, Klebsiella pneumoniae
atgacccgttttcaatcccaacgtaagcaaaaaaatacgatgaatctgagtactaaacaaaaacagcacctgaaaggtctggcacatccgctcaagccggtagttatgcttggcaacaatggtttgaccgaaggggtactggccgagatcgaacaagcgttagggcaccatgaactcatcaaggtgaagatcgcctcagaagatcgcgaaacaaaagccttgatcgtggaagccatcgtacgcgaaaccggcgcctgtaacgtacaggtcatcggtaaaacgctggttctgtaccgcccaacaccagagcgtaaaatctcgctgccacgctaa

SEQ ID NO: 209876 - DNA, 630 bp, Klebsiella pneumoniae; identical to SEQ ID NO: 138986

SEQ ID NO: 209877 - DNA, 1944 bp, Klebsiella pneumoniae
ttgagtgacatggcgaaaaacctaatactctggctggtcattgccgttgtgctgatgtcagtattccagagctttgggcccagcgagtcgaatggccgcaaggtggattattctaccttcctgcaagaggtcaatcaggaccaggttcgcgaagcgcgtatcaacggacgtgagatcaacgttaccaagaaagatagtaaccgttacacgacttacattccggttaacgatccgaagctgctcgataacctgttgactaaaaacgtcaaagttgttggcgaaccaccagaagagccgagcctgctggcttccatcttcatctcctggttcccaatgctgctgctgatcggcgtctggatcttctttatgcggcaaatgcagggcggcggcgggaagggcgcgatgtccttcggcaaaagcaaagcccgtatgttgacggaagaccagatcaaaaccacttttgcagacgttgccgggtgtgacgaagcgaaagaggaagtcggcgagctggtagaatacctgcgtgagccgagccgcttccagaaactgggcggtaaaatcccgaaaggcgtcctgatggtcggccctccgggtaccggtaaaacgctgctggcgaaagcgatcgctggtgaagcgaaggtaccgttctttaccatttccggttctgacttcgtcgaaatgttcgtcggtgtgggcgcttctcgtgtgcgtgacatgttcgaacaggctaagaaagccgcgccttgcatcatcttcatcgatgaaatcgacgccgtcggccgccagcgtggcgcaggcctgggcggtggtcacgatgaacgtgagcagaccctgaaccagatgctggttgagatggacggcttcgaaggtaacgaaggtatcatcgttatcgcggcgactaaccgtccggacgttcttgaccccgcgctgttgcgtccgggccgttttgaccgccaggtggtggttggcctgccggatgttcgcggtcgtgagcagatcctgaaagtgcatatgcgtcgcgttccgctggcgccggatatcgatgcggcaatcattgcgcgcggtaccccgggcttctccggtgcggatctggccaacctggtcaacgaagcggcgctgtttgctgcccgcggtaacaaacgcgttgtgtcgatggttgagttcgagaaagcgaaagacaaaatcatgatgggtgcggaacgtcgctccatggtgatgacggaagcgcagaaagagtctactgcttatcatgaagcgggccacgcgattattggtcgcctggtgccggagcacgatccggtgcacaaagtgacgattatcccgcgcggtcgtgcgctgggtgtgaccttcttcctgccggaaggcgatgcaatcagcgccagccgtcagaaactggaaagccagatctccaccctgtacggcggtcgtctggcggaagagattatctacggtccggaacatgtttctaccggtgcgtccaacgatattaaagtggcgacgaacctggcgcgtaacatggtgacccagtggggcttctccgacaaactcggtccgctgctgtatgcggaagaagagggtgaagtcttcctcggccgtagcgtcgcgaaagcgaagcatatgtccgatgaaaccgcgcgtatcatcgaccaggaagtgaaatcgctgattgagcgtaactacggtcgtgctcgccagctgctgaacgacaacatggacattctgcacgcgatgaaagatgcgctcatgaagtatgagaccatcgatgcgccgcagattgacgacctgatggctcgtcgcgaagttcgtccgccagcgggttgggaagaaccaggttcttctaacaactctgacaacaatggcacgcctcgtgcgccgcgtccggttgatgaaccgcgtacgccgaacccgggcaacaccatgtcagagcagctgggcgacaagtaa

SEQ ID NO: 209878 - DNA, 849 bp, Klebsiella pneumoniae
atgaaacttgtagcccagggctcaaccctcgatctctctcaccctcacgtgatgggtattctaaatgtgacgcctgactccttctccgatggcggcgcccataattcgctgattgaggcggtgaagcatgccaatctgatgatcaacgccggcgcgaccatcattgatatcggcggtgaatcgacgcggccaggggcggctgaggttagtgtggaagaggagcttgcgcgggtgataccggtggttgaagccattgcccagcgctttgaggtatggatctcagtggatacctccaaggcggaggttattcgccaatcggccagggccggggcgcatatcatcaacgatattcgttcgctgaccgagcccggcgcgctgcaggccgccgcggaaaccggactgccggtgtgtctgatgcatatgcagggacaaccaaaaaccatgcaggaggcgccgaagtatgaggacgtcttcgccgatgttgagcgtttttttaatgagcacattgtgcgctgcgaacaggcagggatcgcaaaagaaaaattgctgctcgacccgggattcggtttcggtaaaaatctctcccacaattaccaactgttggccaggcttggggagtttcatcactttggtctgccgctgctggtcggtatgtcacgtaagtcgatggtaggtcagttgctgaacgtcgggccgtcggagcggctgaacggcagcctggcgtgtgccgtcattgcagcaatgcagggcgcgcagattatccgcgtccatgatgtcaaagaaacggtagaagcgctgcgcgtggtggaagccaccctcgccgctaagggaaaaaaacgttatgagtaa

SEQ ID NO: 209879 - DNA, 1338 bp, Klebsiella pneumoniae
atgagtaaccgcaagtattttggcaccgatggtattcgtggccgcgtcggcgatgcgccgatcactccggagtttgtgctcaagctgggctgggcggcgggcaaagtgttagcgcgtcacggttcgcgtaaaattatcatcggcaaggatacccgtatttcgggctatatgctggaatcggcgctggaagctggactggcggcagcggggctctctgcgtcgttcaccgggcctatgccgacaccggccatcgcctacctgacgcgcgccttccgcgccgaggcggggattgttatctctgcttcacataaccctttctacgacaacggcattaaattcttctccattgagggcaccaaactgccggatgatgtcgaagaggcgattgaagccgaaatggagaaagagctcacctgcgtggattcggctgagctgggcaaagccagccgtatcgtcgatgcggcggggcgctacattgaattttgtaagggtacctttcccaacgaactgagcctgggaacgctgaaagtggtggtggattgcgcgcacggcgcgacctatcacatcgcccctaatgtcttccgcgagctgggagcccaggttatcgcgatgggctgcgagccagacggtctcaacatcaacgaagaggtcggcgccactgacgtgcgggcgctgcaggcgcgcgtgctggcggaaaaagccgatctgggtattgcctacgacggcgatggcgatcgggtgattatggttgaccacgaaggcaataaagtcgatggcgaccagatcctctatatcatagcccgggaaggattgcgtcaggggcagctgcgcggcggcgccgtcggcacgctgatgagtaatatggggctggagctggcgctcaagcagttaggcatcccgtttgcccgcgcgaaggtcggtgaccgctatgtactggagatgctccaggaaaaaggctggcgcatcggtgcggaaaactccggccatgtgatcctgctggataaaaccaccaccggcgatggcattgtcgccagcctgcaggtggtcgcggcgatggtccgcaaccacatgagcctgcatgacctgtgcagcgggatgaaaatgttccctcagctgctggtgaatgtccgctttaccgagggcagcggtaacccgctggagaatgagcatgtcaaagcggtgaccgcggaagtggaggcggcgttaggaaaacgcggccgtgtcctgctgcgtaaatcgggtacggagccgctgatccgcgtgatggtggaaggcgagcatgaagatcaggtgcacgagtttgcgcaccgcatcgctgaggcggtaaaaagcgtttag

SEQ ID NO: 209880 - DNA, 330 bp, Klebsiella pneumoniae; identical to SEQ ID NO: 138781

SEQ ID NO: 209881 - DNA, 402 bp, Klebsiella pneumoniae
atgaacaagatcgggttgcttatcgtcgccggcgtgctcggtttagctgggtgcagttcaacatcgccctcccaaacggtggagacgattaatgcgctaaccgtaccggtatcgcccagtgagtctgggactacagcgaatcatgcccaggcggtgaggcgctatttccaggacaatacggcactgattagtcgccttaaccattcgttgaaaagtcattatctgcaggacgtggagcgccgcgatgtgttcgacagacacagcgaggcgtataaggtgtatggcgccctgacccgcctggagcagatggcgtccatgaatgaggtttaccgcaaagagaataatattgcaggcctacaagagatcaaccgcgtactgaaaagcgtgccgctgaccagctga

SEQ ID NO: 209882 - DNA, 552 bp, Klebsiella pneumoniae
atgaagtctattgctgcaaaaatggttgccgtaacgatcgctttgggagccagcagcgctgcctgcgcagccgttaacctgcatggagaagctggcgccgagtttaccaatctgtccgccagctttggcgccggggaaccgggtatgacgttcagttctcagtgggctcatagcgacaacgacggagatagtgtaggactgggaatgggttataactttaaccttggcccttttctgatgaccctgggcggtaaggcggtctatctgaacccaaaagatggtgatgaaggttacgccatcgccgccggtggtggcgctgaactcccccttggtcagtatttcacgcttttcggcgagggctattactcaccggactcaatgtccagcggcgttgaggattatgtggaggccaatgccggggtacgccttaacgtgctcccctctctgaatatcgaagctggctatcgctatattgatatggcagggaaagatggcaatcgcgataacacgctggccgacggcgcttacgccggggttaacttccgcttttaa

SEQ ID NO: 209883 - DNA, 630 bp, Klebsiella pneumoniae
atgaatattaaaccgccgatcaggccgcaaaagaccattgaccggctgatcgatgtacttgagccacacgcgacccccgttaacgcgatcgccagaaaaagactgacatgggaatataaaggcaaaacccagctctttatttttaaaaaaggcgagctgtcgattattcgtaattccgacaggctactgatggtgaccgtctatgagccgcatcttttcggcgtggcggaaatgctgcagcccagccgcagccacagcctgcgagccgaggtatcatgcgaactgctacggatcgaccacgacctggcttcggcgctttttcgtcagcataacctgtgggaagaggtgaccagcctgttggcttatcatacctcgtatatggtgtatcgtgacgatctggtcctgcagcagcgtacctattcggtcatccgtaaccagctgctggagatgatgctattaagcgaagagacccgacagcgagtatctattcttgagtatattcaggacaggacccttctgtcgcgtagcagtattctcaatgtattgtcagcattaaagaaaggcggttatattgcctttgcccgcggcggttatttacaaaatatcgtctcacttcctgaaaaattctga

SEQ ID NO: 209884 - DNA, 1344 bp, Klebsiella pneumoniae
atgacgacgattctcaagcatctcccggttggtcaacgtattggtatcgctttctctggtggactggataccagcgccgcgctgttatggatgcgcaaaaaaggcgccgtgccttatgcatataccgctaacctgggtcaaccggacgaagacgactacgatgctatcccgcgccgcgcgaaagagtacggcgctgaaggcgcccgtctgatcgactgccgcaaacagctggtcgcagaagggatcgccgcgattcagtgtggcgctttccataacaccaccggtgggttgacctacttcaacaccacgccgctaggccgcgcggtcaccggcaccatgctggtggcggcgatgaaagaagacggcgttaacatttggggcgatggcagcacctataaaggcaacgatattgaacgtttctatcgttacggcctgctgaccaacgctgaactgcagatttacaaaccgtggctggacagcgactttatcaatgagctcggcggtcgtcacgaaatgtccgaatttatgatcgcctgcggctttgattacaagatgtcggtcgagaaagcctactccaccgactccaatatgctcggcgcgacccatgaagcgaaagatctcgaattcctgaactccagcgtcaagatcgtcaacccgattatgggcgtgaagttctgggacgaaaacgtgaagatccctgcggaagaggtcaccgtacgctttgagcagggccatccggtggcgctgaatggtaaaacctttgccgatgacgtcgagatgatgctggaagccaaccgcatcggcggtcgtcacggcctgggcatgagcgaccagattgaaaaccggattatcgaagcgaaaagccgcggcatttatgaagctccggggatggcgctgctgcatattgcctacgagcgtttgctgaccggtatccataacgaagatacgattgagcaatatcacgcccacggtcgccagttgggccgcctgctgtatcagggccgctggtttgattcccaggcgctgatgctgcgtgattcgctgcagcgctgggtcgccagccagatcaccggcgaagtcaccctcgaactgcgtcgcggtaacgactactcgatccttaatacggtatcagacaacctgacctataaagcggagcgtctgaccatggaaaaaggcgattccatgtttactgccgaagaccgtatcggccagctgaccatgcgtaatctggacatcaccgatacccgcgagaagctgttcggctatgcccagtctggcctgctgagcgcctcctcggcaaccggtttaccgcaggttgaaaatctggaaaacaaaggtaaataa

SEQ ID NO: 209885 - DNA, 453 bp, Klebsiella pneumoniae
ttgtccacattagagcaaaaattgacagagatgctcactgcgccggttgaagcgcttggctttgagctggtcggcatcgaatttattcgcggtcgcacatccacactgcgcatctatattgatagtgaagatggcatcaacgttgatgattgtgctgatgtgagccaccaggtaagcgccgtcatggatgtcgaagacccgatcactgtcgcttacaacctggaagtctcttcgcctggtcttgaccgtccgatgttcaccgccgaacactatcaacgtttcaccggcgaagaagttgcgctggtgctgcgcatggcggttcagaaccgccgcaaatggcagggcattatcaaagcggtagacggtgagatgatcacggtaaccgtcgaaggcaaagatgaagtgttcgcgctgagtaacatccagaaggcgaacctggttccccacttttaa

SEQ ID NO: 209886 - DNA, 1488 bp, Klebsiella pneumoniae
atgaacaaagaaattttggctgttgttgaagccgtttccaacgaaaaagcgctgccgcgtgagaaaattttcgaagcgctggaaagcgcgctggcaacggccaccaagaaaaaatacgaacaagagatcgacgttcgcgttgaaatcgaccgcaagagcggcgatttcgataccttccgtcgttggctggttgtagaagaagtcacccagccgacgcgcgagatcacgctggaagcagcgcgtttcgaagatgaaagcatgaacgtcggcgactatgtcgaagatcagatcgaatctgttaccttcgaccgtatcaccacccagaccgctaagcaggttatcgtgcagaaagtccgcgaagccgagcgcgcgatggtggtcgatcagttccgcgagcacgaaggtgagatcatcaccggcgtggtgaaaaaagtgaaccgcgacaatatcacactggatctgggtaacaacgctgaagccgtgatcctgcgtgaagatatgctgccgcgtgaaaacttccgtccgggcgaccgcattcgcggcgtactgtacgctgtccgtccggaagcgcgtggcgcccagctgttcgtcacccgttccaaacctgagatgctgatcgaactgttccgcatcgaagtgccggaaatcggtgaagaagtgctggagatcaaagcggcggctcgcgatccgggctctcgtgccaaaatcgcggtgaaaaccaacgacaagcgcatcgacccggttggcgcttgcgtcggtatgcgcggtgcgcgtgtgcaggccgtgtcgactgagctgggtggtgaacgcatcgatatcgtcctgtgggatgataacccggcgcagttcgtgattaacgctatggcgccggcagacgtcgcgtccatcgtggtggatgaagataaacacaccatggatatcgcggtagaagcgggcaacctggcgcaggcgatcggccgtaacggtcagaacgtccgcctggcttcacagctcagcggctgggaactcaacgtcatgaccgttgacgatctgcaggctaagcaccaggcggaagcgcatgccgctatcgataccttcaccaaatatcttgatattgatgaagatttcgcgacagtgctggttgaagaaggcttctcctcgctggaagagctggcctatgtgccgatgaaagaactgctggaaatcgacggtctggatgaagccaccgttgaagcacttcgtgagcgtgcgaaaaacgcactgactacgctggcgctggctcaggaagaaagcctgggagataacaaacctgccgatgatctgttgaatctcgaaggtctggatcgtgccctggcattcaaactggctgcccgtggtgtttgtacgctggaagatctcgccgagcagggcgttgatgacctggctgatatcgaagggatgaccgacgagaaagctggcgagctcatcatggccgctcgcaacatttgttggttcggcgacgaagcgtaa

SEQ ID NO: 209887 - DNA, 2691 bp, Klebsiella pneumoniae
atgacagatgtgactattaaagcgctggcctcagagattcagacctctgtggatcgcctgatacagcaatttgctgacgcaggcatccgcaaatcggctgatgattctgtgacctcgcaagagaaacaaactttgttgacgcacctgaaccgtgaacacggctcggcgccagacaagctgacgttacagcgtaagacgcgcagtacgttgaatattccaggtaccggtggaaagagtaaatcggtacaaatcgaagtccgcaagaaacgcacctttgtgaaacgcgatccgcaagaggctgaacgcctggccgcggaagagcaggcgcagcgtgaagcggaagagcaggcccgtcgtgaagctgaagaagcagcgaaacgcgaggcgcaattaaaagctgaacgtgaggccgcagaacaagctaaacgtgaagtcgctgataaagcgaaacgtgaagctgcggaaaaagacaaagtgagcaatcaacataccgacgaaatgaccaaaaccgcccaggctgaaaagatccgtcgcgagaacgaagccgcggaattgaagcgcaaatcggaagaagaagcacgccgcaaacttgaagaagaagcgcgccgtgtagcggaagaagcacgccgtatggctgaagaaaacgaaaaaaattggtctgaaacctcagacagcccggaagatagcagcgactatcacgtcaccacatcacagcatgctcgtcaggctgaagatgataacgatcgtgaagtcgaaggcggtcgcggccgtagccgtagcagcaaagcggctcgtccggcgaagaaaggcaacaaacacgctgaatcgaaagctgatcgtgaagaagcccgcgcggccgtgcgcggcggtaaaggcggtaagcaccgtaaaggttccgctctgcagcagggcttccagaagccagcgcaggccgttaaccgtgacgtcgtaatcggcgaaaccatcaccgttggcgaactggctaacaagatggcggtgaaaggttctcaggtcatcaaagcgatgatgaagctgggcgccatggcgaccatcaaccaggtcatcgaccaggaaaccgcacagctggttgccgaagagatgggccacaaagttatcctgcgtcgtgaaaacgaactggaagaagccgtaatgagcgaccgtgacaccggcgcggcggctgaaccgcgcgcaccggtcgtgaccattatgggtcacgttgaccacggtaaaacctcgctgctggactacattcgttctaccaaggttgcctccggcgaagcgggtggtattacccagcacatcggtgcttaccacgtcgaaaccgacaacggcatgatcaccttcctggataccccgggccacgccgcgtttacctccatgcgtgctcgtggcgcgcaggcgacggatatcgtggttctggtggtggcggcagacgacggcgtgatgccgcagactatcgaagctatccagcacgctaaagcggcgcaggtaccggtggtagtggcggtgaacaagatcgataagccagaagccgatccggatcgcgtgaagaacgaactgtcccagtacggcatcctgccggaagagtggggcggcgagagccagtttgtccacgtttccgcgaaagcgggtaccggcatcgacgacctgctggacgcgatcctgctgcaggctgaagttcttgagctgaaagcggtccgcaacggtatggcgagcggcgcggtcatcgaatccttccttgataaaggtcgtggtccggtagctaccgttctggttcgcgaaggtactctgcacaagggcgacattgttctgtgcggcttcgaatatggccgtgtgcgcgcgatgcgtgacgaactgggtcgcgaagtgctggaagcgggtccgtccattccggtggaaatcctcggcctgtccggtgtgccggctgccggtgatgaagtgaccgtagtgcgtgacgagaaaaaagcgcgtgaagtggcgctgtatcgtcagggcaaattccgtgaagttaagctggcgcgtcagcagaaatctaaactggaaaacatgttcgctaacatgaccgaaggcgaagttcacgaagtgaacatcgtactgaaggcggacgtacagggttctgtcgaagcgatttccgattccttactgaaactgtctaccgacgaagtgaaagtgaagatcatcggttccggcgtaggtggtatcaccgaaaccgacgctaccctggcagcagcatccaacgcgattctggttggcttcaacgttcgtgccgatgcctctgcgcgtaaagttatcgaagcggaaagcctggatctgcgttactactccgtcatctataacctgatcgacgaagtgaaagcggcgatgagcggcatgctgtctccggaactgaaacagcagatcatcggtctggctgaagtgcgtgatgtcttcaaatcgccgaaattcggcgccatcgcgggctgtatggttaccgaagggacgatcaaacgtcacaacccaatccgcgttctgcgtgacaacgtggttatctatgaaggcgagctggaatccctgcgccgcttcaaagatgacgttaacgaagtccgtaacggcatggaatgtggtatcggcgtgaagaactacaacgacgttcgcgttggcgatatgatcgaagtgttcgaaatcatcgaaatccagcgtagcatcgattaa

SEQ ID NO: 209888 - DNA, 402 bp, Klebsiella pneumoniae
atggcgaaagaatttggtcgcccgcagcgtgtggcccaggagatgcaaaaagagattgccatcatcctgcagcgtgaaattaaagatccgcgtctgggcatgatgaccaccgtttccggtgtggaaatgtcccgtgacctggcctatgccaaggtgtatgtcaccttccttaacgacaaagatgaagccgcggtgaaagcgggcatcaaagcgctgcaggaagcttctggctttatccgctctctgctggggaaagcgatgcgtctgcgcatcgtaccggaactgactttcttctacgacaactcactggtcgaagggatgcgtatgtccaacctggtcaccagcgtggtgaaacacgacgatgagcgtcgtgtgaacccggacgacagcaaggaggactga

SEQ ID NO: 209889 - DNA, 945 bp, Klebsiella pneumoniae
atgagtcgtcctcgtcgtcgcggccgcgacgtgcatggcgtattgttgctggacaagcctcagggcgcctccagtaacgatgtgctgcaaaaagtaaaacgtatttataacgccaaccgcgccgggcataccggcgcgctggatccgctggcgaccggtatgctgccgatctgccttggcgaagcgaccaagttttcccagtatctgctggactccgataagcgttaccgcgtgatcgccaaacttggccagcgcacggatacctccgatgccgacggtcaggtggtggaagagcgcccgctgactttttgcgacgaacagctggcggcggcgctggacagcttccgcggcgagacgcagcaggtgccgtcgatgtattcggcgctgaaatatcagggcaagaagctatacgaatatgctcgccagggtattgaagttccgcgggaagcccggccgataaccgtctatgagctgctgtttattcgccgcgaaggcgatgagctggagctggagatccactgctcgaaaggcacctacatccggacgattatcgatgatttaggtgagaagctcggctgcggcgcgcacgtgattttcctgcgtcgcctggcggtaagcaaatacccggtcgagcggatggtgaccctcgagcagctgcaggcgctggtcgatgaggcggcggcgcaggatattcctgccgctcagttgcttgatccgctgctgatgccgatggacagcccggcctcggattacccgctggttaatattccagaaacctccgcagtctactttaagaacggcaacccggtacgtcagtcaggcgcgccgcttaacgggctggtgcgggtgatggagagcgagtccggcaagtttctcggcatgggcgaaattgacgatgaaggccgcgtggccccgcgtcgtctggtggtggaatacccggcgtaa

SEQ ID NO: 209890 - DNA, 270 bp, Klebsiella pneumoniae; identical to SEQ ID NO: 139489

SEQ ID NO: 209891 - DNA, 2136 bp, Klebsiella pneumoniae
ttgcttaatccgatcgttcgtaaattccagtacggccagcataccgtgaccctggaaaccggcatgatggcgcgccaggcaacggccgctgtgatggttagcatggatgacactgcggtattcgttaccgttgtgggtcagaaaaaagcgaagccaggccaggactttttcccgctgaccgttaactaccaggagcgtacctacgctgccggtaaaatcccgggtggtttcttccgtcgtgaaggccgtccaagcgaaggcgaaaccctgatcgcgcgtctgattgaccgcccggttcgcccgctgttcccggaaggcttcgttaacgaagttcaggttatcgccaccgtcgtttccgttaacccgcaggttaacccagacatcgtcgcgatgatcggtgcttccgctgcgctgtcgctgtctggtattccgttcaatggcccaatcggcgctgcgcgcgtgggttacatcaacgaccagtacgtactgaacccaacccaggaagaactgaagtccagcaaactggacctggtggttgccggtaccgaagcggccgtgctgatggtggaatccgaagcggaactgctgagcgaagaccagatgctgggcgcggtggtcttcggccacgagcagcagcagattgttattcagaacatcaacgacctggtgaaagaagccggtaaaccgcgttgggactggcagccggaagcggtcaacgaagcgctgaacgcgcgcgtggctgcgctggctgaatcccgtctgagcgatgcttaccgtatcaccgacaaacaagagcgttacgctcaggttgacgtgatcaaatctgaaaccatcgccacgctggttgctgaagatgaaaccctggacgctaacgagctgggtgaaatcctgcacgccatcgagaaaaatgtggttcgtagccgcgtactggccggcgagccgcgtatcgatggccgtgaaaaagatatgatccgtggtctggacgttcgtaccggcgttctgccgcgtactcacggttccgcgctgttcacccgtggcgaaacgcaggcgctggttaccgcgactctgggtaccgcacgcgatgcgcagaacatcgacgaactgatgggcgagcgcaccgactccttcctgttccactacaacttccctccgtactccgtaggcgaaactggcatggtggggtctccgaagcgtcgtgaaatcggtcacggtcgtctggcgaagcgcggcgtactggccgtgatgccgactattgaagaattcccgtacaccgtgcgcgtggtatcggaaatcaccgaatctaacggttcctcttccatggcttccgtctgcggcgcctctctggcgctgatggacgccggcgtgccggtaaaagccgctgtggcgggtatcgcaatgggtctggtgaaagaaggcgacaacttcgtcgtgctgtctgacatcctcggtgacgaagatcacctcggcgatatggacttcaaagttgcgggttcccgcgacggtatctctgcgctgcagatggatatcaaaattgaaggtatcaccaaagaaatcatgcaggttgcattgaaccaggctaaaggtgcgcgtctgcacatcctgggcgtgatggagcaggcgattaacgcgccgcgcggcgatatctctgaattcgcaccgcgtatccacaccatcaagatcaacccggacaagatcaaagacgttatcggtaaaggcggttctgttatccgtgccctgaccgaagagaccggtactaccatcgagatcgaagatgacggtaccgtgaagatcgcagcgaccgacggcgacaaagcgcagcatgctatccgtcgtatcgaagagatcaccgctgagatcgaagttggccgcatctacaatggtaaagtgacccgtatcgttgactttggcgcattcgttgccatcggcggcggtaaagaaggtctggttcacatctcgcagatcgctgacaagcgcgttgagaaagtgactgactacctgcagatgggtcaggaagtaccggttaaggttctggaagttgaccgccagggccgtgtccgtctgagcattaaagaagcaactgaacagactccgtctgccgcagcgccggaagctccggctgccgagcagggcgagtaa

SEQ ID NO: 209892 - DNA, 885 bp, Klebsiella pneumoniae
atgaagccttttttgcgctggtgtttcgtggcgacagctctcacgctggcaggatgcagtagcaccgcctggcgtaaggacgccgtcctcgcagtaccattgcaaccgactttacagcaagaagtgattctggcacgcatggaacaaattcttgccagtcgggctttatccgatgacgaacgcgcacagcttttatatgagcgcggagtgttgtatgatagtctcggtctgagggcacttgcgcgaaatgatttttcacaagcgctggcaatccgacccgatatgccggaagtattcaattacttaggcatttacttaacgcaggcaggcaattttgatgctgcctatgaagcgtttgattctgtacttgagcttgatccaacttacaactacgcgcacttgaaccgcggtatcgccctgtattacggcggccgggctaagttagcgcaagatgatctgctggcgttttatcaagacgatcccaatgatcctttccgtagcctgtggctttatatcgccgagcgtaaactcgacgagaagcgggcgcttgaagcactcagagagcgcttaaacaagtcggataaagagcaatggggatggaacattgtcgagttctaccttggcgacattagcgaaaaagagctgatgactcgtctgaaggcagacgcaacggataacacctcgctcgctgagcatctcagtgaaaccaacttctatttaggtaagtactacctaagtctgggggacaaggacagcgctacggcactgttcaaactggcggtcgccaacaacgtacacaactacgttgagcaccgatacgcattgttggaattatcgctcttgggccaggagcaagatgacctggcagaatcggaccagcaatag

SEQ ID NO: 209893 - DNA, 1932 bp, Klebsiella pneumoniae
atggctgaattcgaaaccacttttgcagatctgggcctgaaggctcctatccttgaagcgctcaccgatctgggttacgaaaaaccatctccgatccaggctgagtgcattccgcatctgctggacggccgcgacgttctgggtatggcccagaccggtagcggtaaaaccgcagcattctctttaccgctgctgaacaacatcgatcctgagctgagagcaccgcagattctggtgctggcgccgacccgcgagctggcggtacaggttgctgaagcaatgacggaattctctaaacatatgcgcggcgtgaacgtggttgccctgtacggcggccagcgttatgacgtgcagctgcgcgccctgcgtcagggtccgcagatcgtcgtcggtaccccgggtcgtctgctggaccacctgaagcgcggcaccctggacctctccaaactgagcggcctggtactggatgaagcagatgaaatgctgcgcatgggctttatcgaagacgtagaaaccattatggcgcagatccctgaagggcatcagaccgcgctgttctccgccaccatgccggaagctatccgtcgcattacccgtcgctttatgaaagagccgcaggaagtgcgcattcagtccagcgtgacgactcgcccggatatcagccagagctactggactgcctacggcatgcgtaaaaacgaagcgctggtgcgtttcctggaagcggaagactttgatgcggcgattatcttcgtccgtaccaaaaacgcgaccctggaagtagctgaagcgctggagcgtaatggctacaacagcgcggcgctgaacggcgacatgaaccaggcgctgcgtgagcagactctggaacgcctgaaagatggtcgtctggatatcctgattgcgactgacgttgcggcccgtggcctggacgttgagcgtatcagcctggtggtgaactacgacatcccaatggattctgaatcctacgttcaccgtatcggccgtactggtcgtgccggtcgtgctggccgcgcgctgctgttcgttgagaaccgcgagcgtcgtctgctgcgcaacatcgaacgcaccatgaagctgaccattcctgaagtggaactgcctaacgcggagctgctgagcaagcgtcgtctggaaaaattcgccgcgaaagttcagcagcagctggaaagcagcgatctggatcagtaccgtgcactgctggcgaaaatccagccgacggcggaaggtgaagagctggacgtggaaacgctggctgctgcgctgctgaagatggctcagggcgaacgttcgctgatcgttccgccggacgcgccgatgcgtccacgtcgtgaattccgcgatcgtgacgatcgtttcgaccgtcgtggcgaccgtaatgatcgcggcccgcgcggcgatcgcgaagatcgtccgaagcgtgagcgtcgtgacgtgggtgacatggagctgtatcgcattgaagtgggtcgcgatgacggcgttgaagtgcgtcatatcgttggcgcgatcgccaatgaaggcgatatcagcagccgttacatcggtaacatcaagctgttcgcttctcactccaccattgagctgccgaaagggatgccgggcgaagtgctgcagcactttactcgtacccgtatcctgaacaagccgatgaacatgcagctgctgggcgatgcgcagccgcgcaccgaacgtcgtggcggcggtgagcgtcgcgaaggcggccgtggctttggcggcgagcgtcgtgaaggcggccgtggcttcggtggcgaacgtcgtgaaggcggtcgtggtgaaggacgtcgtttcagcggcgaacgtcgtgaaggccgtgcgccgcgtcgtgacgatgcatccgcgccgcgccgcgatgactcagccggccgccgtcgcttcggtggcgatgcgtaa

SEQ ID NO: 209894 - DNA, 1245 bp, Klebsiella pneumoniae
atggcgacactaaccactacggcaacccgtccgtctctgtttggcggcgtggtgattatcggcggcacgattatcggcgcgggcatgttctcgctgccggtggtgatgtccggcgcgtggtttttctggtcgctggcggcgctggtcttcacctggttctgcatgctgcactccggtttgatgatcctcgaggccaatcttaactaccgcatcggctccagcttcgacaccattaccaaagacctgctcggcaagggctggaacctggtgaacggtgtatcaatcgcctttgtgctctatatcctgacctacgcctatatttcggcgagcggttcgatcctccaccacaccttcagtgaactgtcgctgaaggtgccggcgcgcgcggcgggcttcggctttgcgctgctggtggcgtttatcgtctggatgagcaccaaagcggtgagccgcatgacggctatcgtactgggcgctaaggtgatcaccttcttcctgaccttcggtagcctgctcgggcacgtcgagccgacgacgttatttaacgttgcggagaagaatgcctcctatgcgccatacctgctgatgacgctcccgttctgcctggcctcgtttggctatcacggcaacgtgccgagcctgatgaaatactacggaaaagatccgcgcaccatcatccgctgcttaacctacggtacgctgctggcgctgggtctgtatgtcgtttggctgctggtgacgatgggtaacatccctcgtccgcagtttatcgacatcgcgcagaagggcggcaacattgatgtgctggtgcaggcgctgagcggcgtgctgaatagtcggagtctggatctgctgctggtggtgttctcgaactttgctgtcgccagttcgttcctcggcgtaacgctggggctgttcgactacctggcggatctgtttggctttgacgatagcgcgatgggacgctttaaaaccgcgctgctgacctttatcccgccgatgattggcggactggtcaaacccgatggtttcctctacgccatcggctatgctggcctggcggcgacgatctgggcggcgattgtaccggcgctgctggctcacgcctcacgcaaacgcttcggcagcccacagttccgcgtttggggcggaacgccaatgattgtgctgatcctgctctttggcctcggcaatgcggttgtacatatcctgtcgagcgtcaatctgctgccggtttatcagtaa

SEQ ID NO: 209895 - DNA, 1008 bp, Klebsiella pneumoniae
atgactgacaaatctgttccattctcggtgctcgatctggcgccgatcccgcaaggatcttctgccaaagaagcctttacccactctctggatctcgcccggctggccgaatcgcgcggctatcatcgctactggctggcggagcatcataatatggtcggcattgccagcgcagcgacctcggtgctgattggctatctcgccgccaacaccaccaccctgcatctcgggtccggcggcgtgatgctgcctaaccactctccactggtgatagctgagcagttcggcaccctgaacaccctttaccccgggcggatcgacctcggccttggccgcgcgccgggcagcgatcagccgaccatgcgcgccctgcgtcgccatatgagcggcgatgtcgataatttcccgcgcgatgtagcggaactggtggactggtttgacgcccgcgatccgaacccgcacgtgcgcccggttcccggctacggggagcgcattccagtatggctgctgggctcaagcctctatagcgcgcaactggcggcgcagctcggcctgccgtttgccttcgcctcgcacttcgcgccggatatgttgttccaggccctgcatctgtatcgcagcaatttcaaaccttcggcgcggctggaaaaaccgtacgcgatggtgtgtatcaatatcatcgccgccgacagcaaccgcgatgcggagtttctcttcacctccatgcaacaggcgtttgtgaagctgcgtcgcggcgagaccggtcagttgccgccgccggtggaaaatatgcatcagctgtggtcagcgtccgagcagtatggtgtgcagcaggcactgagcatgtcgttggtcggcgataaaactaaagtccgccatgggctagagtcgattctgcgtgaaaccgaggcggacgaaatcatggtcaatggccagatcttcgaccaccaggcgcgtctgcattctttcgatttagcgatgcaggtgaaagaggagctgttggggtaa

SEQ ID NO: 209896 - DNA, 879 bp, Klebsiella pneumoniae
atgaaatattcattagggccggtgctgtactactggccaaaagagacgctggaagatttttaccagcaggcggcaaactgcagcgccgacaccatttatctcggcgaagcggtatgcagcaaacgccgcgccaccaaagttggcgactggatcgaaatggcgaaaacgctggccgctagcggcaagcaggtggtgctctccaccctcgcgctggtgcaggcctcttctgaactgggcgagctgaagcgctatgtcgataacggcgaatttctgattgaggctagtgatttgggcgtggtaaatctctgcgccgaacgcaagctaccgttcgtcgccgggcatgcgctgaactgctacaacgccgtcaccctgcgcctgctgcggaaacagggcatggtgcgctggtgcatgccggtggaactctcccgcgactggctggctaatttactgacccagtgcgaagagctgggtatccgcaaccagtttgaagtcgaagtgctgagctacggccatctgccgctggcttattccgcgcgctgctttaccgcccgctcggaagaccggccaaaggacgagtgcgaaacctgctgcatcaagtacccaaccgggcgcagcatgctgtcgcaggagaaccagcaggtgttcgtgctcaatggtattcagaccatgagcggctacgtctataacctgggcaatgagctgacctccatgcacggcctggtggatatggtgcgcctgtcgccgatgggcaacgagaccttcgccatgctcgaggccttccgcgccaacgaaaacggcgctgcgccgctggatctcaccagcaatagcgattgcaacggctactggaaacgattgccaggactggtgcttcaggcctga

SEQ ID NO: 209897 - DNA, 996 bp, Klebsiella pneumoniae
atggagctgctctgcccagccggtaaccttccggcgcttaaggcggccatcgaaaacggcgccgatgccgtctatatcgggctgaaagatgacaccaacgcccgccactttgccggccttaatttcaccgaaaagaaactgcaggaagccgtcagctttgtgcatcagcaccgtcgtaagctgcatatcgccatcaataccttcgctcatcccgacggctacgcccgctggcagcgagcagtggatatggccgctcaactgggcgccgatgcgctcattctggccgatatcgccatgctggagtacgctgcggagcgttacccacacattgagcgtcacgtttcggtgcaggcttccgccaccaatgaagaggccattcgcttctatcatcgcaacttcgacgtcgcgcgcgtcgtactgccgcgcgtgttgtctattcatcaggtgaaacagttggcccgcgccacgccggtgccgctggaagtcttcgccttcggcagcctgtgcatcatggcggaaggccgctgctatctctcttcctacctgaccggcgaatcgcccaacaccgtcggcgcctgttcgcctgcccgcttcgtacgctggcagcaaacgccgcaggggctggaatcgcgtctcaatgaagtgctgattgaccgttatcaggatggcgaaaatgccggttatccgacgctgtgcaaaggccgctacctggttgatggcgagcgctatcacgcgctggaggagcccaccagcctcaacaccctggaactgttgccggaattgatggccgccaatatcgcctcggtgaaaatcgaaggccgtcagcgcagcccggcttacgtgacccaggtggcgaaagtctggcgccaggcgatcgatcgctgcaaagccgatccgcagaatttcgtaccgcagtccgcctggatggagaccctgggcgccatgtccgaggggacacaaactacccttggcgcttatcaccgtaaatggcagtga

SEQ ID NO: 209898 - DNA, 525 bp, Klebsiella pneumoniae; identical to SEQ ID NO: 138035

SEQ ID NO: 209899 - DNA, 504 bp, Klebsiella pneumoniae
atgctgattcgagtggagattgggattgatgcaccgggaatcgacgcgctgctgcgtcgtaccttcggccgcgatgccgaagcgcagctggtgcacgatctgcgtgaagatggactgatcacgctgggggtagtggcgacggatgatgaaggccaggtgatcggctacgttgccttcagcccggtggcggtggaaggtgaggagctgcagtgggtcggcctggcgccgctggcggtagatgaacgctaccgcggacagggcattggccggcagctggtttatgaagggctggactcgctgaatgagtttggctacgccgcggtggtgacgctgggcgacccggatttataccgtcgcttcggctttgaaccggccgcgcgcttcgatctccgctgccgctggccggacagcgccgaggcgttccaggttcaccgtctggcggatgacgccctcgacggcgtccatggccaggtagaatacagcgagcactttaatcgtctttaa

SEQ ID NO: 209900 - DNA, 321 bp, Klebsiella pneumoniae
atggtgcacacaccttaccatagtgactttgtgaccgtgtgctggtttctgtatctcattcgaaccgcggataatcgcctttataccggcatcaccaccgacgtgccacgccgctttcgccagcatcaggcgggaaaaggcgcaaaggcgttgcgcggcaaaggcgacctgcagctggcctttagccacgaagttggtgaacactcacttgcattgcgactggaatatcgcgtcaagcagctaacgaagcgcgaaaaagagcgcctcgttgccggagaggatgccttcgaaaccctgctggcaaggcttaaagacgattaa

SEQ ID NO: 209901 - DNA, 444 bp, Klebsiella pneumoniae
atggatacgcttgccgccattggtcgctggctgagtaaacagcacgtcgtcacctggtgcgtctcccgtgaagacgagctgtggtgcgcgaatgccttttacgtctatgacccggataccgtggccttttatctgctcagcgaggagcacacccgccatggccagatgaccggacagagggcgaaggtggccggcacggttaacggccagccaaaaaccgtggccctgatccgcggcgtgcagttcaaaggcgagatccgtcgtctgagcggtgacgaagaggcgcgaatgcgccagcgctacgtcaagcgcttcccggtggcccgcatgctgtcggcgccggtatgggagattcgtccggacgaaatcaaatttaccgacaacacgctgggtttcgggaaaaaattacactggcggcgtgatgccggcgccgagcaggcgtag

SEQ ID NO: 209902 - DNA, 537 bp, Klebsiella pneumoniae
atgagtaaaaagatagccgtcctcattaccgacgactttgaagattctgaatttacctctcccgccgaagcctttaagctcgccgggcatcaggtcatcacgatcgaaaagcaggctggcaaaacggtgaagggtaagcagggagaagccgaggtcgccatcgacagagccatcgatgacgtcacaccgggtgaatttgatgccttattgctgcccgggggctactctcccgaccagctgcgtggtgatgaacgcttcgtcacctttacccgcgattttgtcaacggcggtaagccggtgtttgccatctgccacggtccgcagctgctgatcagcgccgatgtgatccgcggacgtaagctcacggcggtgaaaccgattgtggtggatgtgaaaaacgccgggggcgagttttacgaccaggaggtggtggtcgataacgaacagctggtcaccagcagaacgccggacgatctgccggccttcaatcgcgaagcgctacgcctgctcggcgccggcatcacgccgccagtgtaa

SEQ ID NO: 209903 - DNA, 648 bp, Klebsiella pneumoniae
atgagtcaggtattattaaccggcgcgaccgggttagttggcggtcacttactccggctgctgcagaatgagccccgtataagcaccatcgccgcgccgacgcgtcgcccgctggcgccagcggaaggtgtctttaatcctcacgatccccagctgaccgatgccctggcgcaggtggttgacccggtggatatcgtcttctgttgcctgggaacgacgcgccgggaggccgggagcaaagaggccttcgtccatgctgactacacgctggtggttgataccgcgctgaccggcaaacgactgggtgcgcaacatatgctggtggttagcgcgatgggcgccaacgcccactcgccgtttttctacaatcgggtgaagggagaaatggaggcggcgctgattgagcaagactggccgcggctgaccatcgccaggccgtcgatgctgtcaggcgagcgggaaaaaaagcgggccaatgagaccttcctcgcaccattgttccggctcttgccggggaactggaaatccattgcggcccgcgatgtggcgatcgccctgctggcggaggcgctgtcgcccacccacgaaggggtgcgaattctgacatcatcggaactacgggagcgcgccgcgcggcaggctgaatag

SEQ ID NO: 209904 - DNA, 1041 bp, Klebsiella pneumoniae
atggctggtcagtcttcatctcaggcggcgtcaccatttcaatggtggaaacccgcgcttttctttctcgtcgtgattgttggtctgtggtacgtcaaatggcagccgtactacgggaaagccttcaccgctgcggaaacccacagtatcggtaaatctattctcgcccaggccgacgctaacccgctgatggcggcgtgggactatgcgatggtttacttccttgccgtctggaaagcggcggtgctcggcgtgctgctcgggtcattgattcaggttctcattccgcgcgactggctgctacgcacccttggacaatcgcggtttcagggcacgctgctgggagcgattttctcgctgcccggcatgatgtgcacctgctgcgccgcgccggtcacggccgggatgcgcaaacagcaggtgtcgatggggggggcgctggcgttctggatggggaacccgctgctcaatccggcgacgctggtgtttatgggttttgttctgggctggcagtttgcgctggttcgcctggtggcgggtctggcgacagtattaactgtggcgacgctggtgcagaaatgggtgaaagaggcggcgacgcagccggtagcggtgccagatgtacaggcggaggcgagccagggcggcttctttagtcgctggctgcgggcgctgtggacgctgttctggaacacgatcccggtttatatcctcgcggtgctggtgctgggagcggcgcgcgtctggctgttcccgcacgccgatggcgtggtggataatacgttgttctgggttatcgcgatggcgatcgccggctgcctgtttgtgatccctaccgcggcggaaattccgattgtgcagacaatgatgctggcgggtatggggacggcgcccgcgctggcgctgctcatcacactgccggcagtgagcgtgccgtcgctgattatgctgcgtaaagccttcccagccaaagcgctgtggctgacgggcggactggtggcgctgtgcggggcgattgtcggtgcgctggcgctggtgtag

SEQ ID NO: 209905 - DNA, 576 bp, Klebsiella pneumoniae; identical to SEQ ID NO: 138042

SEQ ID NO: 209906 - DNA, 591 bp, Klebsiella pneumoniae; identical to SEQ ID NO: 138212

SEQ ID NO: 209907 - DNA, 387 bp, Klebsiella pneumoniae
atggctcaagtaccagcagggaaaaatcgttccggccagctaagcaaacagaccggtgatgcctgggaaaaccaggctcgccgctggctggaaggccagggcctgcgttttatcgccgccaatgcccgcgagcgtggcggcgaaattgaccttatcatgcgcgacggcacggtcaccgtttttatcgaagtgcgctaccgccgtagcgcccggtacggtgatgcggcagccagcgtcactccgcaaaaacaacaacgactgcttaaagccgcccgtttgtggctctgccgacagaatgggagctttgagactgtggattgccgtttcgatgtggtagccttcaccggaaacgacatccaatggctaaaaaacgcctttggcgaatag

SEQ ID NO: 209908 - DNA, 2118 bp, Klebsiella pneumoniae
atggtaccgtcaacatttcttcgttctaagcccgcgcgctgcctgcccatattgctggcgactcttatttttgctggctgcggcacccacacgcaggatcaaagcgcggcgtttatgcagggtacgtcgcaggccaactccagtttctacttacagcagatgcagcaaagcacgaatgatagcaagaccaactggcaattactcgccattcgtgcactactgcaggaagggaagaagcagcaggctatcgacctgtttaaccagctgccggcgaacctgaacagcactcaggcccgtgaacagtcgctgctggcggtggaagtgaagctggcgcagaacgattatcaggccgcccgtaatctgctggctaagatcgatccgacaaaccttgagcagcctcagcaggcgcgctactggcaggcgcaaatcgatgccagccagggtaaaccatcgctgaccctgctgcgcgccttaatcgcccagcagccgctgctgagtgacgccaaacagcgtcagaaaaatattgatgcgacctggcaagcgctcacctcgatgccccaggaccaggccaatgcgctggtgatcaacgccgatgaaaatatcctccagggctggctggatctgcagcggatgtggtttgacaaccgcaacgatccgacgctactgaaagcgggcgttaaagactggcagacgcgctatccgcaaaacccgggcgctaaaatgctgccgacggcgcttgtgaatatgcaaaactataagcccgcgtccatcaacaagattgcgctttttctgccgctaaacggtcaggcgtcgatcttcggccgcactatccagcagggctttgaagccgccaaaaacggcgcgccgtcggtgacgggcagcgcggttcccgcccaggtcgcccaggtcgcccaggcggcgaatgtgtccggtaatgatgatgtggtgagtccgtcgcaggcagaaatcagcgatcttaccgccgccggaagccgcgctgatccggttcaggccccgacgcaggaccaggcagcgcctgctgcggaaccggcagcccaggcgccggcaacatccgccacgccgcagactaccgcttccccggccacccagccggttaccgcgccggccgcacagccgcagcccgtggtcgcaaccgccgccaacccttctgcggaactgaaaatttacgacaccaccagccagccgataagccagctgctcgcccaggcgcagcaggatggcgccaccctggtggttgggccgttgctgaaagaaaacgttgaagaggttatcaagagcaacacgccgctcaatgtgctggccctcaaccagccggaaaaagtcgaaagccgcgctaacctctgctatttcgcgctttctccggaagacgaagcgcgtgacgccgcccgacatatccaccaacaggggaaacagaccccgctgctgctggttccgcgcggcgcgctgggcgatcgtgtggttagcgcttttgccgacgagtggctgaagctgggcggcgccagcgtcctgcagcagcgttttggatccacggccgagctgcgcgccggtgtgaacggcggcgggggcattgcgctgagcggcaccccggtctccaccctgccatcagcgcagaatagcatcctcggcagtgcggatgagatgccggtaagcagcggcggcagcgtcgatgcggcctatatcctcgccaccccggaacagattgcctatatcaaaccgatgatcgccatgcgcaacggcagccagagcaatgtcaccctgtacgccagctcgcgcagcgcccagggcaccgcggggccggatttccgtctggagatggaaggcttgcagtatagtgagatcccaatgctggccggcagcaatccgtcgctaatgcagcaagcgctgtccgcggtgcgtaatgactactcgctggcgcgcctgtatgccatgggcgctgacgcctggtcactggcaaatcacttcacgcaaatgagccagacgcctggcttcgagctgaacggcaataccggcgatctgacggccaaccaggattgcgtgattaacaggaaactgtcatggctcaagtaccagcagggaaaaatcgttccggccagctaa

SEQ ID NO: 209909 - DNA, 864 bp, Klebsiella pneumoniae
atgaaacaacacgaatcagcggataattctcaggggcagctctatattgtgcccactccgataggaaatctgtctgatatcacgcagcgtgcactggaagtgctgcaagctgttgatttaattgcagcggaagatacccgtcataccggtttgctgctgcaacattttgcgataaacgcccgtttgtttgcgcttcacgaccataatgagcagcaaaaggcggaaaccctgcttgccaaactgaaagaagggcaaaacatcgcgctggtttccgatgccggcacgccgctgattaacgatcctggttaccatctggtgcgcacctgtcgcgaagcgaatattcgcgtggtgccgctgccgggcccctgtgcggctatcgccgccctgagcgccgccggcctgccttccgaccgtttctgttatgaaggcttcctgccggcgaaatcgaaaggccgccgcgataccctgaaagcgctggaagaagagccgcgcacccttatcttctatgagtcgacccaccgtctggtggagagtctggaggatatctgcgcggtactgggagaatcccgctatgtggtgctggctcgtgagctgaccaaaacctgggagtcgatccatggcgcgccgattggtgagctggtggcgtgggtgaaggaagatgaaaaccgtcgtaaaggcgagatggtgctgatcgtcgaaggtttcaaggctcaggaagaggcgctgccggcggccgcgctgcgtactctggcgctgctgcaggcggagctgccgctgaagaaagccgccgcgctggccgcggaaatccacggcgtgaagaaaaatgcgttgtataagtacgccctggagcagcagggggagtaa

SEQ ID NO: 209910 - DNA, 1002 bp, Klebsiella pneumoniae
atgagtcgttaccaaccgccgtttagcatcacaccctcggtcctcaaccttgtcgttgagattggggaattgcttgggcattggtcggcgaaacgtggagaagcatcgccgttgctgcgtaaagaaaaccgcattcgtactattcaggcgtcactcgcgattgaacataatagcctgagcatggaacaggtaacggcgctgctggaaggcaaacgggttctggcgccggctaaggatattcaggaagtgagaaatgccattcgtgcttatgaattaatgcccggatggcatgcggcaaacattagcgatcttctgacggcgcataaaacgctgatgaccgggctggttgatcgtccaggcgctttacgtggcggaaacgtcggcatttatcgcggtacgcaggtgatacatatggctccgcctgctgcccaggtcccaagattgatcgctgatttactcagttggctggaacacaccgagctacatcctttaattgccagttcagtttttcactacgagtttgagttcattcaccctttcgctgatggcaatggtcggatggggcgtttatggcagacgttgattctaagccagtggcgtcaggaattggcctggctgccggttgaaacgctgatccaccatcagcaagaacgttattacgacattttaggtgcttgtgataaaaccagtgattgcacgctattcgtgacctggatgttgcaaaatatcctggcggcgctgaaagaaggtctggaaacttcattcatcgtgtcggaagaaatgtcggaagaaatgtcggaagaaatcgacgtcaaattagccccaccggaaaacgcaattttgcgtttgctaaccgaaaagccggaattaacggcgagagcgctggcggagatcttggggatatcagcacgtacggttgagcgtcatctgcaagggctacaggcgaaagggagattgattcgcataggcgccaaaaaaggtggaagctggctggttaagtag

SEQ ID NO: 209911 - DNA, 774 bp, Klebsiella pneumoniae
atgaactcatttgaacgaaggaacaaaattgtcgatatggtgaatacgcagggtagcgtattggttctagacctttcgaatctctttggcatctctgaggtaacgatccgcgccgatctccgcttactggaagaaaaaggactgttaacccgttttcacggcggcgccgcccgtgcgggtagcgacctgaccgacgccgagaatcaggaagtggtgcttgaagaccgctatcagcttgccagcgatcccaaaaagcgcatcgcccatgccgcggcagcgatgatccgtgaaggtatgacggtgatcctcgatagcggtagcaccactcttcttatcgccgaagcattagtacggatgaccaatatcaccgtcatcaccaacagcctgcccgccgcgtttactctggcagaaaataaagatatcaccctggtggtgtgcggcggtaccgtgcggcacaaaacgcattcgatgcacggcacgattgccgaacgttcgctgcaaggtatttgcgccgatttgatgtttgtcggcgccgacggtatcgacgccaccaatggcatcaccacctttaacgaaggctactccatcagcagcgtgatggccgccgccgcgcatcaggtgatcgccgtgctcgacgccagcaaattcaatcgccggggctttaaccaggtactgccgatggaaaagatagactgcgtgatcaccgacgacggcattagtgaaaatgaccgtgcagcgttaagcagcaaaaaggtggaactgaagatagtgtaa

SEQ ID NO: 209912 - DNA, 1044 bp, Klebsiella pneumoniae
atgaaatcagtggtaatccatgctgaggggaacgtctgcgttgaagaacgccctatccccacgctgcaaacggaaaacgatgtcctggtcaaagtggtcagttccgggttatgcggctccgatatcccgcgcattttcgccaaaggggcgcattactaccctattacgctggggcacgaattcagcggttatgtggaatcctacggcgcggcggtaaccgacctgcagcccggcgatgccgtcgcctgcgtgccgctgctgccttgcttccagtgcccgcaatgccagcgcgagtatttctctttatgtaaacagtatcagttcgtcggctcacgcagcgaaggcggcaacgccgaatatgtggtggtaaagcgcgccaacctgttccgcctgccggaccagatgccaattgatgatggcgcgtttatcgaaccgataaccgttggcctgcacgcttttcatctggcgcagggctgtgaaggtaaaaacgtgattattatcggcgccggcaccatcggcctgctggcgctacagtgcgcccgcgaactgggcgccaacagcgtcacggcgatcgatatcaatccgcagaagctggagctggccaaaaccctcggcgcaacccatgtgttcaacagtcgcgagatgagcggccaggcgattcagcaggcgctggaatccattcagttcgaccagttagtcctcgagaccgccggtacgccgcagaccgtcgcgctggcgattgaggccgccggtccgcgggcgcagctggcgttggttggcacgcttcatcacgatttaaccctcctggcagccaccttcgggcagattctgcgtaaggagttgaatattgtgggtagctggatgaactactctggcccgtggccgggagaagagtggcaaacggccacccgtctgctgactgaaaaacgcctgcagctggcgccgctgatcgcccatcgtggcgacgcagaaagcttcgctcgtgcagtgcaggcgctcaacggcgcgccaatgcaaggcaaaatcctgctcaaactctcttga

SEQ ID NO: 209913 - DNA, 1383 bp, Klebsiella pneumoniae
atgtttagcgaaatcatgcgttatatcctcgatctcggtccgacggtgatgctgccgatcgtgatcattatcttctccaaattactggggatgaagctcggggattgttttaaatcaggtctacatatcgggatcgggtttgtcggcatcgggctggtcattggcctgatgctcgactccatcggcccggcggcaaaggcgatggcggagcatttccagattaatcttcacgtgatagacattggttggccgggttcatcaccgatgacctgggcgtcgcaaatcgccctggtggcgatcccggtggccatcgcggtcaatatcgtgatgctggttacccgtatgacccgcgtggtgaatgttgatatctggaacatctggcatatgacctttaccggcgcaatgctgcatatcgcgaccgggtcgtactggataggtattctcggcgtggtggtgcatgctgcttttgtgtataagctgggcgattggtttgccaaagatacccgcgatttcttcggcctcgagggtattgcgatcccgcacggcagttcggcgtatttagggccggttgccgtcctcgtggataccatcatcgacaagatccccggtcttaaccgtattcactttagcgccgatgacattcagaaacgcttcggccccttcggtgaaccggttaccgttggcttcgtcatggggctggtgattggcgcgctggcgggttacgacctgaagggcattcttcagctggcggtgaaaaccgcagcggtgatgctgctgatgccccgggtgatcaaaccgattatggatggcctcaccccgatagccaaacaggcgcgtaaacgtctgcaggctaaattcggcggccaggaattcctgattggtctcgatccggcgctgctgctcggtcatacctcggtagtctcggccagcctgattttcatcccgctgaccattcttatcgccgtcgtggtccctggcaaccaggttctgccatttggtgacctggccaccatcggcttcttcgtagcgatggcagtggctgtacatcagggcaatctgttccgcacgttgatttccggggtcatcattatgggaatcaccctgtggatcgccacccagaccattggcctgcacacccagctggcggcaaacgccggggccctgaaagccggcggcatggtggcctcaatggaccagggtggttcgccgattacctggctgctgatccagctctttacctggcaaaatgtggttggcttcgcggtcatcggcatcatctatctggccggcgttctactgacctggcgtcgcgctcgcggcttcatcgccgcggaaaaagcagaaaaaagcgctgccccgcaacaaagtacaggcatgtcttga

SEQ ID NO: 209914 - DNA, 285 bp, Klebsiella pneumoniae
atgaaacgtaaagttatcgtcgcctgcggcggtgccgtcgccacctccacgatggcggcagaagagattaaagagctgtgtgcagaccacaatattgaactggatttggtgcagtgccgggtcaatgaaatcgaaacctacatggacggggcggacctgatctgcaccaccgcgcgcgtggagcggaccttcggcgacattccggtggtgcacggcatgccattcgtctcgggcgtcggcattgaagccttacaacagaaaatcctcggcatcctcgcggagtaa

SEQ ID NO: 209915 - DNA, 468 bp, Klebsiella pneumoniae
atgagtcaactgtttgttcgtaccggcattcatttcagttccagtcagcaggcactggaacacattggcgcagagatgctggcgcgaggcgtcgtacatgacagctatcccgccgccctgctcgaacgcgaagcgacttttcccaccggcatcgccctggagaagcatgctgtcgctatcccgcactgcgaagcgatccacgcgaaatcaccggccatttacctgatacgtccggacatgccggtctcttttcagcgcgctgacgacgacggcgaaatcgacgtttcgctcatcatcgcgctgattgttgaaaacccggcggcacagctgaagctgctgcgccggttatttagtgagctacaaaatccgcacacgctggaggcactgctcgccgcttccgacgatcggctgccggtgcggttccagcaattaatccttgagcccgagcttagcgccgtggcttcataa

SEQ ID NO: 209916 - DNA, 1272 bp, Klebsiella pneumoniae
atgaaagacattatcactcgccataagtcaggcgaacatatcggcatctgttcagtatgttcggcgcatccgctggttatcgaagcggcgttacgtttcgacctgtcgaccaacaataaggtgctgatcgaagcgacgtccaaccaggtgaatcagtttggtggctacaccggcatgcagccggccgatttccgcgacttcgtctacaacatcgcgcgtaccgtcggttttccggcggagcgcattattcttggcggcgaccatcttggaccgaactgctggcaagacgaaccggccgccgtggcgatggaaaaatcaatcgacctgatcaaagcctacgtcgccgccggctttagtaaaatccatctcgatgcatcaatgtcgtgtgctgacgatccggtgccgctggatcctggtgtggttgctgagcgcgccgctcgcctgtgtcaggctgccgaggagaccgccagcgatgagcaaaagcgccacctgacctacgtcatcgggaccgaagttccggttcccggcggcgaggccagcaccatcggcagcgtacatgtcacccgggcgcaggatgccgccgcgacgctcgaaacccatgaagccgccttccgtaagctggggctcgacgccgcgctggagcgagttatcgccatcgtcgtgcagcccggcgtggagttcgaccatacgcaaatcattcattaccagccgcaggaagcgaaagcgctctccgcctggatcgaaagcaccccgatggtctacgaagcgcactctaccgactaccaaacccgccaggcttatcgtgcgctggtccgcgaccacttcgccattctgaaagtcggcccggcgctcacctttgccctgcgtgaagccatctttgccctcgcccaaatggaaaatgagctgatcgccccggagtctcgcagtcgcgtgatggaggtgatcgacgaagtgatgcttaacgaacccggctactggaaaaaatactatcgccccacctggagccaggcgatggtcgatatccacttcagcctttccgaccgtatccgttattactggccgcatccgcgtattcgccaaagcgttgagaaacttatcgctaatctgaccgacgctaagctaccgctggggcttatcagccagtatatgccggtgcagtttgaacgactgtcgctgaatgaactgaacgccgagccgcacgcgctgatcctcgacaaaatccaggatgtcctgcgtgcctatcgctacggctgttcttctgaaaccgcgtga

SEQ ID NO: 209917 - DNA, 816 bp, Klebsiella pneumoniae
atgcaactaacttctgccgatatttgtttcgatcgtcaggtcaaaacgaaagacgaggcgctacagcgtgtcgttgcagccctgacccatgccggacatacgcgggcagactatctacaaggcatgcgcgagcgcgaggggcaaatcagcacctatctgggcaacggcattgccattccccacggtacgccgcacagtcgcgacgcagtgcttaaaacgggcgttaaggtgctggcttgtccgcagggggttgactggggtgaggagcaaaccgcctatctgattgtcggtatcgcggctcaggacaatgagcatctcgatattttgcgccagctcacccatgctctgggcgatgatcgagtacctgaggcgctgacgcgcgctgataccccccaggcggtgctggaaattctcgccggcgacattcctctgccagcaggcgaagaaccacaacccgcgccgcaatttgacgaagaggccacctttaccctgcgtaatccgcacgggctacatgcccgtcccagcgcggtgctggtgaaagccgtcaagcagtggcgatcgcaaatccgggtcgaaaaccttgatacgcgctccgccattgttgatgccaagaatctgatgcgcgtcgtatcgctgggcgccaaacagggtcatcgtctgcactttatggccagcggcaacgatgcgcagcaggcgttaaaagccattggtgacgcttttaacgccggtctcggcgaaattgccgcccagccgcagcaggtctcccaggaagccgtcaaaacgaaacgcagctggctatcccgaatatttagttaa

SEQ ID NO: 209918 - DNA, 1413 bp, Klebsiella pneumoniae
atgaaaaagattattgccgtgaccggctgccctacaggtattgctcatacatttatggctgaagaggccttaaaaaccgcagcgaaaaaattaaacgttgaaataaaagtcgaaaccaatggcgcttccggcgtagaaaacgccattacgccggaagacctgaaggatatttatggcgtgattattgctgccgataaagatgttaatgccgaacgttttaatggtttaccggttattgaggtgccggttaaagaagccattcaccatccggcggaattaattaataaagtcgttaacggtcaggcgccgcgtcgtcagggattctccgcggcaacggatccagacgagaaatatgagcgagaatcgttcggccgacagatttacaaacatctgatgagcggcgtttccaacatgctaccgttcgttgtcgccggcgggatcttaatcgctgtttctttcttatggggcatctactccgccgacccgaattcaccgcagtataacgtgattgccgccacgctgatgaaagtcggtcagcaggcgttctcgatcatggtgccggtgtttaccgcctacattgcctggtcgatatctggccgccctggcatggttgccggttttgtcggcggtctgctggcgaacgccaccggcgccggattcctcggtgggatcatcgccggttttgccgccgggtattttatgctgctgatccgtcatctgctcgacggtctgccgcgccagtacgaagggctgaagtcgatctttattatgccgctgataggcgtcctggtgatcggcgtgatgatggtcctgctcggccagccggtggcagcgatcaacaatggcatgatgaactggctcagctctttacaggaagccaacccgatcctgctggggatcgtggtaggcgcaatgtgctccttcgacttcggcgggccggtcaacaaagcggcctatgtcaccggtacgttgctgctgggtcaaggtaactacttttttatggccggtgtatctgccgcctgcatcacgccgccgctggtcatcgctctggcgaccacgttctttccgaaaggctttagcgaggaggaacgcgccgccgggatggtcaactatatcctcggctgtacgcacattaccgaaggtgcgattccctttgccgccaaggatccgctgcgggtgatcccgatgatgatgatcgcctcctcaatttctgcggtactcagctacagcctgcatattcaggttccggcaccgcacggcggcttcttaatcctgccgctggtcagtaaaccgttgatgtgggtgctgtgcattctcgccggttccgcctgcggggcacttatgctgggatgctggcggctgtggcaaaaacgcactgacaaagcgacagctcttgctggcgccatgaaataa

SEQ ID NO: 209919 - DNA, 915 bp, Klebsiella pneumoniae
gtgatccacaccctgacactgaataccgcgatcgatatgaatatcttttgcgatccgctccagccggcggcagtcaaccgcacccggcaaacggaatattgcccgaatggtaaaggggttaacgtctcgctggtattacatcattaccagcagccaacccatgtcatgggcatattcggcggttttaccggccgctatatcgttgaggaactacgcaaacagcatattaatgtcacaccggcatgggtcgctgaaccgacccgtataaatatatttattaacgacggcagcgatgaatacaaactggtaaatcccggcgcgcggattgacgatgaaggaaaagaacaaattcttcaccatttacagtgcgtcgcgcccggtgattatttagttatcagcggcagtctgccaccgggaatagagagccggttctatagcgagattctggtgctgtgccagcagaaagggtgtgaagtcatcttagatatcagccacccggtgctgcgccagctgttagagtggcgtccactattgattaaacccaatgacgacgagctgaaagagatctttggtctggatgtcagcagcccccggcgggtacgcgaagcaatgcaaacgctccaccagctcggggctcgcaatgttctgctgacccttggcgcgcaagggctctatttttcgaacggcgcgcaactgtggttctgctcggcaccgaaaatcgaactggtcagctcggcctgcgccggcgatgccgcgctgggtgcattcctcagccattggcttaacacagacgatattccccaggccctggcgctggccagcgccaccggcgctgatgtggccgcctccgccgggctgggtaaattaaaccgtacgcaagaattattacaacaacttcagatcgtccaattataa

SEQ ID NO: 209920 - DNA, 855 bp, Klebsiella pneumoniae
atgtacatcatttccagtaaaaacatgctattaaaagctcagcgacagagttatgccgtgccggctttcaatatccataacctcgaaaccatgcaggtcgttgttgaaacggcggctgagttgcgctcccccttgatccttgccggcacccccggtacctacagctatgccggcaccggcaacgtagtggcgatcgcccgcgatctggcaaaaaagtgggatctcccgctcgccctgcacctcgatcatcacgaggatctggctgatatcacgcgcaaagtgcaggcagggatccgctcggtcatgatcgatggctctcactcaccgttcgaggagaatgtggcactggtaaaaagcgtggtggagttgagccaccgctatgatgccagcgttgaagccgagctaggccgtctgggcggagttgaagacgatctggtggtcgatgctaaagatgcgctctataccaaccccgaacaggcccgcgaatttgtcgctcgtaccggtattgattcgctggccgtcgccatcggtaccgcgcacggcctttacaccgccgaaccgaagcttgattttgagcgcctggcggctattcgcgactgcgttgacgttccgctggttctgcatggtgcttccggcctgccggatagtgatattcgtcgcgccatttctctgggcgtatgcaaagtcaacgtcgccaccgaactaaaaatcgctttctcggatgcgctgaaagcctacttcctggaaaatccgggcgccaacgatcctcgtcactatatgaaaccggcgaaagcggcaatgaaagaggtcgttcgcaaagtcattcacgtttgtggctgcgaaggacaactgtaa

SEQ ID NO: 209921 - DNA, 840 bp, Klebsiella pneumoniae
gtggcaaaaccgtcaaccagcttgctgaaaaggcgcttggacatcgcagagatcgttcgtaagaacggcgagatcaaagtcgacgatctggcagaaatgctggctgtttccggggtgacaatccgtaacgatctcaactacctcgagcagcagggctacttgaaacgctcttttggcggggcgatttataccgcccaggctggcgcgccggttgcgatgacccgagaagcgcctgccgtcagagataaagcgctggagacggaaatggctcgccaggtggcggcgcagatagaaaatggcgaaacgctgtttctaggccagggttccattttgcgtaaagtgatcccctttctggccaacagagaagagctttgcctgctattaaatgatctgggccacgtcgcgctggcgcaggagtttttaaatggggaaaccgttctgcttggcggggtgttgtccggtcaggggcggattgtggagggcgaactggcgctgaaggcgttgggtcattaccgcccttcacgtgcgctgatagcggtggatcacattgctgaagacggcacgctaagcgtgcgtaacgaggttacggcacatttgttaagcgaagcggtggcccagagtaaacgagtcattgcgattgtcgcttcccggccggtatatggcgagaaacgttatgctgtgggtgaattacagcagatcagcagcgtcgtgacccctcaggtcgtcgcggcagagtaccatgcctgcttcctcgccgcgggtttgaccaacagctataccaacaatgaatgcctgacatggctcaacacggctttgcataagacaaaccaggagcggtga

SEQ ID NO: 209922 - DNA, 951 bp, Klebsiella pneumoniae
atgaacgtaaccatttgcaccatcggcgagctgctggtggagtttctcgccaaggaagagaatcaggggttttcccgtcccggtgaattttgggggccctatcccagcggggcgccggcaatatttgccgatcaggtggcaaagctgggtttcggctccgtgttgtttagctgtgtgggcaacgacgcatttggcgagatgaatattgcgcggctggagaaagacggcgtcaacgtcaacggcatcgctatgctgcagaaagcgactaccggtagcgccttcgtcagctatcgtagccaggcgcagcgcgattttatttttaatatgcctaacagcgcctgcggtctgctgactgccgaccacattgacgaagcgttgctaaatcagtgtcagcattttcatattatggggtcatcgctattctcgttccgtattatcgatgcgatgcgtaaagcgattgaaaacattaaaggccgcagcggcacagtatcgttcgacccaaatattcgcaaagagatgctgaacatcccggagatgtcgcaggcctttgaatatattctcgactacaccgatatcttcctgccgagcgatggcgagctggattactttggtctcaatccggaacgcaatgagcaggtcctggttgataagctactgaaacgcggcgtgaagcatgtggtgattaaacgcgggccgcgtggcgcaagctactttagcgccaacgagacgcaccatgtcgccggcttcagcgtgccggtggtggatccgactggtgccggggattgctttggcgccacctttgttagtctgttcctcaatggcgccacgccccgggaggcgctgagatgggcaaacgccagcggctcgctggcgattagccaacgcggccccatggaaggcacctcgacgcaggcggagatcagcgcttttcttgccgcccagcatccctaa

SEQ ID NO: 209923 - DNA, 1572 bp, Klebsiella pneumoniae
atggctgacattgcaattcgacaacaatcgccgaccgcgttttatattaaagttgacccgacagataatgtggcgattattgtcaacgatcgcggcttaaccgccggaacgcgtttcccggacggcctgacgctcgtcgagcatatcccgcagggtcacaaagttgccctggtggatatccccgcccatggtgaaatcatccgctacggcgaagtcattggctatgccgtacgcgatatcccgcagggaagctggattgacgagtcgctggtggagctgcccaccgccccgccgctgaataccctgccgctggccactaaagtgcctgaaccgctaccgccgctggaaggttacaccttcgaaggctaccgcaatgctgacggcagcgtgggtaccaagaatctgctgggtattaccaccagcgtgcactgcgtcgctggcgtggtcgattacgtggtgaaaatcattgaacgcgacctgctgccaaactatcccaacgtcgatggcgtggtgggcctgaatcatctctacggctgcggcgtggcaattaatgcgccggcggcggtagtgccgattcgcaccattcataatatcgccctcaacccaaacttcggcggcgaggtgatggtcattggcctcggctgtgagaagctgcagccggaacgcctgctgcagggcacggaagacgtcaaaagtatcccggtggacagcgccagcatcgtcagcctgcaggatgaaaagcatgttggttttaaatcgatggtcgatgacattctgcaggtcgccgagcgccacctggcgaaactgaaccagcgccagcgggaaacctgcccggcctctgagctggtggtcgggatgcagtgcggcggcagcgacgccttttcaggcgtgaccgccaacccggcggtaggttacgcgtccgacctgctggtgcgctgcggggcgacggtgatgttctcggaagtgaccgaagtacgcgacgccattcatctgttgaccccgcgggcgattaacgaagaggtcggtaaacgtctgctggaagagatggcctggtacgataactatcttgatatgggcaaaaccgaccgcagcgctaacccctcccccggcaacaagaaaggcggtctggccaacgtggtggaaaaagcgctggggtcgattgccaaatcagggaaaagcgccatcgttgaggtgctctctccggggcagcgtccgaccaaacgcggcctcatttacgccgcaacccccgccagcgattttgtctgcggcacccagcaggtagcctctggcatcacggtgcaggtattcaccaccggtcgcggtacgccgtacggactgatggcggtaccggtgataaaaatggcgacccgtaccgagctggccaaccgctggtatgacttaatggacattaacgccgggaccatcgccactggcgaagagacgattgaggatgtcgggcggaagctgttcgaatttattctcgacgtcgccagcggacgcaaaaaaaccttctccgatcaatggggcctgcacaaccagctggcggtatttaacccggcgccggtaacctga

SEQ ID NO: 209924 - DNA, 150 bp, Klebsiella pneumoniae
atgacttatggcataagcacaattatggatttaaataataactttatattgtgggtatgcatagtgtctggcgggggcgtgctgattatactgagtcatgtttttgaggtgatcgatatgcgaatagacaatttcaatatcgtcttttaa

SEQ ID NO: 209925 - DNA, 1332 bp, Klebsiella pneumoniae
atgattttggattctacattagatgaaaaaaaaggaataccgacccgctatttaattctgttgatgatatttgtggtgacggcagtgaactatggcgaccgcgcgaccttgtctatcgccggtactgaagtcgcgaaagagctggggctcagcgcggtgtcgatgggatacattttttccgccttcggctgggcttatctgctgatgcagatccctggcggctggctgctggataaatttggctcgaaaaaggtttattcatacagtctgtttttctggtcactgtttaccttcctgcaaggctttattgatgtgttcccgctcgcctgggccggggtctccatgttcttcatgcgttttatgctgggcttttccgaagcgccctcgtttcccgccaacgcccgcattgtggcggcctggtttccggccaaagagcggggtacggcttcagctatctttaatgccgctcagtacttctcgctggctctgttctcgccgctgctcggctggctgaccttcgcgctgggctgggaacatgtctttaccgtgatggggataatagggtttgtgctcaccatcatctgggtgaagtttgtgcataaccccaccgatcatccgcgaatgtccgccgcggagctgaaatatatctcagaaggcggcgcagtggtcgatatggaccataaaaaagaggccaccccggcggccgggccgaagatggactatatccgccagttgctgactaaccgaatgatgttaggcgtatttttcggtcagtatttcctgaataccattacatggttcttcctgacgtggtttccgatctacctcgtgcaggacaagggaatgtcgattctgaaagtggggtttgtggcttcgattccggcgctgtttggctttgctggcggcgtactgggcgggctgttttcggattatctgattggccgcggctgcacgctgacttttgcgcgtaagctgcccattgtgctgggaatgctgctggcgtcgtccatcatcctgtgtaactacacggccagcacgccgctggtcattacgctgatggcgctggcgttctttggcaaaggctttggcgcgctgggctggccggttatctcggatgtcgcgccgaaggagattgttggcctgtgcggcggggtattcaacgtctttggcaatgtggcctcgatcgccacgccgctggttattggctatatcgtgagcgaactgcactcatttaatggcgcactgatttttgttggcggctccgcgctgatgatgatggtctgctacctgtttgtggttggcgatatcaaacgtatggaattgcagaagtaa

SEQ ID NO: 209926 - DNA, 771 bp, Klebsiella pneumoniae
atggataacgcaatttttccgaacaaatttaaggccgcgctggcggcgcatcaggtgcagattggctgctggtgcgctttggctaacccgattagcaccgaggtgctgggtctggcggggttcgactggctggtgctggacgcggaacacgcgccaaacgacgtcaccacgctcattccgcagctgatggccctgaaaggtagctccagcgcgcaggtagtccgtgtgccgaccaatgaacccatcatcatcaagcgcatgctggacatcggcttctataacttcctggtgccgtttgtcgagacggctgaacaggcggcgcaggcggtggcttcgacccgttatccgccggaagggatccgcggggtctccgtttcccaccgcggcaatatgtttggcaccgtgccggactacttcgcccagtccaacaagaacatttccattctggtgcagattgagagccagaccggagtggacaacgtcgaggcgattgccgcgaccgagggcgtggacggtgtgtttgtcggcccgagcgacctggccgccgccttaggccatttgggcaatgccgcccatcctgaggtgcagcgcgctatccagcatatcttcgccagcgcgaagaagcacggtaagccaagcggcattctggcgccagtggaagccgatgcgcgccgctatctggaatggggcgcgaccttcgtcgccgttggcagcgatctgggcgtcttccgttctgcaacccagaaacttgccgacgcgtttaaaaaataa

SEQ ID NO: 209927 - DNA, 891 bp, Klebsiella pneumoniae
atgacaatcaaagtaggttttatcggtcttggcattatgggcaaaccgatgagcaaaaatttgctgaaagcgggttactcgctggtggtgtctgaccgtaacccggaagcgattgccgacgtgatcgccgctggcgctgagaccgcgacgacgccgaaagcgattgccgaacagtgcgaggtgatcatcaccatgctgccgaactctccgcatgttaaagaggtggcgctgggtgaaaacggcattattgaaggggcgaaaccgggcaccgtggtgatcgatatgagctccattgcgccgctggcgagtcgggaaatcagcgaagcgctgaaagccaaaggtattgatatgctggatgcgccggtgagcggcggcgaaccgaaagccatcgacggcacgctgtcggtcatggtcggcggcgataaagcgatcttcgataaatactacgatctgatgaaagcgatggccggctccgtagtgcataccggcgatattggcgcgggcaacgtcaccaaactggctaaccaggtaattgtcgcgctgaacatcgcggcgatgtctgaagcgctgaccctggcgactaaagccggcgtcaatccggatctggtttatcaggctattcgcggcggtctggcgggcagtaccgtgctggatgcgaaagccccgatggtgatggaccgtaacttcaaaccgggtttccgtatcgacctgcatattaaagatctggccaatgcgttggatacctcacacggcgtgggcgcccaactgccgctgacggcggcggtgatggagatgatgcaggcgctgcgcgcggacggtctcggtactgcagaccatagcgcgctggcgtgctattacgaaaaactggcgaaagtggaagtcactcgctaa

SEQ ID NO: 209928 - DNA, 1146 bp, Klebsiella pneumoniae
atgaaaatcgtcattgccccagactcttacaaagaaagcctttctgccagcgaggtagctcaggcgatagaaaaaggatttcgggaaattttccctgatgcacagtatgtttccctgcccgtcgccgacggcggcgaggggacggtggaagccatgattgccgccacgcagggaaaggaacatttcgcgtgggtaacgggtccgctgggtgagagagtgaaggcctgctggggcatgtccggcgacggcgtcaccgcgtttattgagatggcggcagccagcggtctggggctcgttccgcccgacaaacgtaacccgctcatcaccacttcacggggtaccggggagctaatattacaggcgctggagcatggtgcggaacggatcattatcggcatcggcggtagtgcgaccaacgacggtggggcgggtatgatgcaggcgctaggcgcccgcctctgtgacgccgagggacaagagatcggccatggcgggggcaacctcggcagtctgagccggatcgatctttccgccatcgatccgcgcttacgtgacaggatgattcacgtggcctgcgatgttaccaacccgctggtgggcgagcgtggggcgtcgcggatctttggcccacagaaaggggcgaccgaggcgatgatcgtcgagctggatcgtaatctggcgcattatgccgacgtcattaaggcgtcgctgcaggtggacgtgaagtcgatccctggcgcgggagcggccggcggcatgggcgcggcgctgatggcctttctcaatgcggagctgcgcagcgggattgagatcgttaccgaggcgctgaagctggaagaacaaatccatgactgctcactggtggtcaccggggaagggcggctcgatagccagtctgttcacggtaaggtgccggtgggggtggcacgggtggcgaagaaataccgtaagccggtgatcggtattgctggcagcctgactcacgatgtcggcgtggttcaccagcacggtatcgatgccgtattcagcgtgttaacttccgtttcgacgctggaagaggcatttcgcggggcgtttgataatatttaccgcgcgtcgcgtaatattgctgccaccctgcaggttgggatgaccactgagggatga

SEQ ID NO: 209929 - DNA, 465 bp, Klebsiella pneumoniae
atgttattacgttttcgcgtattaccgctggtttttgtcatctcgctgttaagcggctgcggcctggcttctaaagccttttattccgcgggagacaaattatttcaacccggagatgacgccgtcgcttcgatgcagacgtattcagtggctcagttcctgcagccgtttactctcaacccggcgaaggccagcagcgattatctgggtaaatgggtcaaggtacgcggggtgattgtcgacattcgtcggaagagcggtatcgccggcagctactattttatcgtgaccatgcgagatgaacagaataaaacggataaacgtcttacctttaattttggctcgcataacagcgcagacgtagaggctttaagcaacggcagcgtcgctacgatcgtcggccaggttcatcaggtgcaagattccacgatcccgacgctacagaatcctaaggtggttaaataa

SEQ ID NO: 209930 - DNA, 411 bp, Klebsiella pneumoniae
atgaaattgataacccgtattgcctttgccacgctgttgaccaccggtttctctatcacggctcaggccgcagacgttaaggcggcgccagcaccggcgcaggatcctattgttcagcacttaaaacttaccaacgatcaggtcgcgaaaattaaaagcctgcatcagcagttggagagtaatgtccagcagatttcccaacaggaaattaaagacggggctctgataaacgtaattcattccggtaaatgggatgaaaaagcggtcaacgatcagctggcggccttcagcaagattgatcagcaggtgcgttattaccgcgtgaagtactattttgaggtgaataaggtactgacgccggagcagcgcacgcaggtgaaaaaagatcttgccgacgcgctgagtgaataa

SEQ ID NO: 209931 - DNA, 168 bp, Klebsiella pneumoniae; identical to SEQ ID NO: 136618

SEQ ID NO: 209932 - DNA, 702 bp, Klebsiella pneumoniae
atgattactacccgaacagccaaacaatgcggacaagcagacttcggctggctgcaggcccgctacaccttctcctttggccactacttcgacccgaaattactgggcttcgcatccttgcgcgtcctcaaccaggaagtgctggcgcccggcgcttccttccaggccagaacgtacccaaaagtcgatatcctgaacctgattctggaaggcgaagcggagtatcgcgacagcgacggcaaccacgtgcaggccaaagccggtgaagcgctgctgatcgccacccagcctggcgtgagctatagcgagcataatctgagtaaagagcagtcgttaacgcgaatgcaactttggcttgatgcctgcccgcagcgggaaaacccgctgcagcagaaaatcaatgtcgcagacgcgacgctgcagctgctggcctctccggagggcggggataacagcctccagcttcgccaacaggcctgggtctaccatatcgcgctggagaaaggtgagcagatcaacgtgcaattacatggtccacgcgcctacctgcagtcgattcacggctccgtccatgccgtcgcacaggaacagcaaaagcaggctctcacctgcggtgacggcgcatttattcgtgacgaagctaacattaccctcgtcgccgatacgccgctgcgcgctttgctgatagatttaccggtgtaa

SEQ ID NO: 209933 - DNA, 897 bp, Klebsiella pneumoniae
atggccaaagagagagcattaacgctggaagcgttacgcgtgatggatgcgatcgaccggcgcggaagcttcgctgccgcagctgatgagctgggacgcgtgccttccgccctgagctacaccatgcaaaaactggaggaggaactggacgtggtgctgtttgaccgctcaggtcatcgcacgaagttcactaacgttggaagaatgctgctggagcgcgggcgcgtgctgcttgaagcggcggataaactcaccaccgatgctgaagccctgtcgcgcggttgggaaacccacctgacgatcgttaccgaagcgctggtgcccaccccggatctgtttccgctaattgaaaaactggcgaccaaatctaatacgcagttatcgattatcaccgaggtgctggccggcgcctgggagcggctggagcaggggcgggcggatatcgttgtcgcgccggatatgcattttcgttcctcctcggagattaactcgcgcaaactctattcggtgctcaatgtgtacgtcgcggcgccggatcacccaatccaccaggagccggaaccgctctcggaagtgacccgcgtgaaataccgcggcgtcgcggtggcggataccgcgcgcgagcggcccgtcctcaccgtccagttgttggataaacagccgcgcttaacggtgagcaccattgaagacaagcgccaggccctgttggccgggctaggtgtggcgaccatgccctatccgctggtggagaaggatattgccgaaggacgtttgcgggttgtcagcccggaatacaccaatgaaattgacataattatggcctggcgacgggacagtatgggcgaagcgaagtcttggtgtctgcgtgagatccccaagctgtttgccggcagatag

SEQ ID NO: 209934 - DNA, 369 bp, Klebsiella pneumoniae
atggactggtatctcaaggtattaaaaaactatataggatttggcggccgtgcgcggcgcaaagagtactggatgtttattctggtcaacctcatcctgaccggcgtattgagcatcatcgataaaatgctgggctggcagcgggctggcggcgaaggcattctgaccactatctatggcgtactggtctttttaccgtggtgggcggtgcaatttcgccgtctgcatgacaccgatcgttcggcctggtggctattgctgctgttgatcccggtcatcggctggctggtgatcctgatctttaactgccagcgcggcaccgaaggcaacaatcgcttcggacccgatccgaaacccttctcctattaa

SEQ ID NO: 209935 - DNA, 987 bp, Klebsiella pneumoniae
atgggacaattagtcgacggcgtctggcaggatacctggtatgacacaaaatccaccggtgggcgttttaaacgttccgtttccgccttccgtaactggctgaccgccgacggcgcggctggccccagcggtgaaggcggttttgcagcggaaaaggatcgctatcatttgtatgtttctctcgcctgcccgtgggcgcatcgcacgttaattatgcgtaaattaaaaggtctggagccttttctccccgtatccgtggtcaatccgctgatgctggaaaacggctggacctttgacgatagcttcccggaagccaccggcgatactctctaccagcatgactttctctatcagctgtatctgcacgccgacccgcactacaccggacgcgtgaccgtgccggtgctgtgggataaaaaacagcagaccatcgtcagcaatgagtcggcagaaatcatccgcatgttcaataccgccttcgatggccttggcgcccgggccggggattactacccgccagcgctgcgggaacaaatcgatgagctgaacggctggatctatgacaacgtcaacaacggcgtgtataaagccggctttgccaccagccagcaagcttacgacgaagcggtggatgcggtctttacctcgctggagcggctggagcagatcctcggccagcatcgctatctgacgggcaatcagctaacggaagccgacattcgcctctggaccactctggtacgcttcgacccggtatatgtgacccattttaaatgcgataaacggcgcatcagtgattacctcaatctgtacggtttcctgcgcgacatctaccagatgccgggtatcgccgagacggtgagttttccgcatatccgtcaccactattaccgcagccataaaaccattaaccctaccggtattatttccattgggccgcagcaggatctcaacgaaccgcacggtcgcgatcagcgcttccgttga

SEQ ID NO: 209936 - DNA, 393 bp, Klebsiella pneumoniae
atgaaaaaattagaagatgttggtgtattggtagcgcgtattctgatgccgattctgtttatcactgcaggatggggcaaaatcaccggttatgcgggaacccagcagtatatggaagccatgggcgtcccgggcgcgctgctgccgctgaccatcctccttgagttcggcggcggtctggcgattctgttcggtttcctgacccggaccaccgcgctgttcactgcgggctttacgctgctgaccgcgttcctgttccatagcaactttgcggaaggcgtgaactccctgatgttcatgaaaaacctgaccattgcgggcggttacctgctgctggccattaccggaccgggcgccttcagtattgaccgtgtactgaataagaaatggtaa

SEQ ID NO: 209937 - DNA, 297 bp, Klebsiella pneumoniae
gtgaatggccgacaggagcgtgaacggcaaaagacgcagctgctgcgccagatccagcagcaacggctggagctcagcgcctgccgccgtcactggcacgaggcgactgcgcccctcgaccgcggctggcatacgctgctgagtttacgttcgtggctgatggttggcagcggtctgatggccgtatggtccgtacgacatccgcattttttaatgcgctggaccaaacgcggactcggactgtggagcacctggcgcctggtgcgcgggatcctgcgccagtcggcagttcgctaa

SEQ ID NO: 209938 - DNA, 399 bp, Klebsiella pneumoniae
atggcgaatactcaacacacgcagggaccgggtcagcgcgttttctccattggtcagcgcatcgtcacgctgctggtcgaaatggtggaaacgcggctgcgtctggtcgtcgtggagctggaggaggagaaagccaacctcttccagctgctgatcatgaccggactgacgctgctgtttgccgcgtttggcctcatgagtctgctggtgctggttatctgggccgttgacgctcagtaccgcctgcacgtgatgatcgccaccaccgttgtgctgctcctcgccgccgcgatcgtgggtatcctaaccctacgtaaggcgcgccgctccacgctgctgcgtctaacgcgtaaagagctggagaacgaccgtgcccttctggaggaggataaatcgtga

SEQ ID NO: 209939 - DNA, 306 bp, Klebsiella pneumoniae; identical to SEQ ID NO: 136612

SEQ ID NO: 209940 - DNA, 369 bp, Klebsiella pneumoniae
atgaaacaccgcatcgctctgcttctggtcctgacttcacttagcgccagcgccctagccgcctctccctgccaggaaaaagagcaggatattcaacgagagatcagctacgccgaaaagcatcataatcaaagtcgcattgatgggctaaataccgcgctacgtcaggttcgggaaaactgtagcgacagtaaactcaaagccgatcataagcaaaaaattgccaaacagcgggaagagatcgctgaacgtcagcgcgatctgcaggaagcccggaagaaaggcgatgcggacaaaattaacaaacgccagcataaactcaatgaagcgcaacaggagttaaaaacgctggagtctcgggattactaa

SEQ ID NO: 209941 - DNA, 387 bp, Klebsiella pneumoniae
atgatggtcatgaaacgcccttccctgcgccagttcagctggctgctgggtggttctcttctgctcggcgccctgttctggctttggctggcggtgcagcagcaggaggccacgctggcgatacgcccggttggccagggtatcggaatgccggacggtttctccgtctggcatcatctcgatgccaacggcatccgctttaaaagcatcacgccacagaaggatggtctgctgattaagttcgattccaccgcccagggcgcggcggcgaaagaagttctcggccgcgctctgccacatggttatattattgcccttctggaggacgataactcgcccaccgcctggctatcccgcctgcgcgacgcgccgcatcgcctcgggtaa

SEQ ID NO: 209942 - DNA, 663 bp, Klebsiella pneumoniae
atggaactatttacccagttattgaatgccttgtgggctcaggattacgaaacgctcgcgaatccctccatgataggcatgctgtattttgtcttgtttatgattttgttccttgagaacgggttattgcctgccgcgtttttaccgggggatagtctgctcgtgctcgtgggcgtgctgatcgccaaaggggcgatgggttttccggaaactttgctgctgctcaccgccgccgccagcctcggctgctggctaagctatattcaggggcgttggctgggtaatacgcggatcgtgcaaaactggctgtcacacctgccttcgcactatcaccagcgtgcgcatcacttgtttcataagcatgggctctccgcgctgctgatcggccgctttatcgccttcgtacgcacgctgctgcccaccatcgccgggctttccggccttaataacgcccgttttcagtttttcaactggatgagcggcctgctgtgggtgctcatcctgacctcgcttggctatctgctgggtaaaaccccggtattcctcaagtatgaagatcagctgatgtcctgcctgatgctcctgccggttgccctgttggtcttcggactgatcggctcgctggtggtgctgtggaagaaaaaatacagaagccggggctaa

SEQ ID NO: 209943 - DNA, 777 bp, Klebsiella pneumoniae
atggaaatcattgaaccacgccgtctatatcagcagcttgccgctgagctgaagacgcgcatcgaacaaggtgtctaccttgtaggggataagctgcccgccgagcgcttcatcgccgatgaaaaaaacgtcagccgcaccgtggttcgtgaagccattatcatgctggaagtggaagggtatgtcgaagtccgcaaagggtcgggtatccacgttatctccaaccatccgaaataccagcaggtggccgatgaaagccttgagttcgccaactatggcccctttgaactgctgcaggcgcggcagctaattgaaagcaatattgccgaattcgcggcgactcaggtgaccaaacaggacatcatgaagctgatggagattcaggagaaagcgcgtaacgagaaatgtttccgcgactccgagtgggacctgcagtttcacgtccaggtggcgctggcgacgcagaacagcgcgctggcggcgatcgtggaaaagatgtggacccagcgcgtgcataacccctactggaaaaagctgcatgagcatatcgacctgcgtacggtcgataactggtgcgacgaccacgatcaaatcctgaaagctctgctgcgaaaagatcccaacgccgccaagctggcgatgtggcagcatctggaaaataccaagcaaatgttgttcaacgaaaccagcgatgactttgaatttaatgccgatcgctacttatttgccgaaaacccagtcgttcatctcgataccgcagtcaacggcgcgaaataa

SEQ ID NO: 209944 - DNA, 1302 bp, Klebsiella pneumoniae
atgcgtaaaattaaagggttacgttggtacatgatcgcgctggtgacgctgggcaccgtgctgggctacctgacccgtaacaccgtagcggcggccgcgccgacgctgatggaagagttacacatttcgacccaacagtactcctatatcattgcagcctattccgctgcctataccgttatgcagcccgtcgcggggtatgtccttgatattctggggaccaaaattggctatgccttcttcgccatcgcctgggcggtattctgcggctcaacggcgctggccggcagctggggtggactggcgctggcccgtggcgcagtcggcgcagcggaggccgcaatgatccccgccggcctgaaggccagctcagagtggttcccggcaaaagagcgctctatcgcagtgggctacttcaacgtgggttcctctattggcgccatgatcgcgccgccgttggtggtgtgggcgattgtcatgcacagctggcagatggcgttcatcatctccggggtattgagcttcgcctgggccatcgcctggcttatcttctacaaacacccgcgcgaccagaaaaaattatctgacgaagaacgtgactacatcattggcggtcaggagtctcagcatcagaccaataacgcgaagaaaatgtcgccgtggcaaatcctgcgcaaccgtcagttctggggtatcgccctgccgcgcttcctcgccgagccggcctgggggacctttaacgcctggatcccgctgttcatgttcaaagtttacggttttaacctgaaagagatcgccatgttcgcctggatgccgatgctgttcgccgacctcggctgtatcgtcggcggatatctgccgccgctgttccagcgctggtttggcgtcaacctgatcgtgtcgcgtaaaatggtggtcaccatgggcgccctgctgatgattggcccggggatgatcggcctgttcaccagcccgtacgtggcgattgccctgctgtgcatcggcgggttcgctcaccaggcgctgtccggggcgctgattaccctctcttccgatgtctttggccgtaacgaagtcgctaccgccaacggtctgaccgggatggccgcctggctggcgagcaccatgttcgccctggtcgtcggcgcgctggctgacaccatcggctttagcccgctgtttgcggtactggccgtctttgacctgctgggcgcgctggttatctggacggtgctgaaaaacaaaccggctgacgatgactcgacgccgcttagcagccgcaaaccggtcacgcagagttag

SEQ ID NO: 209945 - DNA, 1413 bp, Klebsiella pneumoniae
atgacatcgtttatgactgaagattttctacttgataccgagtttgcccgccgtctgtaccatgattacgccaaagatcagccgattttcgactaccactgccaccttccgccgcagcaggttgccgaaaactatcgctttaaaaacctgtatgacatctggctgaaaggcgatcactataaatggcgcgcaatgcgcactaacggcgtgccggagcgtctgtgtaccggtgatgcgtccgatcgcgagaaatttgacgcctgggcggccacggttccacacactattggcaacccgttataccactggacccatttagagctgcgtcgaccttttggtattacaggtaagctgttgtcgccatccaccgccgatgagatctgggaccagtgtaatgatttgctggctcaggatgccttctccgcccgcggaatcatgaagcagatgaatgtgaagatggtcggtaccaccgacgatccgattgattctcttgagcaccacgcggctgtcgccaaagacaactcctttgacatcaaagtgctgccgagctggcgcccggataaagccttcaacatcgagttggcgaccttcaatgattatatggctaagctgggcgaggtatccgataccgatattcgccgcttcgctgacctgcaaagcgccctgaccaaacgtctggatcattttgccgcacacggctgcaaagtctccgatcatgcgctggacgtggtgctgtttgccgaagcgaccgacgccgagctggatgacattctggcgcgccgcctggctggcgagacccttagcgaacacgaagtggcgcagttcaaaaccgcggtgctggtgttcctcggcgcagagtatgcccgtcgcggctgggtccagcagtaccacattggcgcgctgcgtaacaacaacctccgtcagttcaaactgttagggccagacgtcggcttcgactcgatcaacgatcgtccgatggcggaagagctgtctaagctgctgagcaagcagaacgaagaaaacctgctgccgaaaacgattctctactgcctgaacccgcgtgataacgaagtgctgggcaccatgatcggtaacttccagggtgaaggcatgccaggcaagatgcagttcggctccggctggtggttcaacgatcagaaagacggtatggagcggcagatgacccagctggcgcagctcgggctgctgagccgcttcgtcgggatgttgaccgacagtcgcagcttcctctcctacacgcgccacgaatacttccgccgcattctgtgccagatgatcggccgttgggtggctgccggcgaagcgcctgcggatatcgcgctgctgggcgagatggtgaaaaacatttgctttaacaatgcgcgtgactatttcgccattgaactgaactaa

SEQ ID NO: 209946 - DNA, 1488 bp, Klebsiella pneumoniae
atgcaatacatcaaaatccattcgcaggataacgtcgcggtcgcgctgacggatatcgctgccggtagcgtggtgacgattgataatgactcggtcaccctcggccaggatatcgttcgcggccacaagtttgcactgcgcgctatcgcgaaaggggaaaacgtcgttaagtacgggttgccgattggccatgcgctggcggatatcgcgccgggcgagcatgttcatgcgcacaatacgcgcaccaatctcagcgaccttgacgcgtatcgctatcaaccggacctggttgcccaaccgccacagcctgcggatcgcgaagtacagatttatcgtcgcgccaacggtgacgtcggcgtgcgcaatgagctgtggatcctgccgaccgtcggctgcgtcaacgcgatggccagacaaatgcagaaccgtttcctgaaagagacgtatggcgctgaggatatcgatggggtacatctcttcagccacacctatggctgctcgcagcttggggacgatcacatcaacactcgcaccatgctgcaaaatatggttcgtcacccgaacgccggggcggtgctggtggttggccttggctgtgaaaacaaccaggtggaggcctttcgcgagacgctgggcgagtttgacccgcagcgcgtgcactttatggtttgccagcatcaggacgatgaagtggaggcgggggttgagcatctgcatcagctgtatgaagtgatgcgtcaggataaacgccagccgggcaagctcagcgagctgaagtttggcctcgagtgcgggggatcggacggcctgtcgggcattaccgctaatccgatgctgggccgcttctcagactatgtgatcgccaacggcggcactaccgtgctgaccgaagtgccggagatgttcggcgctgaacagttgttgatgagccactgccgcgacgaagcgaccttcgacaagctggtgaccatggtcaatgactttaagcagtactttattgctcacgaccagcctatttacgaaaacccctcgccgggtaataaggccggagggatcactaccctcgaagataagtcgctgggctgtactcagaaagcgggctccagccaggtggtggatgttctgcgctacggcgagcgcctgaaggttcatggtctgaatttactgagcgcgccgggcaacgacgcggtcgccaccagcgcgctggccggcgccggctgccatatggtgctgttcagcaccggtcgcggcacgccgtacggcggctttgtgccaacggtgaagatcgccaccaacagcgagctggcggcgaagaaaaagcactggatcgactttgatgccgggcagctgctccacggcaaaacgatgccgcagctgctggaagagtttgtggatgccattgtagccttcgccaacggtaaaccgacctgtaatgagcagaatgacttccgcgagctggccatctttaaaagcggtgttaccctgtaa

SEQ ID NO: 209947 - DNA, 555 bp, Klebsiella pneumoniae
atgaccgcgtattggctggcccagggggtcggcgtcatcgcctttcttatcggcattaccacctttatcaaccgcgatgaacgccgtttcaggctacagctggcggtctatagcgctattatcggcgttcattttttcctgatgggcgccgggccggctggaatgagcgccgggctcaatgcgcttcgcacggtcatttccttacgcacccgtagcctgtgggtgatgacagtctttatcctcctgacgttgattctcggcctgggtaaactgcagcatgccatggagctgctgccgatcattggcaccgtcgccagcacctgggcgctgtttcgctgcaaagggctaaccgtccgctgcgtgatgtggtgctccaccgcctgctgggtcacgcataatctgtggttgggttccattggcgggacgctgatagaaggcagtttcctgatcgtcaacgggctgaacatcattcgcttccgccggatgcaaaagcgcggtatcgatccgtttaaggttgaaaacgcagtacaggaagagagcccctccgcccgatag

SEQ ID NO: 209948 - DNA, 1248 bp, Klebsiella pneumoniae
atgacaacacgcactccctcatcagggtggctctcccgcctggcgcaaggcagcctggtgaaacaaattttaatcggcctggtgcttggcgtactgttggcgctggtctctaagcctgcggctatcgccgtcggtctgctggggaccctgttcgtcggcgcgttaaaagcggtagcgccggtgctggtattgatgcttgtcatggcctcgatcgccaaccatcagcacggacaaaaaaccagtatacgccccattctgtttctctatctgctgggcacctttagcgcggcgctgaccgcggtgttgttcagctttctctttccctcgaccctgcacttaaccaccgccgccgacagcatcacgccgccgtcggggattgttgaggtgctgcgcggcctgctgatgagcatggtgtccaacccgatcgacgctctgctgaacgccaactatatcggcattctggtgtgggcggtggggcttggcttcgccctgcgtcatggtaacgacaccaccaaaaacctgatcaacgacgtctcccacgcggtgacctttatcgttaaagtggtgatccgctttgcgccgctggggatcttcggcctggtatcttccaccctggcgaccaccggtttcgagaccctgtggggctatgcccagctgctgctggtgctggtgggctgtatgctgctggtagcgctggtgattaacccgctgctggtgttctggaagatccgccgcaacccctatccgctggtgctcacctgcctgcgcgaaagcggcgtttacgcgttcttcacccgcagttccgccgccaacattccagtgaatatggcgctgtgcgagaagctgaatctggatcgcgacacctattcggtctctattccactgggggcgaccatcaatatggcaggcgcggcaatcaccatcaccgtgctgacgctggcggcggtgcatacgctgaatattccggtggatctgccgacggcgctgctgctgagcgtggtcgcttcgctgtgcgcctgcggcgcctccggcgtggcgggcggctcgctgctgctgatcccgctggcctgtaatatgtttgggatcccgaacgatgtggcgatgcaagtggttgccgttggctttattatcggcgtgctgcaggactcctgcgaaaccgcgctgaactcctccaccgacgccctgtttaccgccgcggcctgcatggcggaagacgaccagctggcgaaaaacgccctgcgcggataa

SEQ ID NO: 209949 - DNA, 972 bp, Klebsiella pneumoniae
atgaatactgtcggcacgccgttgctatggggtggattcgctgtcgttgtcgcgatcatgttggcaatcgacctgctgcttcagggacgacgcggttcgcatagcatgaccatgaagcaggccgctggctggtcaatcctctgggtcacgctttctctgctgttcaacgccgccttctggtggtatctggtgcaaacccagggccgggccgtcgccgatccgcaggccttagccttcctcaccggttatctgattgaaaaagcgctggcggtcgataacgtcttcgtctggttgatgctgttcagctatttcgccgtaccgcctgctctgcagcgccgggtgttggtgtatggcgtactgggcgcgatcgttctgcgtaccattatgatcttcgccggcagctggctgatttcgcagttcgactggctgctgtacgtctttggcgccttcctgctgtttaccggcgtgaagatggcgctggcgaaagaggacgactccggcatcggcgataaaccgctggtgcgctggatccgcagccatctgcggatgaccgataaaatcgagagcgagcgcttcttcacccgtaaaaacggggtgctgttcgccaccccgctgctgctggtgctgattctggtggaactgagcgacgtgattttcgccgtcgacagtatcccggcaatcttcgcggtcaccaccgatccgtttatcgtgctgacctcgaacctgttcgccatcctcggcctgcgcgccatgtacttcctgctggcgggggtcgctgagcgcttctcgatgctcaaatacggtctgtcggtgattctggtgtttattggcgtgaagatgctgatcgtcgacttctaccatatcccggttgccatctcgctgggcgtggtgggcggcatcctggccgccacgctgctgattaacgcctgggtcaacaggcagcacgacaagcagcgcaaactgccagagtaa

SEQ ID NO: 209950 - DNA, 990 bp, Klebsiella pneumoniae
atgatacgtttcgcagttgttggcacaaactggatcaccaagcagtttgtcgatgccgcccatgaaaccggcaaatataaacttaccgccatctactcccgcagcctcgaacaggcgcaagccttcgccaaagactatccggtcgagcatctgtttacctcgctcgatgaactggcacagagccctgacgttgacgcggtctatattgccagcccgaactcgctgcactttccgcagacccggctgttcctgagccataagaagcacgtcatttgcgaaaagccgctggcgtcgaacctgcaggaagtcgaggcggcgatagcgctggcgaaagaaaataacgtggtgctgtttgaagcctttaaaaccgccagtctgcctaactttctcctactgaaagaaacgctcgctaaagtgggcaaactacgcaaagccttcatcaactactgtcagtactcctcacgctatcagcgctaccttgacggcgaaaaccccaacacctttaacccggcgttctctaacggttcgattatggatatcggcttctattgcctggcgtccgctgtggcgctgtggggcgagccgcgggccgttcttgccaccgccagcctgctggacagcggcgtagacgcccagggcaccgtggtgctgagctatggcgacttcgacgtgacgctgcatcactccaaagttagcgattccgcgatccccagtgaaattcagggcgaagacggcgcgttagtgatcgaaaaaatctccgaatgtcagaagctggcgtttgtgccgcgcggcggtaaagcccaggacctgacgcagccccagcacattaataccatgctgtatgaagcggagacctttgcgcgcctggtggagacacaggatgtggatcacccgggcctggcggtgagccggatcaccgccaaactgtccagcgaaattcgtcgccagaccggggtgatcttcccggccgatacgcagccgctggcgtaa

SEQ ID NO: 209951 - DNA, 501 bp, Klebsiella pneumoniae; identical to SEQ ID NO: 136600

SEQ ID NO: 209952 - DNA, 603 bp, Klebsiella pneumoniae; identical to SEQ ID NO: 136599

SEQ ID NO: 209953 - DNA, 708 bp, Klebsiella pneumoniae
atgcgtagcgtaacgccgtcaatcgaatctgcggtcagccgcctggcgccgggctttcgggcattaagtattgtggtggagagcgcgccggtggccgatcccgccgtcgcggagcaggcgctggccgaggcctgcctggcggtgcagcaggatgatgtgccctgggcgcaagcgcacctggcggcatgggatgaagcgttcagcgccttcggcgcgaaggcgaaacgtaccccctgttcggcgcaggcgctgcgcaagcgggtgctgaaagaggggagcctgccggccatcgatccggtggtggatatctacaacgcgatcagcattcgctatgccgtcccggtcggtggggaaaatctggccgcctaccgtggcgaaccgcggctggccattgcccgcggcgatgagccattcgatacgctaaaatcggcagagccggtagtggaatatccggagccgggcgaagtcatctggcgggatgatataggcgtaacctgccgacgctggaactggcgacagggcgtgcgcacccggctggacagcggcgcgcagacgatgtggtttattctcgaaagcctgccggcgatgccgttgtcggccctgcatgaggcgggagagcggctggtaggttatctgcagcagctgatgcccggcgctcgcgcgtcgataacgctgctgcgagccgatgacgagggcgatctacgctga

SEQ ID NO: 209954 - DNA, 1131 bp, Klebsiella pneumoniae
atgagccaggcagagttaaacggtgagttattcacattagagcggttcccacctaacgctgaagaagaagcgcttcaggcatgggaagcggcggatgaatatctgctgcaacaggtgaatgacgtcgacggcctgacgctcatcttcaacgacggcttcggcgcgctcgcctgcgcgctggcggagcgcaacccggtcagtatcaacgactcctttatttccgagctggcgacccgccacaacctgcggatgaacggtatcgatgaagagagcgtgcgctttcaggatagcctgagcccgctaccggccgcgccggcgctggtgctgattaaggtgccaaaacagctggcgctgctggaacagcagctgcgcgccctgcgcgaagtagttacgccggaaacccgcatcatcgccgcggcgaaagcccgtgatgtgcacaactcgacgctggcgctgtttgaaaaaatcctcggcaccaccaccacctcgctggcgtggaaaaaagcgcgtctgatccactgcgttttcaccgctcctgagcttgccgatgcgccgcaaacctacagctggaagctggacggcacgccgtggaccatccataaccacgccaacgtttttgcccgcagcgggctggatatcggcgcgcgtttcttcctgcagcatttaccgtctgatctagaaggcgagatcgccgatctcggctgcggcaatggggtgattggcctgcaggcgctggcgcagaacccgaacgcgcgggtcatgtttaccgatgagtcgcacatggcggtggcttccagccggttgaacgtcgagcgcaatctgccggacgatatcgcacgctgtgaattcatggtcaacaactcgctctccggcattgagcctgaccgctttacggcgattctgtgtaatccgccgttccatcagcaacacgctattaccgaccatatcgcctggcagatgtttaacgatgcccgccgcagcctgaaatacggcggcgagctgtacgtcgtcggcaaccgccacctcgattacttccgtaagctgaagcgcgcgtttggtaattgcacgacgattgcgacgaacaataagtttgtcattttgaaagcaaccaaggtgcgtaagcagcgctga

SEQ ID NO: 209955 - DNA, 2022 bp, Klebsiella pneumoniae
atgagccgctatccgtcgcttttcgccccgcttgagctgggcttcacaacgctcaaaaaccgcgtgttgatgggctcaatgcacaccgggctggaagagctgccggacggcgcgcagcggctggcggccttttacgccgagcgcgcccgtcacggcgtggcgctgatcgtcaccggcggcatcgctccggcgccctctggcgtcaccatggccggcggcgcggtactcaacgacgccagccatctggcgcatcatcgccatattaccgacgcggtacatcaggaaggcggcaaaatcgctctgcagatcctgcacaccggccgttacagctaccagcccgcgctggtggccccctcggcgctacaggcgccgatcaaccgttttaccccccatgaactgagccacgatgagatcctgacgctgatcgatgattttgcccactgcgcccagctggcgcgcgaagcgggctatgacggcgtcgaggtgatgggctctgagggctatctgattaacgaatttctcgccgcgcgcaccaaccagcgcgacgaccaatggggcggcgattatgccaggcgcatgcgtttcgccgtagaggtggttaaggcggtgcgccagcgcgccggccacgatttcattatcatttaccgtctgtcgatgctcgatctggtcaacgacggcagcacgctggcggaagtcaccgaactggccaaagcgattgaagcggcgggagcgaccatcatcaacaccgggattggctggcacgaagcgcgcattccgaccatcgccacgccggtaccgcgcggagctttcagctgggtcacccgcaagctgaagggcgcggtgtcgatcccgttgatcaccaccaaccgcattaacgatccgcaggtcgcggaggatattctcgcccgcggcgatgccgatatggtatcgatggcccgcccgttccttgccgacgccgaatttatatcaaaagcgcaggacgatcgcgccgatcagatcaacacctgcatcggctgcaatcaggcgtgtctcgatcggatcttcgtcggcaaagtcacctcctgtctggtcaacccgcgcgcgtgtcatgaaaccctgatgccggtcctgcctgccaacgcgcctaaacggctggcggtggtcggcgccgggcctgccggtctggccttcgccgtaaacgctgccgcccgcggtcatcacgtcacgttgtttgatgcgctcccggagatcggcggtcagtttaatatcgccaaacagatccccggcaaagaggagtttcacgagacgctgcgttactaccgcaccatgctcgatcttcatggtgtcgatctacgcctgaacacccgcgtcacgacagacgatctgctggcgttcgatgagacgatcctcgccaccggtatcgccccgcgcctgccggcgatcgatgggatcgatcatccaaaagtgctgagctaccttgatgtcttgcgcgataaagcgccggttggcgcgaaggtggcgattatcggctgcggcggcatcggcttcgacaccgcgatgtttttaagccagtcgggcgcggccaccagccaggatatcggcgagttctgccgcgaatggggtatcgataccagcctgcaaacggcgggagggctgagtgctgaaggcccgcaactgagtaaaagcccgcgacagattgtgatgctgcagcgcaaagccagcaaaccgggcgaagggctcggcaaaaccaccggctggatccaccgcgcgacgctgctggcgcgcggggtgaaaatgatcccggcggtcagctatgaaaagatcgatgatgaagggttacatgtcactatcggcggcgagcgccagctgttggcggtcgatcaggtggtgatctgcgccggtcaggagccgcgccgcgagctggcggatccgctgcgcgcggcggggaaaacggtgcatctcatcggcggttgcgacgtggcggcggagctggatgcgcgtcgggcgattgcccagggcactaaactggcgctggcgatttag

SEQ ID NO: 209956 - DNA, 1599 bp, Klebsiella pneumoniae
atgagttacctgttagcgttagatgccgggaccggcagcattcgggcggtcattttcgatcttaatggccgccagctggcggtaggccaggccgaatggaaacacctgagcgttgataacgtccccggctcgatggagttcgaccttaccaccaactggcagctggcctgccagtgcattcgccaggcgctcgatgccgcccggctctctgccgccgatattcagtccgtcgcctgctgttcgatgcgcgaagggatcgtcctctatgaccgcgacggcgaagccatctgggcctgcgccaacgtcgatgcccgcgccagccgcgaagtggcggagcttaaggagatccacgactatcgttttgaatccgaggtgtacgaggtctcgggacaaaccctggcgcttagcgccatgccgcgcctgctgtggctggcgcaccaccgccccgatatctaccgcaaagcggcaaccatcaccatgatcagcgactggctggcggcgaagctatccggcgagctggcggtcgacccgtcaaacgccggcaccaccggcatgctcgatctgttcagccgcgactggcgtccggcgctgctggatatggccgggctgcgcgccgatatgctgtcgccggtcaaagagaccggcaccctgctgggcgccgtcaccgaagcggcggcgcagcagagcggcctgcgcgccgggacgccggtggtgatgggcggcggcgacgtccagctcggctgcctgggccttggggtggtgcacgccgggcaaaccgcggtactcggcggcactttctggcagcaggtggtcaacctgccgcaggtgcgtaccgatccgcagatgaatattcgcgttaatcctcatgtcattcccggcatggcgcaggcggaatcgatcagcttctttaccggcctgaccatgcgctggtttcgcgacgccttctgcgctgaagaaaaactgattgccgagcgtctcggcgtcgatgcctattcgctgctggaggagatggccagccgcgtgcccgccggttcccacggcgtgatgcctattttttccgacgccatgcactttaagcagtggtaccacgccgcgccgtcgtttattaacctctccatcgatccggagaagtgcaacaaagcgaccctgttccgcgcgctggaggagaacgcggcgattgtctccgcctgcaacctggcccagatttcgcagttctccggggtaacattcgagagcctggtgtttgccggcggcggctctaaaggcgcgctgtggagccagatcctcagcgacgtcaccggcctgccggtgcgggtgccggtcgtccgcgaagccaccgctctgggctgcgccatcgccgccggaaccggcgccggattgtatggcgatatggccagcaccggagaacggttagtgagctggcaccgcgagttcaccccaaatccgcagcatcgcgagctgtatcaggagatgatgagcaagtggcagacggtgtacgccgatcagcttggccttgtcgatagcgggctgacaacgtcgatgtggcaggcgccgggtctggaacgccgccagcgcgttgtgtcctccccctcaccctaa

SEQ ID NO: 209957 - DNA, 972 bp, Klebsiella pneumoniae
atgagcgaaaaacgcattacggaagagaaccgctacgccgggctggcgttagccgaggaagagctggtggcgcgggtggcgtggtgctactaccacgacggcctgacgcaaaatgacatcggcgagcgtttggggctgccgcggctgaagatttcccgtctgctggagaaaggccgccagtccggggtgatccgcgtgcagatcaactcgcgctatgagggctgtctggcgctggaaagtgaactccagcagcgctttggcctcaagattgcccgtgtgctgccggcgctcaacaccccgccgatgaatacccggctggggatcggcgcggcgcaatcgctgatgggcattctgcagccgggacagctgctggcggtcggcttcggcgaagccaccatgagctgcctgcagcatctcagcggctttatcggctcgcagcaggtgcggctggtgaccctctccggcggcgtcggcccgtatatgaccggtatcggccagcttgatgccgcctgcagcgtcagcattatcccggcgccgctgcgggtctcttcggcggaggtcgccgagatcctgcgccgcgagtcgagcgtgcgcgacgtgatcctcgcggcgacggcggcggacgcggcggtagtcggcattggcgccatcgatcagcggcgcgacgcgaccattctgcgctccggctatatcagcgagggcgaacagctgatgtacgcccgcaaaggcgcggtcggcgacattttaggttatttcctgcaggccgacggcaggccggtagaaggactggagatccatcgggaactgctcggcgtgacccttgatgagctggcgcagctgccgaccatcgttggcgtcgccgggggagaagaaaaagcgcaggcgatttatgccgctctgattggcaagcgcattaatggcctggtaacggaagagacaacagcacgcgcggtactcgcgctggcctcctga

SEQ ID NO: 209958 - DNA, 1488 bp, Klebsiella pneumoniae
atgaagccactgcttgaagctcgccagatccgcaaacagttctccggcgttgccgtgctgaagggcatcgactttacgctatgcgcgggccaggtgcatgccctgatgggaggcaatggcgcgggtaaatcgacgctgatgaagatcatcgccggcgtcgaaaccccggataacggtgaactgacgatcggcgaccgcgcgtttgcgcgcctcaatccggcgctggctcatcagttaggcatctatctggtgccgcaggagccgatgctgtttcccaacctcagcgtgcgcgagaacattctctttcgtttgccgaagcgggcggataccgtcgcgcggttgcaggacaaactgcagaagttgaactgccagatcaacctcgacgccagcgccagcacgctcgaggtagccgatcaacagatggtcgagatcctgcgcgggctgatgcgcgaggccaggatcctgatcctggatgaacccaccgcctctttaacgccgggtgaaaccgagaggctctttagccagatccgtgcgttacaggcgctggacgttgggatcgtctttatctcacacaaattgcccgaaatccgccagcttgccagccatatttcggtgatgcgcgacggcgcggtggtgctgagcggcgagaccgcggcataccgcgacgaacaactgattaacgcgatgacgccggtcagccgcgaccatgcgctgagcgacacgcaaaagctgtggctgtcgctaccgggcaaccgccgtacgcaaccgcaggactttcccgtgctgcgggtggaagatcttaccggcgaaggctttatcgatctcaatctggagatccgcgccggagagatcgtcggtctggccgggctggtgggatccgggcgcaccgaatttgccgaaaccttatacggcctgcgtccaccgcgcgccgggcgaatctggctggagaaccgcgagattagctgcgacagcacccgcgccaggttggccagcgggctggtctatctgccggaagaccgccaggtctcggggctgtttctcgatgcgccggtgcgctggaacacggtgatgttcaatcagccgtcgtggtggcagcaggggaaacgggaggcggcggtggttgaacgctatcaccgggcactggggatcaagctggccgatggcgatcagccggtgcgcactctctctggcggtaaccagcagaaggtgctgctggcgcgctgtctggaagctaatccgttactgctgattgtcgatgagccgacgcgcggcgtggatgtctccgcccgcgccgatatctatcagctgctgaaaagcgttgccgcgcaaaacgtggcggtgctgatgatctccagcgatctggatgagttcgttggccttgccgaccgggtgctggtgatgcatcagggccgctacagcggcgagctggcgcggcaggcggtgaccgtcgatcgcatgatgaccctggcctttggagggcaggcatga

SEQ ID NO: 209959 - DNA, 1035 bp, Klebsiella pneumoniae
atgaaaacgttactcaagaatcgcgaactgagcgccttctttgccatcgtggcgctctttgttgtgctggtggcgctcaatccagcctatttcagcctgcagaccctggcgatgattttctccagctcgcaaatcctctgcctgctggcattgggcgcgaccctggtgatgctgacccgcaatattgacgtgtcggtaggttcgaccgttgggctatgcgccatcgccgtcggcgtggcgctgaacaacggctatgggttggcgacggctatcgccttcgcgctggcgattggcgcgctggccggagcttttaacggcctgctggtcgtggggctgcgcatcccggcgatcgtcgcgacgctcggtacgctggggttgtatcgcggggtgatgttgctgtggaccggcgggaaatggatcgaaggcttgcccgacagcctgaaatcgctctcggagcccgcgtttatcggcgtgtcgccgctgggctggctggtgctggcgctgctgctggcgggcggctggctgctgtcgcgcaccgcctttggtcgtgatttttacgccgctggcgataacctcgccgccgcgcgccaactgggcgtggcggtcaaccgcacgcggatgctggcctttaccctcaacggtatgctggcggcctgcgccgggatcgtcttcgccgcgcagattggttttgtgcctaatcagaccggcagcggcctggagatgaaagccatcgccgcctgcgtgctgggcgggatctcgctgctcggcggtaccggcacgctgcttggcgcgtttctcggcgcctttttcctcacccaaatcgacaccgtactggtgctgttccgccttcccgcctggtggaacgactttatcgccggcctggtgctgctcggcgtgctggtgctcgatggccgtctgcgtcaggcgctggcccgccatcagcgggcgctaaagtacagccgtttccagcccggtaacaaaggggggaaacaggttgcccgctttcccgaacgcaaaagcaaagaggtggcttaa

SEQ ID NO: 209960 - DNA, 999 bp, Klebsiella pneumoniae
atgaagctgaagcttaactgggaaagcgcgctgctggcgttgctgatcgtggagatcctgctgttcggcgcgctgaatccgcgcatgctggatctcaatatgctgctctttagcaccagcgactttatctgcatcggcatcgtcgcgctgccgctgacgctggtgatcatcagcggcgggatcgatatttcgctgggctcgaccatcggcctgtgcgccatcgccctcggggtgatgacccaggcgggctggccgctgtggctcgcggtatcgctgacgttgctcttgggactgctgtgcgggttattcaacgccgcgctgatccactacaccggcatcagcccgctggtgatcacgcttggtacgctgtatctgtacggcggcggcgcgctgctgctttccgggatggccggcgcgaccggttacgaggggattggcggttttcccgatagcttcaccgccttcgccaatttaaccctcgccggactgccgctgccgctggtgctgttcgcgattatcacctttttcttctggctgctgacccatcgcgggcgctttggccgccacctctttttactcgggcaaaacccgcgcgccgcgcgctatgccgcgctgtcggtgaacggcatcccgtacgtgctgtatggcctggtgggcgtcgcctcggcggtcgcggcgctggtgatggtctcctatttcggctcggcacgttcggatttaggccgcgacctgctgatgccggcgctgaccgcggcggtgctcggcggggccaatatttacggcggctcgggatcgatactgggtaccgcgctggcggcattgctggtggggtatctgcaacagggtttacagatggtcggcatccccaaccaggtgtcgagcgcgctgtcaggggcgctgttggttgtggtggtgatggggcgttcgctgagcctgcaccgtgaatgggtgcgcgcgacctggcggcgtcttttctcgcataaaacaatcggagcataa

SEQ ID NO: 209961 - DNA, 1002 bp, Klebsiella pneumoniae
atgaaattaaaactgatcgtgctggcgctggcgatgagcgtggttaccgcgcaggcggcggaccgcatcgcctttattcctaagctggtcggcgtcggcttctttaccagcggcggcaacggcgcgaaagaggcggggaaagcgctgggcgtggatgtcacctatgacggccccaccgagcccagcgtctccggccaggtgcagcttatcaacaacttcgtcaaccagggctacaacgcgattatcgtttccgccgtctcgccggacggcctgtgtccggcgctgaagcgggcgatgcagcgcggggtgaaagtcctgacctgggattccgataccaggccggagtgccgcagcatctatatcaatcagggcacgccgcagcagcttggcggcctgctggtcgagatggcggaaaagcaggtgacgaagcctactgccaaggtagcgtttttctactccagcccgacggtgaccgaccagaaccagtgggtgaaggaagccaaagccaaaatcgaaaaagagcatccgcagtggcaaatcgtcaccactcagttcggctataacgatgccaccaaatcgctgcaaaccgccgaggggatcttaaaagcctatccggatctcgacgccattatcgcgccggatgccaatgcgctgccggcggcggcgcaggcggcggagaacctcaagcgtcagggcgtggcgatcgtcggctttagtacgccgaacgtgatgcgcccgtacgttgagcgcggcacggtgaaagcgttcggcctgtgggatgtggttcagcagggcaaaattgcggttaacgtcgccgatcgattgctgaaaaagggcgatcttaacgtaggcgacagcgttgaggtgaaagatatcggctcgctgaaggtcgaaccgaatagcgtgcagggctaccagtatgaggcgaagggcaacggtatcgtgctgctgccggagcgcgtggtgttcagcaaagagaacatcaacaactacgacttctga

SEQ ID NO: 209962 - DNA, 888 bp, Klebsiella pneumoniae
atggcagatttagacgatatcaaagaggggaaagacttcggtattgaccgcccgcagcagaatacgctgtataccctgaaaggctgcggctcgctggactggggcatgcagtcgcggctggcgcgcatttttaatccgcacagcaaccgcacggtgatgctggccttcgatcacggttacttccaggggccaaccaccgggctggagcgtatcgacctgtcgattgcgccgctgtttgccgacaccgacgtgctgatgtgtacccgcggcgtactgcgcagccaggtaccggcggccaccaataagccggtggtgctccgcgcctccggcggcaattcgattttaagcgaactctccaacgaatgtgtggcggtggcgatggaagacgcgctgcggctcaacgtatgcgcggtggcggcgcaggtctatatcggcagcgaatacgaacatcagtcgatcaataacatcatcaaactggtggacgccggcaatcgctacggtatgccggtcctggcggttaccggcgtcggcaaagagatgacccgcgacgcgcgctacttctcgctggccagccggattgccgccgaaatgggggcgcagtttgtgaagacctatttcgttgaggaaggctttgaaaaagtgaccgccagctgtccggtgccgatcgttatcgccggcggtaaaaaactgccggagcatgaggcgctggagatgtgctggcgggcgatcgaccagggcgcgtccggggtggatatggggcgcaacatcttccagtccagcgccccgcgcgcgatgcttaaggcggtgaaaaaggtggtgcatgagaatctgaacgcgcgcgaagcgtatcagttctggcaggaagaaaaacagggagagctgaaatga

SEQ ID NO: 209963 - DNA, 297 bp, Klebsiella pneumoniae
atgaacgtcacgctagtggagatcaatattaaacccgagcgggtggatgagtttctcgaggtgtttcgcgccaaccacgagggcgcgctgcaggagccaggcaacctgcgctttgatgtcctgcaggatcccgaggtgaaaacccgcttttttatctacgaagcctataaagacgatgaggcggtgctggcgcataagaagacgccgcactatttagcctgcgtcgaaaagctggaggagatgatgtcgcagccgcggcagaagcgcagctttatcggcctgttaccgcaggtgtga

SEQ ID NO: 209964 - DNA, 1380 bp, Klebsiella pneumoniae
ttgaacaggttaccttccagcgcatcggctctggcctgcagcgcacacgcactgaatctcattgaaaagcgcacgcttgatcatgaggaaatgaaagcacttaaccaggaggtcagggaatactttaaagagcatgtgaatccggggtttttagagtatcgaaaatcggtcacagccggcggggattacggagccgtagagtggcaagcgggagggttaaatacgcttgtcgacacccagggacaggagtttatcgactgccttggtgggtttggcatcttcaatgtagggcaccgtaatccagttgtggtatccgccgtcgagaatcaactcgcgaaacaaccgcttcacagtcaggagctgctggacccgctacgcgcgatgctggcgaaaacgctggcagccttaacgcccgggaaactaaagtacagtttcttctgcaacagcggtaccgaatcggtagaggcggccatcaagctggcgaaagcctatcagtcgccgcgcggtaaatttaccttcatcgccaccagcggcgccttccacggtaaatcgctgggcgcgctgtcggccaccgccaagtcgaccttccgcaaaccctttatgccgctgctgccgggcttccgccacgtgccgttcggcgatatcaacgccatgcgcaccatgctgagcgagtgcaagaaaaccggcgacgacgtcgcggcggtgatccttgagccgattcagggcgaagggggcgtgatcctcccgccaacggggtatttgccggcggtgcgtaaactgtgcgacgagtttggcgcattgctgatcctcgacgaagtgcagaccggcatgggccgcaccggcaagatgttcgcctgcgagcatgagaacgtccagccggacattctgtgtctggcgaaagcgctcggcggcggtgtgatgccgatcggcgcgacggtggcgacggaagaggtcttctcggtgctcttcgataacccgttcctgcacaccaccaccttcggcggcaacccgttggcctgtgcggcggcgctggcgacgatcaacgtgctgctgacgcaaaacctgccggcgcaggcggcgcagaaaggcgatatgctgctggacggtttccgcctgctggcgcaggagtatccggacctggtgaatgaagtgcgcgggaaaggcatgctgatggctatcgagtttgttgataacgagattggctacgactttgccagcgagatgttcagacagcgggtgctggtcgccgggacgttaaacaacgccaagacgatccgcattgaaccgccgctgaccctcacccttgagcagtgcgaacaggtgctgaaggcggcgcgcaaggcgctggcggccctgcgcgtttcggtcgaagaagcgtaa

SEQ ID NO: 209965 - DNA, 555 bp, Klebsiella pneumoniae
atgcgacatcatcatgaagaagggcgtgggccacgcgggcgccacggtgatcccagcgaacacggcgaccatggccgccgcggcggcggacgtcgccagcgtttctttggccacggcgaactgcggctgatcattctggatatcctcagccgcagcgccagccatggctatgagctgatcaaagagatcgaaacgcttacccaggggaactacagccccagcccgggggtgatctatccgacgctggatctgctccaggaccagggccttatcagcgtggaagacgacaacggacgcaagaaaatccttatcagcgaggaaggaaaacagctgcacgccgagaaccaggagcacctggcccatatccaggagcgcctgcaggcgcggatggtcggctgcgagctgcgccgggatccgcagatgaagcgcgcgctggaaaacttcaaagcggtcctcgacctgaaagtgaaccagcaggccagcagtgccgcccagctcaagcagatcatcggcattattgaccgggcggcgatggagatctctcagctcgactaa

SEQ ID NO: 209966 - DNA, 777 bp, Klebsiella pneumoniae
atgatgacaaaaaccaaagcagacaagtacccgcagcgtgtccgcaatgagctgcgtttccgtgagctgacggtgctgcgcgtggagcgcgcaggcgcggcgttccagcgtatcgtgctgggaggcgaggcgctggaaggcttcgcctctcacggctttgacgaccataccaagctttttttccccgagccgggcgcggcatttaccccgccgcaggtgaccgaggaggggattgactggggggaaggcgtgcggcctgccacccgcgactatacgccgctgtacgatgccgaacgtcacgagctggcttacgatttctatatccacgatggcggtatcgccagccgttgggcgctggaagcaaaagtgggcgataagctggtgatcggcggcccgcgcggctcgctggtggtgccggaagattatgcctggcagctgtatgtttgcgatgagtccggcatgccggcgctgcgccgtcgtctgctgggattacgccagctgccggcgaggccgcaggtgacggccatcgttactatcgccgatgcgtcgtataaagattatctggcggatctcgacggctttaacatcgagtgggtggtgggccacaatccggccttcgtcgccgagcgtctggcgcaggtgaaggtgccggcggaggattattttatctggctgaccggcgaaggcgcggtggtgaaatcgctgctggcgcgctttgaagacgagagcatcgatcagcagctggtgcgttcccaggcgtactggcacagcaagtaa

SEQ ID NO: 209967 - DNA, 1650 bp, Klebsiella pneumoniae
atgtctcaattcttttttaaccagcgcgccagcctcgtcaacgatgtgattgagggtaccattatcgccagcccgtggaataacctcgcccgtctggagagcgacccggcgatccgggtggtggtccgtcgcgatctgaataaaaacaacgtggcggtgatctccggcggcggcgccggccatgaaccggcgcacgtcggctttattggtaaaggcatgctgaccgccgcggtctgcggcgatctgttcgcctcgccgagcgtcgacgcggtgctcaccgccattcaggcagtgaccggcgaggcgggctgcctgctgatcgtcaaaaactacaccggcgatcggcttaacttcggtctggcggcggagaaagcgcgccgactcggctacaacgtggagatgctgatcgtcggcgacgatatttcgctgccggataacaaacagccgcgcggcatcgccgggaccattctggtgcataaagtggcgggctatttcgccgagcgcggcttcaacctcgccaccgtcctgcgtgaagcgcaatacgccgccagccataccgccagcatcggggtggcgctggccagctgccacctgccgcaggaagccgacagcgcgccgcgccatcaggccggtcacgccgagctgggaatgggcatccacggtgagccgggcgcctcgacgatcgccacgcaaaacagtgcagaaatcgttaacctgatggtggaaaaactgaccgccgccctaccggaaaccggccgcctggcggtgatgctcaataacctcggcggcgtgtcggtggctgagatggcgattctgacccgcgagctggccaacaccccgctgcaggcgcgcattgactggttaataggcccggcctcgctggtgacggcgctggatatgaaaggcttctcgctgaccaccatcgtgctggaggagagtattgagaaagcgctgctttcggatgtggaaaccgccagctggcagaagccggtgcagccgcggactatcaacgtcgtgccgtccaccctcgacagcgcccgggtggattttacgccctcggccaacccacaggtgggcgattacgtggcgcaggtgaccggcgccctcatcgatcttgaagaacatctcaacgcgctggatgccaaagtaggcgacggcgataccggctccaccttcgccgccggggcgcgcgaaattgccgagcggctcgagcgtcagcagctgcccctgaacgatctgccaacgctcttcgcgctgatcggcgaacgcctgacggtggtgatgggcggctccagcggggtattgatgtctatcttcttcaccgctgccgggcagaagctggggcaaggcgccagcgtggccgaggcgctgaacgccggtctggaacagatgaagttttacggcggcgccgatgagggagaccggacgatgatcgacgctctgcagccggccctggcggcgctgctggccgaaccggagaatctgcaggccgctttcgccgcggcgcaggccggggcggatcgcacctgccagtcaagcaaagccggcgccggacgcgcgtcctatctcaacagcgatagcctgctcggcaacatggaccccggcgcccacgcggtggcgatggtgtttaaggcgctggcggaacgctaa

SEQ ID NO: 209968 - DNA, 1422 bp, Klebsiella pneumoniae
atggtaaacctggttattgtttctcatagcgcccggctgggcgaaggtgtcggagaactggcccggcagatgttaatcaacgatggctgcaaactggcgatcgccgccgggatcgacgatcccgacagcccgatcggcaccgatccgcttaaagtcatggaggcgatcgaatccgtggccgataccgatcacgtgctggtgatgatggatatcggcagcgcgttgctcagcgccgaaaccgccctcgatctgctcgatccggcgattgccgcgaaggtgcgactgtgcgccgcgccgctggtggaagggacgctggcggccaccgtcagcgctgcctccggcgccgggatcgacaaggtgatcgccgacgccatgagcgccctggaggccaagcgggttcagctgggtttaccttcgccaacttctgacgccgcgccggagccgatgcttgccgacgacggcgacacaaaatcggtgtcagtcattattaacaatcacaacggcctgcacgtgcgtccggcgtcgaagctggtcgccgcgctggcgggctttaacgccgatctgctgctggagaaaaacgggaagtgcgtcaaaccggacagcctcaaccaaatcgcgctattgcaggtccgccgcaacgataagctgcgcctgctggcccgcggtccggatgccgacgcggcgctggcggcgtttcaggcgctggccgccgataacttcggtgaatcgcctgcggcgcaaccggcagcggctccggcaacgcccgagcgcgtcgaaggcgctgccctgcgctatccgctggccctgatccagccgctccgcccggctgccgccgatgccgcccgcgagcagcagcgcctgcgccaggccattgaccagacgctggcggatcttatcgccctgaccgagctggcggaaaataaatttcacgccgatatcgcggcgatcttcgccgggcaccacaccctgctcgacgatgacgatctgtttgatgccgccaacgatcgcctgctcaccgaacaatgcacggcggaatgggcatggcatcaggtgttgatggagctcagccagcagtatcgccagctggatgacccctacctgcaggcgcgctatatcgatatcgaagatattttgcagcgcaccctgcgccatctgcagggcgttcaggagagagtgccgacgcccggcgagccaacaattattattgccgacaacatttatccctcaaccgtcttacagctggatgccagcttcgttaaaggcctgtgcctgcgcgatggcagcgaacaggctcacggcgcgattatcgcccgcgcggcggggatcgcctggctgagccagcagggcgaggcgctgaacagcgtgcagcccggcgagactatcgtgctcgatatgcgccaccagcgccttatccgtgactaa

SEQ ID NO: 209969 - DNA, 633 bp, Klebsiella pneumoniae
atgtcactgaacagaacgcaaatcgtcgactggctgtaccgctgcggcgatattttcaccaaagagagcgattttctcaccggcctcgataaagagattggcgacgccgaccacggtctcaatatgcaccgcggtttcagtaaagtggtcgaaaagctgccgtcgattgccgataaagatattggctttatcctcaaaaacaccggcatgacgctgctctccaacgtcggcggcgccagcggcccgctgttcggcaccttcttcattcgcgccgcgcaggtgacccaggcccaccagagcctgacgctcgacgagctgtacctgatgatccgcgaaggtgcggacggtgtcgtcaatcgcggcaaagcggagccaggggataaaaccatgtgcgacgtctggctgccggtggtggactccctgcgccagtccagcgagcagcacctgtcgatcgccgccgcgatggatgccgcctgcgaagtggccgagcgtgcggcccacgccaccatcactatgcaggcgcgtaaaggccgcgccagctatctcggcgagcgcagcatcggacatcaggatcccggcgcgacctcggtgctgtttatggttcagatgctggccgccgccgccaaagagtaa

SEQ ID NO: 209970 - DNA, 1071 bp, Klebsiella pneumoniae
atgaaaaagctgattaaccgtgttgaagatgtactgaatgaacaattacaggggctggctaaagcccatccgcagctgaccctgcatcaggacccgctgtatgtgacccgcaccgacgcgccggtggctggcaaggtggccctgctctccggcggcggcagcggacatgaaccgatgcactgcggctatatcggccagggcatgctctccggcgcctgtccgggagaaatcttcacctcgccgacgccggacaaaatgtttgaatgcgcgatgcaaattgacggcggcgaaggcgtcttgctaattatcaaaaactataccggcgacatcctgaattttgagaccgccaccgagctgctgcatgagagcggcattaaagtcaccaccgtggtggtcgacgacgacgtggcggtgaaagacagcctctataccgccggtcgtcgcggcgtcgccaacaccgtactgatcgaaaaactggtcggcgccgccgccgagcgcggcgactcgctggaagcctgcgctgaactgggccgccgcctgaacaatctcggccactcgattggtatcgccctcggcgcctgcaccgtaccggctgccgggcagccctcctttacgctgaaagatgacgagatggagttcggcgtcggcattcacggcgagccgggcatcgaccgccgccgcttcagctcgctggaccaaaccgtcgatgagatgttcgataccctgctggaaaacggcgcttacagccgcacgctgcgccagtgggataccgtcaagggcgcgtggcaggaagtgcagcagagcaaaaccgcgctgcaaaacggcgaccgggttatcgcgctggttaataacctcggcgccactccgctttccgaactgtatggcgtgtataaccgccttgcccagcgctgcgaagcgtccggcatcatcatcgaacgcaacctcatcggcagctactgtacttcgctggatatggcgggcttctccatcactctgctgaaagtggatgacgagacgctgacgctatgggacgccccggttcacaccccggcgctgaactggggaaactaa

SEQ ID NO: 209971 - DNA, 1098 bp, Klebsiella pneumoniae
atgctaaaagttattcaatctccagccaaatatcttcagggtcctgatgctgctgttctgttcggtcaatatgccaaaaacctggcggagagcttcttcgtcatcgccgacgatttcgtaatgaagctggcgggagagaaagtggtgaatggcctgcagagccacgatattcgctgccatgcggaacggtttaacggtgaatgcagccatgcggaaatcaaccgtctgatggcgattttgcaaaaacagggctgccgcggcgtggtcgggatcggcggtggtaaaaccctcgataccgcgaaggcgatcggttactaccagaagctgccggtggtggtgatcccgaccatcgcctcgaccgatgcgccgaccagcgcgctgtcggtgatctacaccgaagcgggcgagtttgaagagtatctgatctatccgaaaaacccggatatggtggtgatggacacggcgattatcgccaaagcgccggtacgcctgctggtctccggcatgggcgatgcgctctccacctggttcgaggccaaagcttgctacgatgcgcgcgccaccagcatggccggaggacagtccaccgaggcggcgctgagcctcgcccgcctgtgctatgatacgctgctggcggagggcgaaaaggcccgtctggcggcgcaggccggggtagtgaccgaagcgctggagcgcatcatcgaggcgaacacttacctcagcggcattggctttgaaagcagtggcctggccgctgcccatgcaatccacaacggtttcaccattcttgaagagtgccatcacctgtatcacggtgagaaagtggccttcggtaccctggcgcagctggtgctgcagaacagcccgatggacgagattgaaacggtgctgggcttctgccagcgcgtcggcctgccggtgacgctcgcgcagatgggcgtcaaagaggggatcgacgagaaaatcgccgcggtggcgaaagctacctgcgcggaaggggaaaccatccataatatgccgtttgcggtgaccccggagagcgtccatgccgctatcctcaccgccgatctgttaggccagcagtggctggcgcgttaa

SEQ ID NO: 209972 - DNA, 1926 bp, Klebsiella pneumoniae
atgactgttcagactcaggataccgggaaggcggtctcttccgtcattgcccagtcatggcaccgctgcagcaagtttatgcagcgcgaaacctggcaaacgccgcaccaggcccagggcctgaccttcgactccatctgtcggcgtaaaaccgcgctgctgaccatcggccaggcggcgctggaagacgcctgggagtttatggacggtcgcccctgcgcgctgtttattcttgatgagtccgcctgcatcctgagccgttgcggcgagccgcaaaccctggcccagctggctgccctgggatttcgcgacggcagctattgtgcggagagcattatcggcacctgcgcgctgtcgctggccgcgatgcagggccagccgatcaacaccgccggcgatcggcattttaagcaggcgctacagccatggagtttttgctcgacgccggtgtttgataaccacgggcggctgttcggctctatctcgctttgctgtctggtcgagcaccagtccagcgccgacctctccctgacgctggccatcgcccgcgaggtgggtaactccctgcttaccgacagcctgctggcggaatccaaccgccacctcaatcagatgtacggcctgctggagagcatggacgatggggtgatggcgtggaacgaacagggcgtgctgcagtttctcaatgttcaggcggcgagactgctgcatcttgatgctcaggccagccaggggaaaaatatcgccgatctggtgaccctcccggcgctgctgcgccgcgccatcaaacacgcccgcggcctgaatcacgtcgaagtcacctttgaaagtcagcatcagtttgtcgacgcggtgatcaccttaaaaccgattgtcgaggcgcaaggcaacagttttattctgctgctgcacccggtggagcagatgcggcagctgatgaccagccagctcggtaaagttagccacacctttgagcagatgtctgccgacgatccggaaacccgacgcctgatccactttggccgccaggcggcgcgcggcggcttcccggtgctactgtgcggcgaagagggggtcgggaaagagctgctgagccaggctattcacaatgaaagcgaacgggcgggcggcccctacatcgccgtcaactgccagctatatgccgacagcgtgcttggccaggactttatgggcagcgcccctaccgacgatgaaaatggtcgcctgagccgccttgagctggccaacggcggcaccctgtttctggaaaagatcgagtatctggcgccggagctgcagtcggccctgctgcaggtaattaagcagggcgtgctcacccgcctcgacgcccggcgcctgatcccggtggatgtgaaggtgattgccaccaccaccgtcgatctggccaatctggtggaacagaaccgctttagccgccagctgtactatgcgctgcactcctttgagatcgtcatcccgccgctgcgcgcccgacgcaacagtattccgtcgctggtgcataaccggttgaagagcctggagaagcgtttctcttcgcgactgaaagtggacgatgacgcgctggcgcagctggtggcctactcgtggccggggaatgattttgagctcaatagcgtcattgagaatatcgccatcagcagcgacaacggccacattcgcctgagtaatctgccggaatatctcttttccgagcggccgggcggggatagcgcgtcatcgctgctgccggccagcctgacctttagcgccatcgaaaaggaagctattattcacgccgcccgggtgaccagcgggcgggtgcaggagatgtcgcagctgctcaatatcggccgcaccaccctgtggcgcaaaatgaagcagtacgatattgacgccagccagttcaagcgcaagcatcaggcctag

SEQ ID NO: 209973 - DNA, 531 bp, Klebsiella pneumoniae
atgtatcgtatctatacccgcaccggggataaaggcaccaccgccctgtacggcggcagccgcatcgagaaagaccatattcgcgtcgaggcctacggcaccgtcgatgaactgatatcccagctgggcgtctgctacgccacgacccgcgacgccgggctgcgggaaagcctgcaccatattcagcagacgctgttcgtgctgggggctgaactggccagcgatgcgcggggcctgacccgcctgagccagacgatcggcgaagaggagatcaccgccctggagcggcttatcgaccgcaatatggccgagagcggcccgttaaaacagttcgtgatcccggggaggaatctcgcctctgcccagctgcacgtggcgcgcacccagtcccgtcggctcgaacgcctgctgacggccatggaccgcgcgcatccgctgcgcgacgcgctcaaacgctacagcaatcgcctgtcggatgccctgttctccatggcgcgaatcgaagagactaggcctgatgcttgcgcttga

SEQ ID NO: 209974 - DNA, 354 bp, Klebsiella pneumoniae; identical to SEQ ID NO: 181095

SEQ ID NO: 209975 - DNA, 1164 bp, Klebsiella pneumoniae
atgagctatcgtatgtttgattatctggtgccaaacgttaacttttttggccccaacgccatttccgtagtcggcgaacgctgccagctgctgggggggaaaaaagccctgctggtcaccgacaaaggcctgcgggcaattaaagatggcgcggtggacaaaaccctgcattatctgcgggaggccgggatcgaggtggcgatctttgacggcgtcgagccgaacccgaaagacaccaacgtgcgcgacggcctcgccgtgtttcgccgcgaacagtgcgacatcatcgtcaccgtgggcggcggcagcccgcacgattgcggcaaaggcatcggcatcgccgccacccatgagggcgatctgtaccagtatgccggaatcgagaccctgaccaacccgctgccgcctatcgtcgcggtcaacaccaccgccggcaccgccagcgaggtcacccgccactgcgtcctgaccaacaccgaaaccaaagtgaagtttgtgatcgtcagctggcgcaacctgccgtcggtctctatcaacgatccgctgctgatgatcggtaaaccggccgccctgaccgcggcgaccgggatggatgccctgacccacgccgtagaggcctatatctccaaagacgctaacccggtgacggacgccgccgccatgcaggcgatccgcctcatcgcccgcaacctgcgccaggccgtggccctcggcagcaatctgcaggcgcgggaaaacatggcctatgcttctctgctggccgggatggctttcaataacgccaacctcggctacgtgcacgccatggcgcaccagctgggcggcctgtacgacatgccgcacggcgtggccaacgctgtcctgctgccgcatgtggcccgctacaacctgatcgccaacccggagaaattcgccgatattgctgaactgatgggcgaaaatatcaccggactgtccactctcgacgcggcggaaaaagccatcgccgctatcacgcgtctgtcgatggatatcggtattccgcagcatctgcgcgatctgggggtaaaagaggccgacttcccctacatggcggagatggctctgaaagacggcaatgcgttctcgaacccgcgtaaaggcaacgagcaggagattgccgcgattttccgccaggcattctga

SEQ ID NO: 209976 - DNA, 429 bp, Klebsiella pneumoniae
atgaacaagagccaacaagttcagacaatcaccctggctgccgcccagcaaatggcggcggcggtggaaaaaaaagccgctgagatcaacgtggcggtggtgttttccgtggttgaccacggaggcaacacgctgcttattcagcggatggacgaggccttcgtctccagctgcgatatttccctgaataaagcctggagcgcctgcagcctgaagcaaggtacccatgaaattacttcagcggtccagccaggacaatctctgtacggtctgcagctaaccaaccaacagcgaattattatttttggcggcggcctgccagttatttttaatgagcaggtaattggcgccgtcggcgttagcggcggtacggtcgagcaggatcaattattagcccagtgcgccctggattgtttttccgcattataa

SEQ ID NO: 209977 - DNA, 1668 bp, Klebsiella pneumoniae
atgaaaagatcaaaacgatttgcagtactggcccagcgccccgtcaatcaggacgggctgattggcgagtggcctgaagaggggctgatcgccatggacagcccctttgacccggtctcttcagtaaaagtggacaacggtctgatcgtcgaactggacggcaaacgccgggaccagtttgacatgatcgaccggtttatcgccgattacgcgatcaacgttgagcgcacagagcaggcaatgcgcctggaggcggtggaaatagcccgcatgctggtggatattcacgtcagccgggaggagatcattgccatcactaccgccatcacgccggccaaagcggtcgaggtgatggcgcagatgaacgtggtggagatgatgatggcgctgcagaagatgcgtgcccgccggaccccctccaaccagtgccacgtcaccaatctcaaagataatccggtgcagattgccgctgacgccgccgaggccgggatccgcggcttctcagaacaggagaccacggtcggtatcgcgcgctatgcgccgtttaacgccctggcgctgttggtcggttcgcagtgcggccgtcccggcgtgttgacgcagtgctcggtggaagaggccaccgagctggagctgggcatgcgtggcttaaccagctacgccgagacggtgtcggtctacggcacggaagcggtatttaccgacggcgatgatactccgtggtcaaaggcgttcctcgcttcggcctacgcctcccgcgggttgaaaatgcgctacacctccggcaccggatccgaagcgctgatgggctattcggagagcaagtcgatgctctacctcgaatcgcgctgcatcttcattaccaaaggcgccggggttcaggggctgcaaaacggcgcggtgagctgtatcggcatgaccggcgctgtgccgtcgggcattcgggcggtgctggcggaaaacctgatcgcctctatgctcgacctcgaagtggcgtccgccaacgaccagactttctcccactcggatattcgccgcaccgcgcgcaccctgatgcagatgctgccgggcaccgactttattttctccggctacagcgcggtgccgaactacgacaacatgttcgccggctcgaacttcgatgcggaagattttgatgattacaacatcctgcagcgtgacctgatggttgacggcggcctgcgtccggtgaccgaggcggaaaccattgccattcgccagaaagcggcgcgggcgatccaggcggttttccgcgagctggggctgccgccaatcgccgacgaggaggtggaggccgccacctacgcgcacggcagcaacgagatgccgccgcgtaacgtggtggaggatctgagtgcggtggaagagatgatgaagcgcaacatcaccggcctcgatattgtcggcgcgctgagccgcagcggctttgaggatatcgccagcaatattctcaatatgctgcgccagcgggtcaccggcgattacctgcagacctcggccattctcgatcggcagttcgaggtggtgagtgcggtcaacgacatcaatgactatcaggggccgggcaccggctatcgcatctctgccgaacgctgggcggagatcaaaaatattccgggcgtggttcagcccgacaccattgaataa

SEQ ID NO: 209978 - DNA, 585 bp, Klebsiella pneumoniae
gtgcaacagacaacccaaattcagccctcttttaccctgaaaacccgcgagggcggggtagcttctgccgatgaacgcgccgatgaagtggtgatcggcgtcggccctgccttcgataaacaccagcatcacactctgatcgatatgccccatggcgcgatcctcaaagagctgattgccggggtggaagaagaggggcttcacgcccgggtggtgcgcattctgcgcacgtccgacgtctcctttatggcctgggatgcggccaacctgagcggctcggggatcggcatcggtatccagtcgaaggggaccacggtcatccatcagcgcgatctgctgccgctcagcaacctggagctgttctcccaggcgccgctgctgacgctggagacctaccggcagattggcaaaaacgccgcgcgctatgcgcgcaaagagtcaccttcgccggtgccggtggtgaacgatcagatggtgcggccgaaatttatggccaaagccgcgctatttcatatcaaagagaccaaacatgtggtgcaggacgccgagcccgtcaccctgcacgtcgacttagtaagggagtga

SEQ ID NO: 209979 - DNA, 426 bp, Klebsiella pneumoniae
atgagcgagaaaaccatgcgcgtgcaggattatccgttagccacccgctgcccggagcatatcctgacgcctaccggcaaaccattgaccgatattaccctcgagaaggtgctctctggcgaggtgggcccgcaggatgtgcggatctcccgtcagacccttgagtaccaggcgcagattgccgagcagatgcagcgccatgcggtggcgcgcaatttccgccgcgcggcggagcttatcgccattcctgacgagcgcattctggctatctataacgcgctgcgcccgttccgctcctcgcaggcggagctgctggcgatcgccgacgagctggagcacacctggcatgcgacagtgaatgccgcctttgtccgggagtcggcggaagtgtatcagcagcggcataagctgcgtaaaggaagctaa

SEQ ID NO: 209980 - DNA, 1824 bp, Klebsiella pneumoniae
atgccgttaatagccgggattgatatcggcaacgccaccaccgaggtggcgctggcgtccgacgacccgcaggcgagggcgtttgttgccagcgggatcgtcgcgacgacgggcatgaaagggacgcgggacaatatcgccgggaccctcgccgcgctggagcaggccctggcgaaaacaccgtggtcgatgagcgatgtctctcgcatctatcttaacgaagccgcgccggtgattggcgatgtggcgatggagaccatcaccgagaccattatcaccgaatcgaccatgatcggtcataacccgcagacgccgggcggggtgggcgttggcgtggggacgactatcgccctcgggcggctggcgacgctgccggcggcgcaatatgccgaggggtggatcgtactgattgacgacgccgtcgatttccttgacgccgtgtggtggctcaatgaggcgctcgaccgggggatcaacgtggtggcggcgatcctcaaaaaggacgacggcgtgctggtgaacaaccgcctgcgtaaaaccctgccggtggtagatgaagtgacgctgctggagcaggtccccgagggggtgatggcggcggtggaagtggccgcgccgggccaggtggtgcggatcctgtcgaatccctacgggatcgccaccttcttcgggctaagcccggaagagacccaggccatcgtccccatcgcccgcgccctgattggcaaccgttcagcggtggtgctcaagaccccgcagggggacgtgcagtcgcgggtgatcccggcgggcaacctctacattagcggcgaaaagcgccgcggagaggccgatgtcgccgagggcgcggaagccatcatgcaggcgatgagcgcctgcgctccggtacgcgacatccgcggcgaaccgggcactcacgccggcggcatgcttgagcgggtgcgcaaggtaatggcgtccctgaccggccatgagatgagcgcgatatacatccaggatctgctggcggtggatacgtttattccgcgcaaggtgcagggcgggatggccggcgagtgcgccatggagaatgccgtcgggatggcggcgatggtgaaagcggaccgtctgcaaatgcaggttatcgcccgcgaactgagcgcccgactgcagaccgaggtggtggtgggcggcgtggaggccaacatggccatcgccggggcgttaaccactcccggctgtgcggcgccgctggcgatcctcgatctcggcgccggctcgacggatgcggcgatcgtcaacgcggaggggcagataacggcggtccatctcgccggggcggggaatatggtcagcctgttgattaaaaccgagctgggtctcgaggatctttcgctggcggaagcgataaaaaagtacccgctggccaaagtggaaagcctgttcagtattcgtcacgagaatggcgcggtggagttctttcgggaagccctcagcccggcggtgttcgccaaagtggtgtacatcaaggagggcgaactggtgccgatcgataacgccagcccgctggaaaaaattcgtctcgtgcgccggcaggcgaaagagaaagtgtttgtcaccaactgcctgcgcgcgctgcgccaggtctcacccggcggttccattcgcgatatcgcctttgtggtgctggtgggcggctcatcgctggactttgagatcccgcagcttatcacggaagccttgtcgcactatggcgtggtcgccgggcagggcaatattcggggaacagaagggccgcgcaatgcggtcgccaccgggctgctactggccggtcaggcgaattaa

SEQ ID NO: 209981 - DNA, 804 bp, Klebsiella pneumoniae
atgaaccagacttctaccttaaccgggcagtgcgtggccgagtttcttggcaccggattgctcattttcttcggcgcgggctgcgtcgctgcgctgcgggtcgccggggccagctttggtcagtgggagatcagtattatctggggccttggcgtcgccatggccatctacctgacggccggtgtctccggcgcgcacctaaatccggcggtgaccattgccctgtggctgttcgcctgttttgaacgccgcaaggtgctgccgtttattgttgcccagacggccggggccttctgcgccgccgcgctggtgtatgggctctatcgccagctgtttctcgatcttgaacagagtcagcatatcgtgcgcggcactgccgccagtcttaacctggccggggtcttttccacgtacccgcatccacatatcacttttatacaagcgtttgccgtggagaccaccatcacggcaatcctgatggcgatgatcatggccctgaccgacgacggcaacggaattccgcgcgggccgctggcgccgttgctgattggcttgctgatcgccgtgatcggcgcgtcgatggggccgctaaccggctttgcgctgaatccggcgcgcgacttcggtccaaaactgtttaccagtctggccgggtggggctcgatcgcctttaccggtgggctggcgatcccttactttctggtgccgctgctggcgccggtggtgggggcgattatcggggcgtttttgtatcgcaagcttatcggccgccatctgccgtgcgaatgcggtatcgatgagtaa

SEQ ID NO: 209982 - DNA, 306 bp, Klebsiella pneumoniae
atgaatttacctaaagcactcgtattgaccgtggcggctaccacattctgtctgatgaccagcccggcgttcgcggttgaggaaaccacgccgcagaatatgacctgtcaggaatttatggatatgaacccaaaaagcatgaccccggtggccttctgggtagtgaatcgcaacaccgactttagcggcggcgactatgttgactggcatgaagtcgagaccgtttcggtaccgaaaatgctgcaggagtgccacaagaaccccgccgctaaacttggcgatctcagcgcggtcatcaaaaaataa

SEQ ID NO: 209983 - DNA, 576 bp, Klebsiella pneumoniae
atgtttatgtttagccattacaccttaaatgcgtttagcccacgcgtcttcattcgatataaacggcatgcctgcctgatggcggtattgctgtttatctgcggagcctgttgtctggcctggccgttggtcgccggctggtatctcgccacagtaaccggcatgttattgatgatctgcggcttctattcgctgtacagcctgattgtcttccgccagcagcactggaaatcacgcctggtggcgctgatcttcgccatcgcctggatcgtgctcggcctgagctttgtcgtcaatcctctcaacggtatgagcagtctggccattttatttggctttttatttgttctcggcggtatttcccgcatcgttaacggatgtcaaacccgcaaacaaagcggcgctggctggaatatttttatcggcctgttggatttacttatcgcctgcctgtggctggccatgaacccgcagcaaagctggttatttattaccgcctttatcggcgttgaaatgatatttagcgccatcggcttgttggtcctgcgcaataaaatgaagcacgctcaggcttaa

SEQ ID NO: 209984 - DNA, 642 bp, Klebsiella pneumoniae
atgaaaaaagtcattctggcgagcctgctggcaaccatgatgagtacctctccggtatgggcaacagatagcgcgacggcagcgccagccgcgccagccgcggcagccacgacgcaggtacagaaagaagccgccgatgtgctgcaggtggcggtgcagggcgcgaatgcgatgcgcgacatccagttcgcccgtctggcgctgttccatggccagccggatagcgccaaaaaactgacagacgacgccgccgcgctgctggccgccgatgatgccagctgggcgaagtttgtgaaaactgatgctaaagccaaaatgatcgccgatcgctatgtgatcattaacgcctctatcgccctgtctgaagactatgtggccacgccggaaaaagagagcgctatccaatccgccaacgaaaagctggcgaaaggcgatcagaaaggggctatcgataccctgcgtctggccggtattggcgtgattgagaaccagtatctgatgccgcttaaccagacccgtaaggcggtagcgcaggcgcaagaactgctgaaagccggtaaatattacgaagcgaatctggtgctgaagggcgctgaagagggcattgtggtggatagcgagatgctggtggcaggcaactga

SEQ ID NO: 209985 - DNA, 3243 bp, Klebsiella pneumoniae
atggcggttcgtcttattttatccgtcgttgtcgggctggcgctgagcctctcgcctgccgcgtatgccatgaaacagctggagctgaagagccattctcatatcgcggcgatcgatatcccgcttagcggtaaggagaaagcatggctggcggcgcagccgacgctgaccgtcgggacctggcttcccgagaggacgcccatcgtctatgacggcgacgagaaaagttatcagggcattaacgccgactatctggcgctgatggcgcacagcctcggactgaaggtgattatccgccagtatgacaccgagcagcaggcgctcaccgccctggccgaccgccaggtggataccctgctcactcaggtggcgcaccgggatgcgctcgccccgggcctggatcaatccgcgccgctgcttaaaacctggccgacgctggtcacctcgctgaaatcccctctgccgccgctgaccactgaccgccgcgtcacgctggcctgcacccgcgattgcgcttttttcgatattattcagcaggcgtttcccaacgccaaaatcaccctttatgatagcgactatcaggctctcgcctcggtggtcagcggcgagaatcagtattttatcggcaacaacatcaccactggccactgcatctcgaaatatttctcgcaatcgctggttatcgcgcactattttcgtcagcaggagcaacacaaccgctttgtcacccgtgacgatcggccagagctgcatcaactcttcgaccgttttatccatgccgtcgacagcgacaccgcgatgcggatcatgcaaaactggctcaaccgtggcgatctgtcgtttctcaataccccgcttacctttagccccgaagaacagcgctgggtgcagaagcatcgtcgcgtccgcctgctggtgaacccctattttccgccatttaccctggtggataacgaggatgaactgcgcggcatcatggccgatatgctgaatattgtctcactccagaccggcctgcagtttgaccctattctggtgcgcaaccgtcaggctctggcaaagcgcatggaaaaagaggactgggcgatcatgcccgccgccaccctgaccccacagccgcaggcctacgtcaccctcagcgatccgcttattaacgtggcctttgtgctggtcgcccgcggcagcgcccccgaccagcatctgctgacgcgctcggcacggatcgccctgccggtcgggcctatcgccgcccatgatctgaaagcgcgttttccgctgattaactgggtggaaacggataacgttggcgtcgccatgaagatggtagaggaaggcgaagtggatgccgccgtagcctcggagctttccgcccgctatatgatcgaccactactatccacagggtctgcactacacccgcattgatggactccccgtcgcggccattcggctggccatcccgcgcgatgaaccggtgctggccgccattcttaacaaagcgctgcaggttattccgccacgggatattctgcagatgaccgagaagtggtcgaaaatctccagtcagcaaatagagaactggagccagtacagccgccagttttaccagctgatcgcctttgcgctggtgctgatcgccatcagcctcggctggggactctccctgtgtcgggaagtgcgcaaacgtaaagactcccagcagcggctcgaggaggagctggcgcagaaggaggccctctcctgtgcgctggagcgcgaaaaagacaaagcgattcaggcgacaaaagccaagagccgctttctggccagcatgagccacgagctgcgcacgccggtgagcgccatcgtcggctttctggagctgctggcgaaaccggagctgaacggcggccagcgtaaagaggcgatcgagctggcggggtcgacggcgcaaaccctgctgggacttatcggcaatattcttgatatcgacaagattgaatcgggaaaataccaggttaccccgcagtggagcgatgtcgcacagttagtgtcgcagcagtgtcataccttcgacgcgctggcgcagcaaaagggcatcgatctgcactaccataacgcgctgcaggaagggaccatgctgtgggtcgacccgcaggcgctacggcaaatcctcaataatctcattggcaatgcgctgaagtttaccgtcgaaggcgcaattcaggtctcctgccggctgacgccggcgaatgagacacagggagagttggccctcatggttagcgacagcggctgcgggatcagtgaagcagagcaggccaccctcttccaccgctatgcccaggcgcgccagggacgccagcagaccggctccggactggggctggtcatttgcaaagagctggttgcgctgatgcagggtcgcctggagatggtcagccgtccgggcgtggggaccactttcaccatcacgctgccggtcaaggcgagccgctgcgcgatccacgcgccgcaggcgtcgcccgccagaccgcaggctctacccgggctggcgatactgatagcggacgatcaccccaccaaccggctactgctcaagcgccagctcagcactatcggctatagcgtcgatgaagcctgcgacggtgaagaggcagagaataagctcgccagcaaacattacgatctgctgataacagacctcaatatgccgaagaaagatggcctggcgctggcggcctcgctacgccgtcgctatccgggcctggtaatttggggcgtgactgccagcgcgctgccgcagtcgcgggaggcgtgtctggccagcggcatgaatatgtgtctgtttaagccggtgtcggtccagacgctgagtcatgagctcagccgtttagcggtgggccgcgcatcacctcacgctacccggcacctgaagctcagcgtgctgagcgagaatacggggggagaccaggcgctgatgaatgagatgctggagacgttccgcgatgcgtcggccgcggatttacaggctgccggacaggcaatcgcccggcatgagccgcagatttttctgcgggcgctgcaccgtctgcacggttcagcacaaattctggggattactgcgctacaacaactgtgcgccccttttgaggcaaagcggcctgattcgctgacgccggcaagctgtctggaggtggtacagcgcatcaccggcgtcatgcgcgagatcgatggcgaaatcgacgccctgatcggccgctag

SEQ ID NO: 209986 - DNA, 615 bp, Klebsiella pneumoniae
atgaatgcgataatcattgacgatcatccattggcacgtatcgccattcgcaaccttctcgacagcaacggtattaccgtcgcggcagagctcgacagcggcgctcatgccgtgcagaccgcggaaagcatgcagcctgacctgctcatcgtcgacgtcgatattccagagctcagcggtatcgaggtgctggagcagctgcgcaaacgccgctaccagggaacaatcatcatcatttccgctaagaatgaactgttctacggcaaacgcagcgccgactgcggagcaaatggttttgtgagtaaaaaagagggaatgaataatatcctcgccgcaatcgacgcagccaataatggctacagctatttccccttttcactggaacgcttctgcacccacggcatcaccgatcagaaccggctggatacgctgtcaacgcaggagatgaaggtgttccgctatattctcagcggcgtcgactacaccaccatcggcagcaaaatgaatatcagcaataaaacggtaagtacctataaggtccgtctgatggataaattaggctgcagcaccctgcttgagctatatgactttgcgcaacgcaataaaatagggtga

SEQ ID NO: 209987 - DNA, 291 bp, Klebsiella pneumoniae
atgagtagcgccgcggtgggaaaggatgtcgtccccgatgaggcgcggacccgagatatgatgcgctgtcaggattatctgcaactggatccgcgcgcctggacgccgatggtgatttggctgatgaacgatcctttttcactggagccgccggagtggaccgacttccatgaagccgagctggtgctgacgccgatcctcaccgaaatctgccgtcaggagccggatgtctggctcacctcgctgcgggaacggctcaattcttatcagcaggtgcggtcgctgaactaa

SEQ ID NO: 209988 - DNA, 273 bp, Klebsiella pneumoniae
atgaaagaggccgccgcgtttgcttttaatgtcgatgcttcgcaggtgtcaatttccgatgcgaggcagcaggatgtgaaaaccaactttgtagtcaccatcggcaaaaccagccatcgctgctatgtgacgaaggccgccgagccgaagctttacaggctgatcccgctgggcggcggtagcaccgtctcggatgccatctgcgccggcgccaacccgacgctagcgagcaaaacctgcgacgccctgtcgcaaaaagcgggccgctgctga

SEQ ID NO: 209989 - DNA, 507 bp, Klebsiella pneumoniae
atgattagcgatatccttgcgccgggcctgcgcgttgtcttttgcggtatcaacccggggaagtcctccgcccataccggctttcattttgcccatcctggcaatcgcttctggaaggtcatccatcaggccgggttcaccgatcggcagctcaggccggaagaggagctgcagctgctggatacgcgctgcggcatcaccatgctggtagagcgtccgacggtgcaggccagcgaggtcgccttgcaggagctgcgcagcggcggccgtgagctggtgcggaaaattgaggagtatcagccgcaggccctggcggtgctcggcaagcaggccttcgagctggcctttaaccagcgcggcgcgaagtgggggaaacaggccatgaccatcgggacgacccaggtgtgggtgctgcctaatcccagcggcttaaaccgggcgacgctcgataagctggtggcggcctatcgtgaactggacgatgccctggcaacccgcggccagtag

SEQ ID NO: 209990 - DNA, 1842 bp, Klebsiella pneumoniae
atggagcaaaacccgcagtcacagctgaagcttcttgtccaacgtggtaaggagcaaggctatctgacctatgccgaggtcaatgaccatctgccggaagatatcgtcgattccgatcagatcgaagacatcatccaaatgatcaacgacatgggtattcaggtgatggaagaagcaccggatgccgatgatctgatgcttgccgaaaacaccgcggatgaagatgctgccgaagccgccgcgcaggtgctctccagcgtggaatccgaaatcgggcgcacgaccgacccggtgcgtatgtacatgcgtgaaatgggtaccgtagagctgctgacccgtgaaggcgaaattgacatcgccaaacgcatcgaagacggcatcaatcaggtgcagtgctccgttgccgaatatccggaagcgatcacctacctgcttgagcagtacgaccgcgttgaagcggaagaagcccgtctgtccgatctgatcaccggtttcgtcgatccgaacgccgaagaagatatggcgccaaccgccacccacgttggctccgagctgtctcaggaagagatggatgacgacgaagacgaagacgaagatgaagacgccgacgacaacagcgatgacgacaacagcatcgacccagagctggcccgtgagaaattcgccgagctgcgtacccagtacgagctgacgcgcgacaccatcaaagccaaaggtcgtagccatgccgccgcccaggaagagatcctgaagctgtctgaagtcttcaagcagttccgcctggtgccgaagcagttcgattacctggtcaacagcatgcgcagcatgatggatcgcgttcgtactcaggaacgtatcatcatgaagctgtgcgttgagcagtgcaaaatgccgaagaaaaacttcatcaccctgttcaccggcaacgaaaccagcgaaacctggttcaacgccgcggtggcaatgaacaagccgtggtctgagaagctgctggaagtgaaagaagatgtgcagcgcggcctgcagaagctgcagcagattgaagaagagaccggcctgaccatcgagcaggttaaagatatcaaccgtcgcatgtccatcggcgaagcgaaagcccgtcgtgcgaagaaagagatggttgaagcgaacctgcgtctggttatctctatcgccaagaaatacaccaaccgcggtctgcagttcctcgacctgattcaggaaggcaacatcggtctgatgaaagcggtcgataagttcgaataccgtcgcggctacaagttctcgacctacgccacctggtggatccgtcaggccatcacccgctctatcgcggaccaggcgcgcaccatccgtattccggtgcatatgattgagaccattaacaagctcaaccgtatctcccgtcagatgctgcaggagatgggccgtgaaccgaccccggaagagctggctgagcgtatgctgatgccggaagacaaaatccgtaaagtgctgaagatcgccaaagagcctatctccatggaaacgccgatcggcgacgatgaagattcgcatctgggggatttcatcgaggataccaccctcgagctgccgctggattctgcgaccaccgagagcctgcgcgcggcaacgcatgacgtgctggccggcctcaccgctcgtgaagcgaaagtgctgcgtatgcgtttcggtatcgacatgaacaccgaccacacgctggaagaagtgggtaaacagttcgacgttacccgcgaacgtatccgtcagatcgaagcgaaggcgctgcgtaaactgcgccacccgagccgttctgaagtgctgcgtagcttcctcgacgattaa

SEQ ID NO: 209991 - DNA, 1746 bp, Klebsiella pneumoniae
atggctggacgaattccacgtgtatttattagcgatctgcttgccagaaccgacatcgtcgatctgatcgatgcgcgggtaaagctgaaaaagcagggcaaaaattttcacgcgtgctgtccgttccataacgaaaaaaccccctctttcaccgtcaacggtgaaaaacagttttaccactgcttcggctgcggggcgcacggcaatgctatcgacttcctgatgaactacgacaagctcgagttcgtggaaacggtcgaagagctggccgccatgcacaacctcgaagtgccttatgaagcaggcaacggacccagccagatagagcgccatcaacggcagaacctctaccagttactggatggtctgaatgcgttttatcaacagtctctgatgcagcccgccgccgatcctgcgcgccagtacctggcgaaacgggggttaagcagcgaggtgattacgcgctttgccatcggctatgctcccccaggttgggataacgttttaaaacggtttggcggcaatcaggaaaaccgccagtcgcttattgatgccggcatgctggtcaccaacgatcagggacgcagttacgaccgcttccgcgaacgggtgatgttccccatccgcgataagcgaggccgggtgattgggtttggcggacgggtgctgggcgatgccctgccgaagtatctgaactccccggaaaccgacatattccataaaggccgccagctgtatggcctgtatgaagcgcagcaggataaccccgaaccaccgcgtttgctggttgtcgaagggtatatggacgtcgtggcgctggcgcagtacgacattaattatgccgtggcctcgctgggtacctcgaccacggccgaccatatccagctgctgttccgggtgacgaataacgtcatctgctgctacgacggcgaccgggccggccgcgatgccgcctggcgcgcgctggagacggcgctgccgtacatgaccgatggtcgccagctacgctttatgtttctgcctgacggcgaagacccggatacgctggtgcgtaaagagggcaaagcggcgttcgaggcgcggatggagcaggctcagccgctctccacgttcttgtttaacagcctgctgccgcaggtcgatctgagtactccggacgggcgcgcgcagctgagcacgctggcgctgccgctgataacccaggtcccgggcgaaacgctgcgcatctatttgcgtcaggagttgggcaataagctgggcattttagatgacgcgcagcttgaacgattaatgccaaaacaggcggaaaatggcgcgccgcgtcccgcaccgcagctaaaacgcacgaccatgcgtatactgataggactgctggtgcaaaacccggatctggcgccgttagtcccgccgctggagggactggactcgcgcaaaatgccgggactgagcctgttcaacgaactggtgaagagctgtctggcgcagcctggtctgacaaccgggcaacttttagagcaatatcgcggcacaaaagaggcggcaacccttgaaaaactgtcgatgtgggacgatatagcagataaagacatcgctgaacaaaccttcaccgactcgctcaaccatatgtttgattcactgctggaactgcgacaggaagagttgatagctcgcgatcgcacacacggtttaagcagtgaagaacgccgggagctctggaccatcagccaggagctggcgaaaaaataa

SEQ ID NO: 209992 - DNA, 216 bp, Klebsiella pneumoniae; identical to SEQ ID NO: 136860

SEQ ID NO: 209993 - DNA, 1014 bp, Klebsiella pneumoniae
atgcgtgtactgggcattgaaacatcctgcgatgaaaccggcatcgcgatttatgacgaccagcaaggtctgttagccaaccaattgtatagtcaggtgaaactgcatgcggattacggcggcgtggtgccggagctggcatcgcgcgaccacgtgcgcaaaacggtgccgctgatccaggcggcgctgaaagaagccggtctgacggcgaaagatatcgacgccgtcgcctatacggcgggtccaggcctggtcggcgcgctgctggtcggggcgaccgttggccggtcgctagccttcgcctggaacgtgccggcgatcccggtacaccatatggaagggcatctgctggcgccgatgttggaagataatccgccggcgttcccgttcgtcgcgctgctggtttccggcggccacacccagttgattagcgtcaccggtattggtcagtatgaactgttgggcgagtcgattgacgatgcggcgggcgaagcctttgataagacggcgaagctgctgggactggattatcccggcgggccgatgctgtcgaaaatggcgtcccagggcaccgaaggccgctttgtcttcccgcggccgatgaccgaccgtccggggctggacttcagcttctccggcctgaagaccttcgccgccaacaccattcgcagcaacggcgacgatgagcaaacccgcgccgacatcgcccgggcgtttgaggatgcggtcgtcgatacactaatgattaaatgtcgccgcgcgctggagcaaaccggctttaagcgtctggtgatggcgggaggcgtgagcgccaaccgtaccctgcgggcgaagctggcggagatgatgcaaaaacgcggcggcgaggtgttctacgcccgccctgagttctgtactgacaacggcgcgatgatcgcctacgccggcatggtgcgtctgcaaaccggcgccaaagccgagctcggcgtgacggttcgcccgcgctggccgctggccgagctgcctgccgcctaa

SEQ ID NO: 209994 - DNA, 1608 bp, Klebsiella pneumoniae
atgtcatcactggatcttaaccctgaattacccgcgacaacgcggacttccggtacccgggaaaccttagaagattacaccttacgttacgccccgctgagcttccgccgctggggtccgggcgtcgtcgcggtcaccgcgctgggcggcatcgcctatctggccgacttttccatcggcgccagcatcggtatggcctggggcaccagcaacgccatctattcgatcctggtggcggcgctggtgatcttcctcaccggcattccgctggcgatcaccgccgcgcgctacaacattgaccttgacctgatcacccgcagcgctggcttcggctatttcggctcggtgatcaccagcattatttttgccggcttcacctttatcttcttcgccctcgaaggctcgatcatggcccagggcctgctggtgggcctcgggatcccgctgtggatgggatatctgatcgccaccctgatggtgctcccgctggtggtctatggcatgaaagccctgacccgcctgcaggtgtggaccacgccgctgtggctggtgctgatggtggtgccggtggtgtggctgattgtcaaagatccgcagctggtggacggcttcctgcatttcgccggtaaaaacagcgcgtcgacggtggatattaccgccatcatgctcggcgctggggtatgcctgtcgctgatcatgcagattggcgagcaaattgattacctgcgctttatgccgcctaagaccgcggagaatcgtaaaagctggtggctggcggtcttttccgccggtccgggctgggtggtgttaggggcgatcaaacagatcatcggcgccttcctcggcttctatctgttgacccgtttcccggcggtgcacaataccgaaccggtgcagcagttcgtcagcgtcttcgataacctggtgcccggctggctggccctgacgctggcggtggtgctggtggtgatctcgcagatcaaaattaacgtcaccaatgcctactccggctcgctggcgtggaccagcgcctggacccgcaccaccaaacgctatccgggacggattatttttgtggtggtcaacctggcgattgccctggcgctgatggaaggcgatatgttcagcgccctgtcgtggatcctcggcttttactccaacttcgctatcgcctgggtcgtggtggtggcgaccgacatctcctttaataaaggcttgctcaagctggcgccggcgcagccggagtatcgccgcggcatgatctacaacgttaacccggtgggcgtggtctcctttggtctggccgccgggctgtcgatctgcgccttcttcggtctgctgggggcgacgctggcgccgttctcgccgctgattgcgctggtcgttgcctttgtcatgaccccgctgatggggctccttacccgcgggcgctactatattaagcaggtggatgacggcatcgccgagccgcgctatgacgcggcggggaacgcctccaccaccgtgtatcaatgcgttagctgtgaggaagagtacgagcgcccggacgtgatgcactcgcacaagcatcagggagccatctgctcgctgtgtaaaagtatggagtag

SEQ ID NO: 209995 - DNA, 618 bp, Klebsiella pneumoniae
atgaactcttataaacacccgctgcgcgtcggcgtcggcggcccggtcggctccggtaaaaccgctctgctggaagcgctgtgtaaagcgatgcgcgatacctggcagctggcggtggtcactaacgacatctataccaaagaagatcagcgcatcctcaccgaagcgggcgcgctggcgcctgaacgcatcgtcggtgtggaaaccggcggctgcccgcatacggcgatccgcgaagatgcctcaatgaacctcgccgccgtggaagcgctgagtgaaaagttcggtaacctcgaccttatcttcgtggaaagcggcggcgataacctgagcgccaccttcagcccggagctggcggatctgaccatctacgtcatcgatgtggccgaaggggagaagatcccgcgcaaaggcggaccggggatcaccaaatccgatttcctggtgatcaataaaaccgaccttgccccctatgtgggcgcgtcgctggaggtgatggcgagcgatacccagcgtatgcgcggcgatcgcccatggaccttcaccaatctgaagcagggcgacggcctgagcaccattatcgccttcctcgaagacaaaggcatgcttggcaaatag

SEQ ID NO: 209996 - DNA, 711 bp, Klebsiella pneumoniae
atgctcatcatgaccaccacgctcacagccactagcatgtcgacagcggaacaacgcctgcggctgatgcagctggccagcagcaacctgccggtagggggttacagctggtcccaggggctggagtgggctgtggaagccggctgggtgctggacgtcgcggccttcgagcgctggcagcgacgccagatgacggaaggcttttttaccgttgacctgccgctgttcgcccgcctgtaccgcgcctgcgaacaaggcgatatcgctgcggcccagcgctggaccgcctatctgctggcctgccgggaaactcgtgaactgcgggaggaagagcgcaaccgcggcgcggcgtttgcccgtctgctgagcgactggcagccggactgtccgccgccgtggcgctccctgtgccagcaaagccagctcgccgggatggcctggctcggcgtgcgctggcgtatcgccctgcccgagatggccctcagcctgggctatagctggattgagagcgccgtgatggccggcgtcaagctggtccccttcggccagcaggccgcccagcagctgattttacgtctttgtgaccactacgcggccgagatgccccgcgcgctggccgcgccggacggcgatatcggatcggccaccccgctcgccgccatcgcctctgcccggcatgaaacccaatactctcgattattccgttcctag

SEQ ID NO: 209997 - DNA, 477 bp, Klebsiella pneumoniae
atgctttatttaactcaacgtctggagatccccgccgccgcgaccgccagcgttacgctgccgattgatgttcgcgtcaaaagccgggttaaggtcaccctcaacgatggccgggaagccggcctgctgctgccccgcggcctgctgctgcgcggcggcgatgtgctcagcaacgaagaaggcaccgagtttgtgcaggtgattgccgctgatgaaggggtgtcggtagtgcgctgcgacgatccttttatgctggcgaaggcctgctaccacctcggcaaccgtcacgtgccgctgcagattatgccgggcgagctgcgctaccatcacgatcacgtgctggacgatatgctgcgccagttcggcctgacggtgacctttggccagctgccgttcgagccggaagccggcgcttacgccagcgagagccacggtcatcatcatgctcatcatgaccaccacgctcacagccactag

SEQ ID NO: 209998 - DNA, 1704 bp, Klebsiella pneumoniae
atgagtaatatttcacgccaggcctatgccgatatgttcggccccaccgtcggcgacaaggtgcgcctggcggataccgagctgtggatcgaggtggaggacgatctgaccacctacggggaagaggtcaaattcggcggcggcaaagtgatccgcgacggcatgggccaggggcagatgctggccgccgactgtgtcgacctggtgctcaccaacgcgttgatcgtcgatcactgggggatcgttaaggccgatatcggcgtgaaggacggccggatcttcgccatcggcaaagccggtaaccccgacatccagcccaacgtcaccatccccatcggtgcctcgacggaagtgattgccgccgaaggaaaaattgtcaccgccggcgggatcgatacccatattcactggatctgtccgcagcaggcggaagaggcgctggtctccggcgtgaccaccatggtcggcggcggcaccggcccggccgcgggcacccatgccaccacctgcaccccgggcccgtggtatatctcacgcatgctgcaggcggccgacagcctgccggtcaatatcggcctgctgggcaagggcaacgtttctcagccggatgccctgcgcgagcaggtggcggcgggcgttattggcctgaagatccatgaggactggggcgccaccccggcggcgatcgattgtgcgttaaccgtcgccgatgaaatggacatccaggtcgccctgcacagcgacaccctgaatgaatccggttttgtggaagacaccctcgccgccatcggcgggcgcaccatccacaccttccataccgaaggggccggcggcggccatgcgccagacatcatcaccgcctgcgcccacccgaacattttgccgtcgtccaccaacccaacgctgccctacaccctcaacaccatcgatgaacatctcgatatgctgatggtctgccaccatctggacccggacatcgctgaggacgtggcctttgccgagtcgcgcattcgccgggaaaccatcgctgcggaagacgtgctgcacgatctcggcgccttctcgctcacctcctccgattcgcaggccatgggccgcgtcggggaagtgattctccgcacctggcaggtggcgcatcgcatgaaggtgcagcgcggagcgctggcggaggagaccggggataacgacaacttccgcgtgaagcgctacatcgccaaatacaccatcaacccggcgctgacccacggcatcgcacacgaagtcggatccattgaggtgggtaagctggctgacctcgtggtctggtcaccagccttcttcggcgtgaaaccggccaccgtgatcaaaggcggcatgatcgccatcgcgccgatgggcgatatcaatgcctctattccgaccccgcagccggtgcactaccgcccgatgtttggcgcgctgggcagcgcccgccatcactgccgcctcaccttcctgtcgcaggcggcggcagccaatggcgttgccgagcggctgaacctgcgcagcgcgatcgccgtggtgaaaggctgccgtacggtgcagaaagccgacatggtgcacaacagcctgcagcctaacatcaccgtcgacgcccagacctatgaggtgcgggtggatggcgaacttatcaccagcgagccggcagacgttctgccgatggcgcaacgatattttctgttttaa

SEQ ID NO: 209999 - DNA, 321 bp, Klebsiella pneumoniae; identical to SEQ ID NO: 136867

SEQ ID NO: 210000 - DNA, 303 bp, Klebsiella pneumoniae
atggaactgaccccccgagaaaaagacaagctgttgctgtttaccgccgcgctggtggcggagcgtcgcctggcccgcggcctgaagctcaactatccggagtccgtggccctgatcagcgcctttattatggaaggcgctcgggacggcaaaagcgtggcctcgctgatggaggaaggccgtcatgtcctgacccgcgagcaggtgatggagggcgtcccggaaatgatcccggatatccaggtcgaagccaccttcccggacggctcgaagctggtcaccgttcacaacccgattatctga

SEQ ID NO: 210001 - DNA, 825 bp, Klebsiella pneumoniae
ttgcacggcaccgtgttaccaccactcaaaaaaggctggcaggctacgctggatctccgctttcaccaggccggcggcaagaccgttctcgccagcgcccaacacgtcggcccgctgaccgtccagcgcccgttttacccggaagaagagacctgtcacctctatctgcttcacccgcccggcggcatcgtcggcggtgatgagctgacaattagcgcgcaccttgcccccggctgccatacgctgataaccatgcctggcgccagcaagttttaccgcagcagcggcgcgcaagcgctagttcgccagcagttgacccttgccccgcaggcgaccctggagtggctcccgcaggatgccatcttctttcccggggcgaatgcccggctgtttactacctttcatctttgcgcctccagcaggctgctggcctgggatctgctctgccttggccgcccggtgattggcgaaaccttcagccacggcaccctcagcaaccggctggaggtatgggtggacgatgagccgctgctggtcgagcgcctgcagctgcaggagggagagctctccagcgtcgccgaacgtccctgggtcggcactttgctgtgctatccggctaccgatgccctgctcgacggggtgcgcgacgcgctggcgccgctcggcctctacgccggcgccagcctgaccgaccgcctgctgacggtgcgtttcctcagtgacgataatctgatttgccagcgggtgatgcgcgacgtatggcagtttctgcgccctcatctcaccggtaaatctcccgtacttccccgaatctggctgacttaa

SEQ ID NO: 210002 - DNA, 618 bp, Klebsiella pneumoniae
atgagtgcaatcgcgcctggactggtactcctcgcctacctctgcggctccatttccagcgccattctggtatgtcgccttgctggcctgcccgacccacgcgacagcggctcaggcaaccccggggccactaacgtactacgaattggcggaaaaggggcggccgtagcggtacttatttttgatgtgctgaagggcatgctcccggtgtggggcgcctgggcgctgggccttacgtcgttctggctggggttagtggcgattgccgcctgcgtgggccatatctggccagtcttctttcatttccgcggcggtaaaggcgtcgccacggccttcggcgctatcgcccccatcgggctcgatctgaccggggtgatggccgggacctggctgctgaccatcctgctcagcggttactcttccctgggcgctatcgtcagcgcgctgatcgccccgttctacgtctggtggttcaaaccgcagtacacctttccggtgtcgatgctctcctgcctgatcctcctgcgccatcacgacaacattcagcgtctgtggcgccgccaggagagcaaaatctggacccgcgtgaagaagaaaaaaacgccagagcagaagtaa

SEQ ID NO: 210003 - DNA, 384 bp, Klebsiella pneumoniae
atggatattgtatttatagagcaactttcggtaatcaccaccatcggtgtttatgactgggaacaaaccattgagcagaagctggtgttcgatatcgaaattgcatgggataaccgcaaggcggccgccagcgatgatgtcagcgattgcctcagctatgctgatatcagcgagcgcgtgatcgcgcatgtggagggggggaaatttgcgttagtggagcgggtggcggaagaggtggccgacctgctgctggaaacattccagtcgccatgggtgcgcataaaagtcagcaaacctggcgccgtggctcgcgcggcaaacgtcggggtgattattgaacgtggccttaatctgaaacaaaacttttcaggtcatacttgttaa

SEQ ID NO: 210004 - DNA, 822 bp, Klebsiella pneumoniae
atgagcgatatacactcgctgctggtggcggcaatattgggtgtggttgagggtttgacagagtttttacctgtttccagtaccggtcatatgattattgttggtcacctgctggggtttgaaggtgataccgcaaatacctttgaagtggtgattcagttaggttcgatactcgccgtggtggtgatgttctggcgtcgcctgttcggcctgatcggcatccatttcgggaaaccgccggcgcatgaaggccagggcagcggccgtttgtcgcttatccatatccttctcggcatgatccccgcggtggtgatggggctgattttccatgacaccattaaatccttgtttaacccggtgaacgtgatgtacgccctgattgtcggcggcgtattgctgattgcagcggaagtgctgaagccgaaacagccgcgcgcggtcgggattgacgatatgacctaccgtcaggcgttcgtcatcggctgctttcagtgcctggcgctgtggccaggtttctcccgctcgggggcgactatctccggcggcatgctgatgggcgtcagccgctatgcggcctcggagttctctttcctgctggcggtaccgatgatgatgggcgccaccgtgctggacgtctacaagagcatcggcttcctgaacatgggcgatgtcccgatgttcgccgtcggcttcgtgatggcgtttatcgtggcgctgattgcgattaaaaccttcctgcagctgatcaaacggatctcgttcattccgttcgctatctaccgctttatcgtcgcggcagcggtgtacgtggtcttcttctaa

SEQ ID NO: 210005 - DNA, 1242 bp, Klebsiella pneumoniae
gtgaagagttatctggtcggtggcgcggtgcgtgacgcgctgctagggctgccggtcaaagaccgagactgggtggtggtgggcgccaccccgcaacagatgctagacgcgggctatcaacaggtaggccgcgattttcccgtgttcctccatccgcaaagccgggaagagtatgccctggcccgcaccgagcgcaaatccggcgcgggctataccggttttacctgctatgccgccccggacgtcaccctcgaagccgatctgctgcgccgcgacctgacggtcaacgccctcgcccaggatgccgacggcgcaattatcgacccctacggcggacagaacgatctccgtcagcgcctgctgcgccatgtctctcccgcgtttagtgaagatccgctgcgcgtgctgcgcgtcgcgcgctttgccgcccgctacgcccacctcggttttcgcattgccgaagagactcaggccctgatggccgcgatggttgaggccggcgagctggcgcatttaacgccggagcgggtgtggaaagagacggaaagcgcattaactactcgcaacccgcaggtctttttccagacgctgcgcgactgtcaggccctcaaggtgctgttcccggagattgacgccctgtacggcgtgccggccccggcgaaatggcatccggaaatcgacaccggcctgcacaccctgatgaccgtcacgatggccgcgatgctgtcgccggatgtcgacgtacgtttcgccaccctgtgccatgacctcggcaaagggctgacgccgaaggcgctctggccgcgtcaccacggccatggtccggcgggagtcaagctggtggagcagctctgcgcgcgtctgcgggtgccgaacgatatccgcgatctcgcgaaactggtggcggagtaccatgacctaatccacaccctgccaattctgcagccgaaaacccttgtcaaactcttcgacagcattgacgcgtggcgcaaaccgcagcgcgtgcagcagatcgcgctcaccagcgaagccgacgtccgcggacgcaccggtttcgaggccagcgattacccgcaggggcgcctgctgctggaggcctgggaagtggcgcagtcggtctccactaaagaggtcgtggcggcgggctttaaaggggcggaaattcgcgaggagctgacgcggcggagaattgcggcggtagcgcagtggaaggaacagcgttgcccccagccgcaaggctga

SEQ ID NO: 210006 - DNA, 621 bp, Klebsiella pneumoniae
atgccaaaattacgcctgattacttttactttgctcgcgcttagcgccgccacggcggttcacgcagaagaaaagcgctacgtttccgatgagctgaacacctgggttcgcagcggcccgggcgataattatcgtctggtcggcaccatcaacgccggggaagaagtgtcggtactgcaaacgaacgacagcaccagttacgcgcaaattcgcgatagcaacggccgtaccgcctggatcccgctgaaagagctgagcaacgagcccagcctgcgcacccgcgtcccggatctggaaaaccaggtcaagacgctgaccgataagctgaataacatcgatgccacctggaaccagcgcacggcggatatgcagaagaaagtcgccggcagcgacagcgtgattaacgcgttgaaggacgagaaccaaaagttgaaaaacgagctggttgtcgcgcagaagaaggtgaatgcggcaaatctgcagcttgatgataaacagcgcaccattatcatgcagtggtttatgtacggcggcggtgtgctgggcgtcggtctgctgctcggtctggtgctgccgcatctggtgccaagccgcaaacgtaaagaccggtggatgaactaa

SEQ ID NO: 210007 - DNA, 1299 bp, Klebsiella pneumoniae
atggctcaagaaatcgaactcaagtttatcgtcgctcaggatggggtagagacgctgcgcgagcagctcaatgcgctcgaggcgaaacatacgcccgcgggccagttgctgaacatttattacgaaaccgccgataactggctgcgtcgtcacgatatgggcctgcgcatccgcggcgatcaggggcgttatgagatgacgctgaaaatcgccggtcgggtggtcggcggcctgcaccagcgcccggaatataatattccactggataaaccggagctggcgcttgagcgcctgccggcggaggtctggccgcaaggggaacttccggccgcgctggcggagcatgtccagccgctgttcagcaccgattttgcccgtgaacgctgggtgatccaggaaggaaagagtgagattgagattgccctcgatcgcggcgaagtaaaggcgggcgaacatcaggagccgatctgcgaactggagctggagctgctcgccggggagaccgccgatctgctgcgcctcgcgcatcgtttgctggagagcggcgtcctgcgtcaggggagcctgagcaaagccgcgcgcgggtatcatctggcgcaaggtaacaatgagcgtccggtgacccggctggcggtgctgccggtggcagcgaaggccagcgtggagcaagggctggaggcggcgctggagagcgccctggcgcattggctgtatcacgacgagatctggctgcgcggcaacgcaaaagccaaagcggaaattctgctggcgatagcccgcgtgcgccatgccctcgtgctgttcggcggcatcgtgccgcgtaaggcgaccacccacctccgcgcgttgctgaacgacgccgacgccgttctgctggctgcggacaccgccgacgaagcgttattccgcaccgaggtcgttggcgccaaactggccctgaccgaatggctggtccagcgcggctggcgtccgttcctcaacgaggcgggagagaaaaaaatagccggctcgttcaaacggtttgccgatattcacctctcgcgggtggcggccgagctgcgcagcgccgtgcagcatctggcggtagaagatgccgctgaccagttgccgaagctgtcccgcgacatcgacagcgtccagctgctggcgggcgcctatggcgacgccgtcgcgccgtggctggagaactggcaggaacttcagcgtgcgatagagcatgacgaccgcagcgtgtttgaatatttccgtcgccaggcgctggctgccgagccgttctggctgcatagtggaaaacgataa

SEQ ID NO: 210008 - DNA, 2838 bp, Klebsiella pneumoniae
atgatgccgctttctccgcagttacagcagcactggcagacggtcgctgaccgtctgccaacggattttcccgttgccgaactgagcccacaggccaggtcggtgatggcattcagcgattttgtcgaacagagtgtgatcgctcagccgggctggctgaatgagcttgcggactccgcgccggcggcggaagagtggcggcattacgaagcctggctgcaggagcgcctgcaggccgtcactgacgaagcggggttgatgcgagagctgcgtctcttccgccgccagatgatggtccgcatcgcctgggcgcaggcgctgtcgctggtgcgcgaagaagagacgctgcagcagctgagcgtcctggcggagaccctgattgtcgccgcccgcgactggctgtacgccgcctgctgtaaagagtggggaacgccatgcaacgccgagggtcagccgcagccgctgctgatcctcgggatgggaaagctgggcggcggcgagctgaacttctcttccgatatcgatctgatctttgcctggccggagcatggcgccacccgcggcggccgccgcgagctggataacgcccagttctttacccgcctggggcagcggcttatcaaggcgctcgaccagccgacgcaggacggctttgtttatcgggtggacatgcgcctgcggccgtttggcgacagcgggccgctggtgctcagctttgcggcgctggaagattattaccaggagcaggggcgggactgggaacgctacgcgatggtgaaagcgcggatcatgggcgataacgacggcgcctacgccagcgaactgcgcgcgatgcttcgccccttcgtcttccgccgctatatcgacttcagcgtgatccagtcgctgcgtaacatgaaaggcatgatcgcccgtgaagtgcggcgtcgcgggctgaaagacaacatcaagctcggcgccggcggcattcgtgaaattgaatttatcgttcaggtctttcagctgatccgcggcggtcgcgaacctgcgctgcagcagcgcgcgctattgccgacactggcggcgattgatgagctgcatctgctgccggaaggcgacgcgacgctgctgcgcgcggcctatctgttcctgcgccggctggaaaacctgctgcaaagtatcaacgatgaacagacccagaccctgccacaggatgaactgaaccgcgccagactggcgtgggggatgcataccgatgactgggagacgctgagcgcgcagctggcgaaccatatggccaacgtacggcgggtgtttaatgaactgatcggcgatgacgaggctcagtcgccagatgagcagctggccgagtactggcgcgagctgtggcaggatgcgctggaagaagatgacgccagtccggcgctggcgcatttaaacgacgccgaccgccgcagcgtgctggcgctgattgccgatttccgcaaagagctggatcggcgcaccatcggcccgcgcggccgccaggtgctggatcagctgatgccgcatctgctgagcgaaatctgctcgcgcgccgatgcgccgctgcctctggcgcggatcacgccgctgttgaccggcatcgtcacccgcaccacctatcttgaactgctgagcgaattccccggcgcgctgaaacacctgattacgctctgcgcggcatcgccgatggtcgccagccagctggcgcgccacccgctgctgctggatgagctgctggatcccaacaccctctatcagccgacggcgaccgatgcctatcgcgacgagctgcgtcagtatctgctgcgggtgccggaagaggatgaagagcagcagctggaggcgttgcgccagttcaagcaggcgcagcagctgcatatcgcggcggcggatatcgccggcaccctgccggtgatgaaggtcagcgaccatttaacctggcttgccgaagcgatcctcgatgcggtggtgcagcaggcatgggggcagatggtggctcgctacggcctgccgacccacctgcacgatcgccaggggcgcggcttcgccgtcgtcggctacggtaagctcggcggttgggagctgggctacagctccgatctcgacctggtgttcctccatgactgcccggcggaggtgatgaccgacggcgagcgggagattgacggccgtcagttctacctgcggctggcccagcggatcatgcatctgttcagcacccgcacctcgtccggtattctctacgaagtggacgcccggctgcgcccttccggcgcggcggggatgctggttaccaccgctgacgcgtttgccgactatcagcagaacgaggcctggacgtgggagcatcaggcgctggtgcgcgcccgcgtggtctatggcgacccggcgttgcaggcgcgctttgacgccattcgtcgcgatatcctgaccaccccgcgggagggcgcaaccctgcagaccgaggttcgcgagatgcgcgagaagatgcgcgcccacctcggcaacaagcatcccaatcgttttgatatcaaagccgatgccggcgggatcacggatattgaatttattacccagtatctggtcctacgctatgccagcgacaagccgaagctgacccgctggtctgataatgtgcgtattctcgagctgctggcgcagaacgacatcatggacgaagaggaagcgcgcgccttaacgcacgcgtacaccaccttgcgtgacgcgctccatcacctggccctgcaggagctgccgggacacgtggcgccagaggccttcagccgggagcgcgagcaggtcagcgccagctggcagaaatggctgatggcttaa

SEQ ID NO: 210009 - DNA, 1434 bp, Klebsiella pneumoniae
atgaaagtaacgctgccggagtttgaacgtgcaggagtgttggtggtgggtgatgtgatgctggaccgctactggtacggccccaccagtcgtatttccccggaagccccggtgccggtggtgaaggtggaaaatatcgaagaacgtcctggcggcgcggcaaacgtagcgatgaacattgcctcgctgggggcaacctcgcgcctggtgggattgaccgggattgatgacgccgcccgcgcgctgagccaggcgctggccaacgtcaatgtgaagtgcgacttcgtctccgtcccgactcacccgactatcaccaagctgcgggtgctgtcgcgcaatcaacagctgatccgcctcgactttgaagagggcttctccggcgtcgatccgcagccgatgcacgagcgcattcagcaggcgctgggctctattggcgcgctggtcctttcggactatgccaaaggggcgctgaccagcgtccagaccatgatccgactcgcacgcgaagcgggcgtgccggtgctgatcgatccgaaaggcaccgatttcgaacgctatcgcggcgcgacgttgctcaccccgaacctctctgagtttgaagcggtggtgggcaagtgccaggatgaagcgcagatcgttgagcgcggcatgaagctcatcgccgaattcgaactgtcggcgctgctggtgacgcgctctgagcaggggatgacgctgctgcagccggggcgtccgccgctgcatatgccgacccaggcccaggaagtgtacgacgtgaccggcgccggcgacacggtgattggcgtactggcggcgaccctggcgtccggcaacaccctggaagaggcctgctatttcgctaacgccgcggcgggcgtggtggtcggtaagctgggtacatccaccgtttcccctgtcgagctggaaaacgcggtccgcggccgggctgagaccggctttggcgtgatgagcgaagaggagctcaaacaggcggttgcggcggcgcgcaagcgcggcgagaaagtggtgatgaccaacggcgtcttcgacattctgcatgccggtcatgtctcctatctggcgaatgcgcgcaagctgggcgaccgtctgatcgtggcggtcaacagcgatgcctccaccaaacgtctgaaaggcgaaacccgcccggtgaacccgctggaacagcggatgatcgtgctgggggcgctggaagccgtcgactgggtggtctccttcgaagaagatactccgcagcgcctgatcgctggcatcctgccggatctgctggtcaagggcggcgactacaaaccggagcagatcgccggcagtgaagaggtctgggcgaacggtggcgaagtgctggtgctcaactttgaagatggctgctcaactaccaatattattaagaaaatacaaaaagatagcgacaaataa

SEQ ID NO: 210010 - DNA, 198 bp, Klebsiella pneumoniae; identical to SEQ ID NO: 138695

SEQ ID NO: 210011 - DNA, 273 bp, Klebsiella pneumoniae
atgattgacccgaaaaaaattgaacaaatcgcccgccaggtccatgagtcgatgccaaaaggacttcgcgatctgggtgaggatgttgagaagaaaatccgccaggcgctacagtcgcagctgacccgtctggatctggttagccgcgaagagtttgacgtgcagactcaggtgctgctgcggacccgggaaaaactggcgctgctggagcagcgcctgaatgacctcgaaaaccgcccggcggcgacgccgggcagcgaagagcagcagtaa

SEQ ID NO: 210012 - DNA, 654 bp, Klebsiella pneumoniae
atgaatcagacgctcctttcttcttttggtaccgcttttgaacgtgtggaacacgctttgaacgccctgcgcgaaggccgcggcgtgatggtgcttgatgatgaagaccgtgaaaacgaaggcgatatgatcttcgccgctgaaaccatgaccgttgagcagatggcgctgaccattcgtcacggcagcggcattgtgtgcctgtgcctgaccgaagaacgccgcaaacagctggatctgccgatgatggtagagaacaacaccagcgcctacggcactggcttcaccgtgaccatcgaagcggccgaaggtgtgaccaccggcgtctccgctgccgaccgcgtgaccaccgtccgcgcggccatcgccgacggcgcgaaaccttccgatcttaaccgtccaggtcacgtcttcccgctgcgtgcgcagccgggcggcgtactgacccgcggcggccacaccgaagccactatcgacctcgtgaccctggctggctttaaaccagcaggcgtgctgtgcgagctgaccaatgacgatggcaccatggcccgcgcgccggagtgcatcaagttcgctcagcagcacaatatggcggtagtcacgattgaagatctggtggcctatcgtcgcgaacatgagcgtaaagccagctaa

SEQ ID NO: 210013 - DNA, 771 bp, Klebsiella pneumoniae
atgtcatcacccttaatattgacgctgttagccggtagcgcaaccttcattggcgccatattcggcgtgattggccagaaaccctctaaccgcctgcttggcttctccctcggctttgccgccgggattatgctattgatttcgttgatggaaatgctgcctgccgcgctggccgccgagggcatgtcgccgctgctcggctacggaatgtttgttgtcggcctgctgggctactttggccttgaccgcctgctgccgcacgcccacccgcaggatctgatgactcccgccatgccgcgcccgcgcaacttacgccgcaccgctattcttctgacgctggggatcagcctgcataactttccggaagggatcgccacctatgtcacggccagcaacaacctcgagcttggcatgggcgtcgcccttgccgtcgccctgcacaatattccggaaggactggcggttgccggaccggtgtatgccgccaccggctcgcgcagcaaagcggtgctctgggccgggctttccggcatggcggaaattttgggcggcgtgctggcgtggttgattctggggagcctggtctcgccgctggtgatgggcgcgatcatggctgccgtcgccggaattatggtggcgctgtcggtcgatgaactgatgccgctggcgaaagagatcgatccgcaaagcaatccaagctacggcgtcctgtgcgggatgtcggtcatggggctgagcctggtggtactccagacgatgggcatcggttaa

SEQ ID NO: 210014 - DNA, 792 bp, Klebsiella pneumoniae
atgtcccgtacccgaatgcccgcgttgtttctcggccatggcagcccaatgaacgtgctggaagacaaccgttatacccgcgcctgggctcaactgggcgaaaccctgccgcgtccgaaagcgatcgtggtggtctctgcgcactggtttacgcgcggtacgggcgtaacggcgatggagacgccgaagaccattcatgacttcggcggttttccgcaggcgctgtatgacacgcattatccggcgccgggctctccggcgctggcgcaacggctggtggagctgctctcgccggtgccggtcaccctcgatacagaagcctggggatttgaccatggatcgtggggcgtgctgattaaaatgtatccgcaggcggatatcccgatggttcagttgagcatcgacagcaccaaaccgccggcctggcatctcgaaatggggcggaagctggcctcgctgcgtgatgaaggcattatgctggtggccagcggcaacgtggtgcataacctgcgcaccgcccgctggcatggcgagaacacgccgtacccttgggcagagtccttcaataactacgtgaaagcgaatctgcaatggcaggggctggacgagcaacacccgctggttaactacctggcacacgaagggggctcgctctccaatccgacggcggagcatttcctgccgctgctgtatgtcctggggacgtgggatggcgttgaggcgatgacgatcccggtcgatggcatcgagatgggctcgctgagcatgctgtcggtgttggttggcgcctga

SEQ ID NO: 210015 - DNA, 1161 bp, Klebsiella pneumoniae
atggaaagagtcagtattaccgagcgcccggactggcgcgagaaagcgaccgagtacggtttcaacttccataccatgtacggcgagccctactggagcgaagaggcgtattacaagctgaccctcgcgcaggtggaaaagctggaagcggtcaccgctgagctacatcagatgtgcctccaggtggtggaaaaagtgatcgccagcgatgagctgatgaccaaattccgcatccctaaacacacctggggttttgtgcgccagtcgtggaaaaccaaccagccgtcgctctactcacgtctcgacctggcctgggatggcatcggcgaaccgaagctgctggagaacaatgccgacaccccgacctcgctgtatgaagcggccttcttccagtggatctggctggaagatcagctcaacgccggcaagctgccggcgggcagcgaccagttcaacagtttgcaggaaaagctgatcgatcgcttcggcgagctgcgcgagcagtttggctttcagctgctgcatatggcctgctgccgcgataccgttgaagatcgcggtaccgtgcagtatctgcaggactgcgccgctgaagcggggctggcgacggaattcctctacgttgaagatatcggcctgggcgaaaaaggccagtttaccgatctgcaggatcaggtgattggcaatctgttcaagctctatccgtgggagtttatgctgcgggagatgttctccaccaagctggaagacgctggcgtacgctggctggagccggcgtggaaaagcattatctccaacaaggcgctgctgccgatgctgtgggagatgttccccaatcaccctaatctgctggcggcctacttcagcgaagatgctcacccggagatggagaagtacgtcattaagccaatcttctcccgcgaaggcgctaacgtgtcgatcgttgaaaatggcaaagtggtggaggcagtagaaggcccgtacggggaagaaggcaccatcgtgcaggcgttttacccgctgccgaagtttggcgatagctatacgctgattggcagctggctcatcaacgaccagcctgcagggatcggtattcgcgaagaccgggcgctgatcacccaggatctgtcgcgcttctatccgcacattttcgtcgaataa

SEQ ID NO: 210016 - DNA, 672 bp, Klebsiella pneumoniae
atgaaacggacaaaaaatattaatcattcgtcgttccgcaaaagctggagcgcacgccatctgacgccggtcgcgctggccgttaccgcggtctttatgctcgccggttgtgaaaaaagcgacgaaacggtgtcgctgtaccagaacgccgatgactgctccgccgccaaccctggcaaagcagccgaatgcaccacggcctacaccaacgcggtaaaagaggcagagcgcactgcgccgaagtatgccacccgcgaagactgcgtcgccgagtttggcgaaggccagtgccagcagacgccagcccaggcgggcgtcgccccggaaaaccaggcgcaggcgcaaagcagcggcagcttctggatgccgctgatggccggctacatgatgggccgcctgatgggcggcggcatggcgcaacagcagccgctgttcagctcgaaaaatccggccagcccggcctacggtcagtacactgacgccagcggcaagagctatggtgccgcccagccgggccgcaccatgaacgtgccgaaaactgcgatggcgccgaagccagccacaaccaccaccgtcacccgcggcggctttggcgagtcggtagcgaaacagtcgaccatgcagcgtagcgccgcaggctcaacgtcctcttctcgctcaatgggcggctaa

SEQ ID NO: 210017 - DNA, 1470 bp, Klebsiella pneumoniae
atgaagaaattgctccccattcttatcggcctgagcctgaccgggttcagcgccatgagccaggcggaaaacctgcttcaggtttaccagcaggcacgcatcagcaaccccgatctgcgtaaatcggcagccgatcgtgacgccgcgttcgaaaagatcaacgaagcgcgcagtccattactgcctcagcttgggctgggagcggattatacctataccaatggctatcgcgacagcaacggcgtcaactctaacgtcaccagcggttcgctgcagttaacgcaggttctgtttgatatgtcgaaatggcgcgccctgacgctgcaggaaaaaacggcagggattcaggatgtcacgtatcagaccgatcagcaaacactgattctgaataccgcgacggcctattttaaagtgctggccgccatcgacacgctctcctataccgaagcgcagaaacaggctatttaccgccagttggatcaaaccacgcagcgctttaacgtaggcctggtggcgatcaccgacgtacagaacgcccgttcacaatacgatgccgtgctggcgaacgaagtcaccgcgcgtaacgatctcgacaacgccgtcgaaggactgcgtcaagtcaccggtaattactatccggagctggcctccctgaacgtgaacggcttcaaaaccaacaagccgcaggcggtcaacgccctgctgaaggaagcggagaaccgcaacctgtcactgctgcaggcgcgtctgagccaggacctggcccgcgagcagattcgtcaggcgcaggacggccatttgccgaccctgaacctttccgcctctaccggggtctcgaatacgcgttacaacggttcgaaaaccaataccccgctcgcctacaacgacagtgataacgggcagaaccaaatcggcctgaacttctctctgccactgtatcagggcggcgcggtgacctcgcaggtcaagcaggcacaatacaacttcgttggcgccagcgagcagctggaaagcgcccaccgcagcgtcgtgcagactgtgcgttcatcgtttaacaacgtgaatgcctccatcagcagcatcaacgcctacaaacaggcggtggtctctgcgcaaagctccctggatgccatggaagctggctactcggtgggtacgcgtactatcgttgacgtcctcgacgccaccactacgctgtataacgctaagcagcagctctcgaatgcgcgctacaactacctgatcaacgagctgaacattaagtcggcgttaggtaccctgaacgagcaggatctggtcgccctgaacaacacgctgggtaaacccatctccacctccgcagatagcgtcgcgccggaaaatccgcaacaggatgccaccgctgatggctacggcaacactaccgcggcggtgaagccggcgtccgcacggaccacccagagcagcggcagcaatccgttccgtcagtaa

SEQ ID NO: 210018 - DNA, 633 bp, Klebsiella pneumoniae
atgagcaaacccacgcagcagggaattaccttctccaaaaatgatgtagaaattattgcacgcgaaacgctatatcgtggttttttttcgctcgatttataccgttttcgccaccgcctgtttaacggcggcatgagtggcgaaatcacccgtgaaatttttgagcgcgggcacgccgccgtcttgctaccctttgacccggtgcgcgacgaagtggtgctggtcgaacaaatccgtatcgccgcctatgataccagcgagagcccgtggctgctggagatggtcgccggcatgattgaagcgggtgaaacggtggaagatgttgcccgtcgggaagcgctggaggaggccgggcttgaagttgggcggacgaaaccaatattaagctatctggccagtcccggcggcaccagcgaacggttatcgatcctggtgggagaagttgatgcatcgacggcaaaaggcattcacggcctggccgaggaaaacgaggatattcgggtgcatgtggtgagtcgggagcaggcttaccagtgggtagaagaggggaaaatcgacaacgcagcctctgtcatcgccttgcaatggctgcaattgcattatcacaatttacgaaatgagtggacaaaatga

SEQ ID NO: 210019 - DNA, 423 bp, Klebsiella pneumoniae
atgaagcgttatacacctgacttccctgagatgatgcgcctgtgcgagaccaacttcgcgcagttgcgccgcctgttgccgcgaacggatgcagcgggtgagaaggtaagctatcaggtgggaagcgcgcagtatcggttaacgatagttgaatcgacccgctacactactctggtggcaatagagcagactctgcctgcagtgagctactggagcctgccatcgatgaccgtccgcctctaccatgacgccatggtggccgaagtgtgttcgagtcagcagatctttcgcttcaaagcgcgatatgattatcctaataaaaagttgcatcaacgcgacgaaaagcatcaaattaaccagtttttggccgactggctgcgttactgtttagcacatggagcgatggcgattccggtttgttag

SEQ ID NO: 210020 - DNA, 828 bp, Klebsiella pneumoniae
ttggaaagcctgttaaacctacctctggctggtgaggccagagtcaggatattacaaattactgatactcacctgtttgctgaaaagcatgaaacgttgttaggcatcaatacctgggatagctatcaggccgtactgtcggccattcatgcctcacagcgtccatgcgatctgattgtcgcaacaggcgatctggcgcaggaccactcctccgcggcctatcagcattttgctgagggcatcgcgagttttgctgcaccctgcgtctggctaccgggcaaccatgatttccagccggcgatgtacagcaccctgcaggaggcgggcatttcccctgccaagcgcgtgtttctcggcgatcgctggcagatcctgctgctcgacagccaggtgtttggcgttccccatggcgagctgagcgacttccagctggagtggctcgaacataagctggcggaggcgccggagcgctataccttactcctgctgcaccatcatccgctgccggccggctgcagctggctggatcagcatagtctgcgcaatgccggcgcgctggacagcgcgttgagcgcctggccgcgggtgaagcatcttttgtgcggccatattcatcaggaactggatctcgactggaatggccggcgcatgatggcgacgccgtcgacctgcgtccagtttaaaccgcactgtgccaatttcactctggatacggtgtcaccgggctggcgctggctggagcttcaccctgacgggacgctgaccaccgaagtgtgccgcctggaaggcgccgcgtttcatccggatattgcttcagaaggctactga

SEQ ID NO: 210021 - DNA, 576 bp, Klebsiella pneumoniae
atggcgacgctcctttatctgcatggctttaacagctctccgcgctcggcgaaggcgacggcgttaaagacctggctggcgcagcactatcctgagatcaccatggtggtgccggagttgccgccttacccggcggaaacggcggagctgttggagtccatcgtgctggagcacggaggcgagccgctgggggtcgtagggtcgtcgctgggcggctactacgcgacctggctttcgcagtgctttatgctgccggcggtggtggttaacccggcggtgcggccgtttgaactactaaacaattttctcggccacaatgagaatccatacaccgggcagcaatatgtgctagagtctcgccatatttacgatctcaaagtcatgcaaatcgacccgctcgaagcgccggatttactctggctgctgcagcagaccggggatgaagtgcttgattaccgccaggccgttcattactacgcctcttgccggcagacggtagaggagggcggtaatcacgcatttgtcggctttgacgatcatttcactcagattatcgaatttctcggcctgcgctaa

SEQ ID NO: 210022 - DNA, 1896 bp, Klebsiella pneumoniae
atgacgcaatcttcatataatgctgatgccattgaggtactcaccgggctagagccggtgcgccgccgtccgggcatgtataccgacaccactcgtcctaaccatcttggtcaggaagttattgataacagtgtggatgaagcgctggcaggccacgccaaacgcgtggaagttatccttcatgccgaccagtccctggaggtcattgacgatggtcgtgggatgccggtcgacatccacccggaagagggcgtgccagcggttgagctgatcctctgccggctgcatgcgggcggtaagttttccaataaaaactatcagttttccggcggcctgcacggggtggggatctcggtagtcaacgccctgtcaaaacgcgtggaggtcaacgtgcgtcgcgacggtcaggtctacagcatcgcctttgaaaatggtgaaaaagtggaagacctgcacgtcaccggcacctgcggcaaacgcaataccgggaccagcgtccatttctggccggacgaaagcttcttcgacagcccgcgcttttccgtttcacgtctgacccacctgttaaaagcgaaagcggtgctgtgcccgggcgtggaaattgttttccgcgaccaggtgaacaacagcgagcagagctggtgctatgccgatggcctgaacgattacctgagcgaagcggtgaacggcctgccgctgctgccggaaaaaccattcgtcggcgccttctccggcgagacggaggcggtggactgggcgctgctgtggctgccggaaggcggcgaactgctgaccgagagctacgtgaacctgatcccgactatgcagggcgggacgcacgttaacggtctgcgtcaggggctgctcgacgcgatgcgtgagttctgcgagtaccgtaatatcctgccgcgcggcgtgaagctgtcagcggaagatatctgggatcgctgcgcgtacgtgctgtcggtgaagatgcaggatccgcagttcgccgggcaaaccaaagagcgcctgtcgtcgcgccagtgcgcggcgttcgtctccggcgtggtgaaggacgccttcagcctgtggctgaatcagaacgtgcaggccgcggagctgctggcggagatggccatctccagcgcccagcgccgtctgcgcgcggccaaaaaagtggtgcgcaaaaagctgaccagcggtccggcgctgccgggtaagctagcggactgtaccgcccaggatctgaaccgtaccgagctgttcctcgtcgaaggggattcggcgggcggctcagccaagcaggcgcgcgatcgcgaatatcaggcgatcatgccgctgaagggcaagatccttaatacctgggaagtctcttccgatgaagtgttagcttcgcaagaagtgcacgacatttcggtggcgattggtattgacccggatagcgatgatttaagccagctgcgctacggtaaaatttgtattctggcggatgcggactccgatggtctgcacattgccaccctgctgtgcgcgctgttcgtaagacatttccgtaccctcgtgaaagaggggcacgtctatgtggcgctaccgccgctgtaccgtatcgacctcggtaaagaggtttactacgcgctgacggaagaagaaaaaaccggcgtgctggagcagctaaagcgcaagaagggcaagccaaacgtccagcgctttaaagggctcggtgagatgaacccgatgcagctgcgcgaaaccacccttgacccgaatacccgccgcctggtgcagctggtgataagcgatgaggacgagcagcagaccacggcgataatggatatgctgctggccaaaaagcgttcggaagatcgtcgcaactggctgcaggagaagggcgatatggcggatctggaagtgtaa

SEQ ID NO: 210023 - DNA, 315 bp, Klebsiella pneumoniae; identical to SEQ ID NO: 136632

SEQ ID NO: 210024 - DNA, 582 bp, Klebsiella pneumoniae
atgagcaacatcctgattatcaatggggcgaaaaagttcgcgcactctaatggtcaactgaacgacaccctgaccgaggtcgcggagagttatctgcgcgacgccgggcacgatgttaaaagcgttcgcgccgaaagcgagtacgacgtaaaagaagaagtacagaatttcctgtgggccgatgtggtgatctggcagatgccgggctggtggatgggcgctccgtggacggtgaaaaaatatatggatgacgtctttaccgaaggccacggctcgctgtacgccagcgatggccgtacccgctccgacgccagcaaaaaatatggctcaggcggcctggtgcaggggaaaaaatatatgctttctctgacctggaacgcgccgatggaagccttcaccgacaaagaccagttcttccacggcgtcggcgttgacggcgtttacctgccgttccataaagccaatcagttcctcggcatggaggcattgccaacctttatcgccaacgacgtgattaaaatgcctgatgtcccacggtatatcgcagaatatcgcaagcatctggcggaaatttttggttaa

SEQ ID NO: 210025 - DNA, 1350 bp, Klebsiella pneumoniae
atgaaacgacttgcccgcctgagcctgcgcctgcgcctgacgctgctgtttgccgtactgaccaccgccgcctggggaatggccagcgttatcgcctggcagcagaccagcaaaaagctggataagctgttcgatacccagcagctgctgttcgctcgccgcctgagcgtcatgcatttcgatgaactgcgcgccccgcccgccttgctcggggaaaagaaaaaggtacgccacgggcacatcgacgacgacgcgctggcgttcgccatcttcacccgcgacggcaaaatggtgcttaatgacggcgagaacggagaggatattcagtggaattcgcagcgcgagggattcagcgatggctatctgcgtgacgacgatgacgagtggcgtttcctgtggttaaccaccgccgacggccgctaccgcatcgccgtcggccaggagtgggattaccggcgcgaaatggcgatggatatcgtgacctcgcagctcaccccgtggatggttgccctgccgctgatgttcgtgctgctcatcgtgctgttaagccgcgagctggcgccattgaaaaatctggcgcgcacgctgcgcctgcgcgcgccggactcggcggattcgctcagcgtggagaagatccccgccgaagttcgcccgctggtcgaagcgctgaatcagctgttccgacgcactcacgacgccatgctgcgcgagcgtcggtttacctctgatgccgcccatgagctacgcagcccgctggcggcgctgaaggtgcagaccgaagtcgcccaactctccctggacgatcccgaagggcgtgagaaagcgttggatcagctccaccaggggatcgatcgcgccacccgactggtggatcagctgctgacgctgtcgcggctggactcgctcgcccaactggatgatgtgcagcaggtcgctatcgccgatctgctgcagtcggcagtgatggagatgtatcacccggcgcagcagtccgggattgagctgcgcctgcatcttaatgccagccatatcgtccgcaccggccagccgctgctgctcagtctgctggtgcgcaatctgctggataacgccgtacgatatagcccgtgcggcagccaggtcgatatcacgctcaacgcccgcgagttccgggtgcgcgataacggcccaggcattaacccgcaggcgctctcgcgcattggcgagcgtttttatcgcccgccggggcaggaggcgccgggcagcggcctgggcttgtcgatcgtccggcgcatcgcctcgctgcacggcatgcaggttgattttgccaacgcgcgcgacggcggcttcgaggcccgcgtgtactggtag

SEQ ID NO: 210026 - DNA, 660 bp, Klebsiella pneumoniae
atgcgcatattactggtggaagatgacaagcttatcggcgacggcatcaaagccgggctgagcaaaatgggctttagcattgactggtttaccgccgggctggagggcaaaaatgccttatacagcgccccctacgacgccgcaatccttgacctcaccctacccggcatcgatggcctcgatattctgcgcgaatggcgcgataaaggccgccatgagccggtgctgatcctcaccgcccgcgatgccctcagccagcgggtggagggcctgcgcctgggcgccgatgactacctgtgcaaacctttcgccctgattgaggtggcagcgcgcctcgaagcgttgatccgccgcgcgcacggccagagcagcagcgaactgcgccacggcaaggtgatcctcgatccgaaccgcttaaccgccagcctcgacggcgaaagcctggcgctgaagccgaaggagttcgccctgctggaactgcttatgcgcaacgccgggcgcgtattgccgcgtaagcttatcgaggaaaagctctacacctgggacgacgaggtctccagcaacgccgtggaagttcacgtccatcatctgcgccgcaagctcggcagcgactttatccgtaccgtccacggcatcggctataccctgggtgacgcatga

SEQ ID NO: 210027 - DNA, 396 bp, Klebsiella pneumoniae
atgaaaaaaattgctgcgatgaccgcgattattgctttagtttccatgccggtactggccgccgggcagggaggattcaccggaccgtctactaccactaccacccaggctggcggcttcaccgggccgagcggcgcggtgaccaccgtggcgaacgccaagtcgctgcgtgatgacacctgggtgaccctgcgcggtaaaatcgtcgagcgcatctctgatgacctgtataaattccaggatgcttccggggtgatcaatgtcgatatcgaccacaagcgctggaacggcgtgaccgtcggcccgcaggacacagtagaaattcagggggaagtcgataaggactggaactcggtagaaatcgacgttaaacagatccgtaaaatcgcgccataa

SEQ ID NO: 210028 - DNA, 870 bp, Klebsiella pneumoniae
atgaacgatattaaggccagcccggcgtatgtcgggcgcttccagcgcgtctgtaggtacattgcgcgccatcttgatgagccgctgtcgctggagacgctgagcgcgatagcgcacagttcgccttaccattttcaccggcaatttagcgcttataccggcattccattgtaccggtatattcagtggttgcgtctgcgacgcgcctgttggcgcctggcgttcaacccccgcgataaagtcatcgatattgcccttgatgccggatttcagaatgcggagtcgttcagtcgtgccttccgtaccgcgtttgaccaaagcccgacccaattccgtcaacaaccggactgggccgagtggcatcgacgcgtaccgaaacatacgctacaggagcaaacgtcgatggacgtcaacattatttcgtgcccctccacccggatagccgtactgcaacatcgcggtagcccggaccttgtcaacgccaccgccgcgcgttttatcgcctggcgtaagacgagcggactatcgcccgtcgccaccagcgatacctgggggatcgcctgggacgatccgcagaccaccccgcaggaggcatttcgttttgatatctgcggtacggtcgatcggccggttggtgaaaacgcctttggcgtgattaacggcgaaatccccggcggacgctgcgccgtcgtgcgccatcacggctcgctggacacgctggcgaacagcgtttggtttctctatcgcgactggttacccgcttcaggcgagacgttacgggattttccggtgtacttccgttacctcaattttgtccatgaggtggctgagcatgaactgcaaaccgatatttatctgccgctggcctga

SEQ ID NO: 210029 - DNA, 2259 bp, Klebsiella pneumoniae
atgagcgatatggcagagcgccttgcgctgcatgaatttacggaaaatgcttacctgaactactccatgtacgtgatcatggacagggcattaccgtttattggcgatggcttaaaaccggtccagcgtcgcatcgtctatgcgatgtccgagctggggctgaacgccagcgcgaaattcaaaaagtccgcccgcaccgtcggcgacgtgttgggtaaatatcacccgcacggcgacatcgcctgctatgaagcgatggtgctgatggcgcagccgttctcttaccgctatccgctggtggatggtcagggaaactggggggcgccggacgatcccaaatctttcgccgccatgcgttacaccgaatcccgcctgtcgaagtatgccgagctgctgctcagcgagctggggcaggggacggtcgactgggtgccaaactttgacggcacgctgcaggagccgaaaatgctgccagcgcgtctgccgaacatcctgctgaacggcaccaccggcatcgcggtaggcatggcgaccgatattcctccgcacaacctgcgggaagtggccaaagcggcgattacgctgattgagcagccgaaaaccaccctcgacgaactgctggatatcgtacaggggccggatttcccgaccgaggcggagatcatcacctcgcgggcggaaattcgcaaaatctaccagaacgggcgcggctcagtgcgcatgcgtgcggtgtggagtaaagaggacggcgcggtggtgatcagtgcgctgccgcatcaggtctccggcgccaaagtgctggagcagattgcggcgcagatgcgcaataaaaagctgccgatggttgacgatctgcgcgacgaatcggaccacgaaaacccgacccgtctggtgattgtcccgcgctccaaccgggtggatatggaacaggtgatgaaccacctgttcgccaccaccgatctggagaagagctaccgcatcaacctcaatatgatcggccttgacggccgcccggcggtgaaaaacctgctggagatcctcagcgagtggctggtgttccgtcgcgataccgtgcgtcgccgtctaaaccatcggttagagaaagtgctgaagcgcctgcatatcctcgaaggtttgctggtggcgtttcttaatatcgatgaagtgattgagatcatccgcactgaagatgaaccgaagccggccctgatgtcgcgctttggcatcagcgaaacccaggcggaagcgattctggaattaaaactgcgccacctcgccaaactggaagagatgaagatccgcggcgagcagagcgagctggaaaaagagcgcgaccagctgcaggcgattctggcgtctgaacgtaagatgaacaacctgctgaaaaaagagctgcaggccgatgccgatgccttcggcgacgaccgtcgctcgccgcttcacgagcgtgaagaagcgaaagcgatgagcgagcatgacatgctgccgtctgagccggtgactatcgttctgtcgcagatgggctgggtgcgcagcgccaaaggacacgacattgacgcccagggcttgagctataaggcgggcgacagctggaaagcctcggcgaagggcaagagcaaccagccggtggtgtttatcgataccaccggacgcagctatgccatcgatccgattactctgccttccgcgcgtggccagggtgaaccgcttaccggcaaactgaccctgccgccgggcgcgaccgtggagcatatgctaatggaaagcgacgatcagaaactgctgatggcttccgacgcgggctacggtttcgtctgtaccttcaacgatctggtggcgcgcaaccgtgccggtaaagcgctaatcaccctgcctgacaacgcgcacgtgatgccgccgctggtgattgaggatgagtccgatatgctgctggccatcaccgccgccgggcggatgctgatgttcccggtcagcgatctgccgcagctgtcgaaaggcaagggcaacaaaattatcagcattccggcggcggaagccgcagccggccaggacggtctggcacatctgtttgttctgccgccgcagagtacgctgaccattcacgtcggcaaacggaagatcaaactgcgtccggaagagctgcaaaaagtcaccggcgagcgcggccgccgcggttcgctgatgcgcgggctgcagaaaattgaccgcgtggaaattgactcgccgcgtcgtgccgcggcaggcgatagcgaagagtaa

SEQ ID NO: 210030 - DNA, 738 bp, Klebsiella pneumoniae
atgctattcatttttcgagtaattttcgtggtcatttattgcatcgtagtgtgcgtacttggctgtctgtactgcttgttcagcccacgtaatccaaaacacgttgccactttcggccatctgtttggccgtttatctccggtatttggcctcaaggtagagctacgcaaacccgccgacgcggaaagctatggcaacgcgatctacatcgctaaccaccagaacaactatgatatggtgacggcgtcgaatatcgtgcaggctccgacggtcaccgtaggtaaaaagagcctgctatggatcccgttctttggccaactgtactggctgacgggcaatttgctgattgaccgtaataaccgaaccaaagcgcacggcactattgccgaagtcgtcaacgcttttaaaaagcgtaaaatttcgttctggatgttcccggaagggacccgtagccgcggccgcggcctgctgccgtttaaaaccggggcttttcacgcggctattgccgctggggtgccgattattccggtgtgtgtctcgaatacatcgaataaaataaagctcaatcgctggaacaacggtctggtgattgtggaaatgctgccgccggtagataccactcagtttggtaaagacaacgtgcgcgcgctggcgacgcattgccgcgagctgatggccgccaaaatcgctgatctggacaacgaagtggccgagcgcgaagcggctggaaagcaataa

SEQ ID NO: 210031 - DNA, 1413 bp, Klebsiella pneumoniae
atgtcactcagtcggcgtcagtttattaaggcttccggcgtagcgctgtgcgctggcgccgcgccgctgaaggcccatgccgccggccagcagcctgcgctgccggttccgccgctgctggaatctcgtcgcggccagccgctgtttctgacgctgcagcgttcccactggtcgtttacccccggcacccgcgcccccgtctgggggatcaatggccgctatatggggccgacgatccgcgtctggaacggagacgacgtcaagcttatctacagcaaccgcctgacggagaacgtggcgatgaccatccgcggtctgcaggtgcctggcccgctgattggcggcgcggcgcgcatgatgtcgccgaacgccgactgggcgccggtgctgcctatccgccagagcgcggcgacgctgtggtatcaggccaacacgccgaaccggatggcgaaacaggtttacaacggtctggcgggcatgtggctggtggaagacgaggtcagcaagaacctgccgatccctaaccactatggcgtcgatgacttcccggtgattattcaggataaacggctggataacttcggcacgccggaatatagcgaaccgggcagcggcggctttgtgggcgacacgctgctggttaacggcgtgcagagcccgtatgttgaagtgtcgcgcggctgggtgcgcctgcgcctgctgaacgcttccaactcccggcgctatcagctgcagatgagcgatggccgactgctgcatgtgatttccggcgatcagggattcttgccggcgccggtttcgctcaagcagctatcgctggccccgggggagcggcgtgaaattctggtcgatatgactaacggcgatgaagtatccattacctgcggcgaagcggcgagcatcgtcgaccgtatccgcggtttttttgaaccgtcaagcatcctggtctccacgctggtgctgacgctgcgtccgaccgggctgctgccgctggtgaccgacagtctgccggtgcgcctgctgccgaccgagctgctctccggtacgccgatccgcagccgggatatcacccttggcgacgatccgggcatcaacggccagctgtgggatccgcagcgtatcgatatcacggcgcagcaggggacctgggagcgctggacggtgcgcgccgaccgcccgcagtcgttccatattgaaggggtgatgttccagatccgtaatgtcaacggctcgtctcctttcccggaagatcgcggctggaaggacaccgtgtgggtcgacgggcaggttgagctgctggtctattacgctcaaccgtcgtggccgcacttcccgttccagtatctgagtcagacgctggagcttgccgatcgcggctcgatcggccagatgctggtgaatcccgcgccgtaa

SEQ ID NO: 210032 - DNA, 2184 bp, Klebsiella pneumoniae
atgagcgcaatatccctgatccaaccggatcgtgaccttttttcctggccgcaatactgggctgcctgttttggccctgcgccttttttaccgatgtcgcgtgaagagatggatcaacttggctgggatagctgcgacattattctggttaccggcgacgcctatgtcgaccacccgagcttcgggatggctatctgcggccgcatgctggaagcgcagggtttccgggttgggatcatctcccagcctgactggaacagcaaagacgactttatgcgtctgggaaaaccgaacctgttcttcggcgtgaccgccggcaacatggactcaatgatcaaccgttacaccgccgaccgtaaactacgtcatgacgatgcctatacggcgggtaacgtggcgggcaaacgtccggaccgcgctaccctcgtctatacccagcgctgtaaagaggcgtggaaagatgtgccggtgatcctcggcggcatcgaagccagcctgcgtcgtaccgcccactatgattactggtccgacaccgtgcgccgctcggtgctggtggactccaaggccgatatgctaatgttcggcaacggcgagcgtccgctggtggaagtggctcatcgcctggcgatgggcgaaaccatcgaccagatccgcgatgtgcgcaataccgccatcatggtgaaagaggcgctgcccggctggagcggcgtggactccacccgtctggatacgcccggtaaaattgaccccatcccgcatccgtacggtgaagatctgccgtgcgccgataacaaaccggtcgcgccgaaaaaacaggaagcgaaaagcattactgtgcaaccgccgcggcccaaaccgtgggaaaaaacctatgtgctgctgccttccttcgagaaggtgaaaggcgataaggtcctgtacgctcacgcctcgcgcattttgcaccacgaaaccaaccccggctgcgcccgggcgctgatgcaaaagcacggcgagcgctacctctggatcaacccgccggcaatcccgctctccaccgaagagatggacagcgtcttcgcgctgccgtacaagcgggtgccgcatccttcctatggcgatgcgcgtattccggcgtatgagatgatccgcttctcaatcaacatcatgcgcggctgcttcggcggctgttcgttctgctcgatcaccgagcacgaaggacgcataatccagagccgttctgaggattcgatcattaatgagatcgaagccattcgcgacaccgtgcccggctttaccggggtgatctccgatctcggcgggccaacggccaacatgtatatgctgcgctgtaaatcgccgcgcgctgagcagacctgccgccgtctctcctgcgtctatccggatatttgcccgcacatggataccaaccatgagccgacgatcaatctttatcgccgcgctcgcgaactgaagggcatcaagaagatccttatcgcctccggggtacgctatgacatcgcggtcgaagatccgcgctatatcaaagagctggcgacccaccacgtcggcggctatctgaagatcgccccggagcataccgaagagggaccgctgtcgaagatgatgaagccgggaatgggcagctacgaccgctttaaagagctgttcgacacctattcgaagcaggcgggtaaagagcagtatctgatcccgtactttatctccgctcatccggggacccgtgatgaagatatggtgaacctggcgctgtggctgaagaagcatcgcttccgtctcgaccaggtgcagaacttctatccgtcgccgctggcgaactcgaccaccatgtattacaccggcaagaacccgctgggtaaaattggttataagagcgaagaggtggtggtgccgaagggcgataaacagcgccgtctgcacaaagcgctgctccgctaccacgatccggcaaactggccgctgatccgtcaggcgctggaggcgatgggcaagaagcacctgattggctcccgtcgcgactgcctggtgccagcgccaaccctggacgaaatgcgtgaagcgcgtcgccagaaccgccatactcgtccggcgctgaccaagcacacgccgatcgcccatcagcgccagacgcctgccgctgcgggcgcgaaaaaacgcgttaagccgaaggccgtatcacgctaa

SEQ ID NO: 210033 - DNA, 528 bp, Klebsiella pneumoniae
atgacgccggtcatcctgtcgcgacaacaactggaccagctctgggagatagaccgcagcgaaattatcgatacgctctaccgtctcgataacggtcagctgcgggcttatcgggaatattatgacgtgcgtggctgggaccctcacgatcgtcaggtttatactccgattcacgaggcctgttacgatcgcggcggtatttttttcgccttttttgacgatgagcagatgattgccgcagcggcgctggatacgctgcctcgcggcatgaatggcgagctgcgccagctattattcttttatgtcggggcgggaaagcgcggccagggctgggggcggcgactgtttcagtatgccctgcaccagctgccagaaatgggggcgtccggcctctatatctcgtcgatccccaacaaaaacaccgtcgatttttatctggctcagggatgtcgcttagcggataagcccgacccggcgctgtttgcgctggagccagaggatattcatctggtctgccatcgcctttaa

SEQ ID NO: 210034 - DNA, 828 bp, Klebsiella pneumoniae; identical to SEQ ID NO: 136643

SEQ ID NO: 210035 - DNA, 1164 bp, Klebsiella pneumoniae
atgaataatttcgacctgcataccccaacccgcattctgtttggcaaaggcgcgattgaaaagctgcgtgaacagatcccggcggaagcccgcgtactgatcacctacggcggcggcagcgtcaaaaaaacaggcgtcctggatcaggtcctcaccgctctgaatggcctggatgtccttgaatttggcggcatcgagccgaacccgtcttacgaaaccctgatgaatgcggtgaaactcgcccgggaagagaaagtgaccttcctgctggcggtcggcggcggttcggtgctggatggcaccaagtttatcgctgcagcagcccactacgacgcggatatcgatccgtgggaaattctggaaacctatggcagcaaaattgccagcgccattccaatgggctcggtactgactctgccggcgaccggttctgaatccaacaaaggcgcggtcatatcgcggaaaaccaccggcgacaaacgcgcgtttatgtcttcgcacgtccagccgcagttcgcgatcctcgatccggtttatacctataccctgccgccgcgccaggtcgcgaacggcgtggttgacgccttcgtccataccctcgagcagtacgtgacctacccggttgacggcaaaatccaggaccgcttcgccgaaggcattctcctgaccctgatcgaggatggcccgaaagccctgcaggaaccggagaactataacgtgcgcgccaatattatgtgggcggcgacgcaggcgctgaacggcctgatcggcgcaggcgtgccacaggactgggcgacgcatatgctcggccacgagctgacggcgatgcacggcctggatcacgcccagacgctggctatcgtgctgccggcgctgtggaatgagaaacgcgatgccaagcgcgagaagctgctgcagtatgccgagcgcgtgtggaatattaccgaaggctctgacgaccaacgtatcgatgccgccatcgccgcaacgcgtcagttcttcgagcagatgggcgtgccgacccgcctttccgattacggtctcgacggtagctccatcccggcgctgctggcgaaactggaagagcacggcatgactaaactgggcgaacatcaggatatcaccctggacgtcagccgccgtatctacgaggctgcacgctaa

SEQ ID NO: 210036 - DNA, 900 bp, Klebsiella pneumoniae
atgcaacacgcagagatatgtcggacattaacggagaagattaacctgctgaaagataagcacgaaatgttaagttcgttgctgcctgacgtccgtttgctgtacggaacgcaaccggggccccggacgccggtgatgtatcagccggggatcgtttttctcttttcgggccataaaattggttatatcaatgagcggacttttcgctacgatacaaacgaatatttactgctgaccgtgccgctacctttcgagtgcgaaacctttgccaccccggaggtgcccctcgccgggatgcgcctgaacgtcgatatcctgcaactgcaagagctgctgatggatattggcgaagatccgctgtttcagcccgcggtcgcctccagcgggataaactccgcggtactctcggaggatattctgtgcgctgccgaacggctgcttgacgtgatggagcggccgctggacgcacggatccttggcaagcaaatcgtccgcgaaattctgtattatgtgctgacggggccctgcggcggcgcgctgttggcgctggtcagccggcagacccacttcagcctgataagtcgcgtgctcaagcatatcgaaagccagtacaccgaaaacctcagcgtcgatcggctggcggcggaagcgaatatgagtgtgtcagcgtttcaccataattttaaagcggtgaccagcacttctcctttgcagtatctgaaaaactaccgtttgcataaagcacgaatgctgatgatccatgacggcatgaaggccagcgcggcggcgatgcgcgtgggatatgaaagcccttcgcagttcagccgcgagtttaagcgctacttcggtttgacgccgggagaagacgccgcgcgtattcgcacgatgcaggggatgtaa

SEQ ID NO: 210037 - DNA, 660 bp, Klebsiella pneumoniae
atggttgtcattcaagagattgtcgccgcgctgtggcaacatgattttgccgcattggcgaaccctcacgttgtgggcgttgtatatctggttatgttcgcgaccctgtttctggaaaacgggctgctgcccgcctcctttttaccgggagacagcctgctgctgctcgccggcgcgctgattgctaaaggcgtcatggactttgtgcccactatcgccattctgaccgccgccgccagcctcggctgctggctgagctatgtgcaagggcgctggctgggcaatacgcaaacggtgaaaggctggctggcgcatctgccgcataagtaccatcagcgcgccacctgcatgtttgaccgccacggcctgctggcgctgctcgcgggccgttttctggcgtttgtccgcaccctgctgccaaccatggccgggatttctggcctgccgaaccgccgcttccagttcttcaactggctgagcgccctgctgtgggtctgtgtggtgacgggtcttggctatgcgctgagcatgatcccgtttgtgaagcgccatgaagatcaggtgatgacctgtctgatgatcctgccgattgccctgctgctggctggcctgctcggcacgctgttcgtggtcattaaaaagaaatattgcagcgcctga

SEQ ID NO: 210038 - DNA, 1188 bp, Klebsiella pneumoniae; identical to SEQ ID NO: 136648

SEQ ID NO: 210039 - DNA, 732 bp, Klebsiella pneumoniae
gtgggtaataatttgatgcaggcggatctctccgtttggggtatgtatcatcatgccgatattgtcgttaaggtggtgatgattggcctgattctggcgtcggtcgtcacatgggccatcttcttccgtaaaggggcggaaatcctcgccagcaagcgtcgcctcaaacgtgaacagcagcagctggcggaagcccgctctctcgatcaggccagcgatatcgccagcgcctttgaggcgaaaagcctcaccacccagcttatcaatgaagcgcagaacgaactcgaactctctgccggtgccgaagacaatgaaggcatcaaggaacgaaccggttttcgccttgagcgccgcgttgcggcggttggtcgccatatggggcgcggtaacggctatctggcgaccatcggcgccatttccccgtttgtgggcctgtttggtaccgtctggggcatcatgaacagctttatcggcatcgcccagacccagaccaccaatcttgcggtggtagcgccgggcatcgcagaagcgctgctggcgacggccatcggcctgttcgccgccatcccggcggtggtcatctataacatcttcgcccgcatgatcggcagctacaaggcctcgctcggcgacgtcgccgctcaggtactcctgctgcaaagccgcgatctggacctcagcgccagcggcgtgaagccggtgcgcagcgcgcagaaattacgggtaggttga

SEQ ID NO: 210040 - DNA, 426 bp, Klebsiella pneumoniae
atggcgatgcgtcttaatgaaaacctggacgataacggcgaaatgcatgagatcaacgtgacgccgtttatcgacgtcatgctggttctgctgattatctttatggtggccgcgccgctggcgacggtcgacgtgaaggtcaatctgcctgcctcctccagccagccgcaaccgcgaccggaaaaacccatctacctgtcggtgaaggcggataagagcatgttcctcggcaacgacccggttaccgaagcgaatatgattaacgccctggatagcctgaccgccggcaaaaaagataccaccgtcttcttccgcgcggataaaaccgtcgattacgagacgatgatgaaagtgatggataccctgcatcaggcgggctatctcaagatcgggctggtgggcgaagagaccgtcaaagcgaagtaa

SEQ ID NO: 210041 - DNA, 1419 bp, Klebsiella pneumoniae
gtgaatcacgataataaactgtcatttgcggagaagctgggatatggcatgggggatgcagcctgcggtatcgtttactcttcggtaaccatgtttctgacatggttttatacggatatttacgggctttctgctgccgcagtcggagtgatgttcctggtgacgcgggttctggatgcgattaccgatccgctaaccggcattgttgcagaccgtgtaaagacccgctggggccattttcgcccgtggcttatctggtttgccgtaccttatgccgtgctggcggtaatgaccttcacgactccggaatttggcgcatcgggtaaactggtttatgcctacctgacctacaccttactcatgctgtgttacacctttatcaatattccctactgcgcattgggcggagtcattacgcgtgatgagaaggatcgcctttcagcccagtcatatcgttttacgatctcatctctggccggtctgatggtttctgtcgcaaccctgttcctggtggattttttcggtaaagaaaataagcagtttggttttcaggcgacaatgggaatcatgggcgcgatcgctattgtaatgctggctttttgcttcttctctaccaaagaacgcgtggctccagctgttgaacagcaggggagcatacgcgaagacctccgtcagctgctggcgaatgaccagtggcgtattgtggcgataattacttttttctccagtatggccggggttatgcgcagcgccgccacgctctattatgcaacctacctgatgttaggcggtgtggagtcagcggcgggaacggccatgaaatcagcatttgtttccaccagtgtcgttggcacgattatcggcagcatcgccgccggatggctggccaagcgctatcgcgcggtatcgctgtttaaaaatatcaacctcctgctggtcctggttggcgtcgtaatgttctttgtgccgccgacctggctgccggtggtgttccctttatacttcctggtcggcttcttccatcagatgtaccagccgtttaaatggaacatgatggccaacgctgccgattatggcgaatggaagtttggccgtcgcatcacgggattatcctattccggtaatctgtttgctttgaaaatgggcatggcggttgctggcgccgccgtaggtttttcgcttgggctatttggctatcaggcgggcgtaacggcgcagactccgctggcgacaatgggaattgtggggctgttaaccctcggtccatcactatcttacctgctcctgtggtggctggcgcgtttctataagctggatgacaaaatgatgcagacaattcagcgcgagctgtccatgcgtcagcagcaggggcattcagagacgcatttgccgctaaacgccgttccggaaaaggcttga

SEQ ID NO: 210042 - DNA, 1524 bp, Klebsiella pneumoniae
atgaccccttctgaataccagaatcctatcttatgcgccgattattccgacccggatatcgtgcgcgtaggcgatgatttctttatggtctcttccagttttaaccatgtgcccgctttaccgatcctgcattcaacggacctggttaattggactatcatcaaccacgttatggatgaactgccgctacctggttatgaccggtatcagccgggtaagggcgtatgggcgccgtcgattcgctggcacgatggcaagctgtgggtctgcttcagcacgccagatgaaggtatttttatctgccataccgaggatccgtggggggaatggagcgctccgcactgcctgcgcgaggccagaggttggatagatccctgcccgttctgggacgacaatggtcaggcctggttggtacatgccttcgcccatagccgcagcggcatcaagcataaactgcagttgtttgcgatggcgccggacgccagcgaattgctgggcgaagggcagattatctatgacggctgctgcgatttacctacccttgaggggccaaaggtttatcaacgcgccggttggtactacatctttgctcctgcgggcggggttgaaaatggctggcagacggtactgcgcgcgcgccagatgacggggccctgggaagccaaaaacgtgcttttccagggaaacacctcgataaatggaccacatcagggcggctgggtggagggtgaggagggcgaatgctggtttgttcatttccaggacttacacctctatggccgcgtggttcacctccagccgatgtcctggggtaacgatggctggccgcgtatcggtgagcagattggcaactgcggcgtcggacagccggttttacgttggccgcgtcctaaagggttaacgccttcaccggcattggcgccgcaaaccagcgactattttgcgcaaggccaaccgggaatacagtggcagtggcaggctaaccccagccctgagtggctgctgccagcgaaaggcgaacttcgattacgctgcgtcccattatccgaagtcgatggacagagagcgttatactgggcgccgcagctgttgctgcagaaattcccggcgctaacttttagcgcgaaaacaagcgtaacgttatatgccgctcaggacggtgatgccggaggcctgatcgtatacggcgaacgctacgccgctttgctggtggagtttgggcaagggggttaccggctcgtgtggcgacacggttggatgagcgatgcgggcgtggtgcgcgaaactcgtcaggttcttgctgagcttaagtgcggcaagtgtcagctgcaggtggccgtaggcgaaggcggcctgtgtcaattttcctggcgagccgaggaggagtggcggaaggttcctctttgttttgctgccgggaagggaaaatgggtcggcgcgaaatttggcctgctggctgcttcaatggttggcctacaaagcgagggctactccgctttgcaggactttgaggtcatactttaa

SEQ ID NO: 210043 - DNA, 495 bp, Klebsiella pneumoniae
atggaacgctttctggaaaatgctatgtacgcctcgcgctggctgctggcgccggtttattttggcctctcgctcggtctgattgcgctgaccatcaaattttttcaggagatcttccacatactgccgcatatttttagcgtcagtgagtcggatatgattctgaccctgctgtcgctggtggatatgaccctggtgggcggtttgctggtgatggtgatgttctccgggtatgaaaattttgtctcgcagctggatattaacgagggtaaagaaaaactcagctggctgggcaaaatggacgcgacttcgctgaaaaataaggttgccgcctccatcgtggcgatctcctctattcacctgctgcgggtgtttatggatgcgaaaaacgtcccggacaataagctgatgtggtacgtgattatccacctgaccttcgtgctttcggcctttgtgatgggctaccttgatcgtctgaccaaagtgaaacactga

SEQ ID NO: 210044 - DNA, 888 bp, Klebsiella pneumoniae
atgacgcgattaacggccaaagatttcccgcagcagttgctcgaatattatgactactatgcccacggcaaaatcagtaaacgcgagtttctccagctggcggggaaatatactgtcggcgggatgaccgcgctggcgctgtttaatctgctgaagcccgactatgccctggcagagcaggtaccgttcaccgacccggatatccgcccggagtatattcattatccctctcctgacggtcacggcgaagtgcgggcttacctggtgacgccgacaaaaatagccgacaaagcgcccgctgtggtggtggtgcatgagaaccgcggcctgaacccctatattgaagatgtagcccggcgggtagcgaaagcggggtatatcgcgctggcgccggatggcctgagcgccgtcggcggctatccggggaatgatgatgaaggccgcgccctacagcagaaagtcgatcccgtgaagctgatgaatgatttttttgcggcggtcgcgtttatggcgaactatccacaggcgacggggaaggtcggtatcaccggtttttgctacggcggcggcgtcagcaacgcggcagcggtggcgatccccgagctggcctgtgcggtgccgttttacggtcgccagccgccgctgaaggaggtcgataaaattaaagcaccgctgctgctgcactatgccggcctcgatagcggcattaatgaaggctggcctgcctatgaacaggcgttgaaggaacaccataaagtctacgaggcctatttctatcagggcgtgaatcacggctttcataatgattccacgccgcgctacgatcgggctgcggctgatctggcctggcaacgcacgctggcatggtttgagaagtatttacgctag

SEQ ID NO: 210045 - DNA, 288 bp, Klebsiella pneumoniae
atggaaaatcattttggcaaaggcttaatggcggggctacaggcatcctatgctgacaccgccgcgcatgcggcgaatttttgcgccgactataaacgcgggtttgtgctcggctactcgcaccgcatgtttgaaaaaaccggcgaccgccagctcagcgcctgggaagcggggatcctcacccgtcgctatggccttgacagagatatggtgatggatttcttcaaagaaggtgggtcgggtatggcgatgcgctattttctggcgggctatcggctggaaagctaa

SEQ ID NO: 210046 - DNA, 867 bp, Klebsiella pneumoniae
atgtcagagcaaaactaccagccaccaaaagtgtgggaatggaagcaaaacagcggcggcgcgttcgccaacatcaaccgtcccgtttccggcgcgactcatgaacgcgtcctgccggtaggaacccatccgctccagctatactcactcggtacacccaacggccagaaggtgacgatcatgcttgaagagctgctggcgctgggcgtcagcggcgcggagtacgacgcctggctgatacgcattggcgaaggggatcagttttccagcggctttgtcgagatcaacccgaactcgaagatcccggccctcagcgaccattccaccacgccgccgacccgggtatttgagtccggcaacattcttctctatctggcggaaaaatttggtttcttcctgccgaaagatcctgccggtcgcaccgaaaccctcaactggctgttctggctgcagggcgcggcgccgttcctcggcggcggcttcggccacttctataactatgcgccagtgaagatcgagtacgcgatcgaccgctttacgatggaagccaaacgccagctcgacgtgctggacaaacagctcgcccgcggtcgctatgtggccggcgaggagtacaccatcgccgatatggctgtctggccgtggtatggcaacgtagtgctgggcaatgtctataacgcggcggagttcctcgacgccgggagctataaaaacgtgctgcgctgggcgcaggatgtcggcaaccgcccggccgtcaagcgcggacgcatcgtcaaccgcaccaacggcccgctcaatgagcagctgcatgagcgccatgatgcccgagactttgacacccaaacggaagataagcgccaggcgtaa

SEQ ID NO: 210047 - DNA, 561 bp, Klebsiella pneumoniae
atgagcacaccctcgcatctgaatgcccaaccgctggtctggggacacggcccgcggacgtttgaggtgttccttgagcccacctgcccctactctgtccgcgcgtttaataaactcgacgatctgctcgatgaggtcggcgccgataacgtgaccatcaagatacgcctgcagtcgcagccgtggcatctgttctccggggttatcgtccgctgcatcctcgccgcgtccaccctgccgcacggcagagagcaggcgcataaggtgatgcaggccgtggccgaccatcgggaagagtttgagtttaccgatcactgcagcgggccgaacatgaacgccacgccgcagcaaatcattgagcgcattgaacgctacagtcacgtgctgctgggggccgcctttgcccgcccggagctgcaggacgtgatcaagtggcacagtaaatacgcccgtcagaacggcatccatgtctcgccgacctttatggtcaacggcctggtgcagccggatctgggcagcggcgatgatgtcagcgtgtgggccgcgcggattatggcctga

SEQ ID NO: 210048 - DNA, 1866 bp, Klebsiella pneumoniae
atgagcaaaggatcgacaagcagtgacgccccgtttgggacattgttaggctatgcacccggtggcgtagcgatttattcatcgaattacagtagcttaaatccgcaggactacccggatgacgcgacgtttcgcagctacatcggcaatgagtatatggggcataaatggcagtgcgtggagtttgcgcgccgctttctgttcctgacctatggctttgtcttcaccgatgtggggatggcttatgaaatcttctccctgcgtttcctgcgcgaagtggtcaatgacaatattttgccgctgcaggccttcgccaacggctcccgccgtccgcctatcgctggttcgctgctgatctggcagaaggggggcgagtttaagcacaccggccatgtggcggtgatcacccagcttgtcggcaataaggtgcgtatcgccgagcagaacgtgattcactcgccgctgccgcagggccagcagtggacccgcgagctgaccctcgaggtcaacgacggccggtacaccatcaaagatacctttgccgataccgaaattttaggctggatgatccagaccgctgataccgaacacagcctgccgcagccggtgctgccgggcgaggcgatggccatcaaaggcgcgcggctgccaaacaacggccagtttcgcggtaaatggctgaacgagaaagacccgttgcagaaagcctacgtggcagccaacggtcatttcatcaaccaggatccctatcagtatttcaccatcagcgaaagtgccgaacaggagctgatcaaagccaccaacgagctgcacctgatgtatctgcacgccaccgataaggtgatgaaggatgacaacctgctggcgctgttcgatattccgaaaattctctggcctcgtctgcgcctctcgtggcagcgccgccgtcatcatatgatcaccgggcgcatggatttttgcatggacgagcgcgggctgaaggtgtacgagtacaatgccgattccgcttcctgccataccgaaggcgggctgatcctcgaacagtggctgaagcagggctactacggcaccggccacaatccggcggaaggtctgctcgatgagctggcgggggcgtggaaacacagccgggcgcggcccttcgtccacatcatgcaggacaaggatctggaagagaactaccacgcgcagtttattcagcgttcgctgacccaggccggttttgagagcaaaattctctttggtcttgatgagctgcgctgggacgctgccggtcagctgatcgacgccgacgggcggctggtcaactgcgtctggaaaacctgggcatgggaaaccgccattgagcaggtgcgcgaagtcagcgccgaggagtacgcggcggtaccgattcgaaccggacatccgcagaatgaggtgcggctgattgacgtcctgctgcgtcctgaagtattggtattcgaacccctgtggacggtgatccccggcaacaaagccattctgccggtgctgtggtcgctgttcccgcatcatcgctatctgctggataccgattttgaggttaacgacgagctggcgaaaaccggctatgcggtgaagcctatttccgggcgctgcgggaacaatatcgacctgatcggccctcaggatgaacttctggataagaccagcggccagtttgtcgatcgcaagaatatctaccagcaactgtggtgcctgccgaaagtggacggtaagtacattcaggtgtgcacatttaccgtcggcggtaactacggcggtacctgcctgcgcggcgattcgtcgctggtggtgaaaaaagagagcgatatcgagccgttaatcgttttgaaagacaaagcatga

SEQ ID NO: 210049 - DNA, 1182 bp, Klebsiella pneumoniae
atgcacgatcggcgtctcgccgcccgcgcgggtgaactcaagccctccgccgtccgcgaacttctcaagcacagtaaactgcccggcgtgatttcgcttggcggcggcattccggccccggaactgtttgataccgaaggcctggagctggcggtgcagaaggtgatgagcgagcgttttaatgacgcattccagtacggtctgacggaaggctacccgccgctgcgccaggcggtgagtgaaatttgccactcccgtggcgtcgcctgttcagccgcccaggtctatatcacctccggctcccagcaatcgctggatatcgttgcccgtacgctgctcgatccgggcgatactatcgtcgttgagcgtcccacttatctggcggcgctgcaggtatttcagctggcgcaggccaatattctcagcgttgacaccgacgatgacgggatgctggtggagcagctggccgacctgctggagaccacccgcgtcaaagctgtttacctggtgccgacgttcggcaatcccggcggcaaaacgctgagcgaggcgcgtcgtcgccggttggttgagctggcgaaaaaatatgatttcgtcattctggaagacgatccctacggcgaaattagctttacagacgccgttcggcgcccgctctatcagcatgctgtcgagctgagctgtgaagatcaggtggtttacacctcgactttttcgaaaatcctcgcgccagggatgcgcatcggctggatcgtcatgccggactggctggcgcagcagacggtgattgtgaagcaggcggcggatctgcataccaatatgctgtcgcaggtgatcactgcggaatacctcagtctgaaccggctggataaccagattgcgttgattcgcgaagactaccgcaagaagtgcgtggcgctggccgatgcgctggaaagccgccttggcgagcacctggaattcagccgcccgcagggggggatgttcctgtgggcgcgtttccgctatccgttcgataccatggaatggatgaagaaaacgctggaaaacggcgtggtgtacgtcccgggtgaagcgttctatcacgataagccggatacccgtaccctgcgtctttcttactccacggtgtcagaagccggattgctgacggccgttgagcggctggcggcctccctgtaa

SEQ ID NO: 210050 - DNA, 189 bp, Klebsiella pneumoniae; identical to SEQ ID NO: 137344

SEQ ID NO: 210051 - DNA, 345 bp, Klebsiella pneumoniae
atgttgaaaaaattatccttaattatcccgctactggcgcttatcgcgctgctggtctggtggttcaccccgcattacactgaggaagatgaagcttactaccgggcggtattttgcataatcgatcatgacgacagccgccagttcctccacgatatgcagaatatcgtcgaggggggaaattctgactacgcgctgcataaaacccattaccttccggcgctggggcagcggatgctggatacctggcgccagctcagcccgcaggaacagcaggtgctgcgtcaggacaagcagcgctgcggcgagatattgcgcgaaaaacaacaggggaaatcatcctga

SEQ ID NO: 210052 - DNA, 603 bp, Klebsiella pneumoniae
atgaaaattatcgttatcggtgccagcggcaccatcggtcgcgcggtcagcgaagaactgagtcagagacatgacgttatccgcgtcggccgcacccggggagattatcaggtggatatcacctcgcaggagagcgtcgaggcgctatttgcccaaacgggtgaagtagatgccatcgtctccaccaccggcaatctgcactttgggccgttaagcaccatgaccgacagccagttcaacctcggtctgcaggacaagctgctggggcaaattcgcctggcgctggtcggccagcattttctgcgcgacggggggtcgattaccctggtcagcggtattgtcgcgcaggaacccattgctcagggggtcaatgccacgacggtcaacgccggtctggaaggctttgttcgcgccgccgcctgcgagctgccgcgcgggatccgcatcaatctcatcagccccaccgtgctcagcgagtcgctggcggcctacggcgactttttcccaggcttccccagcgttcccgccgccgccgtggcgcaggcctatcgccgcagcattgaaggcgttcagaccggccgcatctacccggtcggctactag

SEQ ID NO: 210053 - DNA, 912 bp, Klebsiella pneumoniae
atggacaaattacgagggatggagacgtttattgccgtggtggagtgcggcagctttaccggggcggcgtcgcgcctggggctgtcggcggtgatggttgggaaatatatcgcccagttggaaagccagctggcgacgcgtctgctggagcgtaacacccgacgccagagcctcaccgacgccgggcgagtctattttgacgaagcgaaacgggtgatggagcaggtctccatcgccgaaagcgcggtcgagcggctgcggctggcgccggccggcaccctgcgggtgagcgctcccacctcgttcggcgccagcgtgatcgcgcccctgaccgccaccttcctgcaggtctggcctgcggtccgggtggaactggatctgactaaccggatggtcgatctggtggatgaggggttcgatctggcgatccgtatcggcgagatccatcaggaggatctggtggctcgctacctggcgccgtatcggatggtgatctgcgccgcgccggcttatctggcgcgttacgggacccccgggacgccagaggatctcgccgatcatctctgcctgtcccatacggtctggaccgcccgcaacgagtggcggctgccgggcgtagagggagaagtgcgctggaaacgcgatgcggttttgcgctgcaacgatggctacgcgctgcgccaggcggcgatcgccggggccgggctgctgatgcagccggaggtactgctggccgatgcgctggccagcggcagcctggtgcgcgtgctggaggcgtggactccgcagccgcggcctgtgcatctgctctggcgccaggatcgtcggcccctgccgaagctgacgcagtttatcgcccaccttcagcagggaatggccgacgcgctgacaacgacccgcgcgtcggaataa

SEQ ID NO: 210054 - DNA, 1149 bp, Klebsiella pneumoniae
atgtcatctatccacaccctgagtgtacatagcggaaccttcaccgacagccatggcgcagtgatgccgccgatttatgccacctccacttttgctcagccagcgccggggcagcataccggttatgaatattcccgcagcgggaatcccacccgtcacgcgctggagacggcgatcgccgacctggaaaacggcacgcgcggctacgcgttcgcctccgggctggccgccatctccaccgtgctggagctgctggataaggacagtcatctggtggcggtcgatgatgtgtatggcggcacttaccgcctgctggaaaacgttcgccgccgtagcgctggtctgcaggtgagctgggtgaaacccgacgacctggcgggaattgaagcggcgatccgccccgatacgcgcatgatctgggtggaaacgcccaccaacccgctgctgaagctcgcggatctcagcgccatcgccgccatcgcgcgccgccataacctgatcagcgtcgccgataacacctttgcttcgccggcgatccatcgcccgctggagcatgggtttgatattgtggtgcactccgcgaccaagtacctcaacggccattccgatgtcgtcgccggcctggcggtggttggcgataactccgggctcgcggaaaagcttggctatctgcagaatgcggtaggcggcgtgcttgacccgttcagcagcttcctgacgctgcgcggcatccgtaccctggcgctgcggatggagcgccacagcgcgaacgcgctgcagctcgccgaatggctggaacagcagccggaagtggagcgagtctggtttccctggctggcctcgcacccgcatcatcagctggcgcgccagcaaatggccctgcccggcggcatgatttcggtggtggtgaagggcgatgaaggttacgccgagcgcatcatcagcaagctgcgctggtttacgcttgcggagagcctgggcggcgtggagagtctggtgagccagcccttcagcatgacccatgcctcgatcccgctggagaaacgcctggcgaacggtatcacaccgcagctgatccgcctgtcggtggggatcgaagatcctcacgatctgattgccgactggcagcaggcgctgcgggcggagtga

SEQ ID NO: 210055 - DNA, 1377 bp, Klebsiella pneumoniae
atggttatgtcactgtttcattccgtgagcgacctgatcggtcatactcccctgctccagttgcacaaactggataccgggccctgcagtctgtttttaaaactggaaaatcagaaccccggcgggtcaattaaagatcgggttgcgctgtcgatgattaatgaagccgagcgccagggaaaactggcgcccgggggaacgattatcgaagccaccgccggcaataccggcctcggtctggcgctgattgcggcgcagaaaaattaccgcctgatcctggtggtgccggacaaaatgagccgcgagaaaatctttcacctgcgggcgctgggcgcgacggtgctgctcacccgctccgacgtcaataaaggccacccggcctactaccaggattatgcccgccgccttgccgatgaaacgccgggcgccttttatatcgaccagtttaataacgacgccaatccgctggcccatgccacctccactgcgccggagctttatcagcagctggagggcgacatcgacgccatcgtcgtcggcgtcggctccggcggcacgctgggtgggcttcaggcctggtttgctgagcactcgccgaaaacggaatttattctcgccgatccggcgggttcgatccttgccgatcaggtcgataccggacgctacggcgaaacgggatcctggctggtcgaagggatcggcgaagattttatcccgccgctggccaggctggagggggtacataccgcgtatcgcgtcagcgaccgcgaagcgttccacaccgcgcgccagctgctgcaggttgagggcgtgctggccggctcttccaccggcaccctgctcagcgccgcgctgcgctactgccgggcacaaagccgtccgaaacgggtagtaaccttcgcctgcgacagcggcaataaatacctgtccaaaatgttcaacgacgactggatgcgccagcaaggactgatcgcccgccccgaacagggcgatctcagtgattttatcgccctgcgccatgacgaaggcgctaccgtcacggccgcgccggacgacaccctggccgcggtctttacccgcatgcggctgtatgacatctcccaactgccggtactggaggatggccgcgtggtcggcatcgtcgatgagtgggatttgatccgccacgtacagggcgatcgccaacgcttctccctgccggtcagcgaagcgatgagccgccatgttgaaactctcgataagcgtgcgccagagagtgaactgcaggccattctcgatcgcggtctggtggcggtgatcgctgacaacacgcgttttcttggcctggtcacccgcagcgatgtattgaccgcctggcgtaaccgagtcgcacaataa

SEQ ID NO: 210056 - DNA, 294 bp, Klebsiella pneumoniae
atgccagccgcaaacagcatgtccataaaacgcgaaacgttaaatctgcgcattaaacctgccgaacgcgatcttattgatcgggcggcgaaagccagagggaaaaaccgcacagactttgtgctggaggccgcccgcgctgccgctgaggaagcgctgattgagcaacgcatcattatggccgatccgcaggcttatcaggaatttctcgctcgtctggatcaggctcctgcacctaatgccgcactgcgtaaaactatgcagacccctgcgccgtgggaacaggaagaatga

SEQ ID NO: 210057 - DNA, 486 bp, Klebsiella pneumoniae
atgatctcggcaccagaaccgcttcatgccgggcatattcttaccccgttttgctgcggtatagattccatggatcactggctgaaacagcgggcgatgaaaaatcaggttactggcgcatcccgcacctttgtctgctgcgacgacgcgaaggtgatggcttactactcactggcttccagcgctgtgacgacaaatactgcgccgggtcgttttcgccgcaatatgcctgccccgatcccggttgtggtactgggtcgtctggcggtggataaatcactacatgggaaaggtgtcgggcgggccctggtacgtgatgccgggctgcgtgtgattcaggtggcggagactatcggcattcgcgggatgctggttcacgccctgtcggatgaagcacgggatttttacctgcgggtggggtttgagccgtcgccgatggatccgatgatgttgatggtgacgttgagggatttggttaatgcctga

SEQ ID NO: 210058 - DNA, 594 bp, Klebsiella pneumoniae
atgccttcaattctcgcaaggttgtcagtttgtattattctgtcattgtttatggtttcttgttcgggaagttttgataaaactattgattatcaagacgctaaacagatgcccggctatgggtatatagtcatggatttcagactggcaaatgaaatggcgtatggcaatggctatattccaggaaaaacaaactatacaatttcttataaaaataaaggtgatattttttttgttgatattcagcatgctgattttcgtaatagaatattaaaggcatacataccatatatgaaaggctataccttaataggtatagggagaagttattggtatcctttttttagatgtgataaatgtgacaatgagccacagttaaaatttttatatataaacattgtaaaatcagtggatgaagcatggtgtagtgaaacaacttataaaaatttacgatcatttaatgcaatggacggttgctcccaaatggtaggtgtagaagaatctagaaaagttacaggagatgttcttatcaccccagaattaaaatctgatttccaggggatgttcaccccttatctgaagccaggacgttaa

SEQ ID NO: 210059 - DNA, 153 bp, Klebsiella pneumoniae
atgaaaaagacccgttataccgaagaacagattgcatttgcactgaagcaggccgaaaccggcatctgtgtcggggaagtctgccgaaagatgggcatttctgaagccatttttataattagaagagaaattcgctgctctgggcgtaactga

SEQ ID NO: 210060 - DNA, 1218 bp, Klebsiella pneumoniae
ttgaccacaacagacaaacagccgctggctacccgactggccgccgcggaaaaagagaaacaggccgtcctcgagcaggttaaggcccttagcgccgataagcagtcgctgactattcgcctcgccgctgcggagaaggcgcagcaggccgctcttgaccaggctaaagcgcttaacgctgacaaacagccgctggcgacccggctggccgccgcggaaaaagagaaacaggccgtcctcgagcaggttaaagcccttaacgccgataagcagtcgctgactattcgcctcgccgctgcggaaaagacgcagcaggctgccctcgatcaggtcaaagcccttaacgccgataaacaatctctgtccacccggctggccgccgtggataaagcgccgcatggccccgctaacgacgccgctgcgccaaaaaatgagccaccagagatggcggccatagtggcagcctatcgcctgcaggcggataaagacaacgcccagctacggatgaaagaagatgaaatcgaactgctgagaacgcagctttctgtacagtccaaaacgcgcagcggcgagagcgccgccgccaaactcagcgcatcgggagaacagcaggcttatgcgatcggcgcctcgatgggaagcgaggcgctcaacgtccttaccacccgtcgcactcagggagttaccgtcgacgcaggcctggtgctgcagggcatcgaagatgcctttcgcggccagcttcgtctcggagagcaggaacgtaacaaggcgctgtttgatgtgtcacagcaggtttttcagaacctgaataaaatagagcagaaaaacatcagtgccggcaagaaatatcagcaggcgtttgcgcgcaaaaaagatgtggtctttaaagagggcgtctacagccgcgtcgattacctgggtaaaggaaaaataagcggtaacgacctggttaccgtggtgatcaaagagatgctgacggacgggacggtgatcaacgatatggaagcgaaagatcaggcgcttacgcaaaagctggatgcctatcccccggtgtttcgcgaaccgctgaagcgtctacagaaccacggctctgtgacgctcgtcgtcccgcctgaaaaggcctatggcagtaaaggattaccgccaaaaatcccgccaggcgccaccatggtttattccgtgcggatagtagatagccaacccgagccggcaaaatag

SEQ ID NO: 210061 - DNA, 861 bp, Klebsiella pneumoniae
gtggccgataatccactgtggcatgaaacgctgcatgaccattttggtcagtattttagcgttgataacgtgctgtaccacgaaaaaaccgatcatcaggatctgatcatctttgataaccgcgcctttggccgggtgatggcgctggatggcgtcgtacaaaccaccgaacgcgacgagttcatctatcacgaaatgatgacccatgtgccgctgctggctcacggcaacgcgaagcatgtgttgatcattggcggcggcgatggcgcgatgctgcgcgaagtctctcgtcaccgtagcatcgaaaccatcaccatggtggaaatcgacgccggggtagtttcattctgccgccagtacctgccgaaccataacgccggcgcctatgacgatccgcgctttacgctggtgattgatgatggcgtcaattttgttaatcagacgacgcaaacgtttgacgtgatcatttcggactgtaccgaccctatcggcccgggagaaagcctgttcacctcggctttttatgaaggctgcaaacgctgcctgaacccgggtgggatctttgttgcccagaatggcgtctgcttcctgcaacaggatgaagcggtaggcagccatcgcaagctaagccactattttcgcgacgtcagcttctaccaggcggcaattccaacctattacggcgggatcatgacctttgcctgggcgagcgacaatgaggcgctgcgccatctctccagcgaaatcattcaggcgcgctttcacaaagccaacctgacctgccgttactacaatccggcaatccatacggcggccttcgccttaccacaatatctgcatgatgctctgtccgcaccgtga

SEQ ID NO: 210062 - DNA, 795 bp, Klebsiella pneumoniae; identical to SEQ ID NO: 138091

SEQ ID NO: 210063 - DNA, 363 bp, Klebsiella pneumoniae; identical to SEQ ID NO: 138090

SEQ ID NO: 210064 - DNA, 2598 bp, Klebsiella pneumoniae
gtgctagaagaataccgtaagcacgtagctgagcgtgccgccatggggattgttgccaaacccttagatgcaacccaaatggccgcgctggtagaactgctgaaaaacccgcctgcgggcgaagaagaattcctgttagacctgctgattaaccgtgtaccgccgggcgtcgacgaagccgcctatgttaaagctggattccttgccgcgatcgccaaaggcgaagcgacctcccccctggttacccctgaaaaagccgttgaactgctgggcaccatgcagggcggttacaatatccatccgctgatcgatgcgctggacgacgcgaaactggcgccgattgccgcgaaagcgctctcccataccctgctgatgttcgataacttctacgacgtggaagagaaagccaaagcgggtaacgagcatgctaaacaggttatgcaatcctgggctgacgccgagtggttcctgaaccgtccgcagctggcagagaaaatcactgttaccgtcttcaaggtcaccggcgaaacgaacaccgatgatctctctccggcgccggatgcgtggtcgcgcccggatatcccgctgcatgcgctggcaatgctcaaaaacccccgcgaaggtattgagccggatcagccgggcgtggttggcccaatcaaacagatcgaagccctgcagcagaaaggctacccgctggcctacgtcggcgacgtggtcgggaccggttcttcacgtaaatccgccaccaactcggtgctgtggtttatgggcgacgatatcccgaacgtgccgaacaagcgcggcggcggcctgtgtctgggcggtaaaatcgcgccaattttcttcaacaccatggaagatgcgggcgcgctgcctatcgaagttgatgtgtctaacctgaacatgggcgacgtaatcgacgtttacccgttcaaaggcgaagtgcgtaaccacgagaccaacgaactgctggccagcttcgagctgaaaaccgatgtgctgatcgacgaagtgcgcgccggcggccgtattccgctgatcatcggtcgcggtctgaccaccaaagcgcgtgaagcgctgggcctgccgcacagcgatgtcttccgtcaggcgaaagacgtggcggaaagcacccgcggcttctcgctggcgcagaaaatggttggccgcgcctgcggcgttgccggtatccgtccgggcgcttattgcgaaccgaaaatgacctccgtcggttctcaggacaccaccggtccaatgacccgtgatgagctgaaagacctggcgtgcctgggcttctctgcagacctggtgatgcagtccttctgccacaccgcggcctacccgaagccggttgacgttaccacgcaccacactctgccggacttcatcatgaaccgcggcggtgtttctctgcgtccgggcgatggcgtgattcactcctggctgaaccgcatgctgctgccggataccgtgggtaccggcggtgactcccacacccgtttcccaatcggcatctccttcccggcaggctctggtctggtggccttcgccgccgcgaccggcgtgatgccgctggatatgccggaatcggtgctggtgcgtttcaaaggtaaaatgcagccggggatcaccctgcgtgacctggtccacgccatcccgctgtacgccatcaagcagggcctgctgaccgtggagaagaaaggtaagaaaaacatcttctctggtcgcatcctcgagatcgaaggtctgccggatctgaaagtcgagcaggcgttcgagttgaccgatgcctcggcggagcgttctgccgccggctgcaccatcaagctgaataaagagccgatcgttgagtatctgaactccaacatcgttctgctgaagtggatgatcgccgaaggctacggcgaccgccgtaccctggagcgtcgtatccagggcatggaaaaatggctggcggatccgcagctgctggaagccgatgctgacgcggaatacgcggcagtgatcgacatcgatctggcggatattaaagagccgattctgtgcgcgccgaacgatccggacgatgcccgcctgctgtctgatgtgcagggcgagaagatcgacgaagtgttcatcggctcctgcatgaccaacatcggccacttccgtgccgccggtaagctgctggatagccacaaaggccaactgccgactcgcctgtgggtggcgccgccaacccgtatggatgccgcgcagctgaccgaagaaggctactatagcgtgtttggtaagagcggggcgcgtatcgaaatccctggctgttccctgtgtatgggtaaccaggcgcgcgtggccgacggcgcgacggtggtttccacctctacccgtaacttcccgaaccgtttaggtaccggcgctaacgtctatctggcctctgccgaactggcagcggtggcttcgctgctcggcaaactgccgacgccggaagagtaccagaccttcgtggcgcaggtggataagacggcggaagatacctaccgttatctgaacttcaaccagctggatcagtacactgaaaaagctgacggcgtgatcttccagaccgcggtgtaa

SEQ ID NO: 210065 - DNA, 1608 bp, Klebsiella pneumoniae
atgtcactgccgttcaaaccccatattatcgccctgctctgtagcgctggcttactcgcggcggcaggaacactctatgtacaaagccgaaccccagcgacgatcgctgaaccgcctgcgcagcaagcgccagcgcccgcagcgtcgacgacacagccggtggccgccacttacacccaggcgcaaattgatcagtgggtcgcccctatcgcgctctacccggacagtctgctgtcgcaggtgttgatggcctccacttatcccgacaacgtcctgcaggcggtccagtggtcccaggataaccccgcgatgaaaggggatgcggccgtgcaggcggttgccagccagccgtgggaccctagcgtcaaatctcttgtcgctttccctgccctgctggcgatgatgggcgagaatccgccctgggtggaaaatcttggcaatgcgtttttggcccagccgcatgatgtgatggattcagtgcagcgcctgcgcgccattgcccaacaaaccgggacgctgaaatccacaccgcagcagaaagtgattgtcacccctgccgcactggtttcagccagcagcagcacggcagcaaccgcaaccgcccacacagcggcgcctgcgcccacgcaggtcattaaaatagagccgaccaatccacaggtggtctatgttcccagctataacccctccaccgtctatggtacctggccgaacagcgcctatccgccggtctatctgccgccccctcccggggagcagtttaccgatagcttcgtcaaaggcttcgggtacagcctcggcgtggccaccacctgggcgctgttcagcagtatcgactgggatgatgatgaccatcaccatcacgatgacgactaccgccacggcgattactcgcataatggcgataacatcaatattaatgtaaataatttcaatcatataacaggagaaaacctgccgggaaaccacgttaactggcagcacaatcctgcctatcgcggacacacaccgtatcccgataatacggtagctcagcgcttccatcagaccaacgtttccggcggactgagcgcgacccaacatgcgccagtcgatcgcgaagcgcagcgccaggcagcgatgacccagctgcagcataacgtaccgacggccacagcgggcaatctggcggcaaacaacgcctcacgcgacgcccagcgtcaggcggcctcggcgcagctgaagcaagccacccaacgcagtaattaccgcggttacgacagcacgccgacccaacagcagcgtcgcgaggcggcaaaaacgcagctgaaaacccccacgccgcagcaacagcagcgtcgagaagccgccaggagccacgagcagaaccgcacacctcagcagcagcagcgccggcagcagttccagtccgccacgccagcccagcgtcagcagacgctcagccatctgcgcgccaacgcccttagcggcaacgaaagccgcgccccctcctggcaagcgcagcaggaacgaggactgcagagccgccagttatccggcgtaaaccgcgagttacgcgagggcgccagagaacgtctttccgaacaccatgaactgcgtcgccgctaa

SEQ ID NO: 210066 - DNA, 807 bp, Klebsiella pneumoniae
atgagaaacccattatccgttgccctgtttacgttaatgctgtcgccgcttgccgccttcgcccaacagcagtttgccacgccggaacaggccgcaactgcgctggccgaagcgatcagccagcctaatgaagccgcgctgagcgaagtactcggcgataactggcagcagtttttacccacggacgggatcgaccctgccgccgtcgatcgctttcaacgcgactggcaggtgaaacatgtcatcatccagcagggtgacaaagcctggctcgatgtcggtagcgaggcatggcgtctgcccgtgcctatcgtaaaagcgtctgagggatggcgctttgatatggccgctggcgaagaggagatcctcacccgcgccatcggccgcaatgagctgtcggcgatcgccgccatgcatgcctatgttgatgcccagcaggattattatcatctgaaccaccgctgggcgcagaaaatcatcagtagcgaaggcaaaaaagatggcttgtactggccaacttcgccgggcgaagcgccaagcccgctcggtccggcctttagcccgacggtgcccggtagcggctaccatggctatcgctttcgaattatcgccggtcgcgatgaccagagcgtcgccttgctggcctggccgatagcctggggtgaaaccggcgtgatgagctttatgatcgatcagcaggatagggtctatcaggccaatctcggtgaagagagcgccgcaaaggcacaggagataacgcgttttacccccgacgctgacgccggctggcaagtggcagaaccttaa

SEQ ID NO: 210067 - DNA, 285 bp, Klebsiella pneumoniae
atgaaacgctttttaaccacagcgctggtcgctgcaacgttttttaccggtgtggcttgcgccgctgacgccaacattccctgggcggacaacagcggcggtacggaaacgacccacattgcggcgatgggccaggatctgaatgcccagcatcagcaggtgacgaagaccaatgaaggggtatgggcggcgaattccggtagcatcagcgctgacgaagcggcattatccagcacaaaaccagcctttgccggcgatccttctctgatgcctcaccagggctaa

SEQ ID NO: 210068 - DNA, 1425 bp, Klebsiella pneumoniae
atgagtactgaaatcaaaactcaggtcgtggtacttggggcaggccccgcaggttactctgcagccttccgttgcgctgatttaggtctggaaaccgtcatcgtagaacgttacagcaccctcggtggtgtttgtctgaacgtgggttgtatcccttctaaagcgctgctgcacgtggcaaaagttatcgaagaagcgaaagcgctggccgaacacggcatcgttttcggcgaaccgaaaactgacattgacaagatccgcacctggaaagaaaaagtcatcactcagctgaccggtggtctggctggcatggccaaaggtcgtaaagtgaaggtggttaacggtctgggtaaatttaccggcgctaacaccctggaagtggaaggcgaaaacggcaaaaccgtgatcaacttcgacaacgccatcatcgcggcgggttcccgtccgattcagctgccgtttatcccgcatgaagatccgcgcgtatgggactccaccgacgcgctggaactgaaatctgtaccgaaacgcatgctggtgatgggcggcggtatcatcggtctggaaatgggtaccgtataccatgcgctgggttcagagattgacgtggtggaaatgttcgaccaggttatcccggctgccgacaaagacgtggtgaaagtcttcaccaaacgcatcagcaagaaatttaacctgatgctggaaaccaaagtgactgccgttgaagcgaaagaagacggtatttacgtttccatggaaggtaaaaaagcaccggcggaagcgcagcgttacgacgcagtgctggtcgctatcggccgcgtcccgaacggtaaaaacctcgatgcaggtaaagctggcgtggaagttgacgatcgcggcttcatccgcgttgacaaacaaatgcgcaccaacgtgccgcacatctttgctatcggcgatatcgtcggccagccgatgctggcgcacaaaggtgtccatgaaggccacgttgccgcagaagttatctccggtctgaaacactacttcgatccgaaagtgatcccatccatcgcctacactgaaccagaagtggcatgggtcggtctgaccgagaaagaagcgaaagagaaaggcatcagctacgaaaccgccaccttcccgtgggctgcttccggccgtgctatcgcttctgactgcgcagatggtatgaccaaactgatcttcgacaaagagacccaccgtgttatcggcggcgcgattgtcggcaccaacggcggcgagctgctgggtgagatcggcctggctatcgagatgggctgtgacgctgaagacatcgccctgaccatccacgctcacccgactctgcacgagtccgttggcctggcggcggaagtgttcgaaggcagcatcaccgacctgccaaacgccaaagcgaagaaaaagtaa

SEQ ID NO: 210069 - DNA, 1899 bp, Klebsiella pneumoniae
atggctatcgaaatcaaagtaccggacatcggggctgatgaagttgaaatcaccgagatcctggtcaaagttggcgacaaagtagaagctgaacagtcgctgatcaccgtagaaggcgacaaagcctctatggaagtcccgtctccgcaggctggcgtcgtgcaagagattaaagtctccgtcggcgacaaaaccgagactggcaaactgattatgattttcgattccgccgaaggtgcagccgccgctgcacctgcgcaggaagagaagaaagaagccgctccggccgccgctgctccagcggctgccgcggcagcgaaagaagttcacgtcccggatatcggcggcgatgaagtcgaagtcactgagatcatggttaaagtgggcgacaccatcgccgctgagcaatccctgatcaccgtagaaggcgataaagcctctatggaagttccggcgccgttcgccggtaccgtcaaagagatcaaaatcaataccggcgataaagtttccaccggctccctgattatgatcttcgaagtggcgggcgctgcgcctgcagccgctccggcacaggctgccgcgccggctgctgcggctccggctgccgcagcaggcgtgaaagatgttaacgtcccggacatcggcggcgacgaagttgaagtcaccgaagtgatggttaaagtcggcgataaagtcgcggcggaacagtccctgatcaccgtagagggcgacaaagcctctatggaagttccggcgccgttcgcgggtaccgttaaagagatcaaaatcagcaccggcgataaagtcaaaaccggttccctgattatggtcttcgaagtggaaggcgctgcgcctgccgccgctccggctcaggctgctgccccggcaccagctgctgccccggctcaggccgctaagcctgccgctgcgccggctgcgaaagcagaaggtaaaagcgaattcgctgaaaacgatgcctacgttcacgcgaccccgctgattcgccgcctggcgcgcgagttcggtgttaacctggctaaagtgaaaggcaccggccgtaaaggtcgtatcctgcgcgaagacgttcaggcttacgtgaaagaagcggttaaacgcgctgaatccgcaccggcggctgccgctggcggcggtatcccgggcatgctgccgtggccgaaggttgacttcagcaagtttggcgaagtcgaagaagtggagctgggtcgtatccagaaaatctctggcgccaacctgagccgtaactgggtgatgattccgcacgttacccacttcgacaaaaccgatatcaccgatctggaagcgttccgcaagcagcagaatgccgaagctgagaagcgtaaactggacgtgaaattcactccagtggtcttcatcatgaaagcggttgccgctgcgcttgagcagatgccgcgcttcaacagctcgctctccgaagatggtcagcgcctgacgctgaagaaatacatcaacatcggtgtggcggtggataccccgaacggtctggtggttccggtcttcaaagacgtgaacaagaagagcatcaccgagctgtctcgtgaattgaccaccatctcgaagaaagcgcgcgatggcaaactgacggctggcgaaatgcagggcggttgcttcaccatctccagcatcggcggcctgggtaccacccacttcgcgccgattgttaacgcgccggaagtggccatcctcggcgtgtctaagtccgcgatggagccggtatggaatggtaaagagtttgtgccgcgcctgatgctgccgatctctctgtccttcgaccaccgcgtcatcgacggtgctgatggtgcccgcttcattaccatcattaacaacaccctgagcgacattcgccgcctggtgatgtaa

SEQ ID NO: 210070 - DNA, 2664 bp, Klebsiella pneumoniae
atgtcagaacgtttacacaatgacgtggatccgatcgaaactcgcgactggctacaggcgatcgaatcggtcatccgtgaagaaggtgttgagcgcgctcagtatctgattgaccaactcctttctgaagcccgtaaaggcggagtgaaggttgctgcaggcgcttccgccggcaactacgtcaacactattgccgttgaagatgagccggaatacccgggcaatctggatctggaacgtcgcattcgttctgcgattcgctggaacgccatcatgaccgttctgcgcgcgtcgaaaaaagatctcgaactgggcggccacatggcgtcctatcagtcttccgcgaccttctacgaagtctgcttcaaccacttcttccgtgcgcgcactgagaaagatggcggcgatctggtgtacttccagggtcacatctctccgggcgtatatgcacgtgcgttcctggaaggccgtctgaccgaagagcagatggacaacttccgtcaggaagttcacggcaagggcctgtcctcttatccgcacccgaaactgatgccggaattctggcagttcccgaccgtatccatggggctggggccgttgggcgctatctatcaggccaaattcctgaaatatctggaacaccgcggtctgaaagacacctccgaacaaaccgtttacgccttcctgggcgacggcgagatggatgagccggaatcaaaaggcgctatcaccatcgccacccgtgaaaaactggacaacctggtcttcgtcatcaactgcaacctgcagcgtctggacggcccggtcaccggtaacggcaaaatcattaacgaactggaaggcatcttcggtggtgctggctggaacgttatcaaggttatctggggcggccgttgggatgagctgctgcgtaaagacaccagcggtaagctgattcagctgatgaacgaaaccgttgacggcgactaccagaccttcaaatccaaagacggcgcttacgttcgtgagcacttcttcggcaaatatccggaaaccgctgccctggtcgctgactggactgacgagcagatctgggctctgaaccgcggtggtcacgatccgaagaaagtctacgctgcattgaagaaagcgcaggagaccaaaggtcagccgaccgtgatcctggcgcataccattaaaggttatggtatgggcgataccgctgaaggtaagaacatcgcgcaccaggttaagaaaatgaacatggacggtgttcgctacgtccgcgatcgtttcaatgtgccggtggcggatgccgatctcgaaaaactgccgtacgtaaccttcccggaaggttccgaagagcacacttacctgcacgctcagcgtcagaagctgaacggctatctgccgactcgtcagccgaagttcactgagaaactcgagctgccgaccctggccgacttcagcgcgctgctggaagagcaaaacaaagaaatctctaccactatcgctttcgttcgcgccctgaacgtgatgctgaagaacaagtcgatcaaagatcgtctggtgccgatcatcgccgacgaagcgcgtaccttcggtatggaaggtctgttccgtcagatcggtatttacagcccgaacggccagcagtataccccgcaggaccgtgagcaggttgcttactacaaagaagacgagaaaggccagattctgcaggaagggatcaacgagctgggcgcaggcgcatcctggctggctgctgcgacctcttacagcaccaacaacctgccgatgatcccgttctacatctactactcgatgttcggcttccagcgtatcggcgatctgtgctgggcggctggcgatcagcaggctcgcggcttcctgattggcgggacttccggtcgtactaccctgaacggcgaaggtctgcagcacgaagatggtcacagccacattcagtcgctgactatcccgaactgtatctcttacgacccggcgtacgcctatgaagtggctgtcatcatgcatgatggtctggtccgtatgtacggcgaagcgcaagagaacgtttactactacatcactacgctgaacgaaaactaccacatgccggccatgccggaaggcgccgaggaaggtatccgtaaaggtatctacaaactcgaaaccatcgaaggtagcaaaggtaaagttcagctgctgggctccggttctatcctgcgtcacgtgcgtgaagcagcgcagatcctggcgaaagactacggcgtgggttccgacgtgtatagcgttacctccttcaccgaactggcgcgtgatggccaggattgcgaacgctggaacatgctgcacccgctggaaaccccgcgcgtgccgtatatcgctcaggtaatgaacgacgctccggcagtggcatccactgactatatgaaactgttcgctgagcaggttcgtacttacgtaccggctgatgattaccgcgtactgggtaccgatggcttcggtcgttccgacagccgtgaaaacctgcgtcaccacttcgaagtcgatgcttcctatgtggtcgtagcagcgctgggcgaactggctaaacgtggtgaaatcgataagaaagtggtggctgacgctatcgcgaaattcgacatcgatgcagaaaaagttaacccgcgtctggcgtaa

SEQ ID NO: 210071 - DNA, 780 bp, Klebsiella pneumoniae
atggcctacagcaaaatccgccaaccaaaattatccgatgtgatagagcagcagctggagtttctgattcttgaggggaccttgcgccccggtgaaaaactcccgccagaacgcgaactggctaaacagttcgacgtttcccgcccctcgctgcgtgaggcgattcaacgcctcgaagccaagggcttgttgcttcgtcgtcagggaggtggaacgtttgttcagagccgcctgtggcagagcttcagcgatccgctggttgagctgctgtccgatcaccctgaatcccaattcgatttgcttgagacccgtcacgcgctggaaggcatcgcggcctattacgcggcgctgcgcagcaatgatgaggatcgcgaccgtatccgtgagctgcatcaggctattgaacgcgctcagcagtcgggcgatttggacgctgagtccggcgccgtcgtccagtatcaaatcgccgtcaccgaggcggcacacaatgtggtgttgcttcatctgctaaggtgtatggagccgatgttggcgcaaaacgtgcgtcagaactttgaattgctgtatgcccggcgggaaatgctcccgttggtcagcaaccatcgcactcgcattttcgaggcgataatggccggggagccggagcaggcgcgtgaagcgtcgcaccgtcacctggcgttcattgaggaaattttgctggatcgtagtcgtgagcagagccgtcgagagcgctcactgcgtcgtttacagcaacgaaaggacgagaactccggttcttaa

SEQ ID NO: 210072 - DNA, 1371 bp, Klebsiella pneumoniae
atggaaggtcaacagcacggcgatcggctgaagcgcggcctgaaaaaccgtcacattcagctcatcgcgctgggcggggctatcggcaccggcctgtttctggggagcgcgtccgtcattcagtccgccggcccgggtatcattcttggttacgctatcgccggttttatcgctttcctgatcatgcgtcagctgggcgaaatggtggtggaagagccggtggccggctcatttagccactttgcttacaaatactggggcggttttgccggcttcgcctccggctggaactactgggtactgtatgtcctggtggccatggcggaactgaccgccgttggcaaatatatccagttctggtggccggaaatccctacctgggcctcggcggcggtcttcttcatcgccatcaacgccattaacctgaccaatgtcaaagtgttcggtgaaatggaattctggttcgcgattatcaaagtggtcgccgtagtggcgatgattttgttcggcggctggctgctgttcagcggcaacggcggcccgcaggcgacggtacgtaacctgtgggaccaggggggcttcctgccgcacggcttttacgggctggtgatgatgatggcgatcatcatgttctcctttggcggcctggagctggtggggatcaccgccgcggaagcggataatccggagcaaagcattcctaaagccaccaatcaggttatttaccgtattctgatcttctatgttggttcgctggcggtgctgctctccctgctgccgtggacccgcgtcaccgcggacaccagtccgttcgtcctgatcttccatgaacttggcgatacgctggtggcaaacgctctgaacgtggtggtgctgacggcagcgctgtcggtttataacagctgcgtgtactgcaacagccgtatgctgttcggccttgctcagcagggcaacgcgccaaaagcgctgctcagcgtcgacaaacgcggcgtgccggtgaataccattctcgtctcggccctggtcactgcgctgtgcgtgctgatcaactacctggcgcctgaatctgctttcggtctgctgatggcgctggtggtctcagccctggtcatcaactgggcgatgatcagcctcgcgcatatgaaattccgtcgcgccaaaaagcagcagggcgtggtcacgcgtttcccggccctcttctatccgctgggcaactggctgtgcctgctgtttatggcggcggtgctggtgattatgctgatgaccccggggatggcgatttccgtctggctgatcccggtatggattgcggtgctgggcgtgggctatctgtttaaagagaaagccgccgccaccataaaagcacaataa

SEQ ID NO: 210073 - DNA, 1407 bp, Klebsiella pneumoniae
atggcagagaacacgctttcaataagagaaaagattggttacgggatgggtgatgccggatgcaatattatctttggcgccatcatgctgtttgtgaactatttttacactgatatattcggactagcgccggcgctggtcggcgtacttctgctctcggtgcgagtcatcgatgcggtaaccgaccctatcatgggcgctcttgccgaccgcacccgtagtaaatatggtcgctttcgtccatggctgctgtggatcgccttcccctacgccctgttcagcgtcctgatgttcaccactcctgagtggacctacaatagcaaagtcatctatgcgtttgtgacctactttctgctgtcgattacctataccgcgattaatattccttactgctcgctgggaacggtgatgaccgccgatccgaaagagcgtgttgcctgccagtcttatcgtttcgtcatggtgggtatcgccacgctcctgctgtcattgacgctgctgccaatggccgactggttcggcggcgccgataaagcgaagggctaccagatggcgatgaccgtgctggcctttatcggtatgtgtatgttcctgttctgcttcgccaccgtgcgcgaacgtatccgcccggcggtgcagacgaatgacgaactgaaaaaagatctgaaagacgtctggaaaaatgaccagtgggtgcgcatcctgctgctcacgctgtgcaacgtctgtccgggctttatccgcatggccgccaccatgtactacgtcacctgggtgatgggacaaagcacccattttgccaccctgtttatcagcctcggcgtagttgggatgatgattggcagcatgctggcgaaagtcctgaccgaccgctggtgcaaactgcaggttttcttctggaccaatatcgtgctggccgtgttctcctgcgccttctatttctttaatccacacgccaccacgctgattatggtgctctacttcctgctcaacattctgcatcaaatcccttccccgctacactggtcgctaatgtccgacgttgacgactacggcgaatggaaaaccggcaagcgcgtcaccggtatcagcttctccggtaatctgttcttcctcaaggtcggcctggcggtcgccggggcaatggtcggtttcctgctgtcatggtacggctacgacgccggcgcgaaagcgcaaagcgcctccgcgctgaacggtatcgtgctgctattctcagtcattcccggcgtcggctatctgatcaccgccggcgtggtgcgcctgctgaaggttgaccgtaccctgatgcgccagattcagagcgatctggagaagcgccgcagcaactacagcgagctgaacgaataccaggaactgaaaaccagtgaacacgtaaggaaagcctga

SEQ ID NO: 210074 - DNA, 951 bp, Klebsiella pneumoniae
atgaacaactggccaaacccctttattgaacagcgtgcagacccctttatcctgcgccatcttagccactactactttattgcctcggtgccggaatacgaccggctggagatccggcgcgcggtaacccttgaaggattacgcgatgctgagccggtcgtggtttggcgcgcgccgcaaagcgggccgatgagccagctgatttgggcgccggagctgcatgaaatagacggtaagtggtatatctattttgccgccacccatactcacgatctggatgcgctggggatgttccagcatcgcatgttcgttctcgagtgcgctgacagcgatccgctgaccggccgctggcaggaaaaaggccaggtggtcacgcctttcgataccttcgccctcgatgccaccacttttacccatcaggggaaacgctggtatctgtgggcgcaaaaatccccgcatatcgaaggcaactcaaacctgtatctcgccgaaatggctaacccgtggacgttaaaaggcgagccggtcatgctgagcaagccggagttcgactgggagtgccggggatttaaggtcaacgaagggcctgcggtactgatgcatggcgataagctatttatcagctattccgccagcgccaccgatgaaaactactgcatggggttgttatggatcgaccggcaggccgatccgctgcagccggcaaactggcataaagctccgcagccggtgttccgcaccagctatgaaaaccgccagtttggcccaggtcataatagttttacccaaacgccggaaggggaagatgtgctggtgtatcacgcgcggaattacactgagatagaaggcgacccgctgtatgatcccaatcgccatacgcggttaaagctggtcagctggcgggaagacgggatgcccgacttcggtattccaccggcggatacgctgtag

SEQ ID NO: 210075 - DNA, 855 bp, Klebsiella pneumoniae
atgacgctgtttacgacgctgttggtgcttatcgccgaacggctgtttaagctgggcgaacactggcagcttgatcatcggctggaggtggtgtttcgccggataaaacatttctcgttaccgggcacgctgctgatgacgctggtggccgtcgcggtcgtgtatatcattcagcgtctgctgcaggggcagctgtttaacataccgctgctggtgttctggattttactgggcctgctatgcattggcgccggcaaagttcggctgcactaccatgcctatctgaaagcggcgtcgcgcaatgacagtcgcgcctgcgatgccatggccagcgagctgacgctgattcacggcgtgccgccgggctgtgatgagcgtgagtaccttagcgaactgcaaaatgcgctgctgtggattaactatcgatactatctggcgccgcttttctggtttgtcgtggggggcgcctggggcccgctgacgcttatcgcctacagcgtactgcgcgcctggcagacatggctggcgcgctaccagacgccgcaccaccggttgcagtccgggatcgatggtatcctgcatattgtggactggctgccggtgcgtctggtgggggtggtctatgccctggtgggccatggtgaaaaagcgctcccggcgtggtttgcttcgctgggcgaccgccattcgtcgcagtatcaggtgttgacccgcctggcgcagtattccctggcccgtgagccgcacgtggataaagtagcgacgccgaaggctgcggtatcgatggctaagaagacttcgctggtggtagtggtgattatggcgctgctgacgatttacggtaccctggtttaa

SEQ ID NO: 210076 - DNA, 564 bp, Klebsiella pneumoniae; identical to SEQ ID NO: 137945

SEQ ID NO: 210077 - DNA, 894 bp, Klebsiella pneumoniae
atgtcgcctcgtcgttacaaccccgaccgccgccgtgacgtgctgctggaacgtattaatctcgatattaccgatgctgtcgcacactccctgcgggaagatctgggcggcgaagtcgacgccaacaacgatattagcgcgcaattattgccgcaggatgcacgctcccatgcggtggtcattactcgtgaagatggcgtcttctgtggcaaacgctgggtggaagaggtctttattcagctcgccggtgacgatgtgaatatcacctggcacgtggccgacggcgatgcggtcaaagccgaccagccgctgttcgaattggaaggcccgtcgcgtattctgctcaccggcgaacgcacggcgctgaactttgtgcaaaccctctccggcgtcgccagcgtcgtccgtcgctatgtcgacctgctcgccggcaccaaaacccaactgctggatacgcgcaaaacgctgccagggctgcgtaccgcgctgaaatacgcggtactctgcggcggcggcgccaaccatcgactgggcctgttcgacgcgttcctgattaaagaaaaccacattatcgcctccggatcgatccgtcaggcagtggaaaaggcgttctggctgcatcctgatgtgccggtggaagtggaagtggaaaccctggatgaactggagcaggcgttaaaagccggggccgatatcattatgctcgataacttcaccaccgacctgatgcgcgaggcggtgaaaattaccgcaggccaggcggcgctggaggtctccggcaacgttacctttgacaccatccgcgaattcgccgataccggcgtcgactatatttccgtcggcgccctgaccaaacatgtgcaggcgctcgacctgtcgatgcgcttccgctga

SEQ ID NO: 210078 - DNA, 432 bp, Klebsiella pneumoniae
atggataaacaacgaggttttaccctgattgaactgatggtggttatcggaatcatcgccattcttagcgccatcggcatcccggcctaccagaactacctgcgtaaagccgccctcaccgacctgctgcagacctttgtcccttaccggacagccatcgaactttgcgcgctcgatcatggcggcctaacgccatgcgacggcggcagcaacggcattccctcgccgacaaccacgcgctacctttccgccatgagcgtggccaaaggggtcgtcaccctcaccggtcaggagagtctgaacggactgggggtcaccctgacgccgacctgggacaatgccgagggcgtcaccggctggcagcgcgtctgcaccatcaccggcaatagcgcgcttcagcaggcctgcgaagacgttttccgggtgaagtga

SEQ ID NO: 210079 - DNA, 1386 bp, Klebsiella pneumoniae
atgaaaacagaacagctgatccccctctgccgtcgctaccacgccatgctgctgcatagcgatgaacagacaatctctattgcggtggttaataccccgccggcggagttaatggaggcgctacgcttcgcgacgcaaaagcggatcgacattgaatgctggagccaggagcagatggataagcgtctgcaggcccaggaaaagcaggcgcaactggcgcagaacgacgggccggaaaatatcgccgaacgggtcaaccagatcctcgaacaggccctgcgtcagcgggcgtctgatattcatatcgagcccacggaaacgcacttacgcatccgcctgcgggtcgatggcgtccttcacgccctaccgttgctggctcccgaactggccgcaccggttatcgcgcgactcaaggtcctggccagtctcgatatcgccgagcaccgtttaccgcaggatggccagttcgcgctgaatcttgcgggacgaccgctctcttttcgcatcgccactctgccctgccgctatggcgaaaagattgtcctgcgccttctgcatcaggttgaccaggcgctggatctggaagcactcggactctcatcctcccagctggcggcctttcgccaggcgctgaaccagccgcagggtctgctgctggtcaccggcccaaccggaagcgggaaaacggtgaccctctacagcgccctgcaggccagaaaccgtgagcaagtgaatatctgtagcgtggaggatccactggagatccccatcgccgggatgaaccagacgcaaatcaatccccgcgccggactcacttttcacagtgtgctgcgcgccctgttacgccaggatccggatattgtcatggtgggcgagatccgcgatgccgagaccgctgaaatcgcgctcaaagccgcccagaccggtcatctggtgctctccaccctgcacaccaattccaccagtgaaaccctgacccgcctgcagcaaatgggcatcgcccgctggatgatttcctctgcgctctcgctggtcatcgcccagcgtctggtccgcaagctgtgtccccactgtcggcgtaatgccggcagcgccgccgacctgccgcacagcctgtggccccgcccgctgccacgctggcaggcagcgggctgcgaacattgttaccacggatattacggccggctggcgctgttcgaagtgctgcctgttacccccgggctacgccaggggatagtccagggacttaacgccattgagattgaatctctggcgcgagccgcagggatgatgacgctttttgaaagcggctgtcaggctatcgaacagggattgaccagcctcgaagaggtggtgcgggtgctggggatcccccatggcgactaa

SEQ ID NO: 210080 - DNA, 1206 bp, Klebsiella pneumoniae
atggcgactaagcgtctctggcgctggcgcggtatcgatgtgcagggcgccccctgtcaggggatgctatggcaaaccaagcgtctggaggtcctgcagcacctccaacagcagcgagttataccgctggctgtacgccgctgtgcggtgaagcagagcctctggcacccgcgctacagttgcgaaacgatccgccagctggcgaccctgctgcaggccggcctgccgctggcggaagggttatcgctgctggcgcagcagcagtcgcatgcccagtggcaggcgctgcttgaggcgctaggccgcgagctggcccagggcgtggcgttctctgccgcgctggcgcagtggccccaggcttttccgcccctatatctggcgatgattagcaccggcgaactgacgggcaagctcgatatctgctgcctgcagttggcgaatcagcagcaggagcagcagcggctcgccagcaaagtcaaaaaagcgctgcgctacccgctgatcgtgctctctctggcgctgttggtggtgctggggatgctctattttgtcctgcccgggttcaccgccatctaccagacgttcagtacgccgctaccgctattgacgcggatggtcgttgcggcaggcgacatgctaagtcgcggctggccgctgctgctggcctcgctgctgagcccgctgctgctcaaccagctgatccggcggcgcagcgactggttgctgcgccgccagcggttgcttaacgcgctccctctcattggctccctgatcggcggacaacagctgagcctgatcttcaccatcctggcgttaacccaaagcgccggtattagctttctgcaggggctgcaaagcgttgaagagtccctgtcgtgcccgctgtggcgccagcgtctggcgcaggcccgcgcgctgatcgttcagggggagccgatttggcaggcgttaagccgctgcggcggttttacaccgctgtgcctgcagctcatccgcacgggggaaagcgcgggagcgctggatcagatgctggaaaacctggcgcatcaccatcgccagcaaacctatcagcgagccgatagtctggctgcgcatcttgaaccaatgatgctggtgataaccggctcgctggtcgggattctggtggtggcaatgtatttgcccgtttttcacctgggcgatgccattggcggggcgggaggatga

SEQ ID NO: 210081 - DNA, 1044 bp, Klebsiella pneumoniae
atgcgtattgaagaagatctgaagcttggtttcaaagacgttcttatccgcccgaaacgctctaccctcaaaagccgttctgatgttgagctggaacgtgaattcacctttaaacattcaggcctgacctggtccggcgtgccgattattgcggctaacatggataccgtcggcaccttcagcatggctaaagcgctggccacttttggtattctgaccgcggtacataagcactacaccgctgaagaatggctggcgtttacccagggcgcatccgcagacgtactcaagcatgtgatggtttccaccggcacgtccgatgcggatttcgaaaaaacccagcagatcctctctcagaacccacagctgaattttgtgtgtatcgacgtcgccaacggctactccgagcactttgtacagttcgtggcgaaggcgcgcgaagcctggccgcaaaaaactatcatcgccgggaacgtggtcaccggtgaaatgtgcgaagagctgatcctctccggcgccgatatcgtcaaagttggcatcggcccgggatccgtctgcaccacccgcgttaagaccggggtcggctatccgcagctctccgccgtgattgagtgtgccgatgcggcgcacggccttggcggccagatcatcagcgacggcggttgcaccatgccgggcgatgtggcgaaagccttcggcggcggcgctgatttcgtgatgcttggcggcatgctggcgggccatgaagagagcggcggaaccatcgttgaagagaacggagagaaattcatgctgttctacggcatgagctccgagtcggcgatgacccgccatgtgggcggtgtcgcgaaataccgcgcggcggaaggcaaaaccgttaagctgcctttgcgtggaccagtggagaataccgcacgtgatattctcggcggtctgcgttctgcctgcacctacgttggcgcctcgcgtctgaaagagctgaccaagcgtacgacctttatccgcgttcaggaacaagagaaccgggtattcaatagcctgtaa

SEQ ID NO: 210082 - DNA, 621 bp, Klebsiella pneumoniae; identical to SEQ ID NO: 139073

SEQ ID NO: 210083 - DNA, 744 bp, Klebsiella pneumoniae
atgcatacccccgttctgtttgaacatcctcttaatgagaaaatgcgcacctggctgcgcatcgaatttctgatccagcagatggctttccatccgcagattgccagccatgccgatgcgctccattttttccgtaacgccggcgatctgctggatgtcctggagcgcggcgaggtgcgcactgacctggttaaagagctggaacgccagcagcgtaagctccagtcatgggcagaagtgccgggcgtcgatcaggagcgcataaacgagctgcgccaccagttgaagcagtcctccagcaccctgatggccgcgccgcgcattggtcagtttctgcgtgaagatcgcctgattgcgctggtgcgtcagcgcctgagtattcctggcggctgctgcagcttcgatttaccgaccctgcatatctggctccatatgccacaggcgcatcgcgacgagcaggtggccagctggcttgccagcctcgatccgctggtccagtccctgagcctgatcctcgatcttatccgcaactccgcgctgttccgcaaacagaccagcctcaacggcttttatcaggataatggcgaagatgccgatctgctgcgcctgcgtctcgatctggctcaccagctttatccgcaaatttccggccataagagccgtttcgccatccgtttcctggcgctggacagtgaatatgggatcgtgccggagcgctttgattttgaactggcctgctgttaa

SEQ ID NO: 210084 - DNA, 195 bp, Klebsiella pneumoniae; identical to SEQ ID NO: 139075

SEQ ID NO: 210085 - DNA, 393 bp, Klebsiella pneumoniae
atgaaaaaactgcaaatcgccgtcgggataattcgcaatccgcaaggcgaaatctttattacccagcgcgccgccgatgcccatatggcgaataagctggagttcccgggcgggaaaattgaatctgatgagacgcctgagcaggcgctaatccgcgaactgcaggaggaggttgggattacggtcaccgcctcttcgctctttgataagctggagtatcagttccccgatcgccatattacgctgtggtttttcctcgtggaaagttggcaaggcgagccgtggggtaaagaagggcagccgggtcggtggatggcgggaccaacgttggatccggcggcgtttcctccggcgaatgaaccggttatcagcaaacttatcgcccagggctga

SEQ ID NO: 210086 - DNA, 2706 bp, Klebsiella pneumoniae
atgcttatcaaaatgttaaccaaggttttcggcagccgtaacgaccgtacgctgcgtcgtatgcgcaaagtcgtcaatatcatcaacggcatggaaccggcgatggaaaaactctctgatgacgagctgaaagcgaaaaccgctgaattccgcgcgcgcctggaaaaaggcgaaacgctggaaagcctgatccctgaagctttcgccgtcgttcgcgaagccagtaagcgcgtattcggcatgcgccacttcgacgtccagctgctgggcggtatggtgcttaacgatcgctgcatcgccgagatgcgtaccggtgaaggtaaaaccctgaccgcgaccctgccggcgtacctcaacgcgctaaccggcaaaggcgttcacgtagtgaccgtcaacgactatctggcccagcgtgacgccgaaaataaccgcccgctgtttgaattcctgggcatgacagttggcatcaacatgtccggcctgccggcgccggcgaagcgtgaagcttacgctgccgatatcacctatggcaccaacaacgaatacggcttcgactacctgcgcgacaacatggccttcagcccggaagagcgcgttcagcgtaaattgcactatgcgctggtggatgaggtggactccatcctgatcgatgaggcgcgtacgccgctgatcatttccggcccggcggaagacagctctgaaatgtaccgcaaggtaaacaaaatcatcccgcatctgatccgccaggaaaaagaggattcggatactttcactggcgaaggccacttctcggtggatgaaaaagcgcgtcaggttaacctgaccgaacgtggtctggtgctgattgaagagctgctggtacaggaaggtattatggatgaaggtgagtccctgtactctccaaccaacattatgctgatgcaccacgttaccgccgcgctgcgcgcccatgcgctgttcacccgcgacgttgactacattgtcaaagatggcgaagttatcatcgtcgatgagcacactggccgtacgatgcagggccgccgctggtccgatggtctgcaccaggccgttgaggccaaagagggcgtggagatccaaaacgagaaccagactctggcctctatcaccttccagaactacttccgtctgtacgagaagctggcggggatgaccggtacagccgataccgaagcctttgaattcagctctatctataagctggataccgtggttgtaccgaccaaccgtccgatgatccgtaaagacatggcggatctggtctatatgaccgaagcggaaaaaattcaggctattatcgaagatatcaaaactcgtaccgctgccggtcagccggtgctggtggggactatctcgatcgaaaaatctgaagtggtttcccgcgaactgactaaagctggcatcaagcacaacgtcctgaacgccaaattccacgccagcgaggcggatatcgtcgcccaggcgggctacccttccgcggtgaccatcgctaccaacatggcgggtcgtggtaccgatattatgctcggcggtagctggcaggcggaagtcgctgcgctggaaaacccaacgccagagcagattgagaaaatcaaagccgactggcaggtacgccacgatgcggtactggccgcaggcggtctgcacatcatcggtaccgagcgtcatgaatctcgccgtatcgataaccagctgcgcggccgtgctggtcgtcagggggatgccggttcttcccgcttctacctgtcaatggaagatgccctgatgcgtatcttcgcctccgatcgcgtgtctggcatgatgcgtaaactgggaatgaaaccaggtgaggcgattgagcacccgtgggtcaccaaggcgatcgccaacgcccagcgtaaagtggaaagccgtaacttcgatatccgtaagcagctgctggaatatgatgatgtggccaacgaccagcgccgggcgatctacacccagcgtaacgagctgctggacgtgtctgacgtcagcgaaaccatcaacagcatccgcgaagacgtctttaaggcgacgatcgatgcccatattccgccgcagtcgctggaggagatgtgggatatcgaaggtctgcaggagcgtctgaaaaacgacttcgacctcgacctgccaatcaaagagtggctggataaagagccggagctgcatgaagagaccctgcgcgaacgtattctgcagagcgcggtagaaacctaccagcgtaaagaagaagtggtcggcgccgagatgatgcgccacttcgagaaaggcgtgatgctgcagactctggattcgctgtggaaagagcacctggcggcgatggattacctgcgccagggtatccacctgcgcggctatgcgcagaaagatccgaagcaggagtacaagcgcgaatcgttctcaatgtttgccgcgatgctggagtcactgaagtatgaagtgatcagcaccctgagcaaagtccaggtgcggatgccggaagaagtcgaggcgatggaacagcagcgtcgtgaagaggccgagcgcctggcgcagatgcagcagctcagccatcagagcgatgatgaagccgcagcccaggatctggcggcgcaaaccggcgaacgtaaagtgggccgtaacgatccgtgcccgtgcggctccggcaaaaagtacaaacagtgccacggccgtctgagctaa

SEQ ID NO: 210087 - DNA, 504 bp, Klebsiella pneumoniae
atgaacgtgagtggattgctgacgcgctggcgacagtttggcagacggtatttttggccgcatctcctgttggggatggtcgcggccagcctcggcctgcctgcgttaagcaacggtcacgagaccgcggcgccagcgaaggcgaccgccagcaatcacaatccgagcaaggttaatttctctcagctggcgctgctggagacgaatcgccggcccagctttaccgtcgactactggcatcagcacgccattcgcaccgttattcgtcatctctccttcgccatggcgccgcaggcgctgccggtggcggaagaaacttccccgctgcaggctcagcatctggcgctgctcgacaccctcagcgcgctgctgacgcaggacagcacgccgccggtggtgatccgccaggcgggttacatcccttcttcatattctgccttccgcgtcagcgcctggataagccaggtggcggggatccgcgcagggcctcaacgtctcagctga

SEQ ID NO: 210088 - DNA, 918 bp, Klebsiella pneumoniae
atgatcaaacaaaggactcttaaacgtatcgttcaggcgactggcgtcggtttgcataccggcaagaaagtcacactgacgttacgccctgcgccggcaaataccggggtcatctatcgtcgcaccgacttgaatccaccggtagattttccggctgatgccaaatctgtgcgtgataccatgctctgtacttgcctggttaatgagcatgacgtgcggatttctacggttgaacacctgaacgccgcattggctggcctgggtatcgacaacattattgttgaagtcgatgcgccggaaatcccgattatggacggcagtgcggctccgttcgtttatctgttgctggacgccggcattgatgaactgaactgcgccaagaaatttgtacgtatcaaagagacggttcgcgttgaagatggcgacaaatgggctgaattcaaaccgtacaatggtttttcgctggacttcaccatcgattttaaccatccagcgattgatgccagcacccagcgctatacgctgaacttctcggccgatgcgttcatgcgtcagattagccgtgcgcgtaccttcggttttatgcgcgatatcgaatatctgcagtcccgcggcctgtgcctgggcggcagcttcgattgtgccatcgttgttgacgattatcgcgtactgaacgaagacggtctgcgctttgaagacgaatttgttcgccacaaaatgctggatgcgatcggtgacctgtttatgtgtggtcacaacattatcggcgcattcacggcgtacaaatcgggtcacgcgttgaacaacaaactgctgcaggcggttctggcaaaacaggaagcctgggagtatgtgaccttcgaagacgacgcaaaactgccaatggcgttccgcgcaccgtcgatggttctggcgtaa

SEQ ID NO: 210089 - DNA, 1152 bp, Klebsiella pneumoniae; identical to SEQ ID NO: 138348

SEQ ID NO: 210090 - DNA, 1263 bp, Klebsiella pneumoniae
atgatcaaggcgacggacagaaaactggtagttggactggagattggcaccgccaaggtggccgctttagtaggggaagttctgcccgacggcatgatcaatatcatcggcgtgggcagttgcccatcgcgtggtatggataaaggcggtgtgaacgacctcgagtcggtggtgaaatgcgtacagcgcgccatcgaccaggccgaactgatggcggattgccagatttcatcagtttatttggcactttcgggtaaacatataagctgtcagaatgaaatcgggatggtaccgatttcggaagaagaagtgacgcaggacgacgtcgagaacgtggtccacaccgcgaagtcggttcgcgttcgcgatgaacatcgtgtcctgcacgtgattccgcaggaatatgctatcgactaccaggaagggattaaaaacccggtagggctgtccggcgtgcgtatgcaggcgaaggtgcatctgatcacctgccataacgatatggcaaaaaacattgttaaagcagtggaacgttgtggtctgaaagttgaccaacttattttcgccgggttagcggccagttattcggtattaacagaagacgaacgtgagctgggcgtctgcgttgtggatatcggcggtggtacaatggatatcgccgtctacaccggcggcgcattgcgtcacaccaaagtgatcccgtatgccggcaacgtggtgaccagcgatatcgcctatgccttcggtacgccgccgagcgatgccgaagcgattaaggttcgtcacggatgcgcattgggttccatcgtcggtaaagacgaaaacgtcgaagtaccgagcgttggtggacgtcctccgcgtagcctgcagcgtcagacgttggcagaggtgattgaaccgcgctataccgagctgcttaacctggtcaatgaagagatcctgcagctgcaggaacagctccgccagcagggtgttaaacatcatctggcggcggggattgtgttaaccggcggcgcggcgcaaattgaaggtctggcggcctgtgcgcagcgcgtgttccatactcaggtgcgcattggcgcgccgctgaacatcaccggtttaaccgactatgcccaggagccgtattattcaacggcggtggggctgctgcactacgggaaagagtcacatctcagtggtgaagcggaagtagaaaaacgcgtgacggcctcagtgggctcgtggattaagcgactcaacagctggctgcgaaaagagttttaa

SEQ ID NO: 210091 - DNA, 831 bp, Klebsiella pneumoniae
atgtcgcaggctgcgctgaatacgcggaaccatgaagaagaggcttcttcttcgcgtcggagtaatggaacgcggctggcagggatcgttttcctgctcgcggtgctgtttaccgtgctggtcagcgggtggatggttcttggctggatggaagatgcgcagcgcttaccgctgtcgaagatggtggtgaccggcgagcgccactatacgcgcaatgatgacatccgtcaggcgatcctggcgctgggttcgccgggtacctttatgactcaggatgtgaacatcatccagagccagattgaacgtctgccgtggattaagcaggcgagcgtccgaaagcagtggcccgatgaattgaagattcatctggttgaatatgtgccgattgcgcgctggaatgatcaacatatggtggatgcagaaggaaatgccttcagcgtgccggcggatcgcaccagcaaacagaatttaccgatgttatacggtcccgaaggcagcgagaacgaagtgctgcaggggtatcgtgacatggggcaggtgctggcaaaggataaattcacgttgaaagtggcggcgatgaccgcccgtcgctcctggcagttgacgcttaataatgacatcaagctcaaccttggccgtggcgataccatgaaacggcttcagcgctttatggaactctacccggttcttcagcagcaggcgcagaccgacggcaaacggattagctacgttgatttgcgttatgactcgggtgcggcagtgggctgggtacctgctcccgcagaggaaactaatcaacaacagaatcaggcacaggcagaacaacaatga

SEQ ID NO: 210092 - DNA, 921 bp, Klebsiella pneumoniae
atggctgataaaatcgcggtgcttttcggtggaacctccgctgaacgtgaagtgtcgctgaattcaggcgcggcggtgctggccgggctgcgtgaaggcggggtggacgcccatccggtcgacccgcgcgatgttgatattacccagctaaaaaagcagggctttaagaaagcgtttattgccctccacggccgcggcggggaagatggcactctgcaggggctgctggagttaatccagctgccttataccggcagcggcgtgatggcttcggcgatttcaatggataaactgcgcagcaagtggctgtggcagggcgccggattaccggtcgcgccgtgggtggcgctgacccgcgcccagtttgccgccgggctgtctactgacgtcgaacagcaaattgcggcgctgggtctgccggtcatcatcaagccgagccgtgaaggctccagcgtcgggatgtcgaaagtcagcgaaagttgtgatttagcgagtgcattggcgttggcttttcagcatgatgatgaagttttggtcgaaaaatggctcagtggaccggaatttaccgtcgccatagtcggtgaagaaattttaccgtcaatacgtatccaggccgcgggaaccttctatgattatgaggcgaagtatctctctgatgagacgcaatatttctgcccaggatttgaagatcccgcgcgtgagtcagctattcagaacctggtgcttaaagcctggaatgttctgggttgcaaaggctggggccgtattgacgtgatgctggacagcgatggccagttttatctgctggaagcgaatacttccccgggcatgaccagccatagccttgtgccaatggcggcgcgtcaggcaggaatgagcttctcccagcttgttgtacgaattctggacctggcggggtga

SEQ ID NO: 210093 - DNA, 1476 bp, Klebsiella pneumoniae
atgaatacacaagatttggcaaaactgcgttccatagtgcccgagatgcgtcgcgttcggcacattcactttgtcggcatcggcggtgccggtatgggcggtattgccgaagtgttggctaacgaaggttaccagatcagcggctccgacctggcgccgaatccggtgacccagcagctgtcgcagcttggcgccaccatttatttcaaccatcgcccggaaaacgtgcgtgatgccagcgtggttgtcgtttccagcgcgatttcggcagataacccggaaatcgttgccgcgcatgaggcgcgtatcccggtgatccgtcgtgccgaaatgctggcggaacttatgcgctttcgccacgggatcgccattgccgggacccacggcaaaaccaccaccaccgcgatggtatccagcatttacgccgaggccgggctggacccgaccttcgtcaacggcggactggtaaaagcggcgggcgtacatgcccgtcttggccatagccgttacctgatcgcggaagcggatgagagcgacgcgtcgtttctgcatctgcagccgatggtggccattgtcaccaacatcgaagccgatcacatggatacctaccatggcgactttgagaatctgaagcagacctttatcaacttcctgcacaacctgccgttctacggacgcgcggtgatgtgcgtggacgatccggtgatccgggaattgctgccgcgcgttggccggcagatcaccacctatggttttagcgacgacgccgacgtgcgcgtcgaggactatcgtcaggttggggcgcaggggcatttccgcctggtacgccaggataaagcgatcctgcaggtgacgctcaatgccccgggacgccataacgcgctgaacgcggcggcggccgtcgccgtggcgacggaagaggggattgacgatcgggctattctgcgcgcactggagagcttccagggaacaggacgccgctttgattttcttggcgagtttccgctggccgaagtcaacggcaaaccgggcagcgcgatgctgatcgatgattacggtcaccacccgacggaagtggacgccaccattaaagcagcgcgcgccggctggccggataaaaacctggtgatggtattccagccgcaccgttatacccgtacccgcgatctgtatgatgattttgccaacgtgctgacccaggtggatgccctgctgatgctggacgtctatccggcgggcgaagcgccgatcccgggcgccgacagccgctcgctgtgccgcaccattcgcggccgcgggaaagtggatccgatcctggtgcccgattcggcccaggccgcggagatgctggcgtcagtcctgaccggcaacgatttagtactggtgcagggcgccggtaacatcggtaaaatcgcccgccacctggctgaaatcaaactgatcccgcaaaaaacggaggaggagcgccatggctga

SEQ ID NO: 210094 - DNA, 1047 bp, Klebsiella pneumoniae
atggtgatggcgggcggtaccggcgggcatgtgttcccgggactggcggtcgcgcaccatttaatggaccagggctggcaggttcgctggctgggtaccgccgatcgtatggaagcggatttagtgccgaaaaacggcatcgaaattgattttatccgcatctccggcctgcgtggcaaaggtatcaaagcgcagctactggcgccggtgcgtatttttaacgcctggcgtcaggcgcgggcgatcatgaagcgtttccagccggacgtggtgctgggtatgggcggctatgtttccgggcctggcggtctggcggcgtggtcgctggggatcccggtggtcctccacgagcaaaacggcattgccggcctgactaacaagtggctggcgaagattgcgaagaaagtgatgcaggcgtttcccggcgcgttcccgcatgcggacgtcgttgggaacccggtgcgcaccgatgtactggcgctgccgctgccaggtcagcgtctggttggccgtcaggggccgattcgcgtgctggtggtcggtggctctcagggcgcgcgcgtcctgaaccagacgatgccgcaggtggcggcgaagctcggcgctacggtgaccatctggcatcaaagcggcaaaggcggccagcaaaccgtgcagcaggcctatgccgccgccggacagccgcagcataaagtgacggaatttattgatgacatggccgcggcgtatgcctgggcagatgttgtggtttgccgttccggcgcgctgacggttagcgaaatcgcggccgcaggtttaccagcgctgtttgtcccgttccagcacaaagatcgtcagcagtactggaatgcgctgccgctggagaaagccggcgcggcgaaaattcttgaacagcctgagttcacggtagaggcggttgcctctaccctggcgagctgggatcgggaaaccttgctggatatggcggaacgagcgcgtggcgcttcgattccggacgctaccgagcgggtagcagaagaggtcagcgccgtagctttggcgcgctaa

SEQ ID NO: 210095 - DNA, 1275 bp, Klebsiella pneumoniae
atgcgtttctctctcccacgcctgagaatgccgcagctgagcctgcctcggctgagactgccgcgattgccggggatgtttattttcgcctggctattcgctgcgctgaaaggctgggtgatgggctcgcgcccgaaagataacgacagtctggtgatgtatgaccggatgctgctatggctgaccttcggcctggcggcgatcggctttattatggtgacctcggcgtcgatgccggtcggacagcgcctggcgaacgatcctttcctcttcgccaagcgtgacggcctgtacattgtgctggccttcgcgctggcgatgattacgctacgtctgccgatggatttctggcagcgccacagtaccgcgatgctgatcgcctcgatcgtcatgctgctgatcgtactggtagtaggcagctcggtaaacggcgcatcgcgctggatagcccttggtccgctgcgtattcagccggcggagttcaccaagctgtcgctgttctgctacatcgccaactatctggtgcgtaaagccgacgaagtgcgtaacaacctgcgcggcttcttaaaaccgatgggcgtgattttcgtactggccatcctgctgctggcgcagcctgacctcggtaccgtggtggtcctgttcgtcaccacgctggcgatgctgtttctcgccggcgcgaagctgtggcagttcatcgccattatcggcatgggtatttcggcggtggtcctgctgatcctcgccgaaccataccgtattcgccgcgtgacctccttctggaacccgtgggaagacccgttcggcagcggctaccagctgacccagtcgctgatggctttcggccgcggcgagatgtgggggcagggcctcggcaactcggtgcaaaaactggagtatttaccggaagcgcacactgactttatcttcgccattatcggcgaagaactcggttatatcggtgtggtactggcgcttttaatggtattcttcgtcgctttccgcgccatgtcgattggccgtaaagcgctggagatcgatcatcgcttttccggcttcctcgcctgtgcgattggtatctggtttagcttccaggcgttagttaacgtcggcgcggcggcggggatgctgccgacgaaaggtctgacgctgccgctgatcagttatggtggttccagtctgttgattatgtcgacggccattatgttgttgttgcgaattgattatgaaacgcgtctggaaaaagcccaggcgtttacacggggtgtgcgatga

SEQ ID NO: 210096 - DNA, 1317 bp, Klebsiella pneumoniae
atggcagattatcagggtaaaaaagtcgtcattattgggctgggtatgaccggcctgtcatgcgtggactttttcatggcgcgcggcgtaaccccgcgcgtgatggacacccgcgtcgcgcctccggggctggataaattacccgaatcggtcgaatgccatgtcggcggactcaatgatacctggctgctggcggcggacctgattgtcgccagtccggggattgcgctggcccatccttcgctcagcgcagcggccgacgctggcgtagagatcgttggcgatatcgaactgttctgccgcgaagcgcaggcgccgattatcgccattaccggttctaacggcaaaagcactgttactaccctggtgggcgagatggcgaaagccgctggagttaacgtcggcgtgggcggcaatatcggcctgccggcgctgatgctgctggacaccgatcgagagctgtatgtgctggagctctccagcttccagctggaaaccacctccagcctgcaggcggtggcggcaaccatcctcaacgtgactgaggaccatatggaccgctacccgctggggctgcagcagtatcgcgcggcgaagctgcggatttacgagaatgcgaagacctgcgtggtgaacgcggacgatgcgctcaccatgccggtacgcggggcggacgaacgctgcattagctttggcgtcgatgtcggtgactaccaccttaaccgccagcagggcgaaacctggctgcgcgttaaaggtgagaaagtcctcaatgtgaaagagatgcctctcaccggtcagcataactacagcaacgccctggcggcgctggcgctggccgatgccgcgggtctgccgcgggccagcagcctgaaggcgctgaccacctttaccggtctggcgcaccgtttccagctggtgctggatcacaacggcgtacgctggattaacgactcgaaggcgaccaacgtcggcagcaccgaggcggcgctgaacggcctgcagctggacggcacgctctatctgctgctgggcggcgacggcaagtccgctgattttaccccgctgaagcgctacctcggcggcgatcgtattcgcctgtactgctttggtcgcgatggcgccgagctcgctgagctgcgtcctgaggtggcggtacaaactgagactatggaacaggcgatgcgtcagattgctcccctggtgaaagcgggggacatggttctcctgtcgccggcctgcgctagcctggatcagtttaagaactttgaacaacggggcgagatgtttgcccgtctggcgaaggagttaggttga

SEQ ID NO: 210097 - DNA, 1083 bp, Klebsiella pneumoniae
atgttagtatggctggccgaacacttggtcaaatattattccggctttaacgtcttttcatatctgacgtttcgcgccatcgtcagcctgctgaccgcgctgttcatctcgttgtggatgggcccgcgcatgatcgcccgtctgcaaaaactcgcctttggccaggtcgtacgtaacgacggcccggagtctcatttcagtaaacgcggtactccgaccatgggcgggatcatgatcctcaccgcgatcaccgtttccgttctgctgtgggcctatccatctaacccgtacgtctggtgcgtactgacggtattaatcggctacggcatcatcggtttcgttgatgattaccgtaaagtcgtgcgcaaagataccaaaggcctgatcgcccgctggaagtatttctggatgtcggtgatcgccctgggcgtggccttcgcgctgtatctggcggggaaagataccccggcaaccgagctggtggtgccgttctttaaagacgtaatgccgcagctggggctgttctatatcttgctggcctacttcgttatcgtcggtaccggcaacgccgtcaacctgaccgacggcctcgacggcctggcgattatgccgaccgttttcgtcgcggcaggctttgcgctggtggcatgggccaccggcaacatgaattttgccaactacctgcatatcccgtatctgcgccacgctggcgagctggtgatcgtctgtacggcgattgtcggggcggggctgggcttcctgtggttcaacacctacccggcgcaagtctttatgggcgacgtcggttcactggcgctcggcggcgcgttgggcattatcgccgtgctgctgcgtcaggagttcctgctggtgatcatgggcggggttttcgtggtggaaacgctgtcggttattctgcaggtcggctcctttaagctgcgcggtcagcgcatcttccgcatggcgccgatccaccaccactatgaactgaaaggctggccggagccgcgcgttatcgtgcgcttctggattatttcgctgatgctggtgctgattggcctggcgacgctgaaggtacgttaa

SEQ ID NO: 210098 - DNA, 1359 bp, Klebsiella pneumoniae
atgattcgctttacgttaagtcaacttgccgcgatcgcccatggcgaacggcagggtagcgatgtcgctatcgacgaggtgaccaccgatacccgtaaagtgacggcgggctgcctgtttgtggcgctgaaaggggagcgtttcgacgcccatgattttgccgaacaggcgaaagcggcgggcgccggcgcgctgctggtgagtcgtccgctggcctgcgatctcccgcaggtgattgtgaacgatacccggcaggctttcggtgagttagccgcctgggtgcgtcagcatgtgccgactcgcgtcgtcgccctgaccggctcgtccggtaaaacctcggttaaagagatgaccgcggcgatcctcagccagtgcggcaacacgctgtataccgccggcaacctgaacaacgatatcggcgtcccgatgacgctactgcggctgaccaaagagcatcagtacgcggtgatcgaactcggcgccaaccaccagggcgaaatcgcctggaccgtcagcctgacgcgtccggaagcggcgctggtcaacaaccttgctgcggcgcacctggaaggtttcggttcgctggcgggcgtggcgaaggcgaagggcgaaatctataccggtctgccggaaaatggcatcgccatcctcaatgccgacaataacgactggctgaactggcaggcggtgattggcgatcgcaaagtgtggcgcttctcgccgaacgcggcgaacagcgatttcacggcgaccaacgtgcagatcactagccacggcaccgaatttacgctgcagaccccaaccggcaacgttgacgtactgctgccgctgccgggacgccacaacatcgctaatgcgctggccgccacttcgctggcgatggcggtaggcgccgatttggcggcggtgaaagccggactggcgcagctgcaggccgttccgggacgtctgttcccgatccggctgaccgagagccagctgctgctggatgattcctataacgctaacgttggttcgatgaccgcggcggtgcaggtgctgtcagagatgcccggctttcgcacgatggtggtcggcgatatggcagagcttggcgcggagagcgcggcctgccatcgcgaagtcggcgaagcggcgaaagcggcgggtctggattgcgtcctcagcgtcggtgccttgagcgcggatatcagccgcgccagcggcgtgggcgaacattttaacgataaagccgccgtggtggctcgcctgcgcgagctgctggcggagcacaaaataatgaccattttagtgaagggttcacgtagtgccgccatggaagaggtagtacgcgcattacaggagactgggacatgttag

SEQ ID NO: 210099 - DNA, 1488 bp, Klebsiella pneumoniae
gtggcagatcgtaatttgcgcgacctactcgctccatgggtgccaaacgcaccggagcgcattctgcgagagatgacgctggacagccgggtggctgcttccggcgatctctttatcgcggtacagggtcatcaggcggacgggcgtcgttatatcccgcaggcgatagcgcaaggtgtggctgccattattgctgaagcgcagggcgaagctaaagacggtgagatccgtgaaatgcacggcgtgccggttatctacctgagccagcttaacgaacgcttatcggcgctggccgggcgtttttatcatcagccgtcgcagcagctgcgtctggtgggcgtcaccggcaccaacgggaaaaccaccaccactcagctgctggcgcagtgggcaaagctgctcggcgaaaccagcgcggtgatggggaccgtcggtaacggtctgctggataaagtcgttccaactgaaaacaccaccggttccgcggtggacgttcaacatgtgctctccagtctggtcgggcagggggctaccttcggcgcgatggaagtctcctcccatggtctggtacagcaccgcgtagcggccctgcagtttgccgcctcggtgtttaccaatctcagccgcgatcatctcgactaccatggcgacatggagcactacgaagcggcgaaatggctgctgtactccacccatcattgcggtcaggccatcgtcaatgctgacgatgaagtcggtcgtcgctggctggcaaaactgccggacgcggtggcggtatcgatggaagatcatatcaacccgaattgccacggccgctggctaaaggccaccgcggtgaactatcacgacagcggggcgaccatccagtttgactccagctggggcaagggcgaaatcgaaagccgcctgatgggcgcctttaacgtcagcaatctgctgctggcgctggccacgctgctggcgctgggctatccgctggccgatctgctgaagagcgcagcgcgtttacagccggtgtgcggccgtatggaagtgttcagcgcgccgggtaaacctgccgtggtggtggattatgcccatacgcctgacgcgctggaaaaagcgctgcaggcggcacgcctgcactgcagcggcaagctgtggtgcgtcttcggctgcggcggcgaccgcgacaaaggtaaacgtccgttgatgggcgctatcgcggaagaatttgccgacatcgtggtcgtgactgacgataacccgcgcaccgaagagccgcgggcgattatcaacgatattctggccggcatgctcgatgcaggtcaggcgaaggtgatggaaggccgcgcggaagcggtgaccaacgccgtgatgcaggcgaaagagaacgacgtggtgctggtggcgggtaaaggccatgaagattaccagatcgtcggcaaccgccgtctggattattccgaccgcgtgaccgtcgcgcgtctgctgggagcggtagcatga

SEQ ID NO: 210100 - DNA, 1767 bp, Klebsiella pneumoniae
atgaaagcagcgccaaaaacgcctaaagcaaaacgtcaggaagaacaggccaactttatcagttggcgttttgcgttgctgtgcggctgtattctgctggcgctggcttttctgctgggtcgcgtcgcctggctacaggtgatcagccccgatatgctggtgcgccagggcgatatgcgttctctgcgcgtacaggaagtgtccaccgcgcgcgggatgattaccgatcgctccggacgtccgctggcggtcagcgtgccggtgaaggctatctgggccgacccgaaagagctccatgacgccggcggggttaccctggatacgcgctggaaagcgctggcggatgccctcaatatgccgctggatcagctggcgacgcgcatcaataccaatccgcggatgcggtttatctatctggcgcgtcaggttaaccctgacatggccgattacatcaagaagctgaagctgccgggcattcatctgcgcgaagaatcccgtcggtactacccttccggggaagtaaccgctcacctcatcggctttaccaacgtcgatagccaggggattgaaggggttgaaaaaagctttgataaatggcttaccggtcagccgggcgagcgtatcgtgcgtaaagaccgctatggccgggtaattgaagacatctcttctaccgatagccaggcagcgcacaacctggcgctgagtatcgacgaacgcctgcaggcgctggtctatcgcgagctaaacaacgccgtggcctttaacaaagccgagtcgggcagcgccgtgttagtagatgttaacaccggtgaagtgctggcgatggccaacagcccatcctataacccgaacaacttcgccggtacggcaaaagacaccatgcgtaaccgtgcgattaccgacgtgtttgagccgggttcgacggtgaaaccgatggtggtcatgacggcgctgcagcgcggtatcgtcaacgaaaataccgtgctcaataccgtgccttatcgaattaacggccacgaaatcaaagacgtggcgcgctacagcgaattgaccctgaccggggtgctacagaagtcgagtaacgtcggtgtttctaagctggcgttagcgatgccgtcctcagcgttagtagatacttactcacgttttgggcttggaaaggcgaccaatttggggttggtcggagaacgcagtggcttatatcctcaaaaacaacggtggtctgacatagagagggccaccttttctttcggctatgggctaatggtaaccccgttacagttagcgcgagtctacgcaacgattggcagctatggcatctatcgcccgttgtcgattaccaaagttgatcctccggttccgggcgagcgcgtcttcccggaatcactcgttcgtaccgtcgttcatatgatggaaagcgtggcgctgcccggcggcggcggtgtgaaagcggcgatcaaaggctatcgcatcgcgattaaaaccggtacggcgaaaaaagtggggccggatggccgctatatcaacaaatatattgcttacaccgcaggcgttgcgcccgccagccatccgcgcttcgcgctggtggtggtgatcaacgacccgcaggcaggtaaatactacggtggcgccgtttccgcgccggtcttcggtgccatcatgggcggcgtattgcgcaccatgaacatcgagccggatgcgctggcaacgggcgaaaaaagtgaatttgtaattaatcaaggcgagggaacaggtggcagatcgtaa

SEQ ID NO: 210101 - DNA, 366 bp, Klebsiella pneumoniae
atgatcggcagagtgacagaggccttaagcaaggttaaagggtcgattggaagcaacgagcgccatgctttgcctggcgtgatcggggacgaccttctgcggtttgggaaactgccactctgcctgttcatttgcatcattattacggcgattaccgtggtcaccactgcgcatcacacgcgcctgttgaccgcgcagcgtgaacagctggttctggagcgcgacgccctggatattgagtggcgcaacctgatcctcgaagagaacgcgctcggcgatcacagtcgggttgagcggatcgcgaccgagaagttacagatgcaacacgtcgatccatcacaagaaaatatcgttgtacagaaataa

SEQ ID NO: 210102 - DNA, 942 bp, Klebsiella pneumoniae
atgatggaaaattataaacatactacggtacttctggatgaagccgtcaacggcctcaatattcgtccagacggtatctatattgatggtacttttggccgcggtggtcactcgcgcctgatcctctcccggctgggtgcggaaggacgcttgctggccatcgatcgcgacccgcaggcgattgccgtcgcgcaaaccatcgatgacccccgcttttccatcgtacatggtcccttttcacaactcgctgagtacgtcggcgagcgcaatcttaccggtaagatcgacggcattctgctcgatctcggcgtctcttccccgcagcttgacgatgcggaacgcggcttttcctttatgcgtgacgggccgctggatatgcgcatggatccgacgcgcggtcagtccgcggccgaatggctgcagacggctgaagaagacgatatcgcctgggtgattaaaacctttggcgaagagcgtttcggcaaacgtatcgcccgcgcgatcgtcgaacgtaatcgcattcagccgatgacccgtaccaaagagctggcggaagtcatcgccgcggcgatgccggtaaaagataagcacaaacatcccgcgacccgtaccttccaggcggtgcgcatatgggtaaacagtgaactggaggagatagagcaggcgctaaaaagctcgctcagcgtgctggccccgggcgggcggctgtcgatcattagttttcattcgctggaagatcgcattgtgaagcgctttatgcgtgagcaaagccgcggtccgcaggttccggcgggaataccgatgaccgaagcgcagctcaaaaaactgggcggccgtgagttgcgagcactaggcaagttgatgccgggcgaagaagaggtggcagagaatccacgcgcccgtagttcagtgctgcgtatcgcagagaggacgaacgcatga

SEQ ID NO: 210103 - DNA, 459 bp, Klebsiella pneumoniae
atgttccgtggagcaacgttagtcaatctcgacagcaaaggccgcctggccgtgccaacgcgctatcgcgaagggctgatcgaggacgctgccggtcaattggtatgcaccattgacattcatcacccgtgcctgctgctttatccattgcctgaatgggaagtcatcgagcagaaattgtcgcgtttatcgagcatgaatcccgttgagcggcgcgtacagcgtttgcttttgggtcatgccagcgaatgtcagatggataatgccggccgcttgctgattgcgccggtgttacggcagcatgccgggctgacaaaagaagtgatgctggtcgggcagtttaataaatttgaactgtgggatgaaacgacctggtatcaacgggtcaaggaagatatcgacgctgagcagtccgcgaccggtgaactgtcggagcgcctgcaggatttgtccttataa

SEQ ID NO: 210104 - DNA, 1005 bp, Klebsiella pneumoniae
gtgaaactggatgaaatcgcccggctggccggtgtttcaagaaccaccgcgagctatgtgattaatggcaaagcgaagcagtaccgcgtaagcgataaaacggtcgaaaaagtgatggctgtggtgcgagagcacaactatcacccaaatgcggtcgctgctggcctgcgtgcaggacgcacacgctctatcggtctggtgatcccggatctggaaaacaccagctatacccggattgcaaattatctcgaacgtcaggcgcgtcagcgcggctatcagctgctgattgcctgctcggaggatcagcccgataacgagatgcgctgcatcgagcatctgctgcagcgccaggtggacgctatcattgtctctacttcgctgccgccggagcatcctttttatcagcgctgggctaacgacccgtttccgattgtcgccctcgaccgcgccctcgatcgcgagcacttcaccagcgtggttggcgctgaccgggatgacgccgagatgctcgcagctgagctgcggacgtttcctggcgaaacggtgctctatctcggcgcgctgccggagctgtcggtgagcttcctgcgcgaacagggcttccgtaaagcctggcaggacgatccgcgtgaggtgcattatctctatgccaacagctatgagcgcgaagcggcggcccagctgtttgagaaatggcttgaaacccatccgatgccacaggcgctgtttaccacctctttcccgctgctgcagggcgtaatggatgtgaccttgcgtcgcgagggtaaactgccctccgagctggcgatcgccaccttcggtgataatgagctgctcgattttctgcagtgtccggtactggccgtggcccagcgtcatcgcgatgtcgctgagcgggtgctggagattgtcctcgccagcctcgacgaacctcgcaagccgaagccgggtcttagccgtattcgccgtaatctctatcgtcgcggtagcctgaatcgccgctaa

SEQ ID NO: 210105 - DNA, 492 bp, Klebsiella pneumoniae; identical to SEQ ID NO: 138453

SEQ ID NO: 210106 - DNA, 1725 bp, Klebsiella pneumoniae; identical to SEQ ID NO: 138454

SEQ ID NO: 210107 - DNA, 951 bp, Klebsiella pneumoniae; identical to SEQ ID NO: 138455

SEQ ID NO: 210108 - DNA, 1572 bp, Klebsiella pneumoniae
atgagccagcaagtcattattttcgatacgaccttacgtgatggcgaacaagcgttacaggcaagcctgagtgtcaaagagaagctgcagatcgcactggcccttgagcgaatgggggtcgacgtaatggaagtcggtttcccggtatcctcgccgggcgattttgaatcggtgcaaaccatcacgcgcaccattaaaaacagccgcgtgtgcgccctggcgcgctgcgttgagaaagatatcgacgtggcggcggaatcgttaaaagtggccgaggctttccgtattcatacctttattgccacctcgccgatgcatatcgccaccaaactgcgcagtacgctggatgaggttattgagcgcgcgatctatatggtgaagcgggcacgcaactacactgacgacgttgagttctcctgtgaagacgccggccgtacgccgattgccgatctggctcgcgtcgtggaagcggcgatcaacgccggcgccaccaccattaatatcccggataccgtcggctataccatgccgttcgaatatgccaacatcatcagcggcctgtatgatcgcgtgccgaatatcgacaaagcaattatttccgtccacacccatgatgatctgggcatcgctgtcggtaacgccctcgccgcggtccacgccggtgcgcgccaggtagaaggtgcgatgaacggtatcggcgaacgcgccggcaactgcgcactggaagaagtgatcatggcgatcaaagtgcgcaaagacatcatgaacgtgcacaccaacattaatcatcatgaaatctggcgcaccagccagaccgtcagccagatctgcaatatgccgatcccggcgaacaaggccatcgtcggcaccggcgccttcgcccactcctccggcattcaccaggacggcgtgctgaagaaccgcgaaaactacgagatcatgaccccggaatctatcggcctgaaccaggtgcaactgaacctgacttcccgctccggccgcgcggcggtgaaacaccggatggaagagatgggctaccaggagagcgattacaacctggatcatctgtacgacgcattcctgaagctggcggacaaaaaaggccaggtcttcgattacgatctggaagcgctggcctttatcaacaagcagcaggaagagccagagcatttccgcctggattacttcaacgtccaatccggatccagcgatatcgccaccgcctcgatcaaactggtctgcggggatgagatcaaaaccgaagccgccaacggcaacggtccggtcgatgctatctaccaggcgattaatcgcgtcaccgactacaacattgaattagtgaagtatggcttaagcgcgaaaggccacggcaaagacgccctgggccaggtggatatcgtcgttgactacaatggccgccgcttccatggcgttggtctggcaacggatatcgtagagtcgtcagccaaagcgatggttcacgtgctgaacaacatctggcgcgccgccgaagtcgaaaaagaattgcaacgcaaagctcagaataaagagaacaataaggaaaccgtgtaa

SEQ ID NO: 210109 - DNA, 1092 bp, Klebsiella pneumoniae
atgtcgaagaattaccatattgccgttttgccgggtgatggcattggcccggaagtgatgaaccaggcgatgaaagtactggaagccgtgcgccaacgttttgccatgcacattaccaccagccagtatgacgttggcggggcggccatcgaccgtcagggaactcccctgccgcaggcgaccgtcgccggatgcgagcaggcggatgcgatcctgttcggctccgtcggcggtccgaaatgggagcacctgccgccggcggaacaaccagagcgtggcgcgctgctgccgctgcgtaaacactttaaactgttcagcaacctgcgcccggccaaactgtatcaggggctggaagagttctgcccgctgcgcgccgacatcgctgctaacggcttcgacattctctgcgtacgcgaactgaccggcggcatctacttcggccagccgaaaggccgcgaaggcagcggtcagcatgagaaagcctttgataccgaggtgtatcaccgctttgagatcgagcgtatcgcgcgcatcgcttttgaatccgcccgcaagcgtcgtcacaaagtgacttccatcgataaggccaacgttctgcagtcctccatcctgtggcgcgaaatcgtcagcgagatcggcaaggagtatccggacgttgagctggcgcatatgtatatcgataacgccaccatgcagctgattaaagatccgtcccagttcgacgtgctgctgtgctccaacctgtttggcgacatcctctccgacgagtgcgcgatgatcaccggctcgatgggtatgctgccgtccgccagcctcaatgaacaaggttttggcctgtacgagccggcgggcggttccgcaccggatatcgccggcaaaaatatcgccaacccgatcgcgcagatcctctccctggctctgctgctgcgctacagcctcgacgctgacgaagcggcgaccgccattgaaaacgcgatcaaccgcgccttagaagaaggggttcgaaccggcgacttagcgcgcggcacggcggcggtcagcactgatgaaatgggcgatattattgcccgctatgtcgcagaaggggtgtaa

SEQ ID NO: 210110 - DNA, 1401 bp, Klebsiella pneumoniae
atggcgaagacgttatacgaaaaattatttgatgcgcacgtagtgtatgaggcgcagaacgaaaccccgctgctgtatatcgaccgccatctggtgcacgaagtcacctctccgcaggcgtttgacggtctgcgcgcccatggccgccaggtgcgccagccgggtaaaaccttcgctaccatggatcataacgtctcgacgcagaccaaagacattaacgcgtccggtgagatggcccgcattcagatgcaggagctgattaagaactgtaaagagttcggcgttgaactgtacgacctgaaccacccgtatcagggcatcgtccacgtcatgggcccggaacaaggggttaccctgccggggatgacgatcgtgtgcggtgactcccataccgccacccacggcgcgttcggtgcgctggcgttcggtatcggcacctccgaagtggagcatgtgctggcgacccagaccctgaaacagggccgcgcgaagaccatgaaaatcgaagtccagggcaaagcggcgccgggcattaccgccaaagatatcgtgctggccatcattggtaaaaccggtagcgccggcggcaccggccatgtggttgagttctgcggcgaagcgatccgcgatctgagcatggaagggcgtatgaccctgtgcaacatggcgatcgagatgggcgccaaagcgggcctggtcgcgccggacgaaaccaccttcaattacgtacgcggccgtctgcatgcgccgaaaggcaaagattttgacgatgccgtagcgtactggaaaaccctgaaaaccgacgacgccgcgacgtttgataccgtggtgacgctgcaggcggcggaaattgccccgcaggtgacctggggcaccaacccgggccaggtgatctcggtgacggataacatccccgatccagcgtcgttcagcgatccggtggaacgcgccagcgccgaaaaagcgctggtctatatggggctgaaatccgggatcccgctgacggaagtcgctatcgataaagtgtttatcggctcctgcaccaactcgcgcatcgaagatttacgcgccgcggcggaaatcgctaaagggcgtaaagtggcgccgggcgtccaggcgctggtggtgccgggttctggtccggtgaaagcgcaggcggaagcggaaggtctggataagatctttatcgaagccggctttgagtggcgcttacctggttgctctatgtgtctggcaatgaataatgaccgcctgaatccgggcgaacgctgtgcctcaaccagcaaccgtaactttgaaggccgtcagggccgcggcggacgcacgcacctggtgagcccggcaatggccgcggcggcagccgttaccggccatttcgccgatatccgtaatctgaagtaa

SEQ ID NO: 210111 - DNA, 606 bp, Klebsiella pneumoniae
atggcagagaaatttacccaacataccggcctggtggttccgctggatgctgcaaacgtcgataccgacgcgatcatccctaagcaatttttgcagaaggtcacccgcaccggctttggcgcgcacctgtttaacgactggcgctttctcgacgataaaggtcaacagccgaacccggagttcgtgctgaattttcctgagtaccagggggcatcgatactgctggcgcgggaaaacttcggctgcggctcctcgcgcgagcacgcgccgtgggcgctgaccgattacggctttaaggtcgttatcgccccgagctttgccgatatcttttacggcaacagcttcaataaccagctgctgccggtgaccctgagcgacgagcaggtcgatgaactgttcaagctggtgcaggccaacccgggcattacgtttgaagtggatctggaagcgcaggtagttaaagccggggataaaacctacagctttaagatcgacgatttccgccgccactgcatgctcaacggcctggatagcatcggcctgacgctgcagcatgaagcggcgatctccgactatgaacgcaagctgccggcatttatgaattaa

SEQ ID NO: 210112 - DNA, 2034 bp, Klebsiella pneumoniae
atgagccactatccgcaccttttcagtccgttgaccatcaacggtatgacgttaaaaaaccgcattattatgccccctatgggcaccaatatggccacgctcaatggcgaggtgtcgcaggaacagctggaatactacgaactgcgggccaaaggcggcaccgggcttatcaccatcgaaaatatttgtattgatttccccttcgcctccaacggcaccacccaactgcgcatcgataacgatcaatatattccacggctgtttaaattaaccgagaccctgcataaacatggcgcctgcgtatccattcagttaaatcatgccggcgcttccgcttatgcctaccgactggaaggccagacgccgctctcctcttctacaacgccgtcgaagaagcacggtaatattccgcgtccgatgacccatgaggaaatatatcatgcggtagaaaaatttggtgacgccgcggagcgcgttcggcgcgcaggttttgactgcgtcgaaattcatgccggtcactcctatttaattagccagtttttatcgccgctgtttaataagcgcactgatgaatttggcggcagcgtcgaaaatcgcactcggatactgagtctgattgtcgataaggttcgcgcctgcgtggggccgcgttttccggtcagtctgcgcatcagcgccgacgacttcctcaagggcggcaataccctcgaagattccctgcgtattcttgagctctgccaggagaaggtcgatatcatcaacgtctctgcggcacagaacgacaacctgaatctgcaaatcgatcagatgtcgctggaggatggctggaagcgctatctctcccgcgcggtgcgcgataaattccataaacccacggtcatcgccggcaatattcgcactccacaggtagccgaagatatcctcgccagcggcgatgccgatcttatcgccattggccgcggtctgattgccgagccggagtgggtgcagaaagtgcaaggcggaaaagagcgtctgatgcgcaaatgtatctcctgcaacatcggctgcgccgaccatcgcatcgcccgctcgcgcccgctgcgctgttcgattaacccggatattattcacggtgacgcctataaaatgcggcgcgtgaatcgcgacactaacgtggtggtcatcggcgccggcaccgccgggatggaagccgcctgcaccgcggcggaagttggttgccatacctggctgctggaagcgaaaaaccacgtcggcggcctcgccagcgaaatctcccgcctaccggagaaaaaacgcatcgctgatttcccgcagtttatgaaaaatcgtatcgcctcgctggacaacctgatgctgcagatcggcaagcgggccgacgtggcttcagtttccgccctgcgtccgcatctgattgtcaacgccaccggctcaacgccgctgctgccgcccattgaaggcttgcgggaaaacattgacgtcgagaacggcaagatcttttccattaccggcatgatcgacaatctggcgaaatttaccgatatcaagggcaaacgcatcgccgtagtcggcgctggcgccgttggccttgacgttatcgaatactttaccgctcgcggcgcacaggcggtgctaatcgagatgcaggacgccgccggtcgcgatctcgacatcattaccaaaaatgccatgttgaccatgctcgacgagcaccaggtcgaacagcacatgaatacccaactgatggcggtcgctgccgaccatttccaggtgaaaaatacacagcaaaccttcgatattcccttcgactacggctttgtctgtctggggatgcgcgccaaccggacgggtctcgacgagatcgagcgctgggccaatgccaataacgtcaaaatcatgaacatcggcgacagcgtgatggcgcgacgcattatcgatggcgtccgcgaaggccgcaacgtactggatgcactggaagacatgggtgcgctgggcagccgcgaagcacaacgaattccctttctaacttattga

SEQ ID NO: 210113 - DNA, 864 bp, Klebsiella pneumoniae
atggcagaacgtattactggacacactgagctgattggcctgatcgccaccccgattcgtcacagcatgtcgcccaccatgcacaacgaggctttcgcccatctcgggctggactacgtctatctcgcttttgaagtcggtaaccaggagctaaaagacgtggtgcagggcttccgggcgatgaagctgcgcggttttaacgtctctatgccgaacaaaaccgagatttgccagtatctcgataaactgtcgccggcggcacagctggtcggggcggtcaataccgtggtcaacgacgacggcgtactgaccggacatatcaccgatggcaccggctacatgcgcgcccttagcgaagccggtatcgatatcatcggcaagaagatgaccgtactcggcgccggcggcgcggcaacggcgctctgcgtccaggcagcactggatggcgtgaaggcgatctccatcttcaaccgccgcgataaattcttcgccaacgcagaagaaaccgtggccaagatccgccacaacaccgactgcgagatccatctgttcgatctcgacgatcatgacaaactgcgcgccgaaattgacagcagcgtgatcctgaccaatgccaccggggtcggcatgaagccgttcgaaggccagatgctgctacctgacgacagcttcctgcgtccggacctgatcgtctccgacgtcgtctacaacccgcgcaaaacccacctgctggaagtggccgagaaaaaaggctgccgcacgctgaacggcctggggatgatgctgtggcaaggcgcgcgcgcgttcgaaatctggacgggcaaacagatgccggttgattacatcaagagcattctgttctaa

SEQ ID NO: 210114 - DNA, 1215 bp, Klebsiella pneumoniae
atgaaaaataaatacatccctactgcggcagggctgtatctcaactacctgatccacggtatgggggtgctgttaatcaccctcaacatggcccatcttcaggaacagtggggaacagacaaagccggcgtatcgatcgttatatcttcgttaggtattggtaagttagcgaccatcgtgaccggatttctctcggatcgcttcggtcgcaagccctttatctatcttgggatccttagctacctgatctttttcgtcggcatcctgctgaccaaaaatatctatctggcttacgtgttcggcattatggcgggcctggcgaacagcttcctcgactccggtacctatccggcgctgatggaatctttcccgcactctgccagccgggccaacgtgctgatcaaagccttcgtctctgcagggcagttcctgttgccgttcattatcagcttcctgatatgggcaaatctgtggttcggctggtcgttcgtgattgcggcagcgctctttgtactgagcgggatttatctgcttaaaatgccgttccctgacagccaggcggcgaaaaaagaggaagcccctacggcacaggcggaaacagccgtccggccacaggctaataagctggatatggtgatcttcaccctgtacggttatatcggcatggcgaccttctatctggtcagccaatggctggcgcagtacggccagttcgtcgtcggcctgccctatgcctcggcgattaaactgcttagcatctataccgtcggctcgctggtctgcgtctttgtaactgccgccttcgtcaaagaggtgtttagctcggccattgcgatgattatttatactggcctgtcgatgatttcgctgctgttggtgtgcctgttcccgacgccgatgatggtgaccggctttgcttttgtcatcggctttgccgccgctggcggagtgctgcagctgggtgcgacaatcatggcgatgagcttcccgaacggaaaaggcaaagcaaccggcatcttctacactgccggcagtatcgccagcttcacgatcccgttgatcaccgcaaagctttcgcagatcagtattgccagcattatgtggtttgattttctgatcgccgttatcggctttgtgatcgccctgtacatcggctatcgtcaactgcaggctcgggcggcgcaaaaagtatcacgcaccgcagtcaccgcctga

SEQ ID NO: 210115 - DNA, 756 bp, Klebsiella pneumoniae
atgacaaatgcagtaaccgtaaagaacatcacctttcaggaaggggaaaccctcatttgtgtaccgctgatcggtaaaaccctggatgagatactgggtaacgcccacggcctggtcgatgccggcgccgatattatcgaatggcgcgttgaccactttgcccaggtcagagagatggcccaggtgatggccgcgctggcggaaatccgtggcgcgctgaaagcgcttccgctgctgtttaccttccgcagtaagaaagaaggtggcgaaaccgagctcagcgacgaagcctattttgcgctcaaccgcgaggccgcacgcagtggactggttgatgttatcgatatcgaactgttcaatgatgaagcgcagatccgcgcgctggttgacgatgcgcatgccgcgggcgtcaaggtgatcatgagtaatcatgatttccataagacccccgctcaggaagatattatctatcgcctgcgccgcatgcaggatctgggggccgatctgccgaagatcgcggtgatgccgcagtcgccgcaggacgtactcaccttgctcgccgccacgctgaccatgaaagagaagtatgcgacgcgtccgctgatcaccatgtcgatgggcaaatccggtggcgttagccgggtcaccgggcgcttgttcggttcggcgatgaccttcggtaccgttggtcaggcctccgcgccggggcagatcgccatcgctaagctgcgtgaagtgatggatatgctctcctga

SEQ ID NO: 210116 - DNA, 897 bp, Klebsiella pneumoniae
atgaacctaaagcaactttattattttaaacgtctgtctgaaactgagcattacaccgaagccgcctccagtctgtgcatcacccagccctcgctaagccacgcgatatcggagctggagaaggagttaggggtcgcgctattcgccagacaggggcggaacgtaaaaattacccaaaacggcaagcgttttttgccgtatgttgaagatgcgctggcctcgctggagaacggacgcatgatattgcaaaaaaatggcgctgagaataaagagaatattcgcatcgcctttatttacacgatgggggagtatgttgttccacagttaattaataaatattctctttcacctgaatgtcacaatgtgactttttcttttactcaagggacatcgctgacgctgttgcaggagctgaaggccggaaaagtcgatctggcgatctgctcttatattgccgatgaacccgatatcgattttattccggtgatccagcaggaactggtggtggtcacggcaaaggatcatccgctggcccggctatatgaacatgaagtcgatctggtggagacgattcattatccgtatatctatttttcagaaaatagcggcttacgtccgtttatcgataatgtatttatgcagcaaaagctggtgccggagatcgcctgctatgtggatgaggatacggcgatggccgggctggtgagtattgactacgggatcgcgattatgccgcgcatcaccgcgctctcctattacaatgtccatatcctgaagattaaaaacaccatccccccccgctatatctatctggcgaccatgaaagacaaggggctctctccggcgctggagtcatttaaaaatgtggttatccacgacagccagaagatctgttaa

SEQ ID NO: 210117 - DNA, 1311 bp, Klebsiella pneumoniae
atgagtatgtcaaactctcaggaagtcctcacttccacatcgggggcgaaaaaaagaagccgcgtacggatagttattctgctgctactctccgtcggaacgatgataaattatctcgaccgtaccatcctgggtattgtagcgccacagttaagcaaagaaatccatatcgatccggcgatgatgggcatcatcttctccgccttcgcctggacttatgcgctggcgcagatccccggcgggatgtttttagaccgctttggcaacaaagtgacctatgccctgtcaattttcttctggtcgctgtttaccctgctgcaaagtttcaccctcggcctaaaatccctgctgcttctgcgcctgggactcggcgtcagcgaagcgccctgctttccggccaacagccgcatcgtcagcacctggttccctcagcatgagcgcgcgcgggcaacggcaacgtatacagttggtgaatatatagggctggccgctttctcgccgctgttatttttaattctcgaacatcatggctggagaacgctttttttcctcaccggcggattaggtattttatttactttagtgtggtggcgtttttatcatgaaccgcatgaatcgcgcacggctaatcaagcggagctggagtatatcggcgcaagcagcattaacaataaaatccagaacgttccatttaactggcgtgacgccagacgcctgctgggctgtcgccagatcctcggcgccagcctgggtcagttcgccggcaacaccacactggtctttttcctgacgtggtttcccagctacctcgccaacgagcgccatcttccatggctgcacgtcggcttcttcgccacctggcccttccttgccgccgcgattggcatcctcttcggcggctggatctccgaccggttgttgaagcgaaccggctccgtcaacatcagtcgaaagttaccaataatttccggtttattgctgtccagctgtattatcgcggcgaattgggtaagcgccaatagcaccgtaattattatcatgtcggtggctttttttggccaggggatggtcggtctgggctggaccttaatttcggatattgccccggaaaatatggcaggcctcaccggcggcatatttaatttctgtgccaatatggcctcgattatcgcaccactgataattggtgtgattatttccgccacgggtaatttcttttacgcgctgatctacgtcggcctgacggcgctgattggggtgattgcctacatttttatcatcggcgacattaagcgtatcgaactcaagtag

SEQ ID NO: 210118 - DNA, 1185 bp, Klebsiella pneumoniae
atgctgtggttgatgacgatgggacgacggcttaacggcgtctatgccgcctttatgctggttgcttttatgatgggcgtggcgggcgcgttgcaggcgccgacgttgagtttgtttcttagccgcgaagtgggggcgcaaccgttctgggtgggcctgttctataccgtaaacgccatcgccgggatcctggttagcctgtggctggccaagcgctccgatagccgcggcgaccggcggcggttgattatgttctgctgtctgatggcggtgggtaatgcgctgctgtttgccttcaaccgccactatctgacgctgatcacctgcggcgtgatgctggcatccattgccaacgccgccatgccgcagctcttcgcgctggcgcgggagtacgccgacagctcggcgcgggaagtggtgatgttcagctcggtcatgcgcgcccagctgtcgctggcttgggtgattggcccgccgctggcctttatgctggcgctcaactatggcttcaccaccatgttctccattgcggcgggcatttttgtcattagcctcgctctgattgccatcaaactgccttcggttccgcgtgtggaacagccctcggaggaggcggcggcgctagcgcaggccggcggctggcaggacaagaacgtgcgtatgctgtttatcgcctccaccctgatgtggacctgcaacaccatgtacatcattgatatgccgctgtggatcagcagcgatctcgggcttcccgacagcctggccgggatcctgatgggcactgccgccgggctggagataccggcgatgatcctcgccggctactacgtaaagcgctttggcaaacgtaaaatgatggtggcggcggtggccgccggcgtgctgttttatgccggactgatcctgtttcatggtcgcacggcgctgctggctctgcagctgttcaatgccatctttatcggcattatcgccgggataggcatgctgtggttccaggatttaatgccgggacgggcgggagcggcgaccaccctgttcaccaacagtatttccaccggcgtgatccttgccggcgtgatgcagggggcgctgtcccagagctatggtcacgccagcgtctactggacgatcgcggccatttcgctggtgacgctgtttttgaccagcaaggtgaaggatatctga

SEQ ID NO: 210119 - DNA, 153 bp, Klebsiella pneumoniae; identical to SEQ ID NO: 137091

SEQ ID NO: 210120 - DNA, 1656 bp, Klebsiella pneumoniae
atgtcttccggccgtctgcaacaacagttcattcgcctatggcagtgctgcgacggcaagtcgcaggagaccacccttaacgagctggcggaaatgctgagctgctcgcgccgccatatgcgcaccctgctcaatatgatggagtcccgcggctggctgacctgggaagcggaggcaggccgcggcaagcgttcgcggctaacctttctctataccggcctcgccctgcagcagcaacgtgccgaagatctccttgagcaggatcgcatcgatcagctggtgcagttggtcggcgataaggctgccgtccgccagatgctggtctcgcatctcggccgcagcttccgccaggggcggcacatcctgcgcgtgctctactaccgaccaatgaagaatttgctgcccggtagcgcgctgcggcgttcggaaacgcatattgcccggcagattttcagcgccctgacgcgggtaaatgaggaaaatggggaactggaagccgatattgcccaccactggcagcagttgtcgcccacccactggcgctttttcctccgcccgggcatccattttcaccatggccgtgagctggagatggcggatgtgatcgcctctctgcagcgcagcaatgccctgccgctctattcacatatcgaacgcatcgaatcgcccaccgcctggaccctggatattcatctgcgccagcccgaccgctggctgccctggctgctggggcaggtgccggcgatggtgctgccgcaggagtggcagaccatgaaccacttttcctccatgccggtcggcaccggcccctatgccgtggtgcgtaacaaccagaatcagctcaagatccatgcctttgaggactattttggctaccgggcgctgatcgatgaggtgaacgtctgggtgctgccggagattagcgaagagcccaacggcggcctgacgctgcagggcaataccgaaagcgaaaaagcggtggagagtcgcctggaagagggctgctattacctgctgttcgactcgcgaagcccgctgggggccaacgacgcggtgcgccgctggctaagctatctgtttcagcccgccaacctgctctaccatgcgggcgaacactaccagggcaactggtttcccgcctacggcctgctgccgcgctggcatcacgccagcaaccacgcctgcgagaagccggcggggctggagacagtcacccttacctactaccgcgatcacgtcgaacatcgggtgatcggcgggatcatgcgcgacctgctgacggcgcatcaggtaaagctggagatccaggagctggagtacgatgcctggcatcgcggcgaggtggtcagcgatatctggctcaacagcgtgaacttcaccttaccgatcgaattttcgctcttcgcctatctgtacgaagtcccgctgattcagcgctgcatccccattgactggcaggcagacgcctgccgctggcgagcaggagagtttaatccggccacctggagccagcggctgctggccgggcaacatatcgtgccgctgatccaccactggctgatgattcagggtcagcgcagtatgcgcggcgtgaggatgaataccctcggctggttcgattttaaatccgcatggtttgcgccgccggagccgtaa

SEQ ID NO: 210121 - DNA, 984 bp, Klebsiella pneumoniae
gtgttgaaaaaattactcccgctgctggcgctggtcgccatgcccgctttggctaagcctgttcttaccgtctatacctatgactccttctctgccgactggggccccggcccggcggtcaaaaaagcctttgaagcggagtgcggctgcgagctgaagttcgtcgcgctggaagatggcgtttcgctactgaatcgcctgcgcatggaaggcaaaaacagcaaggccgacgttgtgcttggccttgataacaacctgctggaagccgcggcgcagagtaaactgtttgccaaaagcaacgtacccgccagcgcggtcagcgtgccgggcggctgggataatgacacctttgttccctacgactacggctatttcgccttcgtctatgacaaaaacaaactggctaatccaccgaagagcctgaaagagctggtcgagggcccgcaaaaatggcgggtcatctatgaagatccgcgtaccagcaccccgggactgggcctgctgctgtggatgcaaaaggtctatggcgatcaagcgcccgaggcctggcagaagctggccgcgaaaaccgttaccgtcaccaaaggctggagcgaagcctatggcctgttcctgaaaggggaaagcgacctggtgttgagctataccacctcgccggcctaccacatgattgaagagaagaaagacaactatgcggcggcgagcttcgccgagggccactatctgcaggtcgaagttgccgcgcgtaccgccgccagcaagcagccggaactggcggaaaaattcctcaaatttatggtatctcctggcttccagaacgccatccctaccggcaactggatgtatccggtgacccaggtcaccctgccggccgggtttgataccctggtgaagccgcagaccaccctgtcctttaccccgcagcaggtcgccagcgagcgtcaaacctggattagcgcatggcaacgcgccgtcagccgctaa

SEQ ID NO: 210122 - DNA, 1611 bp, Klebsiella pneumoniae
atggcaacgcgccgtcagccgctaaaccttcgcgggctgatgccgggcctgttcgccgctacgctgctgtgcgctgtcgcgctggcggcgtttctggcgctgtggtttagcgcccccggcgcgggctggcaatcggtcttcagcgatagctacctgtggcatgtggtccgcttctccttctggcaggcgtcgctgtcagcgctgatctcggtgggaccagccatctttctcgcccgcgcgctttaccggcgtcgcttcccgggccgtacgttgctgctgcgcctgtgcgcgatgaccctgatcctgccggtgctggtggcggtgttcggtatcctcagcgtctatggccgccagggctggctggcctcactatttaacgcgctcggctggcaatgggagttctcgccctacggtctgcagggcatcctgctggcgcacgtctttttcaatatgccgatggcgacccgcctgctgctgcaggcgctggagaacattcccggcgagcagcggcaaattgccgcccagcttggcatgcgcggctatgccttcttccgcctcgtcgaatggccgtggctgcgccggcacattcccgccgtcgccgcgctgatttttatgctctgcttcgccagcttcgccaccgtgctctcgctgggcggcggcccgaaagccaccacgatcgagctggctatctaccaggcgctgagctttgactacgatccggcgcgagcggcaatgctggcgctgatccagatgctctgctgccttgggctggtgctgcttagccagcgtctgagtaaagccgtcgccatcggcgtcagccatgtgcgcggctggcgcgaccctgacgatcgcctgcatagccgcctgagcgacgggttgctgatcggcgccgccctgctgctgctgctcccgccgctgctggcggtcatcgtcgacgggatcaaccgtaatatgctggacgtgctggcgcagccagcgctctggcaggcattgagcacctctctacgcatcgccatcgccgccgggctattgagcgtgaccctgacgatgatgctgttatggagcagccgggagctgcgcgctcgccagcggccgttggccgggcaggcaatggagctgagcggcatgctgatccttgcgatgccgggaattgtgctggcgaccggcttcttcctgctgctcaataacactatcggcctgccggagtccgccgacggcatcgtcatcttcactaatgccctgatggcgatcccctatgcgctgaaagtactggaaaacccgatgcgcgacattgccgcccgctacagcatgctgtgccagtcgctgggtattgaaggctttgcccggctgcgggtggtcgagcttcgcgctctccggcgcccgctggcccaggcgctcgccttcgcctgcgtactgtcgattggcgatttcggcgtggtggcgctgttcggcaacgaggcgttccgcaccctgcctttctatctgtaccagcagataggcgcctaccgcagccaggacggggccgtcaccgccctgctcctgctgctgctctgtttcttgttgtttacgctgattgaaaaacttccggggcgtgatgctaaaactcaatga

SEQ ID NO: 210123 - DNA, 702 bp, Klebsiella pneumoniae
atgctaaaactcaatgatgtgacctggctataccagcatctgccgatgcgcttcaccctcgacgtcgcgcgcggggagcgcatcgcggtgctcggtcccagcggcgccggaaagagcaccctgctgaatctgatcgccgggtttctgccacccgccagcggcagcctgctgattaacggcgaggcgcataacgcgacgccgccggcgcagcgtccggtctcgatgttgtttcaggagaataacctgtttaaccatctgaccattcgacaaaatatcagcctcgggatccacccaggccttaaactgagccgcgagcagcaggcgcaggtcacggcgatagctggacagatgggaattgatgcgctgctggaacgtctgcccggcgagctctccggcggtcagcggcagcgcgcggcgctggcccgctgtctggtgcgccagcagccggtgctgctgctggatgaacccttctcggcgctcgatccggcactgcgccaggagatgctgtccctggtcgccgatgtctgcgagcagcagcagctcaccctgctgatggtctcccacagcgtagaggacgccgcgcgcatcgcgccgcgctcgatggtggtcgccgaagggcgcattgtctgggatggcgccaccgccgagctgttaagcggccacagcagcgcctcgcatttgatggggatcagcgcgcgatga

SEQ ID NO: 210124 - DNA, 768 bp, Klebsiella pneumoniae
atgcaagcattgctcgaacactttattacccaatccacggtctactcattgttagccgtgatgctggtggcctttctcgagtcgctggcgctggtggggcttatcttacccggcacggtgatgatggctggccttggggcgctcatcggcggcggcgaagttaacttctggcaggcgtggctggcggggattgtcggctgcctgctgggcgactggatctcattctggctcggctggcgctttaagaagccgttgcaccgctggtcgtttatgaagaaaaaccgcgccctgctggagaaaaccgagcatgcgctgcatcagcacagcatgatcaccattctgattggccgctttgtcggaccgacgcgtccgctggtgccaatggtcgccgggatgctcgacctgccggtggccaagttcgtgctaccgaatattatcggctgcctgctctggccgccgctctatttccttccgggcattctcgccggggcggcgattgatattccggctgatgaaaacagtgccagctttaaatggctgctattgggggcggcgctgctggcctggctggcgggatggctgtgctggcggctgtggcggagcgcgaaaacctcaggcgatcggctgacccgctggctgccgcgcggccgactgctgtggctgtcgccgctgatggtcgcgctggcggctacagcgttaacatttgtcttccgccatccgctgatgccggtctatctggcgatcctgcacaaagtcatcgcgcgctga

SEQ ID NO: 210125 - DNA, 846 bp, Klebsiella pneumoniae
atggccgaaacgcaaaacgatccgctgctgccgggctactcttttaacgctcatctggtcaccggcctgacgccgattgaggcgcagggatacctggatttctttatcgaccgcccgctgggtatgaaaggctatattctcaatctgacgattcgcggcgagggggtgatcaacaaccacggcgaacagtttgtctgccggccgggcgatatgctgctgttcccgcccggggaaattcatcactatggccgccatcccgacgccagcgagtggtatcaccagtgggtctacttccgcccgcgcgcctactggcacgagtggctcaactggccaacgatttttgcccagaccggctttttccgtccggatgaacagtggcaggcgcgctttggcgagctgttcggccagatcgttgatgccgggcagggggcggggcgctattccgaactgttggcgataaacctgctggaacagctgctgctgcggcggatggaggcgatcaacgaatcgctgcatcccccgctggacaaccgggtgcgcgaggcctgccagtacatcagcgaccatctggcggacagccattttgatatcgccagcgtcgcccaacacgtttgcctgtcgccctcgcgtctgtcgcacctgttccgccagcagctgggggtcagcgtcctcggctggcgggaggatcagcgcatcagccaggccaaactgttgctcagcaccacgcggatgccgatcgccaccgttgggcgcaacgtcggcttcgaagatcagctctatttttcccgcgtgtttaaaaaatgcaccggggccagcccgagcgaattccgcgcgggttgtgaataa

SEQ ID NO: 210126 - DNA, 1710 bp, Klebsiella pneumoniae
atggcaattgcgattggcctcgactttggtagtgactcagtccgcgctctggcggtggaatgcgcgtccggcgcagagctggcgaccagcgtggagtggtatccgcgctggcgggaaggacagtattgcgatggcgctaacaaccgcttccgccatcacccgcgagattacatcgagtccatggaagcggcgctgaaaagcgtgctcgcttcgctgagcgccgaacagcgcgccgacgtcgtgggcattggcgtcgacagcaccggctcaactccggctcccgtcgatgccgagggcaacgtgctggcgctgcgcgaagaattcgctgacaaccctaacgccatgtttgtcctgtggaaggatcacaccgcggtcgaggaagccgaggcgatcacccgcctgtgccaccagccgggcaaagaggattactcgcgctatatcggcgggatctactccagcgaatggttctgggccaaaatcctccacgtcacccgcgaagatagcgctgtcgcccaggcagccgcctcgtgggtagagctttgcgactgggtgcccgccctgctctccggtactacgcgtccgcaggatctgcgccgcggccgctgcagcgccggacataaatcgctgtggcatgagagctggggcggtctgccgccggccagcttcttcgatgagcttgatcccatcatcaaccagcatctggcctggccgctgttcaccgatacctggacggccgatgtgccggtcggcacgctgagcgcagagtgggcccagcgcctgggtctgtcgcagagtgtggccatctccggcggcgccttcgactgccacatgggcgccgttggcgccggcgcgcagcctaacgcgctggtgaaagtcatcggcacctccacctgcgacattctgatcgccgataaagagagcgtcggcgagcgcacggtcaaaggcatctgcggccaggtcgacggcagcgtggttccacactttatcggcatggaggcaggccagtccgccttcggcgatatttacgcctggtttggccgcattctcggctggccgctggagcagctggctcagcagcagccggcgttgcgcgagcaaatcaaagccagccaaaaacagttactgccggcgctcaccgaagcctgggccaacaatccatcgctggagcatctgccggtggtgctcgactggttcaacggccgccgcacgccgaatgccaaccagcgcctgaaaggggtgatcaccgaccttaacctggccaccgacgcgccggcgctgttcggcggtctgatcgccgccaccgccttcggcgctcgcgccattatggagtgcttcaccgagcaggggatcccggttaacaacgtcatggcgcttggcggtatcgcgcggaaaaaccaggtcatcatgcaggcctgctgcgacgtgctgaaccgtccgctgcagattgtcgcctccgatcagtgctgcgcgctgggggcggctatcttcgccgccgtcgccgccggcgtctatgacgatattccagccgcccaacagcggatggcaagccaggtggaaactaccctgcagccgcgtccggcgcaggcacagcgtttcgaacaactctatcagcgctaccagcagtggtcggtcagcgcggaacaacactatctcccttcggctgcaaaggcggaaaaagccccgcaatctaaggcagcgctcacccattaa

SEQ ID NO: 210127 - DNA, 1503 bp, Klebsiella pneumoniae
atgacgatttttgataactatgaagtatggttcgttattggcagccaacatctgtacggcccggaagccctgcgccaggtgacgaagcatgccgaacatgtggtgaacagcctgaatgcggaagccaaactgccgtgcaaactggtccttaagccgctgggcaccaccccggacgagatcacccatatctgccgcgacgccaactacgatgacaaatgcgccgggttagtggtctggctgcataccttctcgccggcaaaaatgtggatcaacggcctgaccatcctcaataagccgctgctgcagttccatactcagtacaacgccgcgctgccgtgggacagcatcgatatggactttatgaacctgaaccagaccgcgcacggcggccgcgagttcggcttcatcggcgcccgcatgcgccagcaacacagcgtggtcaccggccactggcaggataaagaggcccaccagcgtatcggcggctggatgcgtcaggcggtctccaaacaggatacccgtcatctgaaagtgtgccgtttcggcgataacatgcgcgaagtggcggtgactgacggcgataaagtcgccgcgcagattaagtttggcttctcggtgaacacctgggcggtcggcgatctggtgcaggtggtgaacagcatcagcgacggcgatatcagcgccctggtcgatgaatatgagagcagctaccgtctgaccccggcagcgcaggttcacggcgagaagcgccagaacgtgctggacgccgcgcgcattgagctggggatgaaacgcttcctcgaacagggcggtttccacgcctttaccaccacctttgaagatctccacggcctgaaacagctcccgggtctcgccgtacagcgcctgatgcagcagggctacggctttgccggcgagggcgactggaaaaccgccgctctgcttcgcatcatgaaggtgatgtcaactggtctgcagggcggcacctcctttatggaggattacacctaccacttcgacaatggtaacgatctggtgctcggctcgcacatgctggaagtgtgcccgacgatcgccaccgtcgagaaaccgatcctcgacgttcagccgctgggcatcggcggcaaagcggatccagcgcgcctgatcttcaatactcaaaccggcccggcgatcgtcgccagcctgatcgacctgggagaccgcttccgtctgctggtcaataccatcgaaaccgtcccaacgccgcacgatctgccgaagctgccggtggccaacgccctgtggaaagcgcagccggatctgcgtaccgcgtcggaagcctggatcatcgccggcggcgcgcaccataccgtcttcagccatgcgctgaacctcgacgatatgcgccagttcgccgagctgcatgatatcgagctgaccgtcattgacaacgatacccgtctgccgtccttcaaggacgcgctgcgctggaatgaagtgtattacggttcaaaacgctaa

SEQ ID NO: 210128 - DNA, 696 bp, Klebsiella pneumoniae
atgttagaagatcttaaacgccaggtgctggaagctaacctggccctgccaaagcataatctggtgaccttaacctggggcaacgtcagcgccgtcgaccgcgagaaaggggtgttcgtgatcaaaccctccggcgtggattaccgcgtgatgaccgccgacgatatggtggtggtcagtctggagagcggcgaagtggtagagggtaataaaaagccctcgtcggataccccgacccatcgcctgctgtatcaggctttcccgacgctgggcggcattgtgcatacccattcgcgccacgccaccatctgggcgcaggccgggcaatctattcccgcgaccggcactacccatgccgactacttttatggcccggtgccctgcacccggttaatgaccgatgcggagatcaacggcgactatgagtgggaaaccggcaacgtgattgtcgaaaccttccgccagcagggaatcgacccggcgcagatgcccggcgtgctggtccattcccacggcccgttcgcctggggcaagaacgccgaagacgcggtgcataacgccatcgtgctggaagagatcgcctatatggggattttctgccgccagctggcgccgcagctgccggctatgcagcaaaccctgctggataagcactatctgcgtaagcacggggccaaagcctactacggccaataa

SEQ ID NO: 210129 - DNA, 2358 bp, Klebsiella pneumoniae
gtgacccagccacgagcaggatttttactcacccgtcactggcgggacactccgcagggcaccgagctctccttctggctggccaccgacgacggtccgctgcaggtcaccctcccgccgcaggagtccgtcgcctttattcccgaagcgcagcgggcgcaggctgaacggctgctgcagggggagaaagggctccgcttcgccccgctggccctgaaagatttccaccgtcagccgattgttggcctctactgccgcgcccatcgccagttgatgcgtctggagaagatgctccgcgacagcggcgtcaccgtttacgaaggcgatatccgcccgccggagcgctatctgatggagcgctttatcaccgccccggtgtgggtggaaggcgaaacgcgcggctcgcagctggtcaacgcacgcatgaagccgaaccctgactatcgtccgccactgaaatgggtgtcgctggatatcgaaaccagccgccacggcgagctgtactgcatcggtctggaaggctgcggccagcgggtggtctacatgctgggccccgaaccggaaacgccgccagacgtcgacttcgagctggtcttcatcgccagccgtcccctgctgctggaaaagctcaacgcctggtttgccgaacacgaccccgacgtgctgatcggctggaacgtagtgcagttcgatctgcgcgttctgcaaaagcacgccgaacgctatcgcatcccgctgcggctcggccgcggcaacagcgagctggagtggcgtgagcacggctttaagaacggcgtctttttcgcccaggccaacgggcggctgattatcgacggcatcgacgcgctaaaatcggcgttctggaatttctcctccttttcgctggaggcggtggcccgcgagctgctgggagaaggcaaagccatcgacaacccatgggatcggatggatgagatcgatcgccgctttcatgaagacaaaccggcgctggccatctataacctgcaggattgcgagctggtgacgcggatcttccacaaaacggagatcatgccgtttttgctcgaacgggcgacggtcaacggtctgcccgccgaccgccacggcggctcggtcgccgccttcagccatctctatttcccgcgcatgcaccgcctgggctacgtggcgccgaatctcggcgacgtaccgccgcaggcgagccccggcggctacgttatggactcccgccccggcctgtatgactcggtgctggtgctggactataaaagcctgtatccgtcgattattcgtacctttttaatcgatccggtcggcctgattgaagggctggcgcaacccgatgaccagcacagtatcgagggcttcctcggcgcccgcttctcgcgagataagcactgcctgccggggattgtcagccagatctggcacggccgggatgaagccaaacgccagcacaataagccgctctctcaggcgctgaagatcattatgaacgccttttacggcgtgctggggaccagcgcctgccgcttcttcgacccgcgtctcgcctcgtcgatcaccatgcgcggccatgcgatcatgcgccagaccaaagcgttaattgaagccaaaggctatgacgttatctacggcgataccgactccaccttcgtctggctgaagcgcccgcacagcgaagcccaggcggcggagatcggccgcgagctggtcagccatgtcaacgcctggtgggcgcaggagcttagcaaaagccagcttaccagcgccctggagctggagtatgaaacccacttctgccgctttttaatgccgacgatccgcggcgccgataccggcagcaagaagcgctatgccgggatgattcaggagggcgatgcccagcgcatggtgtttaagggtctggaaacggtgcgtaccgactggacgccgctggcccagcagtttcaacaggagttatacctgcgcatcttccgcaaccagccgtatcaggattatgtgcgggagactatcgccaggctgatgaacggcgagctcgacgaacagctggtttatcgcaaacgcctgcgccggccgctggcggagtatcagcgcaacgtaccgccgcacgtgcgcgccgcccggcttgccgatgaacacaacctgaagcttgggcgggcgcagcagtatcagcagcgcggcaccatcaaatacgtctggaccaccagcggcccggagccggtggattaccagcagtcgccgctcgattacgatcactatttaacaaagcagttgcagccggtggcggaagggatcctgcccttcgtcaacgatgactttgctacaatagtgacaggacagttggggctattttga

SEQ ID NO: 210130 - DNA, 2907 bp, Klebsiella pneumoniae
atgccttttacacttggtcaacgctggattagcgacacagagagcgaactaggattagggacggtggtagcgctggatgcgcgcatggtcactctccttttccccgccatcggcgaaaaccgtctgtactctcgcaacgattccccgatcacccgcgtaatgtttaacccgggcgacaccatcaccagccatgaaggctggcagctccacgttgacaaagtgaatgaagagaacgggctgctgtcctacactggcacccgcctggacacccaggaagcgaacgtcaccctgcgtgaagtgctgctcgacagcaaactagtattcagcaaaccgcaggaccgcctgttcgccggccaaatcgaccgcatggatcgctttgccctgcgctaccgcgcgcgcaagttccagagcgaacagtaccgcatgccgtggagcggcctgcgcggccagcgcaccagcctgatcccgcaccagctgcatattgcccacgatgtgggccgtcgtcacgcgccgcgcgtcctgctggccgatgaagtgggcttaggtaagaccattgaagccgggatgatcctgcaccagcagctgctctccggcgccgccgagcgcgtgctgatcgtggtcccggaaaccctccagcaccagtggctggtggagatgctgcgccgtttcaacctgcgtttctcgctgttcgacgacgagcgctacgccgaagcgcagcacgatgcctacaatccgttcgaaaccgaacagctggtgatctgctctttagacttcgtgcgtcgcagcaagcagcgcctggagcacctgtgcgacgccgagtgggacctgatggtggtcgacgaagcgcaccacctggtgtggagcgaagaggcgccgagccgtgaatatcaggctattgaacagctggctgagcgcgtgccgggtatcctgctgctgaccgcgacgccggaacagctgggaatggagagccattttgcgcgcctgcgtctgttggatccgaaccgcttccacgattttgaacagtttgtcgaagaacagcagaactaccgtccggtggccgacgccgtcgcgctgctgctggcgggcaacaagctgagcgatagcgaactcaataccctgggcgatctgatcggcgagcaggatatcgagccgctgctgcaggccgccaacagcgatcgcgaagatgcccaggccgcgcgccaggagctgatctcgatgctgatggaccgccacggcaccagccgcgtgctgttccgtaatacccgtaacggcgtcaaaggtttcccgaaacgcgagctgcacaccattcgtctgccgctgccgacccagtaccagacggccatcaaagtgtccggcattatgggcgcgcgcaaaaccgcggaagagcgcgcgcgcgacatgctctatccggagcagatctatcaggaatttgaaggtgataccggtacctggtggaacttcgacccgcgcgtcgagtggctgatgggctacctgaccagccatcgctcgcagaaggtgctggtaatctgcgctaaggccgccaccgccctgcagctggagcaggtgctgcgcgagcgcgaaggcatccgcgccgcggtgttccatgaagggatgtcgattatcgaacgcgaccgcgccgcggcgtggtttgctgaagaagacaccggcgcccaggtgctgctgtgctccgagatcggctccgaaggacgcaacttccagttcgccagcaacctggtgatgttcgacctgccgtttaacccggatctgctggagcagcgtatcggtcgtctcgaccgtatcggccaggcgcacgatatccagatccacgttccgtacctggaaaaaaccgcgcagtcggtgctggtgcgctggtatcacgaagggctcgacgccttcgaacatacctgcccgaccggtcgcaccgtctacgacagcgtgcacgatgaactgatcaactatcttgcggcgccggaatccatcgacggctttgacgatctgatcaaatcctgccgccaacagcatgatgccctgaaggcgcagctggagcagggccgcgaccgtctgctggagatccactccaacggcggcgagaaagcccaggccctggcggagagcatcgaagagcaggatgacgacaccagcctgatcgctttctcgatgaacctgttcgatatcgtcggcatcaaccaggacgaccgcggtgaaaacctgatcgtcctcaccccttccgaccatatgctggtgccggatttcccgggcctgccggaagacggttgcaccatcaccttcgaacgtgacgtggcgctgtcgcgtgaagatgcgcaatttattacctgggaacacccgctgatacgcaacggtctggacctgatcctttccggcgataccggcagcagcaccatttccctgctgaagaacaaggcgctgccggtcggcaccctgctgctggagctgatctatgtcgtcgaagcgcaggcgccgaagcagttgcagctcaaccgcttcctgccggcgaccccggttcgcatgctgctggataaaaacggcaacaacctcgccgcgcaggtggagttcgaaagcttcaaccgccagctgagcgcggtcaaccgccataccggtagcaagctggtcaacgcggtgcagcaggacgttcacgcgattctgcagcagggtgaagcgcagatcgccaaagcggcgcaggggctgatcgacgcggcgcgtaacgaagccgatgaaaagctgacggcggagctgtcgcgtctggaagcgctgaaggcggtgaacccgaacatccgtgacgacgaactggcggggatcgaaagcaaccgtcagcaggtgatggatgcgctggcgcaggccggatggcgtctggacgcgctgcgtctgatcgtcgtcactcaccagtaa

SEQ ID NO: 210131 - DNA, 660 bp, Klebsiella pneumoniae
atggcgatggaaaactacaatccgccgcaggatccctggctggtgatcctgtatcaggatgagcacatcatggtggtcaacaagccgagcggcttgttgtccgtccccggtcgtcttgaggagcataaagacagcgtgatgacgcgcattcagcgcgacttcccgcaggccgaatcggtgcatcgcctggatatggccaccagcggcgtgattgtggtggcgctgaataaagccgccgagcgtgaactgaagcgtcagttccgcgagcgcgagccgaagaagcagtacgtcgcccgcgtctggggccatccgcagccggcggaaggcctcgtggatttaccgctgatttgcgactggccgaaccggccaaagcagaaggtgtgctatgaaaccggcaaagcggcgcaaaccgaatatgaggtgctggagtacgcagaagataacaccgcccgcgtgcgcctgaagccgattaccggacggtcgcaccagctgcgcgtgcatatgctggcgctggggcatccgatccttggcgaccgcttctatgccacgccggaggcgctggcgatggccccgcgcctgctgctgcacgccgagacgctcaccatcacccatcctgcctacggcaacgcgatgacctttcgcgcgccgatcgacttttaa

SEQ ID NO: 210132 - DNA, 540 bp, Klebsiella pneumoniae
atgtcagtggatactcccgcccaggcgggcgtcagcatcgacgcattgctggcggcgaaagagcagcgtgcagcccgccaggccgactggttggcccattatcagcagcctgttatttccctgaccctggtgaccccgggggcggtgaaggacagcattcgctatcgcaatatgatgggcgttgccctccaggcctgcgatcagctgctgtggaagcaccgctggcaaacgctggatcgtcaggtgctatggctgccgaccgggccagaagcgctgtggtgcgtagcgcatccggccagcgaaatcaaagcgatgtgcagtacgctggagcagagccatccgctgggacgcctgtgggatatcgatgtaatctgtccgcagaacgggctggtgggacgccagtcgctgggcgaatcgcagcgccgctgcctgctgtgcgatgagccggcgcacgcctgtgcgcgcagccgtcgtcacgacaccgatctcgtcgtcgcccgcgttgagcagatgattgacgcgtggttcgcccgcgattaa

SEQ ID NO: 210133 - DNA, 1365 bp, Klebsiella pneumoniae
atgagcaccacagacaatgcattctctgcaacccttgaaccgatcgatacgccgaaaaccacgctcaagcagcgctggtggcatattatggataactggaaggtggggatcgtcccgctgccgctgtttctgctggccggaggactgattgccctcgactgccttggcggcaaactgccgagcgatatcgtggtgatggtggccaccctggctttctttggcttcgcctgcggcgagtttggtaaacgcctcccggtgctggggaaactcggtgcggcggcgatctgcgccacctttattccttccgcgctggtccactatggtctgctgcctgacgtggttattgaatccacgaccaaattctataaatccactaacatcctctatctctatatctgctgcatcattgtcggcagcatcatgagtatgaaccgcaccacgctgattcagggctttctgaagatcttcttcccgatgctgtgcggcgaagtggtcggcatgctggtgggcatcggcgtcggcacgctgctgggcatggagccgttccaggtattcttctttatcgtgctgccgattatggccggcggcgtgggagagggggcgattccgctgtcaatgggttatgccgcgctgatgcatatggagcagggcgtggccctgggccgggtattgccgatggtgatgcttggcagcctgacggcgatcgtcatctccggctgcctcaaccagctcggcaagcgcttcccgcatctgaccggcgaagggcaactgatgccgaaccgcagccatgaaacccgcagcctcagcgagagcgaaggcgtgagcggtaagaccgacgttgggaccctcgcctccggcgcgctgctggcggtactgctgtatatgatggggatgctcggccacaaactgattggtctgccggcgccggtaggcatgctgttcctcgcggtgctgttaaagctggctaacgtggtgtctccgcgtctgcaggaggggtcgcagatggtgtataaattcttccgcaccgcggtcacctacccgatcctctttgccgtcggcgtggcgatcaccccgtggcaggaactggtaaacgccttcactttaaccaacctgctggtgatcgtcagtaccgtctccgcgctggtggcgaccggtttcctggttggtaaaaagatagggatgcacccgatcgatgtggcgattgtttcctgttgccagagcgggcagggcggcaccggcgatgtggcgatcctgaccgccggcaaccgcatgagcctgatgccgttcgcgcagatcgctacccgcatcggcggggcgataaatgtctcgctggggttgctgttcctcagccactatctggcgtga

SEQ ID NO: 210134 - DNA, 1626 bp, Klebsiella pneumoniae
atgaaattatcttttcaatataagctgtttatttctctggtcgcttttttctcggtcctttttatcgcgctgggcatttattattattttgacgccagccgccagctttatcaggagatgagcgcccgggccaaaatacaggccgaagagatagccctgatgccgaatttacgtcaacaggtcagccggcacgacccacaggcgattcaggcgtttatgcagcaaatcgccgcccatagcgacgccagctttatcgtcatcggcgaccgtcagggagttcatctgtttcattccgtccatccggagtgggttggcacccgactggtcggcggcgacaaccaggcggtactggaagggaaatccatcaccaccattcgcaaaggcggcctcggggtctcgctgcgcagcaaaacgcccatcgttgatgacgcagggcgagtgatcggtattgtctccgtcggctacctcaccagctatctcgacagcattactctgactaaagtgatcaatatttttatcgccgccgtcctgctgctcatcgccctgtttatcttctcctggtactttacccgcagtatcaagaagcagattttttcgctcgagccgcgggaaattggcctgctggttcgccagcaaaaggcgatgatggagtcgatctttgagggggtgatcgtcatcgatcgccagcggcgtattgaggtgataaaccatgccgcccgcagcctgctggggctcagccagcccgcccgccagctgcgcggtcagtcgatcgacagcgtcatttcgccgcagccctttttcgccagcggcgacatgctcgaacgcgatacccacgatgagctatgccgcttcaaccagttgaccgtgctcgccagtcgggtgcgcattatgctggagaataccctgcagggctgggtgatcacattccgtgaccgcaatgaaatcaatgccctcaccgcccagctgagccaggtgaagcgctatgtcgacaatctgcgcatcatgcgccacgagcagctcaaccggatgactaccctctccggcctgctgcatatgggccattatgacgaagcgatccgctatattcaggcccagtcggaacatgctcaggagctactggattttatctcctcgcacttccactcgccgacgctatgcggtctgctgctcggcaaagccacccgcgcccgcgaaaaaggcgtggcgctgagcttcgacccggcctgccgcatcgaccgccccctgccgtcactaatggaatccgagctgatctccatcatcggcaacctgctggataacgccatcgaagccacgcagcgtgccgagctgccgcatgagccggttgaagtcctgatccagctcaacgcccgggagttgattatcgaagtggccgaccgcggcgtcggcatccgccccgatatccgcgagcgcatttttgaacgcggcgtcaccaccaaaacccgtggcgatcacggcattggtctgtatcttattgaacattatgtcactcaggcgggcggcaccatcgaagtcgccgataacgcgccgcggggaacgatcttcaccctatttatcccggccgacgcgcacgcctgtccgcaaccggaggcccacgatgcatcatga

SEQ ID NO: 210135 - DNA, 699 bp, Klebsiella pneumoniae
atgcatcatgacctggtcgatgtgctaatcattgaagatgagagcgaactggcgcgcctgcacgccgagcttgtgcaaaaacacccgcgactgcggctggcaggcatggcggcctccctcgcccaggcgcggcagctgcttcacgccacgccgccgcagctggtgctgctggataactatttaccggacggcaaaggcgtcacgctgatgaccgacccggcgctggcgaccagccaatgctcggtgatctttatcaccgccgccagcgatatggaaacctgcagccaggccatccgcaacggcgccttcgactatatccttaagccggtatcatggaagcggctgagccagtcgctggagcgctttatccagttctacgatcagcaacgagagtggaaaatcgtcgatcagcaaaacgtcgattccctctatcaactgcaggcgaagaactatcgcgtggatagcggcagcaaggggattgaagagaaaacgctggcgctggtgcagggactgtttagcgaccgggaagcgcactgtttttccgttgatgaagtggtcagcgccgccgggctcagcaaaaccaccgcccgtcgctatctggagcacggcgttgagaccggttttctggaagtggagatgctgtacggaaaaattggccatccgcggcggctgtatcgccgcgctaaggtcaaaagttaa

SEQ ID NO: 210136 - DNA, 828 bp, Klebsiella pneumoniae; identical to SEQ ID NO: 136462

SEQ ID NO: 210137 - DNA, 2349 bp, Klebsiella pneumoniae
atgaaaaaacgtattcccagcctcctggctacgatgattgccagcgccttgtatagccaacaaggcctcgctgccgatctcgcaacgcaatgtatgcttggcgtgccaagctatgatcgtccgctcgtggaaggtcgtcctggcgatctgccggtgacgattaacgccgatcatgcgaagggcaactacccggacaacgccgtctttaccggcaacgtcgatattaaccaggggaatagtcgcctccgcgccgacgaagttcagctgcaccagcagcaggccgcgggccaggcgcagccggtgcgcacggtggacgcgctgggcaacgtgcattacgacgataaccaggtgatcctcaaagggccaaaagcctggtcgaatctgaataccaaagataccaacgtctggcagggcgattatcaaatggtcggacgccagggacgcggcaccgccgacctgatgaaacagcgcggtgaaaaccgctataccattctcgaaaacggcagctttacctcctgtctgccgggctccgacacctggagcgtcgtcggcagcgaagttatccacgatcgcgaagagcaggttgccgagatctggaacgcccgcttcaagcttggctctgtgccgattttctatagcccctacctgcagctgccggtgggcgataagcgtcgttcaggcttcctgatcccgaacgcgaaatacagcaccaaaaacggcgtggaattctccctgccgtactactggaacatcgcgccaaacttcgatgccaccattactccgcactatatgaacaaacgcggcggcgtgatgtgggaaaacgagttccgctatctgacccagctcggcagcggcttaactgaattcgactacctgccgtcggataaagtctacgaagacgaccactcgagcgacagcaacagccgccgctggctgttctactggaaccactcaggggttatcgatcaggtatggcgtctgaacgctgactacaccaaggtcagcgatcctgactacttcaacgacttcagctcgaaatatggttccagtaccgatggctatgcgacgcagaaattcagcgccggttacgtcaaccagaactttgacgccacggtatcgaccaaacagttccaggtctttgaccgcgaatcgagcaactcctattcggctgagccgcagctcgacgtcaactactaccagaatgatgtcggtccgttcgatacccatctctatggacaggttgcccattttgttaactcgaataacaacatgccggaagcgacccgcgttcacttcgaaccgacgatcaacctgccgctgtccaacggttggggcagtctgaataccgaagccaagctgctggcgactcactaccagcagagcaacctcgataagtacaatgccgccaacggcactgactataaagagtccgtcagccgcgtaatgccgcagtttaaagtcgacggcaaaatggtctttgaacgcgacctgcaggagggattcacccaaacgctggaaccgcgcgtgcagtatctgtacgtgccgtaccgcgatcagagtgaaatcggcaactacgactccacgctgttgcagtcggattacaccggtctgttccgcgaccgtacctatagcggtctggaccgcatcgcgtcggctaatcaggtcaccaccgggctcacctcgcgcgtgtatgatgccgccgcggtggaacgttttaataattccgttggtcaaatctactatttcaccgagtcacgcaccggtgatgacaacatcaactgggagaacaacgataccacgggttcactggtctgggccggcgatacctactggcgcattgccgatgaatggggtctgcgcggagggatccagtacgatacgcgtctggataacgttgccactggtaacggcaccattgaataccgtcgcgatgagaaccgcttagttcagcttaactatcgttacgccagcccggaatatattcaggccacgctgccgtcatattccaccgcggcacaatataaacagggtatttcgcaggtggggatgaccgccagttggccgattgtcgatcgctggtccgtggtcggggcctactactacgatactaatacccggaaagcagcaaaccagatgttgggtgtgcagtataactcctgctgctacgccatccgtcttggctacgaacgtaaagtcaacggctggaacagcaacgacaacggcggcgagagcaaatacgataacaccttcggaatcaatatcgaattgcgcggtctgagctctaactacggcctcggcacccagcagatgctgcgctcgaacattttaccgtaccagagctccctgtga

SEQ ID NO: 210138 - DNA, 1287 bp, Klebsiella pneumoniae
atgaagaactggaaaacgctgcttctcggtatcgccatgatcgcgaataccagtttcgctgccccccaggtggtcgataaagtagcggccgtcgtcaataatggcgtcgtgctggaaagcgacgtcgatggtttgatgcaatcggttaagctcaatgctggtcaggctggccaacagctgccggatgacgccaccctgcgccatcaaatcctcgaaagactgatcatggaccagatcgtgttacagatggggcagaagatgggcgtgaagatctctgacgaccagctcgatcaggctatcgccaacatcgccaaacaaaataatatgaccttggatcagatgcgcagccgtctggcctatgaaggcatcaactacaacacctaccgtaaccagatccgtaaagagatgctgatttcggaagtgcgtaacaatgaagtgcgtcgtcgcatcaccgtgctgccgcaggaagtggaagcgctggcgaaacagatcggcgaccagaacgacgccagcaccgagctcaacctgagccacatcctgatcccgctgccggagaacccgacctctgatgaagtcgccgcggcccaggagcaagcaaactccatcgttgagcaggcgcgcaacggcgccaacttcggcaaactggcgatcacctactccgctgaccaacaggcgctgaagggtggccagatgggctggggccgtatccaggagctgccgggcattttcgctcaggcgttaagcacggcgaagaaaggggatatcgtcggtccgattcgttccggcgttggtttccacattctgaaagtcaacgacctgcgcggtggtacccagaatatctccgttaccgaggttcacgcccgtcatattctgctgaaaccgtcgccgatcatgaacgacgcccaggctcaggctaagctggaacagatcgcagccgagattaagagcgggaaaatcacgtttgctcaagcggcgaaaacctattcggaagatccgggctcggcaaaccagggcggtgatttaggctgggccacgccggacatctttgacccggcgttccgcgatgcgctgatgcgtctgaacaaagggcagaccagcggaccggtgcactcttcctttggctggcatctgatcgaactgctggatagccgtcaggtcgacagaaccgacgccgcgcagaaagatcgtgcttaccgcatgctgatgaaccgcaaattctctgaagaagcggcaacctggatgcaggaacagcgcgccagtgcgtatgttaaaattctgagcaactaa

SEQ ID NO: 210139 - DNA, 990 bp, Klebsiella pneumoniae; identical to SEQ ID NO: 136465

SEQ ID NO: 210140 - DNA, 822 bp, Klebsiella pneumoniae
atgaataatcgagtccatcagggccatttagcccgtaaacgcttcgggcagaacttcctcaacgatcagtttgtgatcgacagcatcgtctcggcgattaacccgcagaaaggccaggcgatggttgaaatcggccccggcctggcggccctgaccgagccggtcggcgaacgccttgaccagctgaccgtcatcgaactggaccgcgatctggcggctcgcctgcagacgcatccgttcctcggtccaaagctgaccatctatcagcaggatgcgatgaccatgaactttggcgaactggcggagaaaatgggccagccgctgcgcgtcttcggcaacctgccgtacaatatctcgaccccgctgatgttccatctgttcagctatactgatgccattgccgatatgcactttatgctgcagaaggaagtagtgaatcgtctggttgccggaccgaacagtaaggcgtatggtcggttaagcgtgatggcgcaatattattgccaggtgatcccggtactcgaagtgccgccgagcgcgtttaccccgccgcctaaggtcgactccgcggtggtacgcctggtgccgcacagcaccatgccgtatccggtcaaagagatccgggtgctgagccgcatcaccaccgaagcgttcaaccagcgccgcaagactatccgcaacagtctcggcaatctgttcagcgtggaagtgctgaccgagctgggcatcgacccggccatgcgcgccgaaaatatttccgtggcgcagtactgcctgatggccaactggctgtctgacaatctgccaacgaaggagagctaa

SEQ ID NO: 210141 - DNA, 378 bp, Klebsiella pneumoniae; identical to SEQ ID NO: 136467

SEQ ID NO: 210142 - DNA, 849 bp, Klebsiella pneumoniae
atgtcaacataccttattggcgacgttcacggttgctacgatgaactgatcgcattattagcgcaggttgaattcgatccgcggagagatacgctgtggctgaccggcgatctggtggcccgaggcccgggatcgctggaggtcctgcgctatgtcaaatctctgggcgacagcgtacgactggtgctgggcaaccatgacttacacctgctggcggtctttgccggtatcagccgcaacaagccgaaggatcgtctgaaaccactgctggaagcgccggatgccgatgagctgctcaactggctgcgtcgccagccgctgctgcaggtggatgaagagaaaaagctggtgatggcccacgccggcattaccccgcagtgggatctggagaccgcccagcagtgcgcgcgcgatgttgaagcagtgctctccagcgactcctatcctttcttcctcgatgccatgtacggcgacatgccgaaccactggagcaacgagctgagcggcctggcgcgcctgcgctttatctctaacgcctttacccgcatgcgctactgtttcccgaacggccagctggatatgtattcgaaggaagcgcccgaggacgccccggcgccgctgaagccgtggtttgccattcccggcccggtcagcaatgcctacagcattgcctttggccactgggcttcgctggagggacgcggcacgccggaggggatttacgccctggataccggctgctgctggggcggggaactcacctgcctgcgctgggaagataagcagtacttcacccagccgtcaaaccggcagaaaagcctcgacgaaggcgaagccgtcgcgtcctga

SEQ ID NO: 210143 - DNA, 480 bp, Klebsiella pneumoniae; identical to SEQ ID NO: 136469

SEQ ID NO: 210144 - DNA, 1866 bp, Klebsiella pneumoniae
atggatagccatacgctgatacaggcgttgatttacctcggcgccgcggcgctgattgtgcccatcgccgtccgtctggggctggggtcagtgctgggctatctcatcgccggctgtattatcggcccgtgggcgctgcggctggtgaccgatgccgaggcgattctgcactttgccgagattggcgtggtgctgatgttgttcgtcattggtctggagctcgatccgcagcgcttatggaagctgcgcgcctcggtgtttggcggcggcgcactgcagatggtggcctgcggggtgttgatcggcctgttctgcatgctgctgggcctgcgctggcaggtggccgagctgattggtatgactctggcgctttcttccacagccattgctatgcaggcgatgaatgagcgcaatctgacggtgtcgcagatggggcggagcgccttcgcggtgctgctgttccaggatatcgccgcgatcccgctggtggcgatgatcccgctgctggcggccagcggcggcgccacctcgctgatggcttttgccctctccgcgctgaaagtggccgcagcgctggcgctggtggtggtccttgggcgctatctgacccggccgctgctgcgctttgtcgcccgttccggcctgcgcgaagtgttcagcgccgtggccctgttcctggtcttcggctttggcttattgctggaagaggtggggctgtcgatggcgatgggggcgtttctcgccggggtgctgctggccagctccgaatatcgtcatgcgctggagagtgatattgagccgtttaaaggactgctgttggggctgttctttatcggcgtcggcatgtcgattgatttcggcaccctggtcacccatccgctgcgtattgtgattttgctggtcggtttcctggcgataaaaatgctgatgctgtggcttatcgccaggccgcttggcgtaccgcgcgcccagcgccgctggtttgcggtgctgctggggcaggggagtgagttcgcgtttgtggtgtttggcgccgcgcggatggcggatgtactggacggcgaatgggcaaaagcgttgaccctggcggtggccctgtcgatggcggcaacccccattctgctggtgctgctgacccgtctggagaaatcgtccagcggccaggcgcgtgatgctgacgagattgatgaagagcagccgcgggtgattgtcgccggctttggccgcttcgggcagattgccgggcgattgctgctctcgagcggggtgaagatggtgatcctcgatcatgacccggaccatgtcgataccctgcgcaaatttgatatgaaggttttctacggcgatgccacccgggtcgatctgctggagtcggccggggccgaaaaggcggaagtgctgatcaatgccattgacgatccgcacgtcagcctggagctggtggcgagggtaaaagagcattttccgcatctgcagatcatctcccgcgcccgcgatgtcgatcattacattcagctgcgccaggctggcgtcgaggccccggagcgtgaaaccttcgaggcggcgctgaagtccggccgaatgacgctggaggcgctggggctcggcgcctatgaagcgcgcgagcgggccgatctgttccgtcgattcaacctgcagatggtcgaagagatggtggcgatggcggaaaacgatgccgcgtcgcgggtggcggtcttcaagcggaccagcgatatgctgaccggcatcatcaacgaagatcgtcatcatctgtcgctggtgcagcgtcatggctggcagggtacggaagagggcaggcacaccggggatattgccgatgagccggaaaataagccctcagcctga

SEQ ID NO: 210145 - DNA, 534 bp, Klebsiella pneumoniae
atgattctgataatttatgcgcatccttatccgcagcattctcatgcgaataagcgaatgcttgaacaggcagggacgcttgaaggcgtagagatacgctccctctatcaactctatcccgactttaatatcgatgtcgccgccgagcaggcggcgctggcccgtgccgatctggttatctggcagcatcctatgcagtggtatagcgtaccgccgctgctcaagctgtggatggacaaggtgctgtcgcacggctgggcctatggtcacaacggtattgccctgcgcggtaaatcgctgatgtgggcggtcactaccggcggcggtgaaagccactttgatatcggttcgtttcccggtttcccggtgctggcgcagcctctgcaggcaactgcgctttactgcgggatgaaatggctgccgccgttcgctatgcactgcacctttatctgcgatgatgaaacgctgcaggcgcaggcccgccgctatcgtcaacgcttaatcgactggcaggaggcacaccagaatggatag

SEQ ID NO: 210146 - DNA, 234 bp, Klebsiella pneumoniae; identical to SEQ ID NO: 136472

SEQ ID NO: 210147 - DNA, 3225 bp, Klebsiella pneumoniae
atgccaaaacgtacagacataaaaagtatcctgattctgggcgcgggcccgattgttatcggtcaggcgtgtgagtttgactactccggcgcccaggcctgtaaagcgctgcgcgaagagggctaccgcgttatcctggtgaactctaacccggcgaccatcatgaccgacccggaaatggccgatgccacctacatcgagccgattcactgggaagtggtgcgtaaaatcatcgaaaaagagcgcccggatgcggtgctgccgaccatgggcggccagacggcgctgaactgcgcgctcgagctggagcgtcagggggtcctggctgaattcggcgtgaccatgattggcgccaccgccgatgcgattgataaagccgaagaccgtcgccgtttcgatatcgcaatgaaaaaaatcggcctcgacaccgcgcgctctggtatcgcccacacgatggaagaggcgctggcggttgccgccgacgttggtttcccgtgcatcatccgtccgtccttcaccatgggcggcaccggcggcggtatcgcctataaccgcgaagagttcgaagaaatttgtgaacgcggcctggatctctctccgaccaacgaactgctgatcgatgaatcgctgatcggctggaaagagtacgagatggaagtggtgcgcgataagaacgataactgcatcatcgtctgctccatcgaaaacttcgacgccatggggatccacaccggtgactccatcaccgttgccccggcgcagaccctgaccgacaaagagtaccagatcatgcgtaacgcctcgatggcggtgctgcgtgaaatcggcgtcgaaaccggcggctctaacgtgcagttcgcggtcaacccgaaaaacggtcgcctgatcgttatcgaaatgaacccgcgcgtctcccgctcctcggcgctggcctctaaggccaccggcttcccgattgctaaagtggcagccaagctggcggtaggttatacccttgacgagctgatgaacgacatcaccggcggccgcaccccggcttcctttgaaccgtccattgactacgtggtcactaaaatcccacgctttaacttcgaaaaattcgccggcgccaacgaccgtctgaccacccagatgaagtctgtcggcgaagtgatggcgattggccgtacccagcaggaatccttgcagaaagcgctgcgcggtctggaagtgggcgctaccggcttcgacccgaaagtgagcctcgacgacccggaagcgctgaccaaaatccgccgcgagctgaaagatgccggcgctgagcgtatctggtatatcgctgacgcgttccgcgcgggcctctcggttgacggcgtcttcaacctgaccaacatcgaccgctggttcctggtacagattgaagagctggtccgtctggaagagaaagtggcggaagtgggcatcaacggcctcgacgctgacttcctgcgcaccctgaagcgtaaaggctttgccgatgcgcgtctggcgaagctggcgggcgtgcgggaagcggaaatccgcaagctgcgcgaccagtatgacctgcacccggtctacaagcgcgtggacacctgcgctgcggaatttgctaccgataccgcctacatgtactccacttatgaagaagagtgtgagtccaacccgtccgttgaccgcgataaaatcatggtcctcggcggcggcccgaaccgtatcggtcagggtatcgaattcgactactgctgcgtacacgcctcgctggcgctgcgcgaggacggttacgagaccatcatggtcaactgtaacccggaaaccgtctctaccgactacgacacctccgaccgtctgtattttgagccggtgaccctggaagacgtgctggaaatcgtgcgcatcgagaagccaaaaggcgttatcgtccagtacggcggccagaccccgctgaaactggctcgtgccctggaagctgccggcgtgccggttatcggtaccagtccggacgctatcgaccgggcggaagaccgtgagcgcttccagcacgcggttgaccgtctgaagctgaagcagccggcgaacgccaccgtcaccgccattgagcaggcggtagagaaagcgaaagagattggctacccgctggtggtgcgtccgtcttatgtgctcggcggccgggcgatggagatcgtctatgacgagcaggatctgcgccgctacttccagaccgcggtcagcgtctccaacgacgcgccggtgctgctggatcgcttcctcgacgatgcgattgaagtggatgtcgatgccatctgcgatggcgaaatggtgctgattggcggcatcatggagcatatcgagcaggcaggcgtccactccggcgactccgcctgttccctgccggcctacaccctgagcaaagagattcaggatgtaatgcgcgagcaggtgcagaagctggccttcgagctgcaggttcgcggcctgatgaacgtccagttcgcggtgaaagataacgaagtttatctgattgaggtcaacccgcgtgcggcgcgtaccgtaccgttcgtctccaaagccaccggcgtcccgctggcgaaagtggcggcgcgcgtgatggccggtaagactcttgcgcagcagggcgtgaccaaagagatcatcccgccgtactactcggtgaaagaggtggtcctgccgttcaataaatacccgggcgttgacccgctgttagggccagaaatgcgctccaccggggaagtgatgggcgtcggccgcacctttgccgaagcgttcgccaaagcgcagctgggcagcaactcgaccatgaagaaacagggtcgcgcgctgctctccgtccgcgaaggcgataaagagcgcgtggttgacctggcggcgaagctgctgaagtttggcttcgagctggatgcgactcacggtacggcgattgtgctgggtgaagcgggcattaacccgcgtctggtgaacaaggtgcatgaaggtcgtccgcacattcaggaccgcatcaagaatggcgaatatacctacatcatcaacaccaccgcaggtcgccaggcgattgaagactccaagctgattcgccgcagcgcgctgcagtacaaagtgcattacgacaccaccctgaacggcggctttgccaccgcgatggcgctgaacgctgacgccaccgagaaggtgatttcggttcaggaaatgcacgcgcaaatcactaaataa

SEQ ID NO: 210148 - DNA, 1149 bp, Klebsiella pneumoniae
ttgattaagtcagcgctattggttctggaagacggaacccagtttcacggtcgggccatcggggcaaccggcacggcggttggggaagtcgttttcaatacttcaatgaccggttatcaagaaatcctcactgatccttcctattcccgccaaatcgtcactcttacttatcctcatattggtaatgtcggcaccaacgccgccgatgaagaatcttctcaggtacatgcgcagggtctggttattcgcgacctgccgctgattgccagcaacttccgcagtactgaagacctctcttcttatctgaagcgccataacatcgtggcgattgccgatatcgatacccgcaagctgacgcgtctgctgcgtgagaaaggggcgcagaacggctgcatcatcgcgggcgacagcccggatgcccagctggcgctggaaaaagcgaaagcgttcccgggcctgaacggcatggacttggcgaaggaagtgaccaccgcagaaacctatagctggacgcaaggtagctggaccctggcgggcgacctgccggaagcgaaagcggaaagcgagctgccgttccacgttgtggcatatgacttcggcgcgaaacgcaacatcctgcgaatgctggttgaccgcggctgccgcctgacggtggtgccggcgaaggcctccgccgcggacgtgctggcgctcaatccggacggtatcttcctctccaacggccctggcgacccggcgccgtgcgattacgctatcgaggcgattgaaaaattccttgagaccgatattccggtattcggcatctgccttggccatcagctactggcgctggcgagcggtgccaagaccattaagatgaagttcggccaccacggcggcaaccacccggtgaaagatattgataacaacgtggtgatgatcactgcccagaaccacggtttcgccgtagatgaggcgacgctgccggccaacctgcgcgtgacccataagtcgctgttcgatggcaccctgcaggggatccatcgtaccgacaaaccggcgttcagcttccaggggcaccctgaagcgagcccggggccgcacgatgccgcgccgctgttcgaccactttatcgagttaattgagctctaccgtcagtccgcgaaataa

SEQ ID NO: 210149 - DNA, 822 bp, Klebsiella pneumoniae
atgcatgatgcacaaatccgcgtggccatcgccggcgcgggcggccggatgggacgccagttaattcaggctgcattgcagatggaaggcgtggcgctgggcgcggcgctggagcgcgaagggtcaagcctggtgggcagcgacgccggcgagctggcgggcgccggcaaagcgggcgtcgcggtgcagagcagcctggcggcggtaaaagatgatttcgacgtgttgatcgattttacccgcccggaaggcacgctgaaccatctggcgttttgccgcgagcacggcaaagggatggtcatcggcaccaccggttttgacgacgctggcaaacaggcgattcgcgatgccgcgcaggacattgccattgtcttcgccgctaactttagcgttggcgtcaacgtcctgttgaagctgctggagaaggcggcaaaggtgatgggcgactataccgacatcgaaattatcgaagcgcaccaccggcataaagtggatgcgccgtcaggcaccgcgctggcgatgggcgaagcgatcgccggggcattgaacaaagatctcaaggactgcgcggtctacagtcgtgaaggctacactggcgaacgcgtcccgggcaccatcggcttcgcgaccgttcgcgcgggggatatcgtcggggagcatacggcaatgtttgctgacatcggtgagcgtattgaaatcacccataaagcgtccagccgcatgacctttgcaaatggcgctgttcgttcagcattgtggctgaaaggcaagaaaaatggcctgtttgatatgcgtgatgtgctggatctgaatagtttataa

SEQ ID NO: 210150 - DNA, 909 bp, Klebsiella pneumoniae
atgagcgacgtgttaattaatcctgcgcgtgtgcggcgcgtgaagccactgagtgccgaagaggtggtcagcgcggtagagcgcgcgctgttgaccgaagttcgcctgaccccaaagcccgggttggtggatattcgtaacgctggcgcgcactgggatatggatctggcctcgtttgaggccagcaccgcggtggtggctccgtggatggagaaatttttcatcatgggccacgatactgcggcggtcgcgccggagcatgtattgatgatgctgcgcccggtagggatggcctgtgagaacgatatgctggaggccaccggcggggtgaatacccatcgcggggcgatcttcgcttttggcctgctcagcgcggcggcgggcaggctggtgtcgaaaggtgagccgatagagcagcaccggctttgcgaccaggtggcgcgcttctgtcgcggcatggttatgcaggagttgtcttctgctggcggggaacggctcagtaaaggcgaggctcattttctacgctatggtctctccggggcccgcggcgaggcggagagcggtttcctgacggtgcgtacccaggccatgccagtctttacccgcatgatggaagagaccggcgacagtaatctggcgctactgcaaaccctgctgcatctgatggcgtggaatgatgacaccaacctggtctcgcgcggcgggcttgccgggctgaactttgtccagcaggaggcgcagcgactgctgtggcagggcggcgtgctggcggacggcgggctggaggcgctgcgacagtttgacgatgagctgattgcccgccatctcagccctggcggcagcgccgatctgttggcggtgacctggtttttatccgcgtttcccgccggcgcgcttttcccgctgtaa

SEQ ID NO: 210151 - DNA, 1527 bp, Klebsiella pneumoniae
atgaaagagacagtagcaatgcttaatcagcagtacgtgatgccgaatggactgacaccttatgccggcgtaacggcgaaaagtccctggctggcgagtgagagcgaaaagcgccagcgcaaaatctgcgattcgctggaaacggcaatccgtcgctccagcctgcaaaacggcatgaccatctcgtttcaccacgcgtttcgcggcggtgacaaagtcgtcaatatggtagtggcgaagctggcggaaatgggttttcgcgatctcaccctggcatccagttcgctgatcgacgcccactggccgctgatcgagcatattaaaaatggcgtgatccgccagatctacacctccggcctgcgcggcaagttgggcgaggagatctccgccggtttaatggaaaacccggtgcagatccactcccacggcggtcgcgtacagctgattcaaagcggcgagctgtcgattgatgtcgcgtttctcggcgttccttgctgcgatgagtttggcaacgccaacggctttagcggtaaatcacgctgcggttcgctgggctacgcgcgcgtcgatgccgagcacgctaaatgcgtggtgctgctgaccgaagagtgggtggattatcctaactatccggccagtattgcccaggatcaggtggatctgatagtccaggtagatgaagtcggcgatccgcaaaaaattaccgcgggtgccatccgtctgaccagcaacccgcgcgagctgctgattgcccgccaggcggcgaaagtcgttgagcactccggttactttaaagagggtttctcgctgcagaccggtaccggcggcgcctcgctggcagtaactcgcttccttgaagataaaatgcgccgtaacggcattaccgccagcttcggcctcggcggtatcaccgggacgatggtcgatttgcacgaaaaagggttgatcaaaacgctgctcgatacccagtccttcgatggcgacgcggcgcgttcgctggcgcagaacccgaaccatgtcgagatctccaccaatcagtatgccagcccgggctccaaaggcgcctcctgcgagcgcttaaacgtggtgatgctcagcgcgctggaaattgatatcgactttaacgttaacgtgatgaccggttctaacggtgtgctgcgcggggcgtccggtggccatagcgataccgccgccggtgcggatttgaccattattaccgcgccgttagttcgcggccgtattccctgcgtcgtggaaaaggtgctgacccgcgtcacgccgggggccagcgtggatgtgctggtcactgaccacggcattgcggtcaacccggcacgtcaggacctgatcgacaatttgcgcagcgcaggcattccgctgatgaccattgaggaactgcagcagcgtgctgagctgttgactggcaagccgcagccgatcgaattcaccgatcgggtggtggcggtggtgcgctatcgcgacggttcggtcatcgatgtgattcatcaggtgaaaaacagcgactaa

SEQ ID NO: 210152 - DNA, 870 bp, Klebsiella pneumoniae
atgaaaccacgtcgcagtatgttgttcatccctggcgccaatgccgccatgttaagcacgtcattcgtctacggcgctgatgcggtgatgttcgacctggaagatgccgtttcgctgcgcgagaaagataccgctcgtctgctggtgtatcaggcgctgcagcatccactgtatcaggatatcgaaaccgtggtgcgcattaacccgctgaatacgccgttcggtcttgccgaccttgaagcggtagtccgcgcgggcgtggatatggtgcgtctgccgaaaaccgacagcaaagaagatatccatgagctggaagcgcatgttgagcggattgaacgcgagtgcggccgggaagtgggcagcaccaagttaatggcggcgatcgagtcggcgctgggcgtggtgaacgcggtggaaatcgcccgtgccagcccgcgtctggcggcgatcgcgctggcggccttcgattacgtgatggatatgggcacctcccgcggcgacggtactgaactgttctacgcccgctgcgctgtactgcatgccgcccgcgttgccggcatcgccgcctatgacgtggtgtggtcggatatcaataatgaagagggcttcctggcggaagcgaatctggccaaaaacctcggctttaacggcaaatcgttggttaacccacgacaaattgaactcctgcatcaggtctatgccccaacgcgcaaagaggtcgatcacgcgctggaagtgattgccgcggcggaagaagccgaaacgcgaggtctgggtgtggtatcgctgaacggcaagatgatcgatggaccgattatcgaccatgctcgcaaagtggtggcgctctcggcttccggtattcgtgattaa

SEQ ID NO: 210153 - DNA, 294 bp, Klebsiella pneumoniae
atggaaatgaagattgacgccctggccggcacgctggagtccagcgatgtgatggtcaggattggaccggcggcgcagccgggcattcagctggaaatcgacagcattgtgaaacaacagtttggcgctgcgattgagcaggtagtgagagaaacgctggctcagcttggcgtgaaacaggccaacgtggtggtcgatgataaaggcgcgctggaatgtgttttgcgagctcgcgtacaggccgcggcgctgcgcgcggcgcaacagacccaattacaatggagccagctatga

SEQ ID NO: 210154 - DNA, 1029 bp, Klebsiella pneumoniae
atgacactgatattaaaacgcgttcagctattaaaagataaaccgcggcgagaggcgatcgatcggtttctccgccagcatcaactgtcgttagaggccgactgcgaaatggcgattatcgccgagtatcagcagcggctggtcggctgcggtgctatcgccggcaatgtgctgaaatgcatcgccatcgatccctcgctgcagggggaggggctgagccttaaattactgaccgagctcctgacgctggcctatgagctggggcgcagcgaactgtttttgttcactaaaccttgcaatgccgcgttattttccggcgccggcttctggccgatagcccaggcgggcgaccgcgccgtgctaatggaaaatagccgcgaacggctgactcgttactgccgacagctggcgatgtaccgtcagccgggaagaaaaatcggcgctatcgtgatgaatgccaatcccttccccctcggccaccgctggttggtagaacaggcggccagccagtgcgactggctgcatctgtttgtggtcaaagaagatgcgtcctgcttttcctatcacgatcgcttcaaactcattgaacaggggattaccggcatcgataaggtgacgctgcatcccggttcggcgtatctgatctcgcgggcgacgttccccggctatttcctgaaagagcagggggtggttgatgactgccacagccagattgacctgcagctcttccgcgagcgcctggccccggcgctgcagattacccaacgctttgtcggcaccgagccgctgtgtcccctgacccgtaattacaaccagcgcatgaagtcactactggaagcgccaggcgacgcgccgcccattgaagtagttgagcttgcgcgaatcgaaaaaaatggtggacccgtgtcggcctcccgagtgcgcgaactctatcgacagcgcaactggcaggcggtcgcggcgctggtgccgccggggaccctctcttttctgatgcaactggcggagagcgaacatcaaaccgcctga

SEQ ID NO: 210155 - DNA, 1341 bp, Klebsiella pneumoniae
atgactaacatgagtcaggctccggcgacggagaaaaagggcgttagcgatctgctgggatttaaaatcttcggcatgccgctccccctttacgcatttgcgttaattacactattactttcacatttttataacgcattacccaccgatatcgtcggcggctttgccatcatgtttattatcggcgctatattcggggaaattggcaagcgcctgccaatattcaacaaatatatcggtggcgctccggtgatgattttcctggtggcggcttattttgtctatgccggtatttttacgcagaaagaaatcgatgctatcagcaacgttatggataagagtaacttccttaacttattcatcgcggtattaattaccggagcaattctgtcggtaaaccgccgcctgctgctgaaatcactgctcggctatattccaactatcctgatgggcattgtcggcgcgtctatttttggcatcgctatcggcctggtgttcggtattccagtggatcgcatcatgatgctgtacgtcctgccgatcatgggcggcggcaacggcgcgggcgcggtccccttgtcggagatttaccactccgtcaccggtcgttctcgcgaagagtattactcaaccgctatcgctattctgaccatcgctaacatcttcgccatcgtctttgccgccgtcctcgatatcatcggcaaaaaacacacctggctgagcggcgaaggggaactggtgcgtaaagcctcgttcaaagtggaagaagatgagaaagcgggacaaatcacccatcgcgaaaccgccgtcggtctggtgctgtccactacctgcttcctgctggcctacgtcgtggcgaagaaaattctgcccagcattggcggtgtggctattcactatttcgcgtggatggtgctgatcgtcgccgcgctgaacgcctccgggctgtgctcaccggaaatcaaagccggtgctaaacgcttgtctgatttcttctccaaacagctgctgtgggtgctgatggtcggggtcggcgtctgctacaccgacctacaggaaattatcaacgccatcaccttcgctaacgttgttatcgccgccattatcgttatcggtgcggtgctcggcgcggcgatcggtggctggctgatgggcttcttcccaatagaatcggccatcactgcaggcctgtgtatggccaaccgcggcggctccggcgacctggaagttctctctgcctgtaaccgtatgaaccttatctcttatgcgcaaatctcctcccgtttgggcggcggtattgtgctggtcatcgccagcatcgtgttcggcatgatgatttaa

SEQ ID NO: 210156 - DNA, 252 bp, Klebsiella pneumoniae
atgactgacaatgccgtcctgttaggcgaaggcttcaccctgatgtgtctcggcatgggctttgtgctggtgttcctgctgctgctcattttcgccatccggggaatgtccctcgccgtcaaccgcctgtttcctgagccgcctgccgcccccaaaccggcgccggccgccgtcgcgcccgccgacgatttcgcccgcctgaagccggcgattgtcgccgccattcaccaccatcgccgtcttcacccttaa

SEQ ID NO: 210157 - DNA, 1785 bp, Klebsiella pneumoniae
atgaccgttgccattaccgatgtcgtcctgcgcgacgcccaccagtccctgttcgccacccgtctgcgtctcgacgatatgctgcccgttgccgctcagctggacgacgtcggctaccgctcgctggagtgctggggcggcgccacctttgacgcctgcatccgcttcctcggcgaggacccgtgggtccgcctgcgcgagctgaaaaaggcgatgcccaagaccccgctgcagatgctgctccgcggccagaacctgctcggctaccgccactacgccgacgacgtggtggagcgcttcgtcgagcgcgccgtcaaaaacggcatggacgtcttccgcgtcttcgatgccatgaacgacccgcgcaacatgcagcccgccctgcaggcggtccgccgccacggcgcccacgcccagggtacgctttcgtacaccaccagcccggcgcacaccctgcagacctggctcgacctcaccgaacagctgctggagaccggcgttgactccgtcgccatcaaggacatgtccggcattctgacgccgcatgccgcctttgagctggtcagcgaaatcaagaagcgctatgacgtcaccctgcacctgcactgccacgccaccaccgggatggcggagatggcgctgctgaaggccattgaagccggggtcgacggcgtggatacggcgatttcgtccatgagcgccacctatggccacccggccaccgaagcgctggtggccaccctcgccggcacgccgtacgacaccggcctcgatatccacaggctggagagcatcgccgcctacttccgcgaggtgcgcaaaaaataccacgccttcgaaggccagctgaagggcaccgacagccgtatcctcgtcgcccaggtgccgggcgggatgctcaccaaccttgaaggccagctgaagcagcagagcgccgcccaccgtctggatgaagtactggcggaaatcccccgcgtgcgcgaggacctcggcttcatcccgctggtgaccccgacctcgcagattgtcggcacccaggcggtgctcaacgtgctgggcggcgagcgctacaaaaccatcgcgaaggagaccgccggtatcctgaaaggcgagtacggccgcaccccggccccggtgaacgccgccctgcaggcgcgggtgctcgacggcgccgacccggtgacctgccgcccggccgacctgctgaagccggagctggcgcagctggaagcggatgtgaaacgccaggcacaggagaagggcatcacgcttgccgaaaacgccatcgacgacgtgctcaccgtggcgctgttcccgcaacccggcctgaagttcctcgaaaaccgccacaacccggcggcctttgagccggtaccgcaggcggaagccgcgcagccagtggcaaaagcagaaaaacctgccgcctccggcgtctacaccgtggaggtggaaggcaaagcctttgtggtcaaagtcagcgacggcggtgacgtcagccagctgacggcggctgctccggctcctgctcctgctcctgcctctgcacccgccgctgccgccccggccggcgccggtaccccggtgaccgccccgctggcgggcactatctggaaggtgctggccagcgaaggccagacggtggccgcaggcgaagtgctgctgattctggaagccatgaagatggaaaccgaaatccgcgccgcgcaggccgggaccgtgcgcggtatcgcggtgaaagccggtgacgcggtggcggtcggcgacaccctgatgactctggcgtaa

SEQ ID NO: 210158 - DNA, 1302 bp, Klebsiella pneumoniae
atggaaagtctgaacgccctgatccagggcatggggctgatgcacctcggcgccggccaggcggtgatgctgctggtcagcctgctgctgctctggctggcgattgcgaagaagttcgagccgttactgctgctgccgattggcttcggcggcctgctctccaatattccggaggccgggctggcgctcaccgccctggagagcctgctggcccaccacgacccggcgcagctggcggtgattgccgcgaagctccactgcgcgccggacgtccacgccattaaggcggcgctggccctggccctgccgtcggtgcaggggcagatggagagcctcgcggtggacatgggctactccgccggggtgctggccatcttctataaggtggcgattggctcgggcatcgcgccgctggtcatctttatgggcgtcggagcgatgaccgatttcggcccgctgctggctaacccgcgcaccctgctgctgggggcggcggcgcagttcgggatcttcgccaccgtgctcggggcgctgacgctgaactacttcggcatcatcagcttcaccctgccgcaggcggcggccatcggcatcatcggcggcgccgacggcccgacggcgatttacctgtcgggcaagctggcgccggagctgctgggggccatcgcggtggcggcgtactcctatatggcgctggtgccgctgatccagccgccgatcatgaaggcgctgaccacggataaggagcggaagatccgcatggtgcagctgcgcacggtgagtaagcgggagaagatcctcttcccggcggtgctgttgctgctggtggcgctcctgctgccggacgccgcgccgctgctggggatgttctgcttcggcaacctgatgcgcgagagcggcgtggtggagcggctgagcgatacggtgcagaacgcgctgatcaacatcgtcaccatcttcctcgggctgtcggtgggggccaagctggtggcggacaagttcctgcagccgcagacgctggggatcctggtgctgggggtgatcgccttctgcgtggggaccgccgccggggtgctgatggcgaagctgatgaacgtgttcagccggcacaaaatcaacccgctgatcggctcggcgggggtgtcggcggtgccgatggcggcgcgggtgtcgaacaaggtgggtctggaagcggacgggcagaacttcctgctgatgcacgcgatgggcccgaacgtggcgggggtgatcggctcggcgatcgccgccggggtgatgctcaagtacgtgctggcgatgtag

SEQ ID NO: 210159 - DNA, 1716 bp, Klebsiella pneumoniae
atgtctgaaattttctgttctgtgctccacctgtcggcgccgggggcgcaaaacggggagaataacaatttaatgtctatctacccaatgtatacccgaaaaatcacccactggtttgccaggcgatcgtttcagaatcgcatcttcctgctgatcttattcacctcgacgatcgtcatgctggcgatgtcatggtatctgacagacattaccgaggagcgtctgcattatcaggtcgggcaacgggcgctgattcaggcgatgcagatttcggcgatgccggagctggtggaggcagtgcagaaacgcgatctcgccagaatcaaagcccttatcgaccccatgcgttcgttctccgacgccacctacatcaccgtcggtgatgccagcggccagcgcctctatcacgtcaatcctgatgaaatcggcaaatcgatggaaggcggcgatagcgatgaggcgttgataaacgctaaaagctacgtgtcagtgcgcaaaggctcgctgggatcgtcgctgcgcggtaaatcgccgattcaggacgcaaccggcaaggtgatcggcattgtgtcggtaggctataccattgagcaactggaaaactggctcagcctgcagataagttcgctgctgatcccgatggccatcatgttactgcttctgctcttttgcgcccgccgcttctcactgcatatcaaaaaacagatgctcaatatggaaccccagcagctgtcacagctgttgatccagcaaagcgtgctgtttgaatcggtgttcgaagggcttatcgccatcgactccgattataaaatcactgcgattaatcagactgcgcgtcgcctgctcaatttgagtcagccggaaccgacgcttatcggcaaacggatcagcagcgttatctcgcaggaggtcttcttctacgatgcgccacagaccaataaaaaagacgagatcgttaccttcaatcagatcaaagtgatcgccagccggatggcggtgatcttaaacaatgagccacagggctgggtgatcagctttcgcagcaaagacgatatcaacacccttagcctgcagcttagccaggtacaacaatatgccgataacctgcgcgccgtacagcatgagcatcgcaatctgatctccactatcgccggtctgctgtttcttaaacgctataaccaagcgctggaactgatccaacagcagtcggaaagtcaccagaaggtgatcgattttattgcacgcaatttccaggacaaccacctggccgggctgttgatcggcaaatattaccgggccaaagagcttggacttgagctgattttcgatccggcctgcttcgttgatagattacctaccgccctttcgcacaacgaatggatctcgatcgtggggaatctacttgataacgcctacaatgccagcctgcgtcaaccgcagggttcaaaacagatcgaatgcctgatcaacagtgatggccaggaggtgatcattgagatcgccgaccagggatgcggcattgacgaggcgctgcgcgatcggatcttcgagcgcggcgtcaccagcagcgccagcaaagatcatggtatcggactctggctagtacgcagctacgtggaacaagcaggcggcagtatcgtcgtcgaaaataatattccttttggcaccatttttacgctttatatccccctgacccgagatgaacatcatggatag

SEQ ID NO: 210160 - DNA, 705 bp, Klebsiella pneumoniae
atggatagcatcactactcttattgttgaagacgaacctatgctggcggagatcctggtggataacattaaacagtttccccggttcgacgtcattggtattgcggataagcttgagagcgccaggaaacagctcagactgtatcaaccgcagctgatcctgctggataattttttacccgacggcaaaggtatcgatctgatccgccatgcagtcagtacacattacaagggacggattatctttattaccgcggataatcacatggaaaccatcagcgaagcgctgcgtcttggggtgtttgattacctgattaagccggtgcactatcagcgcctgcagcacacgctggagcgctttgcccgctatcgaagctcgctgcgctccagtgaacaggccagccagctccatgtcgacgcgctgtttaatattcaggcccgggaacaaacggaacccgccagcgcaccactgcgcgggatcgatgaaagcacctttcagcgcgtgctccagctgtttgccgacccgacggtggtgcataccgccgactcgctggcccgtatcctcggcagcagcaaaaccaccgctcgccgttatctggaacaaggagtgaagaacgactttctggaagcggaaatcagctacggcaaggttggccgacctgagcgtatctatcacggcaagcagacctatcctgagcagagataa

SEQ ID NO: 210161 - DNA, 630 bp, Klebsiella pneumoniae
atgactgaacgggtttattacaccagcgatgctaccgacgggcgcgcccagatcattgcctgcactgcagaagcggatggccgttacgccatcgaactggatcggacgctgtttcacccgcaagggggcggtcaaccggcggaccgtggatggattgccgggcaggtggttgagacggtggttgtgcgcggcgaaagggtgctgcatattctgtcgcaaccccttcccctcggtgaagtggagatgaaaattgatgcctccgcgagacagctgcatgctcgtctgcattctgccggccacctgcttggcctggcgggcgaacagcttggctggcaaccggtgaaagcgcaccactggcccggcgaagggcggataacctttgccagcaggaatagcgccgcgctgccggacgccagtgcgctactggcgctagtgaaggcatggcaggcgcaggacttaccgcgtcaggtgacgttcgctgatggcatgcgcaaggtgggattcggcgagctgccagcctatccctgcggaggcacccacgtcgcccgtctggcggagctgggcgacattgtcattagtcagattaagatgaagaaggggcagctggtggtcagctacaccctggcgtaa

SEQ ID NO: 210162 - DNA, 930 bp, Klebsiella pneumoniae
atgaatctgaacctcctgcccgacctcgctcttttcgttcagatagtcgaccagggcagcttctccgccgtcgcccgccagaacggcattaccccttcagccgttagccgcagcgtttcacggctggagcgagagatgggctgcaaactgctgcagcgtaccacccgcaagctgcgtcttagcgatgccggggaaacgatatatcagcatgcccagcagatgctggaagcggcgcgacaggcaatggattccgcaggcagtcgccaaacggtcgcccagggaaagctgacgctcagcgtcccgaaagccgtcggccgctttgtgatccacccgctgatgatggcgtttttccaccgctacccgcaggtggacgtctgcctgcggctggaagatcgccctctcgattttatcgatgacggtattgatctggcgctacgcatcaccgataccccctcccccggcctgcatggcaaaccgctgatgccaatcaggcacgttatctgcgccactgaggcctatttacagcagcacggtacgccgtacacgccgcaggatctgcgcgcgcatagctgcattagccttggcgaaacgcccgccgatgctcgctggaagttccgtcgggaaggcaaaacagaaacggtgcaaacctacgggcggtacgccgccaaccataccgccgtacgcctcgacgcggtcagacagcatttagggatcggcagcctgccgctgttcaccgcccgtgaggcgctggcgaacggcgacatcgtgcaggtgttgcccgagtgggaatttatcagcagctactcaggcgacctgtggctactgtgggcgggagataagcatatgcccgccaggatgcgggcgatgatcgattatctcagcgagacggtgccggcgctgagcgcaggcagcacagagccagcgaaataa

SEQ ID NO: 210163 - DNA, 366 bp, Klebsiella pneumoniae
atgacctatggacaggcgtatttgagcggctggaaagagacctttaactttagcggacgcgccagtcgacggcagttctggacgttttttctcaccaatgtattgatcgccaccgcgccgctggcggcctggtgtctggcaaccagcgttaaccctcaatacggcatcctcagttttgttgtcattccctttgccgcgctctggctgctgttgatggcgatccccctgctggctgtaggctgccggcggatgcatgatatcggccgctccgggatctggtttgtgttgggggttatcattccgtggtttgcaattatttcgctggctctgtgctgcctgcgctcagcgccggcaccgtctcgctga

SEQ ID NO: 210164 - DNA, 915 bp, Klebsiella pneumoniae
atgcgcttaccaatcattcttgataccgatccgggcatcgacgatgccgccgccattgccgcggcgctgttcgcgcctgagctggatctgcagttgatgaccaccgtagcgggcaatgtctcggtggagaagacgacccgtaacgcgctgcaattgctgcatttctggaatgccgatgtaccgctggcgcagggggcgtcgatgccgctggtgcgtccgttgcgcgacgccgcctcggtgcatggcgaatccggcatggaggggtatgactttgttgagcatcaacgtcaaccgctggcgaagccggccttccaggcgatccgtgatgcgcttatgcatgctgccgagccgatcaccctggtggcgattggcccgctgaccaatatagcgctgctgctgacccagtacccggaatgcgtgtttaatattcgccggctggtgatcatgggcggctcggcgggccgcggcaacttcacgccgaatgcggaattcaatatcgctatcgacccggaagccgccgcgaaagtgttccacagcgggctggagattgtgatgtgcgggctggacgtcaccaaccgggcgctgctggcggcggattatctggcgacgctgccgacgctgaaccagaccggtaaaatgctccatgcgctgtttagccactatcgcagcggcagcatgagcagcggtctgcgcatgcacgacttgtgcgctattgcgtggctggcccgcccggaactgttcactctccagccgtgctttgtggcggtggagacgcaggggacctggaccgccggcaccacggtggtggatatcgaaggacgactgggccagccggcgaacgcccaggtggcgctggatatcgacgtcgaagggtttcagcgctgggcggcggaggtgattgccctggcgccgtga

SEQ ID NO: 210165 - DNA, 951 bp, Klebsiella pneumoniae
atgcagatcctgttggctaacccgcgcggtttttgcgctggcgttgaccgcgctatcagcattgtagaaaacgcgctgacgctgtatggcgcaccgatctatgttcgtcatgaagtggtgcacaaccgctatgtggtggatagcctgcgcaagcgtggcgccatttttatcgaacagatcagcgaagtgccggacggcgcgatcctgattttctccgcccacggcgtgtcgcaggcggtacgcaacgaagcgaagagccgcgacctgacggtgttcgatgccacctgtccgctggtgaccaaagtccatatggaagtcgcccgcgccagccgccgcggcgaagagtcgattctgattggccatgccggccatccggaagtcgaaggcaccatgggacagtacaacaacccgcaaggggggatgtacctggtcgagtcgccggaagacgtgctgaagctggaagtgaaaaatgacgcccggctgtcgtttatgacccagaccacgctctccgtcgacgatacctcggatgtgattgacgccctgcgcgcgcgttttccgaaaatcgtcggcccgcgcaaagacgacatttgctatgccaccactaaccgtcaggaagccgtgcgcgcgctggcggagcaggctgacgtagtgctggtggtcgggtcgaaaaactcctccaactctaaccgcctcgccgagctggcgcagcggatgggtaaggcggcttacctgattgacgacgcctccgatatccaggaagcgtgggtcaaggatgcggcctgcgtcggcgtgacggcgggcgcgtcggcgccggatattctggtgcagaacgtcattacccgcctgcaggagctgggcggcggcgaagccgtgccgctggaaggccgggaagagaatatcgtctttgaagtgccgaaagagctgcgtgtggatgtccgtgaagtagagtaa

SEQ ID NO: 210166 - DNA, 450 bp, Klebsiella pneumoniae
atgtctaaatccgtacagagcaacagcgcggtactggtgcacttcactctgaaactggacgacggctccactgccgagtccacccgcagcaacggcaaaccggcgctgtttcgcctcggcgacacctctttgtctgaagggctggagcaacagcttctcggtttgaaagagggggagaaaaaggccttttcgctggagcctgacgccgcctttggcgtacccagcccggacctgattcagtatttctctcgccgcgagtttatcgacgctggcgagccggagatcggcgcgattatgctctttaccgcaatggatggcagcgaaatgcctggcgtgatccgcgaagtgaacggcgattccatcaccgttgacttcaaccatccgctggccgggcgcactgttcattttgatattgaagtgctggagatcgatccggcgctggaggagtaa

SEQ ID NO: 210167 - DNA, 501 bp, Klebsiella pneumoniae
atgagtaaatcgatctgttcaacggggctacgctggctgtgggtggtcgtagccgtgctgattatcgatctgggcagcaaattcctgatcctccagaacttcgctctgggggagacggttccgctgttcccgtcgcttaatctgcattatgcccgcaactatggcgcggcctttagcttcctcgccgacagcggcggctggcagcgctggttcttttccgggatcgcgatcggcatttgcgtggtgctgacggtgctgatgtaccgttcgaaggcgacgcaaaagctgaacaatattgcctacgcgctgattatcggcggcgcgctgggcaacttgttcgatcgcctgtggcatggctttgtggtcgatatgatcgacttctacgtcggcgactggcattttgccaccttcaacctcgccgatagcgcgatctgcatcggcgcagcgctgattgtgctggaaggcttcctgccgaaaccgactgtgaaagagcaggcgtaa

SEQ ID NO: 210168 - DNA, 2853 bp, Klebsiella pneumoniae
gtgtttatcaaaccgaaatacggaaccgagaatctgatgagtgactataaatcgaccctgaatttgccggaaacagggttccctatgcgtggcgacctcgccaaacgcgaaccgggaatgctggcgcgttggaccgatgatgacctgtacggcatcattcgtgcagccaaaaaaggcaaaaaaaccttcattctgcatgatggccctccttatgcgaatggcagcattcatattggtcactcggtaaacaagattctgaaagacattatcgttaagtccaaaggactgacgggctatgactcgccttacgttccgggctgggactgccacggtctgccgatcgagctgaaagtggagcaggaatacggcaagccgggtgagaaatttaccgctgccgaattccgcgctaagtgccgcgaatatgccgccgagcagatcgatggccagcgtaaagactttatccgtctcggcgtgctgggcgactggtcgcatccgtacctgaccatggacttcaaaaccgaagccaacatcatccgcgcgctgggcaaaatcatcggtaatggccacctgcataaaggcgccaaaccggtgcactggtgcgtagactgccgttccgcgctggcggaagcggaagtggagtattacgacaaaacctctccgtctatcgatgtcgcgttccacgcggtagacaaagccgcggtactggcgaaattcggcgtagccgacgtcaacggtccggtgtcgctggttatctggaccaccacgccgtggaccctgccggccaaccgcgctatctctctgtctcctgagttcgactatgcgctggtgcaggttgacggccaggcgctgatcctggcgaaagacctggttgagagcgtaatgaagcgcgttggcgcgacggactacactattctggcggcggtacaaggttctgagcttgagctgatgcgctttaagcatccgttcctcgatttcgacgtgccggcgatccttggcgaccacgtgacgctggatgccggtaccggtgcggtgcataccgctggcggccacggtccggacgactacaccatcagccagaaatacggtctggaaatcgccaacccggttggcccggacggcgcttacctgcctggcacctggccgtccctggacggcattaatgttttcaaagccaatgacatcatcgttgagatgctgcgtgagcgtggcgcgctgttacacgttgagaaactgcagcacagctatccatgctgctggcgccacaagtcgccgatcatcttccgcgccactccgcagtggttcgtgagcatggatcagaaaggcctgcgcgcgcagtcgctgaaagagatcaaaggcgtgcagtggatcccggactggggccaggcgcgtatcgaatcgatggtcgctaaccgccctgactggtgtatctcccgtcagcgcacctggggcgtgccgatgtcgctgttcgtgcataaagaaacccatgaactgcacccgcgtacccttgagctgatggaagaagtggcaaaacgcgttgaagttgacggcatccaagcgtggtgggatctcgattcccgcgacattcttggcgatgacgccgacagctacgagaaagtgcctgataccctcgacgtctggtttgactccgggtcgacccactcttccgtggttgacgtgcgtccggaattcgccggtcacgccgccgatatgtatctggaaggttctgaccagcatcgcggctggttcatgtcctcgctgatgatttccacggcgatgaaaggcaaagcgccatatcgtcaggtactgacccacggcttcaccgtcgacggtcagggccgcaaaatgtccaagtctatcggcaacaccgttagcccgcaggacgtgatgaacaagctcggcgccgatatcctgcgcctgtgggtggcttccaccgactacaccggcgaaatggcggtctctgacgagatcctcaaacgcgctgcggacagctatcgtcgtatccgtaacaccgcgcgcttcctgctggcgaaccttaacggtttcgatccggtgaaagacatggttaaaccggaagagatggtggtgctggaccgctgggcggtcggctgcgcgcaggcggcacaggaagatatcctgaaagcctacgaatcctacgacttccatgaagtggtgcagcgcctgatgcgcttctgctccatcgagatgggctcgttctacctcgacatcatcaaagaccgccagtacaccgccaaggcggacagcgtggcgcgtcgcagctgtcagaccgcgctgttccatatcgtggaagcgctggtgcgctggatggcgccgatcatgtccttcaccgcagatgaaatctggggctatctgccgggcgagcgtgagaaatatgtcttcaccggcgagtggtatgaaggtctgttcggcctggccgacgacgaagcgatgaacgacgatttctgggatgagctgctgaaggtgcgtggcgaagtcaacaaggtgatcgagcaggcgcgtgcggataagaaagtcggcggctcgctggaagcggcagtcacgctgtatgctgatgccgatctggcggctaagctcaatgcgctgggcgatgaattgcgatttgtcctgttgacctccggggcgaacgtcgcagactatgcgagcgcgtccgctgatgcgcagcaaagcgaactgctcaaagggctgaaagtcgcattgagtaaagctgaaggtgagaaatgcccgcgctgctggcattacaccaccgatatcggcaaggtggcggaacacgcggaaatctgcggacgctgtgtgagcaacgtcgccggtgacggcgagcaacgtaaattcgcctga

SEQ ID NO: 210169 - DNA, 939 bp, Klebsiella pneumoniae
atgaagctgatacgcggcatacataatctcagtcaggccccgcacgggtgcgtgctgaccattggtaatttcgacggcgtgcatcgtgggcatcaggcgctgctgcagcggttgcgcgaagagggccgccagcgcggtttaccggtcgtggtgatgatttttgaaccccagccgctggagctctttgccgctgataaagccccggcgcgattgacccgcctgcgtgaaaagctgggctatctggctgaaagcggggttgactatgtattgtgcgttcgctttgaccgccggttcgccgcgctaaccgcgcaggattttatcagtgaactgctggtgcgtcgcctgggcgtgcagttcctcgccgttggtgacgatttccgctttggcgctggtcgccagggggatttcttgttattacaaaaggcgggggcggaatatggcttcgacgtcaccagcactcaaaccttctgcgaaggcggggtgcgaatcagcagcacggcggtacgccaggcgctggccgatgacgatctcctgctggcggagacgctgctcggccatccgtttagcatctccggacgcgtcgtgcatggtgatgaactaggccgaaccataggttttccgacggcgaacttaccgctgcgtcgtcaggtttccccggttaaaggggtctatgcggtagaagtgacagggctgggcgacaaaccgatagcgggcgtcgccaatattggcacccgtccaacggttgcgggcgtgcgtcagcagctcgaagtacatctgttggacgttgtaatggacctctacggtcgccatatcaatgtaatactgcgtaaaaagatacgtaacgagcagcggtttgcgtcgctggacgagctgaaggcgcaaatcgcacgtgatgagttaacggcccgcgaattatttgggctgaccagccaggcctga

SEQ ID NO: 210170 - DNA, 210 bp, Klebsiella pneumoniae; identical to SEQ ID NO: 138792

SEQ ID NO: 210171 - DNA, 897 bp, Klebsiella pneumoniae
atgtcacatattaactacaatcatctgtactacttctggcacgtgtataaagaagggtccgtcgtgggcgcggcggaggcgctgtttctgacgccgcagaccattaccgggcagatcaaagccctggaggagcgcctgcaggggaaattatttaagcgaaagggaagggggcttgagccgagcgagctgggggagctggtttttcgctatgccgacaggatgtttaccctcagccaggagatgctcgacatcgtcaactatcgcaaagagtcgaacctgctgtttgacgtcggcgtggccgatgcgctctcgaaacggctggtcagcggcgtgctggatgccgccgtcgttgagagcgagcagattcatctgcgctgttttgaatccactcatgagctgctgctggagcagctgagccagcataagctcgacatgattatctctgactgcccgatcgactcgacgcagcaggaagggctattttcggtgaagatcggcgagtgcagcgtcagcttctggtgcatgaatccggcgccgacgaagccgttcccggcctgcctcgaagagcggcggctgctgatccccggtcggcgatcgatgctgggacgtaagctgctgaactggattaacgtgcagggcctgaaggtggagatcctcggcgagtttgacgacgcggcgctcatgaaagccttcggcgccgcacataatgcgatatttgtcgcgccgacgctctacgcgcatgatttctaccatgatgaatcgattgtcgaaattggccgtatggatagcgtgatggaggaatatcacgctattttcgctgaacgaatgattcagcacccggcggtacagcgtatctgtaatcgcgattattcgtcgctgttcaccgaaccccgatag

SEQ ID NO: 210172 - DNA, 1224 bp, Klebsiella pneumoniae
gtgtattatgcttttatcgagttattcaccaacaggatgaaagtaaaagtgaaacatctgcaacgattctttagtagcgatgcttccggcggcattgtcttaattatcgccgccgcgctggcgatggtgatggccaataccagcgtgaccagcggtctgtatcactccttccttgatacgccagtacagctgcgtgtgggcgcgctggagatcaacaagaacatgctgttatggatcaatgatgccctgatggcggtgttctttttgctgattggcctggaggtcaaacgtgagctgattcagggctcgctggcgagccgccgtcaggcggtcttcccggtgatagccgcgctgggcgggatgatcgtcccggcgctggtctacctggcctttaacgcccaggatcctgtcgccagagaagggtgggcgatcccggcggcgacggatattgcctttgccctcggcgtgctggcgctgttaggtagccgggtcccgacggcgctgaagattttcctgatggcgctggcgattattgatgacctcggggctatcgtgattatcgcgctgttttatacccacgacctgtccatgctctcgctgggcgtggcggcggcggcgatcgcggtgctggtggccctgaatctgagcggcgtgcggcgtaccgggatctatattctggttggcgcggtgctgtggacggcggtgctgaagtctggcgttcacgcaacccttgccggggtgattgtcggctttatgatcccgctcgaagaaaagcatggcaagtcgccggccaaagcgcttgagcatgtcctgcacccgtgggtggcgtttatgatcctgccgctgtttgccttcgcgaacgcgggggtctcactgcagggggtcacccttgccgggctgacgtcgctcctgccgctgggcattatggctggcctgtttatcggtaagccgctggggattagcctgttctgctggctggccctgaagctgaagtgggcttcgctgccggagggaaccacctgcaagcaaattatggcggtggggatcctgtgcgggattggctttacgatgtcgattttcatcgccaccctggcctttggcagcgtggatcccgcgttgatcaactgggccaagcttggcattctgatcggctcagtgctatcagcggtcgtcggctacctcatactgcgtcagcgcgtgacggatactcgcctcgcggtataa

SEQ ID NO: 210173 - DNA, 1134 bp, Klebsiella pneumoniae
atggcaaagcaagattactacgagattttaggcgtttccaaaacagcggaagagcgtgaaatcaaaaaggcttataagcgcctggccatgaaatatcacccggaccgcaaccagggtgataaagaggctgaagccaaatttaaagaaatcaaagaagcgtatgaaatcctgactgatgcccagaagcgtgcggcctacgatcagtacggccacgcggccttcgaacagggcggcatgggcggcggcggcggttttggcggcggtgccgacttcagcgatatctttggcgatgttttcggcgatatctttggtggcggacgtggtcgtcagcgcgcggcacgcggcgccgatctccgttacaacatggagctgacgctggaagaagcggtgcgcggcgtcactaaagagatccgtattccgacgctggaagagtgcgacgtctgccacggcagcggcgccaaggccggcagcaaaccgcagacctgtccgacctgtcatggcgcgggccaggtgcagatgcgccagggcttttttgcggtacagcagacctgtccgcactgccagggacgcggtacgctaattaaagatccttgcaataaatgtcatggccatggccgcgtagaaaaaaccaaaaccctgtcggttaaaattccggcgggcgtggataccggtgaccggatccgtctggcgggcgaaggcgaggccggcgaacatggcgcgccggcaggcgatctgtacgttcaggttcaggtgaagcagcacgctatctttgagcgtgaaggcaataacctgtactgcgaagttccgatcaacttcaccatggcggcgctgggcggtgagatcgaggtcccaacgctcgacggccgcgtgaacctgaaaattccaggtgaaacccagaccggcaagctgttccgcatgcgtggaaaaggcgtgaaatccgttcgcggcggcgcgcagggcgatctgctgtgccgcgtggtggtggagacgccggtggggctgaatgagaagcagaagcagctgctgaaagagctgcaggagagcttcggcggtccgaccggggaaaacaacagcccgcgttcgaaaagcttctttgacggcgtgaagaagttcttcgacgacctgacccgctaa

SEQ ID NO: 210174 - DNA, 1917 bp, Klebsiella pneumoniae
atgggtaaaattattggtatcgacctgggtactaccaactcttgtgtagcgattatggatggcactactgcacgcgtgctggagaacgccgaaggcgatcgcaccacgccttctatcattgcctatacccaggatggtgaaactctggttggtcagccggctaaacgtcaggcagtgacaaacccgcaaaacaccctgtttgcgattaaacgcctgattggccgccgcttccaggacgaagaagttcagcgtgacgtttctatcatgccatacaaaattgttgccgcagacaatggcgacgcatggctggatgtgaaaggcaccaaaactgcaccgccgcagatctctgctgaagtgctgaagaaaatgaagaaaacggctgaagattacctgggtgaaccggtaactgaagcggttatcaccgtaccggcttactttaacgatgcgcagcgtcaggcaaccaaagatgccggccgtatcgccggtctggaagttaaacgtatcatcaacgaaccaaccgcggccgcgctggcttacggtctggataaagaagtgggcaaccgtactatcgcggtttacgacctcggtggtggtactttcgatatctcgattatcgaaatcgacgaagttgatggcgaaaaaacctttgaagttctggcgaccaacggtgatacccacctgggcggcgaagacttcgatactcgtctgatcaactacctcgttgatgagttcaagaaagatcaggggattgacctgcgcaacgacccgctggccatgcagcgcctgaaagaagccgctgagaaagcgaagattgaactgtcttctgctcagcagaccgacgttaacctgccgtacatcactgcagacgcgaccggtccgaaacacatgaacatcaaagtgactcgcgcgaaactggaaagcctggtagaagacctggttaaccgttccatcgagccgctgaaagtcgctctgcaggatgccggtctgtccgtttccgatatcaacgacgtgatcctcgttggtggtcagactcgtatgccgatggtgcagaagaaagtggccgagttctttggtaaagaaccgcgtaaagacgttaacccggatgaagccgtggcgatcggtgctgccgttcagggcggtgtactgactggcgatgtgaaagacgttctgctgctcgacgtaaccccgctgtcgctgggtatcgaaaccatgggcggcgtgatgactgcgcttatcagcaaaaacaccaccatcccgaccaagcacagccaggtgttctctaccgctgaagacaaccagtctgcggtaaccatccatgtgctgcagggtgagcgtaaacgcgcgtctgataacaaatctctgggtcagttcaacctggatggtattaacccggcgccgcgcggcatgccgcagatcgaagtgaccttcgacatcgatgctgacggtatcctgcacgtctccgcgaaagacaaaaacagcggtaaagagcagaagatcaccatcaaagcgtcttccggtctgaatgaagaagaaattcagaaaatggttcgcgaagcagaagctaacgccgaatctgaccgtaagttcgaagagctggtacagacccgcaaccagggcgaccatctgctgcacagcactcgtaagcaggttgaagaagcaggcgataaactgccggctgacgacaaaactgccattgagtctgcgctgaccgcgctggaatcttctctgaaaggcgaagacaaagcggatatcgaagcgaaaatgcaggcgctggcgcaggcttctcagaagctgatggaaattgctcagcagcagcacgctcagcagcaggcgggttccgctgacgctcaggcgagcaacgcgaaagacgacgatgttgtcgacgctgagttcgaagaagtgaaagataaaaaataa

SEQ ID NO: 210175 - DNA, 405 bp, Klebsiella pneumoniae; identical to SEQ ID NO: 138494

SEQ ID NO: 210176 - DNA, 726 bp, Klebsiella pneumoniae
atgcatattaattacctggaggatgacgatctcgcctttctgcctgagtgcagcgaggcgcatctggaagcctttacccgcattctgacccacggggaaaatggcaaaccccgtctctccagcacgctcctgcgcaacgagacatttttagcgatggaggggcacccggagcgttatcgccgcaactggcagctaatcgccggtgagctacagcattttggcggcgatagcatcgccaacacgctacgccgccatggcaaattttatcgcgcgatcctgctggatgtatgtaaacgactgaaagcgaaggtcgacaaacagctgtcgacgccgcagatcgagcagcagttgctggcgcattttctgcagcacagctggaataaactgaacgcggagcaaaaagcgcagtttctcgccgcggtggagtgccggagccatgagctggacagcctgatggctcatctgctgaggcatcgcaagctaagcgaaggcgtcactttgttgctggacgaacgcttaaccgccatcctgcgcacgcacgccgcggtgagcgtcatcggtcatggcctggtgcgcggcgccgggctgaacagcgtgaaagcggtgagcggcagcgcctaccgggtcaccatccccgcggtcctgcatatcgcctgtttacggcaaatgctccagccgccgtcagacaccgcggaaattggtgaaaaataccccgccagatcatag

SEQ ID NO: 210177 - DNA, 567 bp, Klebsiella pneumoniae
atgggcaacactaagttggctaatccggcaccgctgggccttatgggcttcggcatgaccactattctgcttaacctggcgaatagcggcctgttcgcattcgatgtagctatcctggcgatggggattttttacggcggcattgcgcaaatttttgccggcctgctggaatacaaaaaaggcaacacttttggcttaaccgcttttacctcctacggcagcttctggctgacgctggtggcgattcttctgatgccgaaaatgggcctggcagacgcgccaaacgcgcacttcctcggtatgtacctcggcctgtggggcgtctttaccctgtttatgttctttggcaccctgaaggcagcccgcatgctgcagtttgtcttcctgagcctgaccgtactgttcgcgctgctggcgattggccatttggccgataacgaaggcattgtgaaggtagccggctgggtcggcctgatttgtggcgccagcgctatttacctggcgatgggtgaagtgctgaacgaacagttcggccgcaccgtgctgccgatcggcgaaccgcgctaa

SEQ ID NO: 210178 - DNA, 1305 bp, Klebsiella pneumoniae
atgtcatatgtaaaccgaccgctcaaccgccaggattataaaacgctgacgctggccgccctgggcggcgcgctggagttttatgactttatcattttcgttttcttcgccgccgtcgtcggcgagctcttcttccctgcggatattcccgaatggctgcgccaggtgcaaacttttggcattttcgccgccggttacctggcgcgtccgctggggggcatcatcatggcccactttggcgatctagtggggcgcaagaaaatgttcaccctcagcatcctgctgatggcgctaccaaccctggcgatcggtctgctaccgacctatagctcggtaggtatcatcgccccgctgctattgctgctgatgcgtattctgcagggagcggcgatcggcggtgaagttccaggcgcctgggtgtttgtcgctgagcatgtcccggaaaaacgcattggtatcgcctgcggcacgctgacggccggcctgacggttggcattctgctggggtcggtggtggccacgcttatcaataccagtctgacgccgcaggggatccacgacggcggctggcggatccccttcctgctgggcggcgtatttggtctgatagcgatgtatctgcgccgctggctgcaggagacgccgatttttcttgagatgcagcagcgcaaagcgctggcgcaggagctgccggtaaaagcggtggcgctcaagcaccagaaggcggtggtgatctctatgctgctgacctggctgctgtcggctggcgtggtggtggtgatcctgatgtcgccggtctggctgcagaagcactatggttttgcgccggccattaccctgcaggccaacagcatcgccaccattatgttgtgcatcggctgtctgctcgccgggctggcggcggaccgcttcggcgccagccgcacttttatcgtcggcagcctgctgctggcggttgccagctgggcattttaccatcttgccggcgccagcccgcagcggctgtttctgctctacggtacggtggggctgtgcgtcggcgtggtgggggcggtgccctatgtgatggtgcgggccttcccggcggaagtacgcttcaccggcatctctttctcctacaacctgtcgtacgcgatctttggcggcctgacgccgattgcggtcaccatgctgatgggggtgtcgccgatggcgccggcctggtatgtgctggccctgtcgctgatggggctgggattaggtatctggctgcgtcaggagctgacggcgccgacggggatgccggaaggggagctgcagcgttaa

SEQ ID NO: 210179 - DNA, 588 bp, Klebsiella pneumoniae
atgaataccttacgaatcggcttagtttccatttccgatcgcgcctccagcggcgtctatcaggataaaggcatcccggcactggaagagtggctggcacgtgccctgaccacccctttcgagctgcaaacccgtctgattccggatgagcaggccatcattgagcaaacgctgtgcgaactggttgacgaaatggggtgccatctggtgctgaccaccggcggaaccggccctgcgcgtcgcgatgtgacgcccgacgcaacgctggcgatcgccgatcgcgagatgccgggcttcggcgagcaaatgcgccaggttagcctacactttgtgccgacggctatcctttcccggcaggtcggtgtgatccgcaagcaggcgctgatcctcaaccttcccgggcaaccgaaagcaattcaggagactctggaaggggtgaaagatgctgacggcaacgtgctggtgcacggtattttcgcaagtgtaccttattgtgtacagttgcttgaagggccttatgtggaaaccgatggccgtgtagtagaagcttttcgtcccaagagtgccagacgcgaaactttatcctga

SEQ ID NO: 210180 - DNA, 954 bp, Klebsiella pneumoniae
atgacggataaattaacttctctgcgtcagtacaccactgtcgtcgctgacaccggagatattgcggcaatgaagctgtatcagcctcaggatgccaccactaacccttccctgattctcggcgcggctcagatccctgagtaccgtaagctgattgacgacgctgtcgcctgggctcgtagccagagcagcgatcgcgcgcagcagatcctcgatgcttccgataagctggcggtgaacatcggtctcgaaattctgaaactgatcccgggccgtatctccaccgaagtggacgcacgtctctcctatgacaccgaagcgtctatcgcgaaagccaagcgcatcatcaagctgtacaacgacgcgggcatcagcaacgatcgcattctgatcaaactggcctccacctggcagggcattcgcgccgctgaacagctggaaaaagaaggcattaactgtaacctgacgctgctgttctccttcgctcaggctcgcgcttgcgccgaagcgggcgtcttcctgatttcgccgttcgttggccgtatcctcgactggtacaaagccaacaccgacaagaaagagtacgcaccggcagaagatccgggcgtggtttccgtcagcgaaatctacgagtattacaagcagcacggctatgaaaccgtcgtgatgggcgcaagcttccgtaacgttggcgaaattctggaactggctggctgtgaccgcctgaccatcgccccggcgctgctgaaagagctgtccgaaagcgaaggcgccgttgagcgtaagctggtatataccggtgaagtgaaagcgcgtccggagcgtattaccgaatctgagttcctgtggcagcataaccaggatccgatggcggtagacaaactggcggaaggtatccgtaagtttgcgatcgaccaggaaaaactggaaaaaatgatcgacgaactgctgtaa

SEQ ID NO: 210181 - DNA, 1431 bp, Klebsiella pneumoniae
atgcctgattttctctcatttatcaatgaaatactctggggctcagtgatgatttatctgctactgggcgccggtatctggtttagctggcaaacccggggtattcagtttcgttacgtgcgcaaattcggccgcagtctaaaaaaaagcctgcacccgcagccgggtggtttaacgtcctttcaggcgctctgtaccagccttgccgcccgggtcggcagcggcaatcttgccggggtgacgctggcgatcgccgccggtgggcccggcgccgtattctggatgtgggtttccgccctgctcggcatggccagcagctttgctgaatgttcccttgctcagctgtataaagaacgcgatagccgcggacagtttcgcggcggcccggcctggtacatggcgcgcgggctcggcatgcgttggatgggcgtcctgttttcgatcctcctcctgctggcctatggttttatcttcaataccgtgcaggctaactccgtggcccatgccttgcgctatgcgttcgatctgccggcggcggtcagcggcggcgtgctggccgttgtcgttttgctggcgatcctccgtggtttacgcggcgtggcgcgtctgatgcaatggatcgttccctttatggcgctgttgtggatcgccaccagcctgctcatcggcctgtggcacatcaccgccctgccgacgattttcgccaccatctttcgctgcgccttcggctggcaggaggccgccgccggcgcggtgggctacaccatcagccaggcgctgaccagcggcttccagcgcggcatgttctccaatgaagcagggatgggctcttcgcctaacgccgccgcggccgccgcctcctggccgccgcacccggcggcgcaggggatcgtgcagatgattggcgtgtttatcgatactattgtgatctgtaccgcaagcgcgattatcgtcatgctggcgccgcggcccgacaatgaatatacgctcaacggtattcaggacttgcaacacgcgatgagcgtgctggtcggcggctggggagcgggttttatcgccctcatcgtgctgctgttcgcctttagctctatcgtagccaattacgtgtacgcggaaaataatctggtcttcctgcgcctggataagccgcgctatatctgggggctgcgaatactcaccgtcctgatggtgctgttggggaccatggttagcctgcctgtcgtctggcagagcgcggatatcatcatggcgctgatggcgatgaccaacctgacggccattctgctgctctccccgacggtgcggattatcgccagcgattatctgcgtcagcggcggctgggtatccagccgactttcgatgccactcgttacccggatattgaccaacagctggccccgggcgcctggaatgaattgccgcgcgaatag

SEQ ID NO: 210182 - DNA, 774 bp, Klebsiella pneumoniae
atgctgattctgatttcacctgctaaaacgctcgattatcaaagcccgctggcaacgactcgctatacccagcccgaactcctcgagtattctcagcagcttatcggcatcgcccgtaagctgagcgcaccgcaaatcggcaagctgatgagcattagtgacaagctggcggatctaaacgccacccgcttccacgactggcaccctgactttacgccgcaaaatgcccgccaggcgatcctcgcctttaaaggcgatgtctacactggcctgcaggcagagacactcaccgaggacgactttgacttcgcccagcagcatctgcgcatgctctccgggctgtatggcgtgctgcgcccgttagacctgatgcagccctaccgcctggagatggggatccgtctggaaaatccgcgcggcaaagatctgtaccagttctggggggataccattaccgagaagctgaatcaggcgctgcgcgaccagggcgacgatatcgtcatcaacctggcttccgatgaatattttaaatcggtgaaaacgccaaaattgcagggtcagctgatcaagccggtattcctcgatgagaagaacggcaaattcaaagtgatcagtttttatgcgaagaaagcccgcggcctgatgagtcgctacattattgaaaaccgcttaacccagccggagcagctcaaagcctttaatagcgaaggctatttctttgatgcggatgcctcagagaaaggcgaactggtgtttaaacgccacgagcagtaa

SEQ ID NO: 210183 - DNA, 378 bp, Klebsiella pneumoniae
atgcgtattttatctctttttttggtggtgttcgctttaacaggctgctccgggacaacgattggcggtaatgaagataaattaacgccagcctatctgaaacaacatctcattgtcggaaaaaccaccaaggccgaggttcgtcagtattttggtgccccggattctggtcatacgacggtgacggcgtcgggtaaagagagctggtattattcagtagataaagggatcaacctggtcagcctcgcgggttccatgatcccggtaaccggggcatcgcaagctgccgatgcggtcgataagtccagccaaaaagattcgaactcgctgatgattttcttcgatgaaaaaggcgtggtggaaaactgggtgcgttaa

SEQ ID NO: 210184 - DNA, 1281 bp, Klebsiella pneumoniae
atgaaactgtataacttaaaagatcataacgagcaggtcagctttgcgcaggccgtcacccagggacttggcaagcatcagggcctgttctttccgcacgatctgccggaattcagcctgactgaaatcgacgacatgctggcgcaggactttgtcacccgtagcgccaaaattttatccgcctttatcggcgatgagatcccgcaggatgtcctgcagcagcgggtgcgcgcggcgtttgcgtttccggcgccggtaagcaaggttcaggaagatgtcggctgtctggagctgttccatggccctacgctggcgttcaaggatttcggcggccgctttatggcgcagatgctgacccacatcgcaggcgataagccggtcaccatcctcaccgcgacctctggcgacaccggggcggcggtggcgcatgctttctacggcctgccgaacgtcaaggtagtgatcctctatccgcgcggcaagatcagtccgctgcaggagaagctgttctgtaccctcggcggcaatattgaaaccgtggcgattgatggcgactttgatgcctgccaggcgctggtgaagcaggcgtttgacgatgaagagctgaaggcgacgctgggtctcaactcggctaactccatcaacatcagccgcctgctggcgcagatctgttactacttcgaagcggcggcgcagctgccgcaggaagcccgcaatcagctggtgatttccgtgccgagcggcaacttcggcgatctgaccgccggtctgctggccaagtcgctggggctgccgatcaagcgctttatcgccgccaccaacgccaacgacaccgttccgcgctatctgcagggcggcgagtgggcgccaaaagccacccaggcgacgctgtccaacgccatggacgtcagccagccgaacaactggccgcgcgttgaagagctgttccgccgtaaaatctggcgtctcagcgagctgggctatgccgcggtcgatgatgagaccaccaaagcagcgatgcgcgagctgaaggccatcggctacatctctgaaccgcatgcggcgattgcctggcgcgcgctgcgcgatcagctgcagccgggagagtacggcctgttcctcggcaccgcccatccggcgaagttcaaagagagcgtggaggagatcctgcaggagactctgccgctgccgaaggagctggccgaccgcgccgacctgccgctgctgtctcacaacctgccggcggatttcgccgcgctgcgtaagctgatgatgggctaa

SEQ ID NO: 210185 - DNA, 930 bp, Klebsiella pneumoniae; identical to SEQ ID NO: 138953

SEQ ID NO: 210186 - DNA, 2463 bp, Klebsiella pneumoniae
atgcgagtgttgaagttcggcggtacatcagtggcaaatgcggaacggtttctgcgggttgccgatattctggagagtaatgccaggcaggggcaggtagcgacggtcctgtctgccccggcgaagatcactaaccacctggtagcgatgattgaaaagaccattggcggccaggatgccctccccaatattgccgacgccgaacgcatttttgccgaacttcttcagggccttgccgacgcccagcccgctttcccgcttgcccagttaaaagccttcgtggagcaggaatttgctcagattaagcatgttctgcacggcatcagcctgctgggtcagtgcccggacagcgtcaatgccgcgctgatctgccgcggcgaaaagctctccatcgccatcatggcgggtctgctggaagcccgtggacataaagtcagtgtcattaacccggtcgaaaaactgctcgccgtgggtcactatctggaatccaccgtcgatatcgccgaatccacccgccgcattgccgccagccagatcccggcagaccatatgatcctgatggccgggtttaccgccggcaatgagaaaggcgagctggtggtgctgggacgtaacggctccgactactcggctgcggtactggccgcctgcctgcgcgctgactgctgcgaaatctggaccgatgtcgacggagtgtacacctgcgatccgcgtcaggtgccggatgcgcgcctgctgaaatcgatgtcttatcaggaggcgatggagctctcctactttggcgcgaaagtgctgcacccgcgcaccatcgcccctatcgcccagttccaaatcccatgcctgattaaaaataccggcaacccacaggcgccgggaacgcttatcggcgccagccgcgacgaggacgatttgccggtgaaaggcatctctaacctcaacaacatggcgatgttcaacgtctccgggccggggatgaaagggatggtcggcatggcggcccgcgtcttcgccaccatgtcccgcgccggcatctcggtggtgttgatcactcaatcttcttcggagtacagcatcagtttctgcgtgccgcagagcgactgcgcacgtgccaaacgggcgatggaagatgagttttatctggagctgaaagaggggctgctggagccgctggcgattatggagcgtctggcgatcatctccgtggtgggcgacggaatgcgtaccctgcgcggtatctcggcgaaattctttgcggcactggcccgcgccaatatcaatatcgtggcgattgcccagggctcttccgagcgctcaatttcggtagtggtcagcaatgacgacgccaccaccggcgtgcgcgtgacccatcagatgctgttcaacaccgaccaggtgattgaagtgtttgtcatcggcgtcggcggcgtcggcggcgcgctgctagagcagatcaagcgccagcaggggtggctgaagaacaaacatatcgatctgcgcgtctgcggtgtagccaattctcaggcgctgctgaccagcgtgcatggcctgaatctggaaaactggagtgcggaactggcggaggcgaaagagccgtttaatcttggccgcctgatccgcctggtgaaagagtaccacctgctcaatccggtgatcgtcgactgtacctccagccaggcggtcgccgatcagtatgccgacttcctgcgcgaaggtttccatgtggtgacgccgaacaaaaaggccaatacctcttcgctggattactatcaccagctgcgccatgcggccagcagctcgcggcgtaagttcctctatgacactaacgttggcgcgggcctgccggtgattgagaacctgcagaacctgctcaacgccggcgatgagctgcgccatttctccgggatcctgtccggctccctgtcgtttatcttcggcaagctggacgagggggtgagtttctccgcggcgacggcgatggcccgtgagatggggtataccgagccggatccgcgcgacgatttatccggggtggatgtggcgcgtaaactgctgattctggcccgcgagaccgggcgtgaactggagctggcggacattatcgtcgagtcggcgctgccgccggacttcgacgccagcggcgatgtcgagacctttatggcccgcctgccgtcgctggatgatggttttgcctcgcgggttgctaaggcgcgcgatgaaggtaaagtcttgcgctacgtcggtaacatcgaagaggatggtacctgccgggtaaaaatagccgcggttgacggcaacgatccgctgttcaaagttaagaatggtgagaacgcgctggctttttatagccattattatcagccattgccgctggtgctgcgcggctatggcgccgggaacgacgtcacggcggccggcgtattcgccgacctgctgcgcaccctgtcctggaagttaggagtttaa

SEQ ID NO: 210187 - DNA, 687 bp, Klebsiella pneumoniae
atgcgtttaacgattattttagtcggtcctgcccgggccgagaacgtcggcgctgccgccagggcgatgaaaaccatgggatttcgcgaactacggatcgtcgatagcgaagcccacctggcgccgccggcacgctgggtggcgcatggctcaggcgacatcctcgatggtatcaccacctatcccacccttgccgaggcgctgcatgacgttgattttaccgtcgccaccaccgcccgcagccgcgcgcgttttcactattacgccacgccgcagcagctgttgccgctgctggaggagaaggcgcagtggatgaaccatactgccctggtatttggtcgtgaggacgccggattgaccaatgaggagctggcgctggctgatgtgttgaccggtgtgccgatggctgcggattatccgtcgctgaatctcggccagtcggtgatggtctactgttatcaattagcatcgctaatgcaacaaacggcgcccgccgccgctgcggcagaccatcatcagctgcaggccttacgtactcgtaccctggcgttactttcgcgtttgggcgttgaggatgatgccaaactggccgactggttgtcgcaacggctgggcctgctgcagcagcgcgacacggcaatgttgcatcgtttgctgcatgatattgaaaaaaacctgccagaataa

SEQ ID NO: 210188 - DNA, 717 bp, Klebsiella pneumoniae
atgcagaccccgcacattcttatcgttgaagacgagttggtaacacgcaacacgttaaaaagtattttcgaagcagaaggttacgatgtattcgaagcgaccgatggcgcggaaatgcatcagatcctgtctgaaaatgatatcaacctggtgatcatggatatcaacctgccgggtaaaaatggtcttctgctggcgcgcgagctgcgcgagcaggcagacgtcgcgctgatgttcttaaccggccgcgacaacgaagtggataagatccttggcctcgaaatcggcgctgacgactatatcactaaaccgtttaacccgcgtgaactgactatccgcgcgcgcaacctgctctcccgtaccatgaacctcggtaccgtgagcgaagagcgtcgcagcgtggaaagctacaagttcaacggctgggaactcgatatcaacagccgttccctggttagcccgaacggcgaacagtacaagctgccgcgcagtgaattccgcgcgatgctgcacttctgcgaaaacccgggcaaaattcagtctcgtgccgaactgctgaagaaaatgaccggtcgcgagctgaagccgcatgaccgtaccgttgacgtgaccattcgtcggattcgtaaacacttcgaatccactccggataccccggaaatcatcgctaccattcacggtgaaggctaccgtttctgtggcgatctgcaggaataa

SEQ ID NO: 210189 - DNA, 1359 bp, Klebsiella pneumoniae
atgttgaaatcaccgttattctggaaaatcaccacgttaataggctgtattgtgctgctatctttgccgttaatgatggtcagggagcttattaatgagcgagcggattatcgtaacgaagtggtggacgccattgagcaaagcaccagcggctcgcaaaaactcgccggaccgctgatcgctattccgataaccgagaccctgacccgcatggagaaccaaaaagaggtcaactatcagcggagctgggtgtattactggctgccggagtcgctggcggtcgccggcaagcagaccgtggagtcgaggagggtgggtatctacagcggccaggtctggcataacgtcttgcagattaaggcctcgtttgatccgctgcgtctggcggcgctgagaaaaacgaatatcgtcttaggccagccgcggctggtggtgagcgtcggcgatgcccgcggcattggcgccatccatgccccggaggtcaacggtaacgtattaagcgtggagccggggctggggataagcggcgatggcgcaggtattcatatgccaatgcctgcgctggcggaggacaacaagccgcttgagattgccttttcactcgatctgaacgggacgggtgagttttcactggtgccgctcgggcgtaacagcgagctgcagctgaccagtaactggccgcatcccggttttctcggcagcttcctgccaacgcaacgggaagtgagtgctgccggctatcgcgcccactggcaaagcagctggttcgccaacgatatggggagctatttcaaggatgatatggagatcccgtggtcgcgactgccggcgttcagtgccgatgtgatgtcccttgccgaccagtaccagctaaccgatcgggcgacaaaatatgccatcctgttaatcgggctgacctttatggcttttttcgtgttcgagagcctgacccgtcgccccctgcatccgatgcaatatctgctggtgggcttatcgctggtgctgttttacctggtgctgctggcgctctcagagcacattggttttaccgccgcctggctggcggccagcctgtctggcgcggtgatgaatgggatctaccttcaggcggtgctcagaggatggcgtaacagcctgctgtttgtcgccgcgctactgctgctggatggcgtgatgtggtttctgttgcattctgaggatagcgcgctgctgctgggtaccggggtgctggcgctggcgctgagcgttctgatgtttttgacccgtcgcgtggactggtatgcgttatcgctgccgaaaggcacagtgcctccgacaccggctgccgatgacgataagctgcgtctctggaaagagtga

SEQ ID NO: 210190 - DNA, 1425 bp, Klebsiella pneumoniae
atgcgcatcggcatgcgcctgctgctgggctattttcttatcgtcgcgatcgccgcgtggtttgtgctgtcgatctttgtccaggaagtgaagccgggcgtgcgccgggcgacagaggggaccctcaatgataccgctaccctgttggcggcgctggcgcgtgaggatctgctggcggcaaacccgcagcagggcaggctggcgcaggcctttcaccagctcaaccagcagccgctcaacgccaatattggcggaattaaaaaggtacgtaatgagtaccgcgtctatctgaccgatgcccggggcaaggtggtgtttgactccagcgggcaggcgacagggcaggactattcgcgctggaacgatgtctggctcaccctgcgcggccagtacggcgcgcgcagtacgcgcagcgatccgcatgatgaagccagctcggtgatgtatatcgccgcgccggtgatggataaggggcggattatcggcgtgctgagcgtcggtaaacccaacctggcgatgacgccggtcattaagcgcagcgagcggcggatcctctgggccggcggcgccctgctgggcattgcgctgttgattggcggcggcgtcgtctggtggatcaatttctctatcggcaagctggtgcgctatgcggactcggtgaccgctgagcgcccgctgccgctgccggaggttggcagcagcgaattgcgcaagctggcccaggctctggagagcatgcgggtaaagctcgaaggtaagaatgccatcgaaaactatgtctatgacctgacccatgaactgaaaagcccgctggcggccatccgcggcgcggcggagatcctgcgcgaagggccgccgcctgaggtagcggcgcggtttactgataatatcctcgcgcaaaacacccggatgcaactgctggtggagcggctgctccagcaggcgagactggaaagccggctggagataaagcagcatccggtgtcgatagatgcgctataccaacggctgacggaggagcgcaacatcgctctggcggcgaaagctatcaccctgcgctggcgggagagtgggatgctggtcaatggcgatggcgagctgctggcccaggcgctgggtaatctgctcgacaacgcgattgactttaccccccagggcggtgagatcgccctggctgcggagaagcgaaatgaagaggtgcaattgagcgttatcgacaacgggtgcggtattccggactatgccctggaacgaatctttgagcgattctattcgctgccgcgcgaagacggccataagagcagcggccttgggctggcgttcgttcgtgaagtcgcgcgcctgcatcacggcgatatcaatctgcacaatcggcccgaaggcggcgtggtcgccacgctgcgacttcaccgtcccttcacatag

SEQ ID NO: 210191 - DNA, 690 bp, Klebsiella pneumoniae
atgcagcagccacggatttggttagttgaggatgaacagagtatcgctgataccctggtttacatgctgcagcaggagggcttccaggtcagcgtctttggccgcggtttgcccgcgctggaggcggcggcgcatcaggcgccagatgtcgccatcctcgacgtcggcttgccggatatcagcggcttcgagctctgtcggcgtctgctgacgcgttatccggcgctgccggtgctgtttttgacggcgcgtagcgacgaggtcgataagctgctggggctggaaatcggcgctgacgattatatcgccaagccgttttcaccacgcgaagtctgcgcgcgggtgcgaaccgtgctgcggcggctgcagaagtttgccgcgccatcgccggtggtacgcgtcggcgagtttgtgctcgatgagcaggcggcggcgatcagctggttcggccagccgctgaatctgacgcgctacgaatttctgctgttgaaaaccctgcttcacgcgcccggtcgcgtcttctcccgtcagcagctgatggagctggtgtggatcgatgcctgggaaagcctcgaccgtaccgtcgatacccatatcaaaaccctgcgcgctaagctgcgggctgtgaatcctgaaaaggcgccaatcaatacccatcgcggtatgggctacagcctggggcgcggctga

SEQ ID NO: 210192 - DNA, 474 bp, Klebsiella pneumoniae
atgaaatacaagaagtttgcgatggggctgctcctgctggccggtagccagctggctcaggcggagcagattggttccgtggatacggtcttcaaatggttagggccggatcacaaaatcgtcgtcgaagcctttgacgatccggatgtacagaacgtgacctgctatatcagccgggcgaaaaccggtggcatcaaaggcgggctggggctggcggaagatacctctgacgcggcgatttcctgccagcaggtcgggccgattgagctaacggacaaaatcaaaaacggtaaaagccagggcgacgtggtgttccagaagcgcacctcgctggtgtttaaaaaactgcaggtcgtgcgtttctatgatgcgaagcgcaatgcgctggtctatctgacctactcggataaagtggttgatggctcgccgaagaacgccatcagcgccgtgccgatcatgccatggaataaataa

SEQ ID NO: 210193 - DNA, 870 bp, Klebsiella pneumoniae; identical to SEQ ID NO: 138329

SEQ ID NO: 210194 - DNA, 648 bp, Klebsiella pneumoniae
atgttacaagtataccttgttcgccacggtgaaacgcagtggaacgccgagcgacgtattcagggtcagtccgacagcccgctgaccgcccatggtgagcgccaggcctggcaggtgggcgagcgcgccagaacgctggggatcacccatatcattaccagcgatctggggcgaacccgccgcacagcagaaattatcgccgaagcctgcggctgcagcgtgatcgccgatgcgcgcctgcgcgaactggatatgggggtgctggagaagcgccatatcgactcgctcagcgaagaagaagaaggctggcgtcgccagctggtcaacggcacaccggacggtcgtattccgcagggcgaatcgatgcaggagctcagcgagcgtatgcatgcggcgctggcatcctgtctggaattacccgccggtagccggccgctgctggtgagtcatgggatcgcgctgggctgcctggtgagcacgatattagggctgccggcgtacgctgagcgtcgtctgcggctgcgcaactgctctatttcgcgcgtcgactatcagcaaagcccgtggctggcttccggctgggtggtggaaacggcgggcgacgtctcgcatcttgacgcccccgcaatggacgagctgcagcgttaa

SEQ ID NO: 210195 - DNA, 516 bp, Klebsiella pneumoniae
atgcaccatgttgtctcagcgaccactaatcccgccaaaattcaggcaattctgcaggcttttgacgagattttcggcgaaggatcctgccacattgagtccgtcgccgtcgagagcggcgtgccggaacagcccttcggcagcgaggaaacgcgcgctggcgcacgaaatcgcgtcgccaatgcgcgccttgcccagccaaatgccgatttctgggtagccatcgaagccggtatcgacgatgacagcacctttagctgggtggtcatcgaaagcgccagccagcgcggagaagcgcgctcagccacgctgccgttgcctgacgttattcttgagcaggttcgcgctggcgaagccctcggcccggtcatgtcgcagtataccggcatcgatcagatcggtcgtaaagagggggcgattggggttttcaccggcggcagattaacccgcagcagcgtttaccaccaggcggtcgtgctggcgctaagcccgttccataacgctatttatcgctag

SEQ ID NO: 210196 - DNA, 330 bp, Klebsiella pneumoniae; identical to SEQ ID NO: 138326

SEQ ID NO: 210197 - DNA, 1938 bp, Klebsiella pneumoniae
gtggaaaaagccaaaaaaatgacgtggcatcttttggctgccagcgttggtttgttgacgttgagtcagctggcgcatgcggattcactggatgaacagcgcagccgctacgcacaaattaagcaggcgtgggataaccggcagatggatgtagtcgaccagctgatgcccacgttaagcacctatcccctgtatccctatttgcagtaccgacagatcaccgacgatctgatgaaccagccggcgctggtggtgaaaaactttattgacgccaatccgacgctgccccctgcgcgttcattacgttcgcgcttcgtgaatgaactggcccggcgcagcgactggcgcggcttgctggcgtttagcccggataagccgaccagcaccgaggcgcagtgcaactattactacgccaagctgagcgtgggacagtcgcaggaggcctggagcggggcgaaagagctgtggctgacgggcaagaatcagcccggcgcctgtgaaccgctgttcagcgcctggcgcgactccggtcagcaggatccgctggcatatctcgaacggatccgcctggcgatgaaggccggcaatatcgggctggtgaaatcgctggcccagcaaatgcccgccaactaccagagcatcgccagcgccgtggtcgccctggctaacgatccaaacagcgtcctcaccttcgcccgcaccaccggggcgacggactttacccgtcagatggccgccgtcgccttcgccagcgtcgcccgccaggacgtggaaaatgcccgcctgatgatcccttcgctggtacaggctcagcagctcaatgaggatcagacccaggaactgcgcgatattgtcgcctggcgcctgatgggtagcgatgtaaccgaagagcaggccatctggcgcgatgacgcaatcatgcgttcgcagtccacgccgctggtggagcggcgggtacggatggcgttggggacgggcgatcgccatggcctcaacacctggctggcgcgcctgccgatggaggcgaaagagaaagacgaatggcgctactggcaggcggatctgctgctggagcgcggcagggatgaggaggcgcaggcgatccttcgctcgttgatgcaacagcgaggcttctacccgatggtcgccgcgcagcgtcttggcgaggagtataccttccgcatcgataaagcctcgggcaccatcgatccggcgctggcctccgggccggagatggcgcgggtacgtgagctgatgtactggaatatggataacaccgcgcgcaccgaatgggccaacctggtcactagtcgcaccaaatcccagcaggcgcagctggcgcgctatgccttcgatcagcactggtgggatctgagcgtgcaggcgacgatcgccggtaagctgtgggatcagctggaagaacgtttcccgctggcctataacgacctgtttgcccgctatgttagcggcaaagatattccgcagagctacgcgatggcgattgcccgtcaggagagcgcctggaacccgaaagtgcgctcgccggtcggcgccagcggactgatgcagattatgccgggcaccgcgacgcataccgtcagtatgttcagcattcccggctacagcggcccgtcgcagctgttggatccggaaaccaacatcaacatcggcaccagctatctgcagtacgtttatcagcagttcggcaataaccgtatctacgcctcagcggcctataacgccgggccgggccgggtacgcagctggcaggggaacagcgccggacggatcgacgccgtggcgtttgtcgagagtattccgttttcggaaacccgcggctacgtgaagaatgtcctctcctatgacgcctactaccgctactttatggggcagcaggataagatcctcagcgatgcggagtggcgccagcgttactga

SEQ ID NO: 210198 - DNA, 1668 bp, Klebsiella pneumoniae
gtggctcaattcgtttataccatgcatcgtgtcggcaaagtggttccgccgaaacgtcatattttgaaaaatatctccctcagctttttccctggcgcgaaaatcggtgtgctcggtctgaacggcgccggtaaatctaccctgctgcgcatcatggccggtatcgacaccgagatcgaaggtgaagcgcgtccgcagcccggcatcaaaatcggctacctgccgcaggagccgcagctcaacccggagcacaccgtgcgcgagtccgtggaagaagcggtcgccgaagtggttaacgcgctgaaggggctggacgaagtctatgccaaatacgccgagccggatgcggacttcgataagcttgccgcacagcaaggcaagttcgaagagattatccaggcgcacgacggccacaacctgaacgtccagctggagcgcgcggccgacgccctgcgcctgccggactgggatgcgaaaatcgctaatctttccggtggtgaacgccgccgcgtcgcgctgtgccgtctgctgctggaaaaaccggatatgctgctgctcgacgaaccgaccaaccacctcgacgccgagtccgtcgcctggctggaacgcttcctgcacgacttcgaaggcaccgtggtggcgattacccacgaccgttacttccttgataacgtcgccggctggatcctcgagcttgaccgcggcgaaggtattccgtgggaaggcaactactcctcctggctggagcagaaagaccagcgtctggcgcaggaagcttctcaggaagccgcacgccgcaaatctatcgagaaagaactcgagtgggttcgccagggcgcgaaaggccgtcagtctaagggcaaagcccgcctggcgcgctttgaagagcttaacaacgttgaatatcagaaacgtaacgagactaacgaactgttcattccgccaggcccgcgtctgggcgataaagttctggaagtcagccatctgcgcaaatcttacggcgaccgcgttctgattgacgatctgagcttctcggtaccgaaaggcgctatcgtcggcatcatcggtccgaacggcgcgggtaaatccaccctcttccgcatgatgtccggccaggaacagcctgattccggcaccatcaccctgggtgaaaccgttaagctggcttccgtcgatcagttccgcgacgcgatggacaacagtaagaccgtgtgggaagaagtgtctggcggcctggatatcatgaagatcggcaacaccgagatgccgagccgcgcctacgtgggccgctttaacttcaaaggcgtcgaccagggtaaacgcgttggcgagctgtccggcggtgaacgtggtcgtctgcacctggcgaaactgctgcaggtcggcggtaacgtcctgctgctcgatgaaccaaccaacgacctggatatcgaaaccctgcgcgcgctggaaaacgccctgctggagttcccgggctgcgcgatggttatctcgcacgaccgctggttccttgaccgtattgccacccacattctggattaccaggatgaaggtaaggttgagttcttcgaaggtaactttaccgagtacgaagagtacaagaaacgcactctcggcgccgacgcgctggagccgaagcgaatcaagtacaaacgtatcgcgaaataa

SEQ ID NO: 210199 - DNA, 1233 bp, Klebsiella pneumoniae
atgtcgtcatttgactatttaaaaagcgccattaagcagaaaggctgtaccctgcagcaggtggcggaagccagcggaatgaccaaggggtatcttagccagctgctgaatgccaaaatcaaaagcccgagcgcgcagaagcttgaagcgctgcatcgtttcctcgggctggagtttccccgccgacagaaaagcgtcggcgtggtgtttggtaagttttacccgctgcataccgggcatatctacctgatacagcgcgcctgtagccaggtcgatgagctgcatatcattatgggctatgacgatacccgcgaccgcgagctgtttgaagagagcgccatgtcgcaacagccgacggtgcctgaccgcctgcgctggctgctgcaaacctttaaatatcagaagaatattcgcatccacgccttcaatgaagaggggatggagccctatccgcacggctgggacgtctggagccatgggatccgcgcttttatgagcgaaaaagggatcgagccgaaccggatctatacctcggaagaggccgatgcgccgcagtaccttgagcatctggggatcgagacggtgcttatcgatcctaagcggacctttatgaatattagcggcgggcagatccgcgagaacccgttccgctactgggaatatattccgacggaagtgaaaccgttctttgtgcggacggtggcgatcctcggcggcgagtcgagcggtaaatcgacgctggtcaataaactcgccaatatcttcaataccaccagcgcctgggaatatggccgggattatgttttttcgcatctcggcggcgatgagatggcgctccagtattcggattacgataaaattgcccttgggcatgcgcagtatattgattttgcggtgaaatatgccaacaaggtggcgttcatcgataccgacttcgtcagcactcaggccttctgtctgaagtacgagggacgtgagcacccgtttgtgcaggcgctgattgatgaataccgcttcgacctggtgatcctgctggagaacaataccccgtgggtggccgatggactgcgcagtcttggaagctcggtggatcgtaaagagtttcagtcgttgctggtatcgctgctgaaagagaacgagatcgaattcgtccatgtgaaggagtcggactacgatgcccggttcctgcgctgcgtcgagctggtgaaacagctgatgggcgagcaggggtag

SEQ ID NO: 210200 - DNA, 1383 bp, Klebsiella pneumoniae
gtggcgaaagctccaaaacgcgcatttgtctgtaatgaatgtggtgcggattatccgcgctggcaggggcagtgcagcgcctgccatgcctggaacaccatcaccgagatgcgcatcgccgcgtcgccgcaggtggcgagaaacgagcgtctttcaggctatgccggtaacgccggcgtgtcgaaggtgcagaagctgtcagatatcagcctggaggcgctgccgcgtttctccaccggctttaaagaattcgaccgcgtgctgggcggcggcgtagtgccgggcagcgcgatcctgattggcggcaaccccggcgcgggcaaatcgacgctgctgctgcaaaccctctgcaaactggcggaagggatgaaaaccctgtacgtcaccggggaggagtccctgcagcaggtggcgatgcgcgcccatcgtctcgggttgccaacggccaacctgaacatgctctcggaaaccagcattgagcagatctgtcagatcgccgatgaagaaaagccgcagctgatggtgatcgactccatccaggtgatgcatatggccgacgtgcagtcgtcgccgggcagcgtcgcccaggtacgggaaaccgcggcctatttgacgcgctttgctaaaactcgcggcgtggcgattgtgatggtcggccacgtcaccaaagacggctcgctggccggtccgaaggtgctggagcactgtatcgactgctcggtgctgctggacggggatgccgactcccgcttccgcacgttgcgcagccataaaaaccgctttggcgcggtgaacgagctgggcgtcttcgccatgaccgagcagggcctgcgcgaagtgagcaacccgtccgctatcttcctcagccggggagatgaaatcacctccggtagctcggtgatggtggtctgggaagggacccgcccgctgctggtggagatccaggcgctggtcgatcactcgatgatgtccaacccgcgccgcgttgcggtggggctggaacagaaccgtctggcgatcctgctggcggtgctgcaccgtcacggcggcctacagatggccgatcaggacgtcttcgtcaatgtggtcggcggggtgaaggtcacggaaaccagcgccgacctggcgctgctgctggcgatggtctccagcctgcgcgaccgtcctctgccgcaggatctggtggtctttggcgaagtggggctggccggggaaattcgcccggtaccgagcggtcaggagcgtatctccgaagcggcgaagcacggctttcgccgcgccatcgtcccggcggccaatgtgccgaaaaaagtgccggaaggcatgcaaatctttggcgtgaaaaagctttcagacgcgctaagcgtttttgacgacttataa

SEQ ID NO: 210201 - DNA, 972 bp, Klebsiella pneumoniae
atgcctaacagtttgacctggtgcgacctgcctgaagacgtttccctgtggcctgggttgccgctttccctgagcggcgacgaggtcatgccgctggattatcacgccgggcgcagcggctggctgctgtatggtcgcggtctggataaacgtcggctgacggcgtggcagcgtgagctgggcgccgcgttagtgatcgttgcctcctgggtggtcgaggattaccaggtgatccgtctggccggttcgctgactccccgtacgacgcgactggcgcatgaggcggggctggacgtcgcgccattgggtaaaattccccatttgcgcaccccgggcctgctggtgatggacatggactccacggcgattcagatcgaatgcatcgatgagattgcgaaactggccggcaccggcgagctggtctcggaagtgaccgagcgggcgatgcgtggcgagctggacttcaccgccagcctgcgccagcgcgtggcgacgctgaaagacgccgatgccagtattttgctgcaggttcgcgacgcgctgccgctgatgccgggcctggcgcagctggtgctcaagctggaaacgctgggttggaaagtggcgatcgcctccggcggtttcaccttctttgccgagtatctgcgcgacaaactgcatctcgacgcggtattcgccaatgagctggagatccgcgacggcaagctcaccggcaacgtgctcggcgatatcgtcgatgcgaaatataaagccaatacgttgcgcaagctggcggaaaagtatgagatcccaacggcgcaaaccgtggctatcggcgatggcgccaacgacctgccgatgattaaggcagcagggcttggcatcgcctatcacgcgaagcccaaagtgaatgaacaggcggaagtgactatccgccacgctgacctgatgggggtattctgtattctctcgggcagcatgaaccaaaagtaa

SEQ ID NO: 210202 - DNA, 648 bp, Klebsiella pneumoniae
atggttcgcgcaaaactgaaattccggctgcatcgtgcggtcattgttcttatctgtctcgccctactcgtcgcgctgatgcagggcgcttcgtggttcagtcagaacagtcagaaacaacgcaatccgcagctggaagagctggcccgcacgctggcgcagcaggtggtgctgaatctcgcgccgctgatgcgcagcgagacgcctgacgagaagcgcatcaatcagctgttgacccagctaacccataacagccgcgtcctggacgccggcgtatatgacgaacagggcgacctggtggcgcgctctggcgaaagcgtcgaggttcgcgaccggctggcgctggatggtaaaaaagccggcggctacttcaaccagcagattgtcgaaccggtgccaggaaaaaacggcccgctgggctacctgcgtctgaccctcgatactcataccctggcgaccgaggcgaagcaggtggataataccaccaatatcttacgcctgatgctgttactgtccctggctatcggcgtggtgctgacccgcacgctgctgcagggcaaacgcacccgctggcagcaatcgcccttcctgctcaccgccaacaagccggttgaggatgaagacgatgaaaagaaaggaaatctataa

SEQ ID NO: 210203 - DNA, 1017 bp, Klebsiella pneumoniae
atgtccacattgcgcctcctgctctctgactcttacgacccgtggttcaacctggcggtcgaggagtgcattttccgccagatgcccgccacccagcgggtgctgttcctgtggcgcaatgccgataccgtggtcatcggccgcgcgcagaacccgtggaaggagtgtaatacccgccgcatggaggaagaccatgtgcggctggcccgtcgcagcagcggcggcggcgcggtgttccacgacctcggcaatacctgctttacctttatggcaggcaaaccggagtacgacaaaaccgtctccaccgctattgtgctggcggcgcttaattcactcggcgtaaccgccgaagcctccgggcgcaacgatctggtggtcaaaaccgacagcggcgaccgcaaagtctccggctccgcctatcgtgaaaccatggaccgcggttttcatcacggtaccctgctactcaacgccgatttaagccgtctcgccaactacctcaacccggaccagaaaaagctgcaggctaaaggcattacctcggtgcgcggacgggtggcgaacctggttgagctgctgccgggcattacccatcagcaagtttgcgaggcgatccaggaagcattcttcagccattacggcgaacgggtggacgccgaggtgatctccccggacaacacgccggatctaccaaattttgctgagaccttcgcccgtcagagcagctgggagtggaacttcggccaggcgccggccttctctcatcttctggacgagcgctttcgctggggcggcgttgagctgcattttgacgtcgaaaaagggcatatcacccgcgcgcaggcctttaccgatagcctgaacccggcgccgctggaggccctggcggcacgcttagtcggctgtcagtatcgggcagaagtattacagcagcagtgcgaggcgctggtcggcgatttcccggagcaggaagcggaactgaaagaactgtcggcgtggattgccggcgcagtgcgctga

SEQ ID NO: 210204 - DNA, 720 bp, Klebsiella pneumoniae
atggcaactcctcacattaacgcagaaatgggcgatttcgctgacgtcgttttgatgccgggcgacccgctgcgcgcgaagcacattgcagaaaccttcctcgaagacgtgcgtgaagtgaacaacgtgcgcggcatgctgggcttcaccggtacctataaaggccgcaaaatctccgtgatgggccacgggatgggtatcccgtcctgctctatctacaccaaagagctgatcaccgatttcggcgtgaagaaaatcatccgcgtgggctcctgcggcgcggtgcgtgaagatgtcaaactgcgtgacgtggtgatcggcatgggcgcgtgcaccgactctaaagtgaaccgtctgcgtttcaaagaccatgattttgcggcgattgccgatttcggcatggtgcgtaatgcggtagacgcggcgaaagcgctgggcgttgacgcgcgcgtcggcaacatcttctccgcagacctgttctatacgccggacccgtccatgttcgacgtgatggaaaaatacggcattctgggcgtggaaatggaagcggcgggtatctacggcgtggcggcggagttcggcgcgaaagcgctgaccatctgcaccgtctccgaccacatccgtacccacgagcagaccactgccgctgaacgtcagacgaccttcaacgacatgatcaaaatcgcgctggaatccgtgctgctgggcgataaagagtaa

SEQ ID NO: 210205 - DNA, 1224 bp, Klebsiella pneumoniae
atgaaacgtgcatttatcatggtgctggactcctttgggattggcgcaacggaagacgcagaccgctttggcgacgtcggcgccgatacgctgggccacattgcagaagcctgcgccaaaggcgaggctgaccacggccgcaaaggcccgctgaatttaccgaacctgacccgtctgggtctggtgaaagcgcatgaaggctccaccggtaaaaatgccgcgggtatggatggcaatgccgaagtgattggcgcctatgcctgggcgcatgaactttcttccggtaaagataccccgtccggccactgggaaatcgccggcgtgccggtgctgtttgactggggctacttcagcgaccaggaaaacagtttcccgcaggagctgctggataagctggtgaaacgcgccaacctgccgggctatctcggcaactgccactcctccgggacggtgatcctcgatcagctcggcgaagagcatatgaaaaccgggaaaccgatcttctatacctccgctgactcggtgttccagatcgcctgtcacgaagagacctttggcctcgacaagctgtatgagctgtgcgaaatcgcgcgtgaagaactgaccgaaggcggctataacattggtcgcgtgattgctcgtcctttcgtgggcgacaaagccggtaacttccagcgtaccggtaaccgtcacgacctggcggtagagccgccggcgccgaccgtgctgcagaagctggtcgacgagaaaaacggccacgtggtgtccgtgggtaaaatcgccgatatctacgccaactgcggtatcactaagaaagtgaaagccaccgggctggacgcgctgttcgacgcgaccatcaaagagatgaaggaagcgggcgacgagactatcgtcttcactaacttcgtcgattttgactcctcctggggccaccgtcgtgacgtcgctggctacgcggcgggtctggagctgttcgaccgccgtctgccggagctgatggagctggttggtgaagacgacattctgatcctcaccgccgaccacggctgcgacccgacctggactggtactgaccacacccgcgagcatatcccggtgctggtgtacggcccgaaagtgaaaccaggttcgctcggtcaccgtgaaaccttcgcggacatcggccagactattgcgaaatactttggtacgtctgacatggaatatggcaaagccatgttctga

SEQ ID NO: 210206 - DNA, 1323 bp, Klebsiella pneumoniae
gtgtttctcgcacaagaaattattcgtaaaaaacgtgatggtcaggcattaagcgatgaagagatccgctttttcatcaacggcatccgcgacaatactatctctgaagggcagatcgccgcgctggcgatgaccatcttcttccacgatatgtctatgccggagcgcgtttcgctgaccatggcgatgcgggattccggtaccgttctggactggaaaagcctcaaccttaacggtccgatcgtcgataaacactctaccggcggcgtcggggatgtcacttcgctgatgctggggccgatggtggccgcctgcggtggttacgtaccgatgatctccggccgcggcctcggccataccggcggtacgctggacaaactggaagcgatcccgggcttcgatatcttcccggacgacaaccgcttccgcgagattattaaagatgttggcgtggcaattatcgggcagaccagctcccttgccccggccgacaaacgtttctatgccacccgcgatattaccgcgacggtggactccatcccgctgattaccgcctcgattctggcgaagaagctggcggaagggctggatgcgctggtgatggacgtcaaagtcggcagcggcgcgtttatgccgacttatgaactctctgccgcgctggccgaagcgatcgtgggtgtcgccaacggcgccggcgtgcgcaccaccgcgctgctgaccgatatgaatcaggtactggcctccagcgccggcaacgccgttgaagttcgcgaagcggtgcagttcctgaccggcgaataccgcaacccgcgcctgttcgacgtgacaatggcgctgtgtgtggaaatgctgatctccggcaagctggcggcggacgatgccgaggcgcgcgcgaagctgcaggcggtgctggataacggtaaagcggcggaagtgtttggccgcatggtcgcggcgcagaaagggccgagcgactttgtcgagaattatgctaattatctgccgacggcgatgctgagcaaagcagtctatgctgataccgaaggttttatcagcgcgatggatactcgcgcgctgggcatggcagtggtttctatgggcggcggccgccgtcaggcatcggacaccattgactatagcgttggctttaccgagatggcgcgtctgggtgaccgcgtcgacggacagcgtccgctggcggtgatccatgccaaagacgagaacagctggcaggaggccgcgaaagcggtcaaagcggccattaaactggacgataaagccccggaaattacaccgacagtctatcgccgtatcactgaatag

SEQ ID NO: 210207 - DNA, 780 bp, Klebsiella pneumoniae
atgactgatttaaaagcaagcagcctgcgcgcgttaaaactgatggacctgaccactctgaatgacgacgacaccaatgagaaagtcattgccctgtgtcatcaggcgaaaacgccggtgggtaacaccgcggcggtctgcatctacccgcgcttcatcccgatcgcccgtaaaacgctgaatgagcaggggacgccggatattcgcatcgccacggtcaccaacttcccgcacgggaatgacgatatcgacattgcgctggcggaaacccgcgcggcgatcgcttacggagcagatgaagtggacgtggtcttcccgtaccgcgcgctgatcgccggcaacgagcaggtcggtttcgagctggtgaaagcctgtaaggaagcctgtgcggcggctaacgtgctgctgaaagtgatcatcgaaaccggtgagctgaaagaagaagcgctgatccgtaaagcgtctgaaatctctatcaaagccggggccgatttcatcaaaacctcgaccggtaaagtgccggtgaatgccacgccggaaagcgcgcgcatcatgatggaagtgatccgcgatatgggcgttgagaaaaccgttggcttcaaaccggcgggcggcgtgcgcagcgcggaagacgcgcagcagttcctggcgatcgctgatgaactgttcggcgccgactgggccgattctcgtcactatcgttttggcgcatccagcctgctggctagcctgttgaaagccctgggtcacggcgacggcaagagcgccagcagctactaa

SEQ ID NO: 210208 - DNA, 1278 bp, Klebsiella pneumoniae
atgcaaatcctcatgggacttatcggcatggtggcgctattggccattgctgtgctgctctccaataaccgaaaagccattaacctgcgcaccgtgctcggcgcctggataatccaggtgggtatcggcgcattgatattatatgtaccggccgggcgctcggcgctgctagcgatgtcgaatggcgtcgccagcgtaatcgcctatggtaacgaagggatcagctttatcttcggtgggctggtctccgataaaatgttcgaggtgtttggcggcggcggcttcgtctttgccctgcgcgtgctgccggtgatcgtcttcttctcgtcgctgattgccgtgctttactacctgggcattatgcaactggtcattcgcattctcggcggcgcgctgcgggcagtgctgaagacctcacgtaccgaatcgctatcggctacagcgaacatcttcgttggtcagaccgaagcgccgctggtggtgcgtccttatatcgccaccatgacccgctcggagctgtttgcggtcatgtgcggcggcctggcctcggtggcgggctcggtactggcgggctacgcgcagatgggcgttccgctggagtaccttattgccgcgtcgtttatggcggcgccgggaggcctgctgtttgccaaaattatcgtaccggaaacggaaaaaccggacgataacccggctcatgacagccaaagcgctgacgcggataaaccggccaacgtgctggatgccgccgcctccggcgccgcgtctggtatgcaactggcgctcaacgtcggcgcgatgctgctggcgtttattgcgctgatcgccctgctgaacggcatactctccggcgtcggcggctggtttaaccatcctgagctgtcgctgcagatgatcctcggctggatcttctcaccgctggcgtgggtgattggcgtgccgtggcacgaagcgacggtggcggggtcgtttatcggccagaagctgatcattaacgagttcgtggcctacatgaactttggcgaatatttaaaggcagatgccgaagtggcggcggccgggctgcaggtcatttcagatcacaccaaagccattatctctttcgcgctgtgcggctttgccaacctgtcatcgatcgccattctgattggcggactcgggggaatggcgcccaaccggcggcaggatatcgctcagcttgggctacgtgcggtagcggcggggacgctgtccaacctgatgagcgccaccatcgctggggtttttctcgccctgtaa

SEQ ID NO: 210209 - DNA, 795 bp, Klebsiella pneumoniae
gtgacgcaccgttttatcgatacccactgtcactttgattttccccccttcgcggcagatgaggtcgccagcctggcgcgtgcggcgcaggccggcgtcgggcgaattatcgttccagccatctctgctgagcgttttagccgcgtgctggcgctggcagctcagcacgaagcgctgtacgccgcgctgggtatgcatccgatcgtcatcgaagagcatactgatgagggactggcgcagctggaagccttgatggcgcagcggccgcctaaactggtggcggtgggagagattggcctcgatctttatcgcgacgatccgcagtttgatcgtcagcaggcgctgctggaagcgcagctgaggctggcgaagcgttacgatctgccggtgatcctccactccagacgcacccacgataagctggcgatgctgctgaaaaaacatgccctgccgcgtaccggagtcatccatggctttgccggcagcctgcagcaggccgagcgcttcgttcagcttggctataagatcggcgttggcggcaccattacctatccccgcgccagtaaaacccgtgaagtgatggcgcgtctgccgctttccgctctgctgctggagaccgatgcgccggatatgccgctaaatggctttcagggacagcccaatcgaccggaacaagctgcacgggtatttgaggcgctgtgtgaactgcgtccggagtcgccggcagccatagaagaagggatcatgcacaatacgctcgccttgttttcccttcccccggcctctgtatggtga

SEQ ID NO: 210210 - DNA, 1074 bp, Klebsiella pneumoniae; identical to SEQ ID NO: 134529

SEQ ID NO: 210211 - DNA, 162 bp, Klebsiella pneumoniae
atgtttcgatggggaattatttttctggtcattgcattaattgctgcggctctgggctttggtggtctggcgggtacggccgctggcgcagcgaaaatcgtctttgtcgtcgggattatcttgttcctggtgagcctgtttacaggacgcagacgtccttag

SEQ ID NO: 210212 - DNA, 621 bp, Klebsiella pneumoniae
atgaccagactaaagaatgccaatatgttgctggcgctcttcttaggcttagccgcgttgaacgcctcggcagagacggaaaaaacaacggtagacagtgcgaagtcggctgccagcaatgcgggagaggcggtagataattcgattaacaaagtcggcgattttatggacgacagtaccattaccgcacgggtaaaagcggcgctgatcgaccataaagatattaactccggcgatatttcggtgaaaacggagaataaagtggtcaccctcagcggcgacgtcaccagtgctgaacagaaaagtcaggcactgagcgtagcgaaagaggtcaaaggcgtctcacacgttaacgacaagctgacggtccatcataaatcatcgagcgagacggcgacgctgaaaggctatgccggggataccgccattaccagcgaagtgaaagccaagctgctggcggatgacattgtcccttcgcgcaatgtgaaagtcgaaaccaacgccggcgcggtacatctgaccggtacggtggcttccgcggcgcaggcggagcgtgccgcagagattgcgaaagcggtctccggtgtgaaaagcgtgcgcaacgatcttagcgttaagtaa

SEQ ID NO: 210213 - DNA, 1590 bp, Klebsiella pneumoniae
atgacgttgtctccttatctgcaagaggtggccaaacgccgcacttttgccattatttctcacccggatgccggtaagaccaccatcaccgaaaaggtgctgctgttcggacaggcgattcagaccgccggtacagtaaaaggtcgtggttccagccagcacgcgaaatccgactggatggagatggaaaagcagcgtggtatctcgatcaccacctcggtaatgcagttcccgtatcatgactgcctggtgaacctgctggataccccggggcacgaagacttctccgaagatacctaccgtaccctgacggcggtggactgctgcctgatggtgattgacgcggcaaaaggcgtcgaagatcggacccgtaagctgatggaagtcacccgtctgcgcgatacgccgatcctcacctttatgaacaaacttgaccgtgatatccgcgatccgatggagctgctggatgaagtcgagaacgagctgaaaatcggctgcgcgccgattacctggcctatcggctgcggcaagctgttcaaaggcgtttatcatctctacaaagacgaaacctacctgtatcagaccggtaaaggccacaccatccaggaagtgcgtatcgtgaaggggctcaacaacccggatctcgacgcggcggtgggggaagacctggcgcagcagctgcgtgacgagctggagctggtgcagggggcgtcgaatgagttcgacaaagatctgttcctggccggggaaatcaccccggtcttcttcggaaccgcgttaggtaacttcggcgttgaccatatgctggatggcctggtggagtgggccccggcgccgatgccgcgcaacaccgacacgcgtgaagtcaccgccacggaagagaaattcaccggcttcgtgtttaaaattcaggccaacatggatccgaaacaccgcgaccgcgtggctttcatgcgggtggtgtccggcaaatatgaaaagggcatgaagctgcgtcaggtgcgtatcggcaaggacgtagtgatttccgacgcgctgacctttatggcgggcgatcgctcgcacgttgaagaagcgtacccaggcgatatcatcggcctgcataaccacggcaccattcagattggcgatacctttacccagggcgagatgatgaagttcaccggtattccgaacttcgcgccggaactgttccgtcgtattcgcttgaaggatccgctgaagcagaaacagctgctgaaagggctggttcagctctctgaagagggcgcggtccaggtcttccgcccgatcgctaataacgatctgatcgttggcgccgtcggcgtgctgcagtttgacgtggtggtagcgcgtctgaaaagcgaatacaacgtggaagcgatttacgaatcggtcaacgtggccaccgcgcgctgggttgaatctactgacgtgaagaagttcgaagagttcaagcggaaaaatgaagttcagctggcgctggatggcggcgataacctgacctacatcgccccgacaatggtcaacctgaacctgacgcaggagcgttaccctgacgtggtgttccgcaaaacgcgcgagcactaa

SEQ ID NO: 210214 - DNA, 678 bp, Klebsiella pneumoniae
atgaaatgggactggattttctttgatgccgatgaaacgctgtttacgtttgattctttcagcggcttgcagcggatgtttctcgactacagcgtgacctttaccgccgaagattttcaggactatcaggccgtgaacaagccgctatgggtggattaccaaaacggcgccatcacctcgctacaattacagcatcagcgttttgatagctgggcgggacgtttgaatgtgccgcccggggaactcaacgacgcgtttatgaatgcgatggcggaaatctgtgccccgttgccgggcgcggtctcgctgctcaacgcgctgcagggcaaggtcagaatgggcatcatcaccaacggctttacctcgctgcagcagactcgtctggagcggacaggtttacgcgatcactttgatttgctgattatttctgaacaggtgggtgtcgccaagccggacgcgcgtattttcgattatgcgctggcgcaggcgggtaacccaccgcgctcgcgggtgctgatggtcggcgataccgccgagtcggatattcgcggcggcgtgaacgccggactggcgacctgctggctcaatgcgcatcagcgcgagctgccagcggacctcgagccggactggacggtgacctcgttaagcgaactggagcagctcctgtgtaaacactga

SEQ ID NO: 210215 - DNA, 447 bp, Klebsiella pneumoniae
atgaacacgatttctaccctcagcacggctgatttaaccaaagcctggcacatcgaaaaacgcgcccacgctttcccgtggagcgaacagactctggccagtaaccagggggagcgctatcgcaactatcagctgtcggtagatggcgaaatggcggctttcgccattacgcaagtggtactggatgaggcgacgctgttcaatatcgccgtcgatcccgcgtaccagcgccgcggcctggggcgagcgctgctggagcatgtcattgatgaagtcgaaaaactcggcgtcgtcacgctgtggctggaggtgcgagcatccaacgttgccgccatcgcgctgtatgagagcgtaggtttcaatgaggcaaccatccgccgcaactactatcctacggccgacggacgcgaagacgccattattatggctctgccaattagtatgtaa

SEQ ID NO: 210216 - DNA, 414 bp, Klebsiella pneumoniae
atgacatcccgacgagactggcaattacagcagctgggcattacccagtggtcgctgcgccgaccgggggcgttgcagggcgaaatcgctatctcgcttcctgaacatattcgtctggtgatggtggcggaaaccccgccgtcgctgacagagccgctgattggcgacatattacgcgcgctggccgtgacgccagatcaggtcctgcagctgactccggatcgggtggcgatgctgccgcaggacagccgctgcaacagctggcggttgggcacagaggcgtcgctgccgctggcgggcgcccaggtgtccacccccgcttttgatgaactccagaccagcgcgccggctcgcagggcgctctggcaacaaatctgcgcacatgaacacgatttctaccctcagcacggctga

SEQ ID NO: 210217 - DNA, 1029 bp, Klebsiella pneumoniae
atgtccgcttttaccccggcaagtgaagtcttgctgcgccacagtgatgatttcgagtccgcccgcgttctgtttgccggtgacctgcaggatgacctgcctgcgcgtctggataccgcggccagccgcgcccacacccaacagttccaccactggcaggtcctcaaccgccagatgggtgacaccgtccgttttagcttagtggctgaggccgctgacgtcgccgaatgcgacaccctgatctactactggccaaagaacaaaccagaggcgcagttccagctgatgaacctgctctctctgctgccggtgggaagcgacattttcgtcgtcggtgaaaaccgcagcggcgtccgcagcgcggagcagatgctggctgaatacgcgccattaaacaaagtggatagcgcccgccgctgtggcctctatcatggccgtctggaaaagcagccgaccttcgacgccgacgcattctggggcgaatacacactggataatctgacgattaaaaccctgccgggcgtcttcagccgcgacggtctggacgtcggcagccagctgctgctctccaccctcgagccgcataccaaagggaaagtgctcgacgtcggctgcggcgcgggcgtgctggccgccgcgctggccagccattcaccgaaagtgcgcctcaccctgtgcgacgtcagcgccccggcggtcgaagccagccgcgcgacgcttgccgccaacggcctggctggcgatgtgtttgccagcaacgtcttctccgaggtcaatggtcgcttcgacatgatcatctccaacccgccattccatgacggcctgcagaccagtctcgaagccgcccaggcgctgatccgcggcgcggttcgccatctgaacagcggcggcgagctgcgcattgtcgccaacgccttcctgccgtatccgcaggtgctggatgagacgttcggcttccatgaggtgatcgcccagaccgggcgctttaaggtctatcgcaccatcatgacccgtcaggcgaaaaaataa

SEQ ID NO: 210218 - DNA, 354 bp, Klebsiella pneumoniae; identical to SEQ ID NO: 134537

SEQ ID NO: 210219 - DNA, 1047 bp, Klebsiella pneumoniae
atgactgcacaaacctggcgagcacactacgcacaaaaatatcaatattccttacggctttttttactgcttaatttcatttcttcctcgctgtcgctggtcacccccctatttacggtagttcgttttacgctgccctgcgccctgatcgtcgtctgcagcgggctgctgctgctctggcactggaaatggccgcaatcgaaaataaatattcccactatctcgttgttatttggcatgctatgggcatggcacgtagtgacaaaagcgatgctattgacaccgccgcattttaactatctggtgatcgccctattaagcattctgtttatcggcaccatcgctttttccaataatatcactgcctttaccctccactctttaccaactttccttgcctgcctgataatggcggagggggaacaatggttgcgtatgacttactgctttatgctgcctatagccggtattaccctgcaaaatattatccagaagcgcagcgatgcctttacgcagggtttaatggataaactgatgcatgaacgcaatacgctcaacgatctcagtatgctcgatcccctgaccggtttgtataatcgccgcggactgcagaaccgcctcgataccctgctggcgctggacggcgacaaccactacgtgctgctcctcgatatcgatcacttcaaggcctataacgatcactatggtcatatgatgggtgaccaggcgcttattcgcgtctctgctgccattcgcaacgctgtacgctcacgcgatattgtcgcccgctttggtggagaggagtttatggtgctgctgaccaatagcagcgaagaaacggcctggaagacagccgaacgtatacgtcagcgggtctatgacctgaagatcccgcatatgtttaatgaaagcgtcgccaccaacgtcaccatcagtattggcctgacgccgctcattaatgacaacattgaacaagcgctggcgcgcgccgacggcgcactctatgaggccaaaaataaaggccgcaacattattcttgccagttga

SEQ ID NO: 210220 - DNA, 789 bp, Klebsiella pneumoniae
atggcctggcgttcccttcctctcagcgatgaacttatctggcgggctcctttgccgacggctgagcatgccctggcggagagtattcgggaaaaaatcgccaccctgcgcccacacctgcttgatttcctgcgacttgacgaacccgccccacggcacgcgttaacgcttgccgaatggtcgcaacccatcgccttgcgctccctgctggccacctggtccgatcatatctatcgtcatcagccgacgctgcctcgggaacagaagcctctgctctcgctctgggcgcaatggtatatcggtctgctggtgccgccgctgatgctggcgctgctcaatgaaccgcaaggcctcagcctggcgccagaacatttccatgtcgagtttcatgaaagcggccgggcggcctgcttctggattgatgtgcatagcgatgccgacatcgagaggctttcaccgcaggcgcgaatggatgccctggtaacgcgcaccctgcagccggttgttgaggcgctggcagcgacgggcgaaatcaatagcaaacttatctggagcaataccggctatctgattaactggtatcttggggaaatgcgcgcgctgctgggtgatgagcggcttgccgcgctacgtcagcactgtttttttgaaaaacaactcgccgatggccaggataacccgctgtggcgaacggtgatgctgcgtgaagggcagttagtccgacgcacctgctgtcagcgctatcgcctgccggatgtccaacagtgcggcgactgtacgcttaaataa

SEQ ID NO: 210221 - DNA, 1344 bp, Klebsiella pneumoniae
atgtctgctaaccatgctgcgtttaatttgatatttcgctttgtagaaaattacataagccccatagcagggcggatctcgtcgcagcgccacgtcatggctatccgtgacggatttatctcagcgatgccgtttatgatcgtcggatcgttcctgttagtgtttgcttatccaccgttctcaccggataccacctggggttttgcccgcgcctggctggatctggcgaaagagtttgaggggcgtattctgaccccctttgatatgacgatggggatcatgtcgatctacatctgcgcggcaatctcctataacctcggtaagcattacgagaaatccaatcagctcgatccctttatgtgcgcaatgctgtcgatcatggcctttttgctgattgccgcgccgaaaaccaatggcacgctgccggtggatagcctcggggggaccgggatctttaccgccattctggtggcgatctactgcgtggagatgatgcgtttcttgaaagcgcacaacattgggatccgcttgccggaccaggttccgccgatgatcaaaaactcgtttgatctgttgatcccggtgctggtggtcgtgctgacgctctatccgctgagcctgtttatccagcaccattttgacatgctgatcccgcaggccattatggccattttcaagccgctggtttcggcagccgactctctgccggcaattctgttggcggtgctgatcggccacctgctgtggtttgccgggatccacggtgcggcgatcgtgtccgggatgctgcagatgttctggctgactaacctcggtatgaaccagcaggcgctggcccaaggcgcgcctctgccgcatatctttatggaagcgttctggaccttctttatcgtggtcggaggttccggggcgaccatgggactggtgttctgttatctgcgcagccgttcagcgcatttgcgctccattggtcgtttgagcgtggtgccaagcctgttcaatatcaacgagccggtgatctttgggacgcctatcgtcatgaacccagtgttctttattccgttcctgctggcgccgatggtgaacgcggtgctggcctgggcggcaatgaagctggatctgattggccgcgtcatctccgtcgtaccatggacggcgccggcgccaattggcggcgcctgggcgctgggctgggatttccgggcggcgattctggtcattgttctggcctgcgtgtcggcaatcatctacttcccattctttaaggtatatgagaaacagctgcttgctcaggaagcggaagaggccgagcgggcggagcaggagagtcaacagaccgcataa

SEQ ID NO: 210222 - DNA, 459 bp, Klebsiella pneumoniae; identical to SEQ ID NO: 134541

SEQ ID NO: 210223 - DNA, 675 bp, Klebsiella pneumoniae
atggaaaaaaatagtacaacccgccatgtcgccatcgtagaaaaatgcgtgatgacggaaatggcatggcgctatatctttagtcgtgaagataatcgccgttatcatattcatctgtttaaaaatgtcagtatgctcagggcggcggaaataccgtttccctggtcaaccattattttttctctttcgggaagtcgttcttcacgagccgagagtctgctctttgttcatgaaatggcgcggtgccggccggaagtccaaacgattattctggctaataatgaaagtgaaatgcacctgatcggccatcttatgccggcctgtttgcacggcatactgaataaatccgcgccgcgacgcgggctacaggagcgtttgctgcagctactggacaatcatcatctcagcggcagcgaacaattttgcgacagagaggcgtgcaacgatccgctaagcccgacggagcacgccatccttcggtatatgtcgtggggatattcgctttctgatattgcgatacagctcaaccggaatattaaaacgatccgcgcgcataagtttaacgccatgaccaagctcggagttcgctcagacattggtttattaaacgcggcggatatcctgttgcatttaccgctcaatagtacgacaagcgccgttaaacaggtagcgtaa

SEQ ID NO: 210224 - DNA, 723 bp, Klebsiella pneumoniae
atgttaccaggacaaggtaagtttggcgtcgttattagtaaaattcccgtcatgcaatcagggttaaaggtgatcttcaatgagaacctccctgattacgaactgagtttttgtcgttctcatgatgagctcacccttttacaactgcggcgggcggtgctggttgtcgcggatatctccggcgagattgcgcacccccgagccgtctgcgagcgttattactccctcatgactcagtaccgtgatattcactgggtttttatggtcagcgacagcctctatccgttggccgttgagctattaattcgtcctgaaagctcgttgatctccgagagcgagccggttaaccggctgattgaggtgatttgcgccggtagccgtgcggctgaacagattagccgtacgctgtttgccggggatgaggacagcgatttcgcaagctaccactctgcggcgatgctcactctttcagagcgtaaagttctgcgccttctggcgaaggggtggggaataaaccagatcgccgcgctgttgaaaaagagtaataagacgatcagcgcgcagaaaaacagcgcaatgcgtcgcttatcgctacgcagcaacgctgaaatgtatgcctggatcaacagcgcgcagggaatgcaagagctgaatatcaattcagcttacggggagcaaatggaatggaaaaaaatagtacaacccgccatgtcgccatcgtag

SEQ ID NO: 210225 - DNA, 882 bp, Klebsiella pneumoniae
atgccgttcgttcaaactgtgcccgtatttaagctgtatggcgaagagtgcggctggccgacgccggacctgctgcactgtgagtcgattttacagcgcagcagcctgtatcagtggcatattcgcgtccatcagcatgcggaaatggtccagcttctctatctgcatcaggggcgggcggagatcgaaattgaaggcgccaccgcggtgatgacggagtcctgcatccaggtggttcccgccctctgtattcacgggtttaatttttcacccgggacgcaagggtttgtgctctctctggcgctgccgctgctgagccggtttgaaaatcagttcggtcgccctctggatgtgcttagcgtgccgcagtgtgtgccggtgggccgttctcgcgggcgcatgcatacgctgttttcagcgcttcgcgaggagtactgcgaagagcacgatgcgcgagaaatgatgctctattcgctgctggggacgctgttggtctggctgaaccgacagtgccatcccgcgtcccccgcggaagataaagcggagcggaagcgcagcatgatgcgccacttcgcccgccttatcgagagccactaccgacagcatctcccgttggcggagtatgcgaagctgattggactgtcggttacgcacttaaattatttatgtcgtgagttttatggctgtagcgctcttggagtattgcatcagcggttgatgcttgaagcgcgacgcaatctgcagtacacccgcatgacgattacacaactctctgattatttggggtttagcgatgcagcctatttttcgcgttttttccgtcgctatagcggtatgtcacccaaagcatttagagaaacaattaaagataatgcttcataa

SEQ ID NO: 210226 - DNA, 1185 bp, Klebsiella pneumoniae
atgaagacacaggtcgcgattattggcgcgggcccctccgggctgctgctggggcagttgctgcacaacgccgggatccataccgtgatccttgagcgtcaaacgccgcagtatgtgctggggcgcatccgcgcgggaattctggaaagcggtaccgttgatctgctgcgcgaagcgggcgtggcgcagcggatggatgccgaaggcctggtgcatcatggggtggagtttctgtttgacggccagcgggtgcccgtcgcactgagcgagctaaccgacggtaagagcgtaatggtttatggccagaccgaagtcacccgcgatctgatggctgcccgggccgccagcggcgcgccgatcgtctatggcgtgagcgaggtggctatccatgacgccaaaagcgaccggccgacgatcacctacctcagcgaaggggaaacctgccgtctggagtgcgattttattgccggttgcgacggtttccacggcgtatcgcggcaaagtattccagctggcattttgcagacctacgagagcgtgtggccgtttggctggctaggcctgctggcggatacgccgccggtcaatccggagcttatttatgcgcaccatcagcgggggtttgtattgtgcagtcaacgctcactgactcgcagccgctattatctgcaggttccgctgagcgataaggttgaagcatggtcggacgagcgcttctggcaggagctgaaaagccgcttgccggaggagctggcatccaggttagtgactggtcacgcacttgagaagagcattgcccccctgcgtagcttcgtcgtggagccgatgcaatatgggcggttgttcctggtgggggatgcggcgcatatcgttccgccaaccggggcgaaaggattaaatctggcggcatcggacgtgaactatctgtggcggattctgcgcgaatactaccatcgtggccgcagcgatctgctggcggcctactcgcaactggcgctggatcgggtctggaaaggggaacgctttagctggtttatgacccgcctgctgcatgattttccggatcagaacgcgttcgacgctaaaatgcaggccgccgaccgccgctactatctgggctcgcgcgccgggctgaccaccatcgcggaaaactacgtgggcttgcccatggagcgtgtcgcctga

SEQ ID NO: 210227 - DNA, 777 bp, Klebsiella pneumoniae
atgcaggttgatcggacacagcagcgggcaatcacacgtttatgcatccagtgtggtctttttctgttacagcacggcgccgagagtgcgctggtggaggaactgtcaacacgtctcgggctggcgttggggatggacagcgttgaaagcgccatctcttcgaatgccatcgtcctgaccaccattaaaaatggcgaatgtcttacctctacgcgcaaaaatgtcgatcgcggcattaatatgcatgtggtgacggaagtgcagcacattgtgatcctcgccgagcataagctgctggactatcgcgacgtcgagaagcgttttgcgcagatcgttcccctgcgctatccgcgctggctgctggtgctgatggtgggtctttcctgcgcctgtttctgcaaactgaataacggcggttgggatggagcgctggtcagcttctgcgccagcacggtagccatgtacattcgccagatgctgacccatcgctccatgcatccgcagatcaacttctgcatcaccgcctttgtcgccaccaccatctccgggctgctgctgcgcctcccggcgtttgccagcacgccgaccattgccatggccgccagcgttctgctgctggtcccgggttttccattaatcaatgccgtcgccgatatgtttaaagggcatatcaataccggactcgcccgctgggcgattgccagcctgctaaccctcgccacctgcattggcgtggtgatggccatgaccgtatgggggctgcgcggatgggcataa

SEQ ID NO: 210228 - DNA, 474 bp, Klebsiella pneumoniae
atgggcataatctcatttatttttgcgctggcggaagacatgctgctggcggcgatccccgccgtcgggtttgcgatggtctttaatgtccctcagcgcgctctgcgctggtgcgcgctgctgggggcgattggccatggctcgcgtatgatcatgatgagcgccggttttaacattgaatgggccacctttctcgccgctctgctggtgggcagcattggcattcaatggtcgcgctggtatctggcgcatccgaagatttttaccgtcgccgccgtgatcccgatgtttcctggcatctcagcctacacggcgatgatttccgcggtaaaaatcagtcattttggttattcggaagagatgatgattttgctgctgagcaattttttaaaggcctcttcgattgtgggcgccctttcgattggcctgtcgatacccggcctgtggctgtatcgtaagcgtcctcgcgtctaa

SEQ ID NO: 210229 - DNA, 540 bp, Klebsiella pneumoniae
atgtcttcgcgaattttaacctcccattttagcggcctggaagagttcctccagcagcacgcggcgctgctggcaaaatcgactgacggcaccgttgccgtttttgccaataacgcgccggcattctatgcgctgacgccagcgcggctggcgcaactgctggagctggaagccaggctggcgcgccccggcagcgacatcgcgcttgacccgcagtttttcgaggagcccgccgcggcgccggttgcggtgccgatgggcaaatttgctatgtacgccggatggcagcctgacgccgattttcagcgcctggccgcgctgtggggcattgccctgagccagccggttacccccgaagagctggccgctttcgtcgcttactggcaggcggaaggtaaagtctttcaccacgtgcagtggcagcagaagctggcgcgtagcgtgcaaatcagccgcgccagcaacggcggacagccgaagcgcgatgtgaacagcgttagcgaacccgacagccatattccgcgaggtttccgaggatga

SEQ ID NO: 210230 - DNA, 744 bp, Klebsiella pneumoniae
atgagcatgaaaaacgttggcgacctgatgaaacgcctgcagaaaatgatgccggcacatattgaaccggcgtttaaaaccggcgaagagctgctggcctggcaaaaagagcaaggccggctgcgttccgaagcgctggagcgagagaatcgcgcgatgaaaatgcagcgcaccttcaaccgctcggggatccgcccgctgcatcagaactgctcctttgataactatcgcgtcgagtgcgaggggcagatgaatgcgctcgcccgggcgcgccagtacgtggaagagttcgatggcaatatcgccagctttatcttctccggtaaaccgggcactggcaaaaaccacctggcggcagccatttgcaacgagctgctgctgcgcgggaagtcggtcttaatcatcaccgtggccgatattatgtcggcgatgaaagataccttcggcaaccgggaaacgagcgaagaacagttgcttaacgacctcagcatggtcgacctgctggtgatcgatgaaattgggatgcagacggagtctcgctatgaaaaggtcattatcaatcagatagttgaccggcgctcatcctccaaacgacctaccgggatgctcaccaacagcaatatggaagagatgaacaaactgctcggcgagcgggtgatggaccgtatgcggctcggcaacagcctgtgggttatcttcaattgggaaagttaccggcaccgcgttacaggcaaggagtattaa

SEQ ID NO: 210231 - DNA, 492 bp, Klebsiella pneumoniae
atgaaatcgtttaaaaatagcgttattgccgcgcttgccgttagcgcgtttaccctctctggcgcccacgccgcctcctggcaggattcccttaacagcgctgccagccagctcagcggcagtaacgcccaggccagcggcggcatgtccgtctcctcgctaaccagcctgcttaacggcagcagccaatccctgaccgccagcagcatgaataatgcggccgggatcctgtcatattgcgcgaaacagaagctggcctccgtgaccagcgccgataacgtcaaaaatcaggtgctggataaactggggcttagcacgccggaaaaacaaaaacaggacaccagctatctggatggcctgcaggggctgctcaacagcaaaaacggccagcagttggacctgaatacgctcggcaatagctcgctggcgaaacaggtaaaaaccaaagcctgcgatctggtcttaaaacagggtgttaatttcctctcctga

SEQ ID NO: 210232 - DNA, 2292 bp, Klebsiella pneumoniae
gtgtcagagttgttatccatcgccttatttttagcttcggtggtgctgtatgcctggaaagcgggtcgtaacacctggtggtttgccgccacgctcacggtgttaggcctgttcgtggtgctgaatatcaccctctacgccagtgactacttcaccggcgacggcatcaacgacgcggtactctacactctgaccaacagcctgaccggcgccgggatcggcaaatatatactgccgggggtcggcgtggccgtcgcactggtcgccgtctttggcgccctcggctgggtgctgcgccgccgtcggcatcatcctcatcacgtcggttacagcctggcggcgctactgctggcgctggcctccgttgatgccagcccggccttccatcagatcagcgagctggtgaaatcccagtcacgcgagggcgatccagactttgccgcgtactataaagagccgtcgaagcaaatcgacaatccgcagctgaacctggtctatatctatggcgaaagtctcgagcgcacctattttgataacgacgccttccccaacctcacccctgagcttggcagaattaaagatgaggccattgatttcagcaataccatgcagctgccggggaccgattacactatcgccggcatggtcgcctcacagtgcggcattccgctgttcgcgccgttcgaaggtaatgcctcagcctcagtctccagcttctttccacagaatatttgccttggcgatattctgaagaactccggttacgagaattactttgtgcagggggctaacctgcgctttgccggcaaagacgtgtttcttaaatcccacggcttcgatcatctgtacggggcggaagagctaaaaactacggtggcggatcctacctaccgcaacgactggggcttctatgacgacactgtgctcgacgagacctggaaaaaattcgaagagctgtcgcagtccgggaaacgcttctcgctcttcgccctgacggtggatacccaccatcccgacggttttatctcacgcacctgcgagcgtaaacgctatgatgtggacggcaagaaaaacctctctttcagcgccgttagctgcagtcaggaacatatcgccgcgctgatagaaaagattaaagcctcaccctatttcaaaaacacggtcatcgtggtctcttccgatcacctggccatgaagaacagcgcctgggattatctcaacaagcacgatcgcagcaatctgttcttcgtcctgcgcggcgataaaccgcagcaggagaccctggcggtgaaacgcaacaccatggataacggcgcgacggtgctggatattctcggcggcgataactatatcggcctcgggcgtagcagcctctccggccagtcgctctccggtattttcatgaatatgaaagagaaagtcctggcatggaagcctgacgtgatccgcctgtggaatttccccaaagaaatgaagaatttcaccatcgactcgcaaaaaaatatgatcgctttctccggcagccatttccgcctgccgctgctgctgcgggtatctgaccagcgcgtagaaccgctgccggagagtgaatactctgcgccgctgcgcttccagctggccgatttcgcgccacgggataatttcgtgtgggtcgatcgctgctataaaatgggccagctgtggtcgcctgagctggcgctctccaccgactggtgcgtctcgcagggacagctggggggtgagcagaaggtccagcacgttgataagccgcagtggcacggcaagaccgccttcagggacacccttatcgatatggagcgctataagggcaacgtcgatacgctgaaaattgtcgacaacgatattcgctataaggccgacagcttcgtgtttaacgtcgctggcgccccggaagaggttaaacagttcagcggtatttcgcgtcccgagtcgtgggggcggtggtccaatgctcagttgggcagcgacgtgaagattgaatataaagagccgctgccggagaaatttgatctggtgatcaccgccaaagcttatggcccaaacgctaataagccgattccggtgcgagttggagaaagtgagcaagtgctcactctggataatgacgtgactaccacgacgctgcattttgacaacccaacgcgcagcaacacgctgatcatcaccccgccggacccgcaaaccactaacgagggcaatatcctcggccactccccgcgtcagttggggatcggcatggtggagatcaaagtggtgaaaagcgaaggctaa

SEQ ID NO: 210233 - DNA, 939 bp, Klebsiella pneumoniae
atgaaaaaacggatgacctcgacgccgcacgatgcggtctttaagcgatttcttcgtcacccggagacagcgactgatttcctcaccctctaccttcccgaagcgatccttcagcggtgcgatttctctaccctgaggctgcaatcggcgagctttattgatgaggatctgcgcgcctggtattcagatgtcctctggtcggtgcagaccacctgcggcacggggtatgtttacgtggtgatagagcaccagagctcaccggatagccatatggcctttcgcctgatgcgctatgcgattgccgcaatgcagcgccacctggatgccgggcacaaaacgctgccgctggtggtgccgatgcttttttatcacggtgcaaccagtccgtatcctttttccctcaactggctggatgaatttgccgacccgcagctggcgaagacgctgtatggctgtccgtttccattgatcgacgtgacggtgatgccggacgatgacatcgtgcaacatcggcgagtcgccttgctggagctgatgcaaaaacatattcgccagcgcgatctcagcggcataacggagtcgttggcggccgttgtgatgctgggatacactaaccgtcggcagttgagaatgctgtttcactatatgctgcagtacggtaatacggccgagccgggcgtgtttctccgccggctggcccgccgtctgccacagtatgaggagacattgatgtctatcgcgcaaaagcttaagcaggaaggtcggcaacaaggccgactggaaggccgggaagaagggcacctggagggcttgcaggaaggcagccgacgcgaggcgctgcgcattgccggcagtatgttacagaatggcctcgacaaagagatggtacagaagatcaccggactgtcggctgatgaactacagccgctgtgtggttaa

SEQ ID NO: 210234 - DNA, 1011 bp, Klebsiella pneumoniae
atgttgggttttaatcaggacgagtacctgaccagtgctcgcgagatcatcgctgcgcgtaaacaggctgaaaccgtagccgacgatatttatgacagcggctgtagcgcattattttttgcttcggtaggtggttccctggcgccgatgatggcaattaatgaatttgccaaggaattaaccagcgtgccggtatatcttgaacaggccgcggagttaatccatcgcggacataaaaaattaaataaagatgcggttgtcgttacgttatctaaatccggcgataccaaagagtcggtcgccattgccgaatggtgcaaggcacaggggatccgcgtggtagctattactcgtcacgccgactcgccattggctgccgccgccagctggcatattccgatgtgccacaaaaatggcgtggaatatgaatatatgctgctgtactggttattcttccgcgtcatttttcgtcacggcgagtttgctgattatgcgcgatttgccagccagctcgagttactgccggaaaatctcctgcaggcgaaacgccagttcgatccccgagcggatagcattgccgcgcaataccatgactgcgactatatgatgtggattggcggcgcggaaatgtggggcgaggtctatctgttctcaatgtgtattctcgaagagatgcagtggaagcggacgaagtcggtgagctccgctgaatttttccacggcaccctggagctgctggaaaaagaggttccgctgtttctggtgaaaggcgaggggagatgccgggcgctggacgaacgcgtcgagcgttttgccgaaaaaataactgagcatctggtggttatcgacccgcgcgactatccgctgaacggcattgatgacgcgttccgctggattatggcgccgtgcgtggtgtccaccctgctggtggaccggctggcggcccactttgaacaccataccggccacgacctcaatatccgccgttactaccggcagtttgattactaa

SEQ ID NO: 210235 - DNA, 1062 bp, Klebsiella pneumoniae
atgcgaccaacaatgatgacatatatcagtgaagagccagcctgcctggcgcagatcctgcgcgactaccgacaaaagctagcgccgattgaaaccttcgcccgccagcacccggtacggcggatattattgctcgcgaccggatcgtcgctgaatgccgcgctgtgcgcgcgctatttctttgagcaacgcttcggtgtgctgcttgacattaaagagccgtacaacttcacccattacgacgcgatcgacccgcatgccgatctggtggtggcgatttcacagagcggaaaaagcgcgtcgacgctggaggcgatgcgtaaggtacaggcttccggcaagtcggttttcgccatgacctcagatccgcaaagcccgataggaggcgctagcgatggcgttctggatattaataccgggatcgagagcgtagggtttgtgacccgcggctttagcgcgacggtgctcaacctgttgctgatagcgctgatcattgctcgtaagcaggagaaagccagcgaggtcgaggagcagcactatctcgctgaattgcagcggctggtagcggcgatcccggaggttatcgtccgcacctcgcgctttattgaccgccatagcgaaacgctgcgcagcggcgagcgctttgtcgccaccggctacggcgcgctggttggcgtggcgaaggagttcgaaaccaaatttaccgagacggtgcgcgtgccttccagcggctttgagctggaagcctatatgcatggcccctatctggaagccaatgcccgccatgtgatgctgtttattgaagatacgccggacgcgcgaacccgggcgctgcgcgactatctggcgccgtccattggccgggcctttaccctgacgctgggtgacgaagaggatgctcaaacgctggcgctaaactgtccgtgcgagcatcacctggcgcctctgctgctgattgtcccagtgcagatgctcgcctggcataccgcaggactgaaaggcatcgatctggctaaacgtattttcgacgattttgaccgcgtcttaaaaagtaaaatctga

SEQ ID NO: 210236 - DNA, 852 bp, Klebsiella pneumoniae
atgacgacgaagatgatttctgaagagaccctgcagccgcaggcgcaggaagaaacccggattacgccgcgcgatttacgccgggtgttctggcgctctttccagatggagttctcgtggaactatgagcggcagatgaatctcgcctttgtttacgcgttgatcccggtgctgaagaagctctatccgcgcagagaggagctggccgcagcgctgaagcggcatctggtttttttcaataccacgccgcatatcgtcaccctgctgctggggatcaccacggcgatggaagagaaaaacagtcagcagaaaaacatggatgccactgcgattgataacgtcaaagcctcactgatgggaccgttagccgggctgggtgactctttcttctgggggacgctgcgcctcatcgccaccgggatcggcaccagcctggcgctgaagggcaacatcctcgggccgatcctgtttctgctggtgtttaacgtgccgcacattctggtgcgctggtgttttacccgctggggctacgtactgggcaccggggtcctgcagcggatccagaagagcggaatgatggcgagcctgacctacggggcgtcgattatcggtctgatggtagtcggggcgatgaccgcttcaatgatcgatatcaccattcctctctccttcggcgccggggaggccaaaacccaggtacaggacattatcaacgacattctgccctgcatgctgccgttggtgagttttggcatcgtctactggctactgggacggaaagttaaaccgctctcaattataggcggcatggcgctggtgggcattctgggttcgtggatcggattgttttaa

SEQ ID NO: 210237 - DNA, 780 bp, Klebsiella pneumoniae
atggtagaggctctcttactgggtctggtggcgtttatcgcgcaatcggaatatgccttagggacgtcgctaatttcacggcctatcgtcaccgggctgctgaccgggctggtgctgggggatgtacagaccggcgtcattatgggcgcgacgctggagctggcgtttatcggctctttctccgttggcgcctcgatcccgcccgacgtcgtgaccggcggtattctcggcgtggcgttcgccattacctctggcgcaggcacagaaacggcgttgttgcttggcctgcctatcgccacgctgactttgatcctgaaaaacatctatctggggatgttcattccaatgcttagccagaaggcggacgggtatgcggaacgggcagatctccgcggcattgagcggatgcatttgattgccggattcggcctgtcgctgatgcttgccgcggtggtcaccgtctcattcctggtgggcagcaacgcggtgaaatccctgctcgatacgatcccggaatttatcaaacatgggctcagcgtcgccaccggcatcatcccggccctcggcttcgcgatgctcgccaggctgctgattaacaagaaagtggcgccgtattttttcctcggttttgtgctgatggcctatttgaaaatcccggtgaccggtatcgccattctcggcgccatcgtggcggtagtcatggttaacgtcaccgcgttgaattcacctcgtatcacgacagaacaaggagtcagcgatgacgacgaagatgatttctga

SEQ ID NO: 210238 - DNA, 471 bp, Klebsiella pneumoniae
atgattacattattaagggtagaccatcgattacttcacggccaggtggccttttcctggacccaatatgtcggcgccgattgtattttaatcgccaacgatagcgtccctggcgatgagctgcggaaaaccaccattaagcttgccaaaccgccctcggtgaagctggtgattaaaaatataaatgattctattgaggcaataaaaagcggggttaccgataaatataatttatttattgttgtggagtcggttaatgacgcctggcgtattgccagcgccatcgacgaaataaaaagcataaatcttggcggaataaaggctaaagagggcagtaaaaatatctctaaggcgattaatttactgccgacagaaatagaacagctacaacaactggtgggcaagggcgtcgaagtggagattcgccaggtcccgaacgatcgcaaacagctttttgcggaatgcgtgtaa

SEQ ID NO: 210239 - DNA, 423 bp, Klebsiella pneumoniae
atgaaacgacactatatttttgccagccatggcagctttgctaacggtttgttgaactccgtggaactgatcctcggtaaacaacccgatatacataccttgtgtgcctacgtggaagaagaggtcgatctgacgcagcaggtggaagcgctagtggcgcgtttcccggcgcaggatgagctgatcgtaattacggatatttttgccggtagcgtgaataacgagtttgttcgttttttatctcgcccacatttccatttattatccggtttaaatctgccgttaattattgacttgctgatttccgcagcggaagacaataccgaaaaattaattaccgaggcattaacaaacgccaaagagagcattcagtactgcaatcaaacgattgccagcgcgatgactatggataaagacttctga

SEQ ID NO: 210240 - DNA, 2766 bp, Klebsiella pneumoniae
atgcgtaaaacggaactgttggcttttttgcaaaatcagaccgattttttcgatccggataacctgagcgaagtctttaccgccagctggctggcccggtgtttcgcgatgcaaagaaataccgccagccattatctcaatcagctggtcgctcaggacgtgctggtgaaaatcaacacccggccggtctattttctgcataaaaaagccttttgccagcagttctacccgctttcccgcagtgagtatgccagcatggcggagttactcgcggagagcgaccgccagccggagcaggcggaccatttttcgttgctgaccgggcatgacggcagcctgcgtaaaccgattgagcagatgaaaaccgcgctgttttatcctaacggcgggctaccgctgcttattaccggcgacagcgggaccggcaaaagctatatggctgagctgatgcatgagttcgccatcgcccaggggctgctggcgcccgatgccccctttgtgagctttaactgcgcgcagtatgcgagtaatccggagctgctggccgccaacctgtttggctacgtcaaaggcgcgtttaccggtgcgcagagcgataaagcgggggcgtttgaggcggcaaacggcgggatgctgtttctcgatgaggtccatcgcctggatgctcagggacaggagaagctgttcacctggctggatcgtaaggagatctaccgggtgggggagaccgcgcaaggcttgccgatttcgctgcggttggtgtttgccaccaccgaagatattcacagcacttttctcaccaccttcctgcgccgaattccgatcctggttagcttgcccgatcttcaacaccgtagccgcgaggagaaggaggcgctaacgctacagtttttctggcaggaggcgcgcacgcttgccgcccggctgcaactaacgccgcgactgttgcaggtcctgacgcagtatgtttatcggggcaacgtcggcgagctgaagaatgtggtgaagtacgccgtggcgtcagcctgggccaggtctccgggccgcgaaatgttgaccgtgacgctgcacgatctgccggagaatgtcatggccgcgacgccagcgctcagcgaagcgatgggccagcaggagccgctgctgatcgagccgcagaccagcctggtctggctgctgcgtgcgcgcgacccggtacaggggctgatctatgacgttcagtgtcgggttctggcgcagtatgaagcggtgctgaataaaaaaacggtctgggaagaggcgcaaaggagcatgggggaagagattgaaaccctcttcgatcggctgatctttgataatcatgactccagtagctcgcagatgctgctgctgatcgctcatcaggttcgggaggagtattatcgcctggaaaagcgcttcaatatccagtttaacggcaactgcctctacgcgctgagccactacctgatccaccgatcccgacagccgcagtccacgataaacaatgaaaaagcccgccagctggaggacttcctggtacagaagtttccgctgctgtatcgcttttgcgaagcgatcctcggtgcgttgacgctgaagctggatattgaaccccagcgtatcgacctgctgctgttagtgctgtggttccacaagaatggcgccatcagccagcagcaggtgacccgggcgataattctcgctcacggttacgctaccgccagcagcatcgccaacgtggcgaaccgcttgctgaaaagccagctctttgagtcattcgatatgccgctggacgtgacgccggaggctatcgctaaccaggtgatggcctacatagagagccatgctctggcatcaggattgataatcctggtcgacatgggatcgctgaacgccattcaccgccattttaatcgtcgcctgagtacgccgatggcgatcatcaacaatgtctccaccggtatggcgatgtacgtcggggagcgcattttgcagggcgttatgctggaagatatcgtccgcgagatcggcgatgaccttgcggttgagcaccagctctattacccgcaaaccgataagccgcgggcgattttaaccacctgcgcgaccggtctgggcgcggcggcgaatctgtcggcgctgttaaaagccagcattcctgaagcgcttggcattgatattgtggcctgcgatgtggagacccttgccgatcccgcgcgacgggagccgatgctaagccgctatgaggtgctggcgatcgtcggcaccctggatccgcatcttgccgatctaccctggatctcgctggattcgctgatctctggcgaagggagtcgtccgctgatgcgcatttttggcgaactggcgacggcggagcaggtcagcgagatcaacaacctgatcctgaaaaacttttcgctgcgccgggtgatcgagtcggtgacgatcctcgatacggctaaggtgatcaaccaggttgagcagtttttgctgcgctatgagcatctggccgggcgcgatgtacctaacgatcgtaaggtcgcgctgtatgtgcatataagctgtttgatagagcgattaattcgtcacgcttccccagcccaatacactggagggcagtgtccggatcgcgagctggctacgctacgcgaggcctttagtgtcatagagagcgggtatagtgtcaaaattcccgttgtagagctctgctacattcacgatatcctgacgcgggaaacggaatttattcaggaagatcaagacttttaa

SEQ ID NO: 210241 - DNA, 1446 bp, Klebsiella pneumoniae
atgaaaaccttaaaccgacaaaactttccaggacctcagtatccgacccgtgcgattcagttcggcgagggcaatttcctgcgggcatttattgactggcagctggatctgctgaatgagaaaaccgatctggcgacgggcgtcaccattgttcgcccgatcaacaccgtttttccgccgtcgttaaatactcaggacgggctgtataccacggtgatccgcgggttgaatgaacgcggcgaggcggtgagcgaggcgcggattatccgctccgtaaataatgagatcaatccctggcaggattttgctggctacctggcgctggctcgtgacccggagattacatttgtgttttcaaacaccaccgaagcggggattagctatcacgccggggaccggcctgacgatatgccgccggtcagcttcccggcgaagctgacccaattgcttcttgagcggttccgtcatttcaacggcgcagcggataagggctggacaataatcccttgtgaactgattgactataatggcgaagcactgaaggcgttggtgctgcgctatgctaaagaatggcagttgccaacggcattcagcgactgggttgaaactgccaatacattttgttcaacgctggttgaccgcatcgtcaccggctatccgcgcgaggaagcggaaaagctggaggcggagctcggctaccatgatgctttcctggatactgccgaatacttttggttatttgtaatccaggggccgcaggggctggcggaaatgctgcggctggatcgctgcccgctgaatattcgtatcgtagaggatatccggccctataaagcgcgcaaggttgccattcttaacggcgcgcataccgcgctggtgccggtagcatggctgtgtggggtggatacggttggcgaagcgatgcgggacaaagccgttcgccattatgtccagcagacgattgatgaagagattatcccggcgctcgatttaccggccgaggagcttcgtcagtttgccgatgcggtcaccgggcgctttcttaatccctatattcgccatcaattgctcgccatcgccctgaacggcatgactaagtttcgtacccggatcctgccgcagctgctgacgactatccgccaacacggcgcgatcccgccgcggctaacgtttgctctggcggcgctcatcgccttctatcgcggtcagcgtgacggacagacgtatccgctacaggatgacgaagtttggttaacccgctttgctgaaggatgggctcaggtggcgaacggcagcccgctgcatgaactggtcacagaagtcctgcaggatgctgcgcactggggtgaggatctgacggccattccctgccttgccgaccaggtcacgcgctatctggaaatgattttgcgcgcggggatgcgcgaggccctgtcgcggttgtag

SEQ ID NO: 210242 - DNA, 1023 bp, Klebsiella pneumoniae
atgacgtcgatgaatactttagtatgtcaggaacctaaaaaattacactgggaaaaacgccagattcccattcccggcgatgatgaagtgctcattaaaataaaggcggtggggatttgcgggacagatattcatgcatggggcggcaatcagcctttttttagctatccgcgtgttcttggtcatgaaatatgcggtgagataattgggctgggtaaaaatattcttaatttgaagagtggccaacaggttgctgtgattccctatgtcgcctgccgccactgcccggcctgtctgagcggccggacaaactgctgtgagaacatttcggtgatcggggtgcatcgcgacggcgggtttagcgaatacctctgcgttccggtaaacaatctgctggtggtggatgatgtcgaccctgaagctgtagcgttgattgagccattcgccattagcgcccacgcggtgcgtcgcgcagcgatccagccgggagatcaggtactggtggtcggcgcgggtccgattgggctcggggcagcggcgatcgctaaggctgacggcgcacaggtggtggtggcggataccagcccggcgcggcgcgaacatgtggcacaacatctcggcctgaccaccctcgatccctccgatccactgtttaccgagcaactgtcggccacgtttgacggttctctggcgcagaaagtgattgacgcgacgggaaatcagcaagcaatgaacaacaccgttaatttaatccgtcacggcggcagcatcatttttgttggtctgtttaagggggagctgcagttctctgacccggaatttcataagaaagagacgacgatgatggggagtcgtaatgcgacagaagaggattttgccaaggtcgggcggctgatgactgaagggaaagtgaccgccaggatgatgctgacccaccgttacgacttcaaatcgctggcggaaatttacgaaagcgacgtgattaacaatcgtcagctgatcaaaggcgttattcatttttag

SEQ ID NO: 210243 - DNA, 915 bp, Klebsiella pneumoniae
atgagtcgctcacaaaaccttcgtcacaatgttattaaccaggtcatcaacgacatggcgcgcggctttatcccctcgccgctcccctcgcaaagcgcactggcggaaatgtataacatcagccgcaccacggtgcgccatatcctttgccacttatgcgagcgcggcgtcctgagccaggtcaatcacgactaccagatccttcgtcaaccggaagtacaggacggcttcgatagttccagcgcctcgctggccgaacaaaaccgtctctttgaacaagcgtttttcaccatgattaaccaacgccagttacgcgccggagagcgattctccgaactgcaactggcgcgtgccgcgggcgtcagcccggtcgtggtcagagagtttttactgaaattcagccgctacaacctgattgaaagcgaaaaacgcggccagtggaacatgaagaaatttgagcaatcctgggccgaacaactgttcgaattgcgggaaatgctggaaactcacgcacttcaacactttcttaatctgccggacagcgatgcccgctggctgcaggccaaaaccctgcttgagcgccaccgcactctgcgggacagcattggcgacagctttagtatgttctcccagctcgatcgtgattttcattcgctgctgctttccgccgcggataatatattttttaatcaatcccttgagattatctccgtgatctttcacttccactatcagtgggatgaaagcgaccttaaacagcgcaatatcatcgctattgacgaacatatgactatcctgagcgcactcatctgtcgcagcgatctggatgccaacctggcgctacgtaaccacctgaacactgcgaagcaatccatgattaactctatcaagcaaagtgaatcgctggcgcattaa

SEQ ID NO: 210244 - DNA, 1362 bp, Klebsiella pneumoniae
gtggaatcacaaaatataaccatagacccgcagaccgactttaaagaggggaaagcggaacccctttcagttcccttagaaaatacactacaacgtagctctcgtattaaaaagattcaaacaacggcaatgattctgttatttctggcggcggtgattaactacctcgaccgaagttcattgtccgtggcaaacttaacgattcgccaggagttagggctcaacgccactgaaatcggggcgctgttatcggttttttctctagcctatggcattgcgcaactgccctgcggccctctgctggaccgcaaaggtccacgcatcatgctagggctgggtatgtttttctggtcactatttcaggcgctctccgggatggtgcacagctttacccagttcgtcctggtgcgcatcggcatggggatcggcgaagcgccaatgaacccctgcggcgtcaaggtgatcaacgactggtttaatattaaagagcgcggtcgcccaatgggcttcttcaacgccgcctcgacgatcggtgtcgcggtcagcccaccaatccttgccgcaatgatgctgatgatgggctggcgctggatgtttatcactatcggcatactagggatctttatcgctatcggctggtatatgctttatcgcaaccgggaggatctccccctcaccgccgatgaacaggcgtaccttaacgccggaagcgtcaacgttcgccgcgacccgctgagctttgccgaatggcgcagcctgtttaaaaacaaaaccatgtggggaatgatgctcggcttcagcggcatcaattataccgcgtggctgtatctggcctggctgccgggctacctgcaaacagcgtataacctcgatctgaaaagtaccggatttatggccgcaattcctttcctgtttggtgccgccggtatgctgatcaatggctacgtcaccgactggctggtcaaaggcggcatggcaccgatcaaaagccgcaagatctgcatcattgccgggatgttctgctccgcggcgtttacactgatcgtgccgcatgccactacctctttcgcggcggtgttgttaatcggtatggcgttgttctgcattcattttgccggaacgtcctgctggggattgatccacgtcgccgtggcatcaagaatgacggcttccgtcggcagtattcagaatttcgccagctttatctgcgcttcatttgcaccggtggtgaccggatttattgtcgataccacccattccttccagctggcgctggttatatgcggctgtgtgaccgctctcggcgcgctggcctacattttcctggttcggcagccaattagcgatccgcgtaacgactaa

SEQ ID NO: 210245 - DNA, 837 bp, Klebsiella pneumoniae
atggagctgaccgccgttcccgccacgcagttcagcagcgtgcagttaacggatattctcaacgcctgttttgaagcctacctggtgcctgttacccagtcggtagagggatttgttcagcgttttagcgccgaggggatgagcctggtcgattcccgcgtctggctggccggagatgaaccggcggcgatcgcgatcgtcgcgcgccgggggagtgccgctcgcctggcggcctttgccctgcgcccggcctggcgcggcaaaggcctgggccggaaactgatgcaggagctgctgatgcttttgcaacagcaggggatcgagacggtattcctggaggtgatccgcgataaccatgcggccgtcgcgctgtatcagtcgctgggctttacgcgacgctatgggctctgcggctacctgagtacagaacttctgcccccggtgccgggcgtattgcagctttatcccaccctgtccctgcttcggcgcgccattgaggagagtaacagccagcttccctggctgctggatccgcttaccttcgccactctgccatgtcaggtcgtgacgctggaacagcgcgccttcgcggttctaacgacggcgggctcgcgccctgtactgtcgtttttgtgggtggagcccgccgcccgccgccaggggctggcgcgtgagctgctgaaggcgctggcgcagcagttcccgggcattggtacttcggtgacggtcccggaaacttttacgccgctgtttgccgcggccggctatgccgctttgacactacaacagtatgagatgagcgcaacgatgaatgccctgcggtcggcagggcgttaa

SEQ ID NO: 210246 - DNA, 537 bp, Klebsiella pneumoniae
atgatgaaaactaacactataactgccggtgccgtattacgcctgactcaggagagcgatatcgcccttctgcccgccattgaacgttctgccgcccaggcatttcgccagatcccttctctcgcctggctggcggacagcgaggtgattagcgttgcgcgccatcatgattatctggaaacggagcatagcctgctggcggtagccgccgggcaacccgttggctttattctgaccgaaccgctcgacgatgcgttatttatcgtcgaagtcgccgtccaccaggcctggcagcaacagggcatcggccggatgctgctggagcgggttattgagagcgcacggcagatgggctacccggcggtaaccctcaccaccttccgcgaggtgccgtggaatgcgccgttttatacccgtctgggattcgccatgctcgatgagctgaccctgcccgccgggctggcagcaaaaagggaacaggagacccggcacggcctgccgcccgagtcgcgctgcgccatgcgcctggcgttgtag

SEQ ID NO: 210247 - DNA, 864 bp, Klebsiella pneumoniae
atgtcctggtcaatcgatattatttcctgcataacagatcgctttgtggaactcacggcgaccgaaaaacgcattgcgcagtttattctcgatgatgtcgcggcggcggcggagctgcccatcgccgagatagcgcgtctgacgcaaaccagccaggcttcggtcacccgttttgcccgggcgctcggctgtaaagacgtccgcgagctgaagatgaagcttgcgcaatctcttgcggtcggccagcggtttatcctcgatgttccggatctcgaaggcgtccaggggatctatgagtcaatcatcagcgtactggagaccaaccggcgggcgctggatatcgaggcgctgaagcgcgcggtgagctggctgagcgatgcgcggcagatcctcgccctggggatgggcggcggttcgaccatctgcgctcaggaaattcagtatcgcctgtttcgcctcggtctgccggtagtcagccagagcgatggtctgctggtacgcatgatgagctcggcggtgacgccgcaggatgtggtgatcgtgctttctctgggcggctatacccgggaaatcatcgagagcgcggcgattgccagccagtacggcgcgaaggttattgcgattacccccgccggaacgccgctggctgaacaggcggatctggtgctaccgctgctggtacgggaaaacgactatatctttaagcccagcacttcccgttacgcgatgctggcgatggtcgatgtgctggccaccgaactggcgatggccaacaaaccccaggcaaaaggcaaattacgccgtattaagctggcgctcgacagccaccgcggcggcgtcgatcggcagccgctgggggactaa

SEQ ID NO: 210248 - DNA, 600 bp, Klebsiella pneumoniae
atggacaagattaagctggtggcgattttacgcggcattcaacccgctgaggcggcagatcatattgagacgctaataaatgcagactttcgctatatcgaaatcccgctcaattcgccggactggcagcaaagtattccggcgatggtgcgtcagtttggcgagcgggcgatgattggcgcgggaacggtgctgaaggttgaacaggttgattttctcgctgaagctggggcgaaacttatcgtgacgcccaatacggccccggcggtgatccgccgcgcggtagataaggggatgctggtgtgcgccggctgcgcgacggcctccgaggcgtttagtgcgctggatgccggggcgcaatggctgaaaatctttccgtcatcagcattcggcgcggactatattcgcgcgctgaaagcggtgttgccgccggaggttccggtgctggcggtcggcggcgtgacgccggaaagtctggcgacctggatacaggcggggtgcgccggtgccggtctgggcagcgatctttatcgcgccggacaggccgtggaacgtacccgcgagcaggcggagaggtttatctccgccagtaaaagttag

SEQ ID NO: 210249 - DNA, 873 bp, Klebsiella pneumoniae
atgaacgagtatattgccgtcgattggggctccacccagctgcgggcatggcggatgcgtgatggcgaatgcatcgacaagctgaaactgccctgcggcgtcacgcgtctgaacgggcagcgcgccgaagcggtatttcagcagcagttggcgccgtggcgcggcgaccccgcgctgccggtggtgatggcgggcatgatcggcagcgatgccggttggcaaccggtgccttatctggcctgcccgctggcgctggaggcactcaacggtcagttatatgaggtggcggaaaaagtgtggatcgtgccggggctgaaagtggcgcaggctgcagattacgacgtaatgcgcggtgaagaaacgcagctgctgggcgcctggcaactgatgcccgcggagtgttacgtgatgcccggcacccactgcaaatgggtgcaggtgcaaaacggcgtggtgcgccagttcgccacggcgatgaccggcgaactgcatcacctgctgcttaaccattcgctgctcggccagcaactgcctgcgcagttcccggatgaagcctctttcgccctcggtatagaaaaagggttaaatcagccggcgttattgtccgggctttttagcgcccgcgccgcgcgggtgttaggctcgctggcggcgacttcggtgagcgattatctctccgggctgttgattggcgcggaggtggcgacattcagcgaacgctatcgcgccagccgcgtggtgctggttggtgagcactcgctcaacgcccgttatcagcaggcgatggcggcgcgtgggttagccgtttcctgttgctccggcgaggcggcgtttctttcgggtatagcgaggatgattgatggacaagattaa

SEQ ID NO: 210250 - DNA, 1488 bp, Klebsiella pneumoniae
atgaataatatgtcatttatgatttggttttccgtttatgcctgcgcgatgattaccttaggctggtacgtttcgcgcaaacagaaaaccggcgaagactttttacttggcggtcgttcgctgccgatgatcctcactctcggttcgacggtcggcaccatggtggggaccggctccagcgtcggcgccgtcggctttggctacagcaacggctgggccgggatgctttacggcctcggcggcgcggtggggattctgctggtggcatggttattcgcgccggtacgtaaacttcgcttcatgaccatgagtgaagaaatgtcgtattacactggcggcagtaaaattataaaaaacctcgtcgcaatacttatttttattgcctctataggctggctgggggcgcatatattaggcggcggattatacctggcgtgggccagcggcattgatattaatgtcgcgaaaattattatcgcgctggcttttgtggtttatgtcggtattggcggctattccgcggtggtgtggatcgataccattcaatcgatcgtgctgttcgtgggctttattttaatggcgatactggcggttcatcacgttggcggctggaaccatattcagcaggccgtcgatccggcggcgcaaagcctgttcgcggtcgataaattaggcgtgttgccggcgctatcattggcgatggtgatcggcgtcggcgtgctggcgacgccttcttatcgccagcgtatttactcggcgaagaccgtctcctcggtgcgccagtcctttaccattaccggcctgctgtatctgggcttctccttcctgccggcgatcatcggtatggcggtatggaccatgaacccgcagctggagaacagcggcttcgctttcttgtttgccacccaggtgctgccgccggtgctggcgatggcgatcctgattgccggcatgtcggccaatatgtcttccggcagctctgatgccatcgccgcggtgtccattatgctgcgcgacctctacaccctggtgaccggccatatgcccgcgccggagaaagcgattcgcctgtcgcggatcttcctggttctggtgattgcgctggcgctgctgtttgccctgacctccaacgacatcatcagctacatcaccaaaatgatctcgatgattatgtccgggatgtttatctgcaccatgcttggccgtttctggacacgctttaactggcagggcgcggtcgccgcgctggccggcggcgccggggcatcggttgcggtgctggtggatagcgactggctggcgttctggggcaacccgtgtattccggcggtgctgacgagcctggtggcctcggttgtggtgacgttactgaccccggccagcagcatgagccgcgagcaggcgctggagatgattacccgcgagcgtgaaagccgcccaacgccgccgccgctgccgattggcaaacgtcatacctcacgcgggtaa

SEQ ID NO: 210251 - DNA, 393 bp, Klebsiella pneumoniae
atgagtatcaagcgttatggcgtagaaggtggtaccggtaccggcgggcagcacctgccgttcgcgcgggcggtggaagcgggaggctggctgtacgtttccggccagacgccgatgaaaaatggcgaagtcgtggaaggcgggattgtcgaccagtcgcgtctggcgattcagaactgcgtagatatcatgaccgaagcgggctacaccctggccgacgtggtgcatgttaaagtgatcctcaccgatgcgcgctattttcagtcgttcaataaggtatttcgcgagttctttggcgacaacccgcctgcccgcatctgctgcgtagcggacctggtggtggattgtaaagtcgaagtggatgtgacctgttttaacgctgcgcgacaataa

SEQ ID NO: 210252 - DNA, 1440 bp, Klebsiella pneumoniae
atgaaagttgactggcttttcaaaaacgtcacggtgatcgacgggagcggcgggccgcaataccgtgctgatgtggcggtgaagggcgatcgaattatggctatcgccccggcgctggacgttgcggcggagcaggtgattgatggccaggggcgggtactggcgccgggctttattgatgtgcatacccatgatgatatcaacgtgatccgcatgccggagtacttgccgaagctcagccagggggtgacgacggtgatcgtcggcaactgcgggatcagtgcggcgaccgccaccatgcggggggaagtgccggacccgatgaatctcctcggcgagcagcaacactttatctatcccaccgtggaggcttatgcccatgcggtggaggcggcgcgaccgtcgctgaatgtcggtacgttaatcggtcacaccgcgctgcgcaataaccatatggacgatctgtttcgtccggcgaacgagacggaaatcgccggcatgcgcgtacagctacgcgatgcgctgcgccagggagcattagggctcagtaccgggctggcctacgccagcgccttccagtcgaccaccgaggaggtgatggcgctggcggaagagctggcggccgggaagggcgtctataccacccatttacgttcagagtttgagccgattctcgaggcgctggacgaagccttccgtattggccgtcacggcaacgtgccggtggtggtttcgcaccacaagtgcgccggggcaaaaaactgggggcgtaccaaagagacgctggcgtttttcgatgagatgcgccagcagcaggatatcgcctgcgactgttatccctattcagccagctcatcgacgctggatatgaaacaggtgaccgacgagtttgatatcgtgattacctggtctgaagcgcagccggagcaggcggggaaaacgctgcagcagatcgccgatgagtggcaggtgagcctgcacgacgccgcggcgcggctgatgccggcgggcgctatttatcacaacatggatgagcaggacgtacggcgggtgatgcgctatccggtcaccatgattggctctgacgggctgccgaacgatccgatgccgcatccgcgcctgtggggcgccttcccgcgggtgctcggccactatagccgcgacgagcagctattcccgctgactaccgcggtacacaagatgaccgggctgtcggcggcgcgcttccagctggcggatcgcgggctggtgaaaattggctactttgccgacctggtgctgtttgacccgcagacggtgcgcgatgtcgccagtttctccgacccgaaacgaccggcggacggcattgaggcggtgatggtcaacggcgtgatgagctacggcagtgataagaaaattaccggacgggcagggcgtttcctgcgtcgtcggatggactaa

SEQ ID NO: 210253 - DNA, 1221 bp, Klebsiella pneumoniae
atgaaataccattcagcaccgctcatcccgcacaaatccgccctcatgtccgcgccggctaatctgctggcggaagaggtctgtctacccgccgcgctgctaaaaaagtcggcgctggaaaataatatttcatggatgcagcgctacgccgacgcccgcggcgtatcgctggcgccgcatggtaaaacgacaatgacgccatggatatttcaggcgcagcagcgagcgggggcgtgggggatcggcgtgggcagcgcctggcaggctagcgcggcaatggccagcggcatccaacgcgtcctgatggttaatcagctggtcggcaaagccaatatgcaggtggtcgcgcagctaaaagcccactatcgggcggtggattttatctgctgcgtcgatagcgaggtcaacgtgcgcgccctctccacattcttcgcagaccagggacaaacgctggatgtgctgattgaacttggcgtgcctggcgggcgctgcggctgtcgtagcgtcaatgacgcgctggcgctggcgcagcgggtaagcgacctgccggggttacggctacgcggactggaactgtatgaaggggtgctgcacggcgacgatccgcagccgcaggtggaagcgctgttacagcaggccgcggcgcttgcctgccgcatggagccgctggttgacggcgaatttattctcaccggcgcgggcaccgtctggtatgacgtggtatgcaacatctggctggcggcggcaaaaccgcgccgctgccgtatcgtcatccgccctggctgttatatcacccacgatcgcgggatctacgatctcgcccaacaagagctgatcgcccgcgatccgattgcctgcgatctcgccggcgatcttacatcagcgctggagctgatggcgatggtgcaatcggtgccggaggcggatcgcgcggtggtaaacttcggcaagcgcgactgcgctttcgacgccgggctgccgcagccgatcgcccattatcgtaatggccaggagttagcgctgcgcgcggagtcgatcgtcagcaccggcatcatggatcagcattgtatgctgcgcctggcgccgggcagcgatgtgcaggtcggcgatattctgctgttcggtacctcgcacccgtgtctgacctttgataagtggaagacgttgctgctggtcgatgacgactacaacgtgctggacgagctcgacacgctgttttga

SEQ ID NO: 210254 - DNA, 1017 bp, Klebsiella pneumoniae
atggagtcggtaactctatcgttacctgaagcttatgacctggcgctggaggtactcagcgccaatggatttagcgccgaccacgcggcggcgattgcccgcaatgtgaccgccggggagcgcgacggctgcgcttcccacggcctgtggcggctgttgggcattgtcgataccctgcgcaaaggtaaggtatcgcccgatgccgagccgcagatccatgaccaggcgccggggattgcgcgggcggacgccgggggcgctttttcactgctggcctacgagcgcgcgctgccgctgctgctggagaaggcgcgccacaatggcattgcggcgctggcaattaatcgctgcgttcatttttccgcgctgtttgccgatattgagccgttgaccgaggcagggctggtagggctggcctgtacgccaagccacgcctgggtcgccccggcgggcggcacacgtccgctgttcggcaccaaccccatcgccttcggctggccgcggcgggataagccgccgtttattgttgatatggcgaccagcgccgcggcgcgcggcgagatccagctgcatcagcgcgccggcaaagcgctaccggaaggctggggaatcgacagtcagggacagccaacgaccgatgccgcagaggtgctgaacggcgcgatgttgactttcggcggccataagggctcagcgctggcggcaatggttgagctgttggccgggccgcttatcggcgatatgaccagcgccgaatcgctggcgtgggataacggcgcgggcggtctcccctacggcggcgagctgattctggcgctggatccgcagcgttttctcggcgcacaggcaccagagcagctggcgcgcgccgaaacgctgttcatgggtatgcaggaacaaggggcgcggctgccgggcgagcggcgttttgcctgccgccagcagagtgaacggcagggggtcattatcagtcgttcattgcatgatgagatttgcgccttgcgccggggcgggtaa

SEQ ID NO: 210255 - DNA, 288 bp, Klebsiella pneumoniae
atggcgtcggcgaagcgctgccagcgccgggagcggcgcttgctcaatgatattcgtcacgtcgcctccggcctggttcatcgtatccgccaccgcctgcaggccgcccgcgctgcagcagaggatcagtttctgccagtaaaccacgccgccgccgtcggcggtttcaaacagcacgctgtgcgcggaggggcgggcaatcagccgcgcgccgttcacctcccggatggcggcgatgtcgttggggatttactactggggcgcgcgcagctgcctgccgcaggctaa

SEQ ID NO: 210256 - DNA, 330 bp, Klebsiella pneumoniae
ttggcgtccctgccgggcgcggcgatgaagaagagtagcggttacggctcggcgctcagcctggcgagggcaataagcgtttccgcgcgggcgggggacagcggctctctcggctgcggcagcggccagccatacagccagcgggcgctgggtcagtttggcctgcagccagtcgtcggcggcagccacgtcgccgcagcgcacatcttcgcaacggcacagcaggctctccggcgtcgccgcgtttttcaaagattccgccagccggaaggcgcggtttatggcgtcggcgaagcgctgccagcgccgggagcggcgcttgctcaatga

SEQ ID NO: 210257 - DNA, 441 bp, Klebsiella pneumoniae
atgcatgattcattaaccattgccttgttgcaggcgcgtgaagcggcgatggcctactttcgaccgatcgtcaaacggcacaatctcaccgaacagcagtggcggatcgtgcgaattctcgccgaacgtccgtcgatggactttcacgatctggcctttcgcgcctgtatcctgcgccccagtctgaccggtattttgacgcgcatggagcgggatgggctggtgctgcgcttaaagccagttaacgatcagcgcaagctgtacgtctcgctgacgcctgccggaactgcgctgtacgaaagcgcccaggcggaggtggaagaaacctatcgcctgctggaggcccagttcaccacggaaaagctgcagcaactgacctccctgctggaggagtttattgcgcttggcgtccctgccgggcgcggcgatgaagaagagtag

SEQ ID NO: 210258 - DNA, 633 bp, Klebsiella pneumoniae
atgaaaggtaccatcttcgccgttgcgctcaatcatcgcagccagctcgacgcctggcgcgaggcgtttcaacaggccccctacaagacgccgccgaaaaccgcggtctggtttatcaagccgcgcaataccgtgattggcgatggcgaagccattccccatccgcagggcgagaccgtacaaagcggcgcgacggtggcgctgattgtcggcaaaaccgcgcgtaaagtggcggcggaagaggcggcgaactatatcgctggctacgcgctggctaacgatgtgagtctgccggaagagagtttttatcgtccggcgatcaaagccaagtgccgcgatggcttctgccccatcggcacgctatcggcggtacgcaacgtcgacgatctgaccatcatcaccgaaattaacggccgcgaggcggatagctggcataccggcgatctgcagcgtagcgccgcgcagctgctgagcgccttaagcgagttcgctaccctcaatcccggcgacgcgatccttatcggcacgccccactcccgcgtcacgctgcgccccggcgaccgcgtacgtattctcgccgacggtttcccggcgctcgaaaacccggttgtcgcagaaggagagctggcatga

SEQ ID NO: 210259 - DNA, 765 bp, Klebsiella pneumoniae
atgaaacaggcacgcattgaatggcagggacaggtacgcgacgtgctggtcaatgaacgcgaccaggtgcgcctggacgatggcacggtattaaaagaaggggaattccgctggctgccgcccgccaacggcacgctgttcgcgctggggctgaattacgccgaccacgccagcgagctggaatttaaaccgccaaccgagcctttggtattcatcaaagcgccgaacacctttactggccaccagcagcagtcggtacgcccggataacgtcgaatacatgcactacgaagccgaactggtggtggtgattgggaaaaccgcgcgccgcgtcagcgaagccgaggctatggattatgtcgccggctataccgtgtgcaatgactacgcgatccgcgactatctggaaaactactaccgcccgaacctgcgggtgaaaagccgcgacaccctgacgccgatcggcccgtggatcgtcagcaaagaggcgatcccggatccgcataatctggccctgcgcacctgggtcaacggcgagctgcgccagcagggcaccaccgccgatctgatcttcagcatcccgttcctcatcgcttatttaagcgaatttatgaccctgcaaccgggcgacatgatcgccaccggcacgccgaaagggctatccgacgtggtaccgggcgacgaggtgatcgttgaagtcgagggcgtgggccgcctggtcaaccatatcatcagccagcaagcgtatgaggagacactgtcatga

SEQ ID NO: 210260 - DNA, 1467 bp, Klebsiella pneumoniae
atgaaaaagattaaccattggatcaacggtaaaaacgttgccggcgcagactattttcataccaccaacccggccaccggcgaggtactggcggaagtcgcctccggcggcgaagccgaaatcaaccaggcggtagcggcggcgaaagaggccttcccgaagtgggctaacctgccgatgaaagagcgcgcgcgcctgatgcgccgcctgggggatcttatcgatcagaacgtcccggagatcgcggcgatggaaaccgccgataccggcctgccgatccaccagaccaaaaacgtgttgatcccgcgcgcctcacacaatttcgaatttttcgccgaagtatgccagcagatgaacggcaagacctatccggtcgacgacaagatgctgaactacaccctcgtgcagccggttggcgtctgcgcgctggtgtcgccgtggaacgtgccgtttatgaccgccacctggaaggtggcgccgtgcctggcgctggggaataccgcggtgctgaaaatgtccgagctgtcgccgctgaccgccgatcgtctgggcgagctggcgctggaagccgggatcccggctggcgtactcaatgtggtgcagggctacggcgccaccgccggcgacgcgctggtgcgccatcatgatgtgcgcgccgtctccttcaccggcggcaccgccaccggccgcaacatcatgaaaaacgccggtctgaaaaagtactccatggagctgggcggaaaatcgccggtgctgatttttgaagatgccgatatcgagcgcgcgcttgacgccgcgctgttcaccatcttctcgatcaacggcgaacgctgcaccgccggctcgcgcatctttattcagcagagtatctaccccgagttcgttaaacgcttcgccgagcgcgccaatcgcctgcgcgtaggcgatccgaccgatccgaacacccaggtcggcgcgctgattagccagcagcactgggagaaagtgtccggctacattcgcctcggcatcgaagagggggccaccctgctggccggcggcgcggataaaccgtccgacctgccggcgcatctgaaagccggcaacttcctgcgcccgacggtgctggcggatgtcgacaaccgtatgcgcgtcgcccaggaagagatttttggcccggtcgcctgcctgctgccgttcaaagacgaagcggaagggctacgcctggcgaacgatgtggaatacggcctggcgtcgtatatctggacccaggacgtcagcaaagtgctgcgtctggcgcgcggtattgaagccgggatggtgttcgtcaacacccagaacgtgcgcgacctgcgtcagccgttcggcggcgtgaaggcctccggaaccggccgcgaaggcggcgagtacagctttgaagtgttcgccgaaatgaaaaacgtctgcatctcgatgggcgaccatccgatcccgaaatggggagtctga

SEQ ID NO: 210261 - DNA, 858 bp, Klebsiella pneumoniae
atgggtaagttagcgttagcagcaaaaatcactcacgtgccgtcgatgtatctgtctgagctgccggggaaaaaccacggctgccgtcagggcgcgatcgacgggcataaagaaattggcaagcgctgccgtgaaatgggcgtcgataccattatcgtgtttgatacccactggctggtcaacagcgcctaccacatcaactgcgccgaccattttcagggcgtctacaccagtaacgaactgccgcatttcattcgcgacatgacctacgactacgacggcaacccggagctgggccagcttatcgccgacgaggcggtgaagctcggggtgcgtgccaaagcgcacaatattcccagcctgaagctggagtacggcaccctggtgccgatgcgctacatgaacagcgataagcacttcaaggtggtatctatctccgctttctgtaccgttcacgactttgccgacagccgcaggctgggcgaagcgatcctcaaagccattgaaaaatacgacggcaccgtggcggtgctggccagcggttcgctgtcgcaccgctttatcgacgaccagcgcgccgaagaggggatgaacagctacacccgcgaatttgaccatcaaatggatgagcgggtggtgaagctatggcgcgagggcaaattcaaagagttctgcaccatgctgccggagtatgccgactactgctacggcgaaggcaacatgcacgacacggtgatgctgctcggcctgctgggttgggataaatacgacggcaaggtggagtttatcaccgagctattcgccagctccggtaccggccaggttaacgccgtgttcccgttgccagcgcaggcgtaa

SEQ ID NO: 210262 - DNA, 381 bp, Klebsiella pneumoniae
atgccgcattttatcgccgaatgtaccgacaacatccgcgagcaggccgatctgcctgggctgttcgccaaagtcaacgaggcgctggccgccaccggcatctttccgatcggcgggatccgcagccgcgcccactggctggatacctggcagatggccgacggcaggcaggattacgccttcgtgcatatgaccctgaagatcggcgccgggcgcagcctggagagccgtcaggacgtgggagatatgctgttcgcgctgatcaaatcccacttcgcgacgctaatggagagccgctatctggcgctgtcgttcgccatggaagagctcgacccgacgctgaactacaaacaaaacaacgtgcacgcgttatttaaataa

SEQ ID NO: 210263 - DNA, 804 bp, Klebsiella pneumoniae
atgctcgataaacagacccgtaccctgattgcccagcggctgaaccaggccgaaaagcagcgtgaacagatccgcgcgatctcgctggattatccgtcgatcaccattgaggacgcctacgccgtccagcgcgagtgggtcgagatgaagatcgccgaaggccgcgtgctcaaaggccacaagatcggcctgacctctaaagcgatgcaggccagttcgcagatcagcgagccggactacggcgcgctgctcgacgatatgttctttcacgacggcagcgatattcccaccgaccgctttatcgtgccgcgtattgaagtcgagctggccttcgtgctggccaaaccgctgcgcggcccgaactgtacgctgtttgatgtctacaacgccaccgactacgttatcccggcgctggagcttatcgacgcgcgctgccacaacatcgacccggaaacccagcgtccgcgcaaagtgttcgacaccatctccgacaacgccgccaacgccggggtgatcctcggcggccggccgattaaaccggacgagctcgacctgcgctggatctccgccctgctgtatcgcaacggcgtaattgaagagaccggcgtcgccgcgggcgtactcaatcatccggccaacggcgtggcctggctggccaacaagctggcgccgtacgatgtccagctcgaagccgggcagattatcctcggcggctccttcacccgcccggtcccggcgcgcaagggcgataccttccacgtcgactacggcaacatgggcgccatcagctgccggtttgtctag

SEQ ID NO: 210264 - DNA, 798 bp, Klebsiella pneumoniae
atgaataacgcctttaaagacgccttaaaagcgggccgtccgcaaatcggcctgtggcttgggctgtgcagcagctacagcgccgaactgctggccggcgcgggcttcgactggctgctgatcgacggcgaacacgcgcccaacaatgtaccaacggtgctgacccagctgcaggccattgcgccctaccccagccagccggtggtgcgtccgtcgtggaacgatccggtgcagatcaaacagctgctggacgtcggcgcgcaaaccctgctggtgccgatggtgcagaatgccgaagaagcgcggctggcggtcagagccacccgctatccgccagccggcatccgcggcgtcggcagcgcgctggcccgcgcctcacgctggaatcgcgtcccggattatatccaccgggccaatgacgccatgtgcgtgctggtacagattgagactcgcgaagcgctgaaaaatctgccgcagatcctcgatgtcgacggggtagatggtgtgtttatcggcccggcggatctcagcgctgatatgggccacggcggcaatccgcagcacccggaagtgcaggccgccattgaagatgccatccagcaaatccgtcaggccggtaaagcgccggggatcctgatggctaatgaacagctggcgaaacgctatctcgaactgggcgcgctgttcgtcgccgtcggcgtcgataccaccctgctggcccgcggcgcagaagcgctggcggcccggtttacccacaacgcaaccaccacaaccgataacaataaatccgtctattga

SEQ ID NO: 210265 - DNA, 1359 bp, Klebsiella pneumoniae
atgactacctctaccctgcaacacaatgataataaagccgttgaagtagaaaaccgagtgatcaaaaagctgttccgccgcctgattaccttcctgtttgttctctttgttttctcatttttggatcgaattaatatcggcttcgccggtctgacgatgggtaaagatctcggcctgacctccaccatgttcggcctggcggcgacgctgttctacgtcacctacgtgctgtgcgggatccccagcaatatcatgctggcgaaagttggcgcgcgccgctggatcgccgggatcatggtggtctgggggatcgcctcgacctgcaccatgttcgccaccagcccgcatacgctgtacatcctgcgcatgctggtcggcatcgccgaggccggttttctgccggggatcctcgtctatctgacctggtggtttccggcctaccatcgcgcccgcgccaacgccctgtttatgatcgccatgccggtgaccatgatgctcggctcgatactttccggctatattctggcgctcgacggcctgtggaacctgaaaggctggcaatggctatttctgctggaaggcctgccgtcggtggtgctcggcgtcgtcacctggttcttcctcaacgacacgccggataaagccaactggctggataacgaagagaaacaggcgctgaaggcgatgatcgatcgcgaacgggaacatgcggcgatcgtcccggcttcgccgcgttccacgctgcgcgaagtactgacgccagcggtgctgatgtataccctcgcctacttctgcctgaccaataccctcagcgccattaatatctggacgccgcagatcctgcagagcttcaacaccggcagcagcaacatcatgattggcctgctggcggcgatcccgcagttctgcactattttcggcatgatctggtggagccgccgatccgaccgccgcaaagagcgcaagatgcataccatcctgccctacctgttcgccgcggcgggttggctgctggcttcggcaacgcaccatagcctgatccaactgatcggcattattatggcttcggtgggatcctttaccgcgatggccattttctggaccaccccggatcgggtgatcagcctgcagtcacgcgcggtggcgctggcggtgatcaacgctatcggcaacgtcggctctgccgtcagcccgctgttgatcggcattttgcgtgataccaccggcagctttagctccgggctgtggtttgtcgccggattactgatcgtcggcgcgctggtgcttacccgcattccaatgagccagcgtgaggacgccgccgccgcgccgggattagcggcgcaaaaaggccactaa

SEQ ID NO: 210266 - DNA, 891 bp, Klebsiella pneumoniae
atgtgccagcattcaatcgccaacatcgacatcaataaagattacgacgagagtctgggtaccgaagaggtgcactaccagtcgttctcccgcatggcggccttttttggccgcgacatgcaggcgcatcgccacgaccgctatttccagatgcactaccttgataccggacagattgagctgcagcttgatgaccaccgctattcggtgcaggcgccgctgtttgtgataacgccgccctcggtgccgcacgcctttattaccgagtccgatagcgatggtcacgtgttgacggtccatgaggagctgatctggccgctgctggaggtgctttatcccggcacgcgggagaccttcggcctgccggggatctgcctgtcgctggcggataaacccgacgagctggcggcgctggcgcactactggcagctgattcgccgggagtccaccgcccagctaccggggcgggagcataccctggcgctgctggcgcaggcggtctttaccctgctgctgcgcaacgccaggctcgacgatcatgccgccagcgggatgcgcggcgagctgaaattattccagcgctttaaccagatgatcgacagccactaccatcagcactggacggtaccggattacgccagggagctgcatctaaccgaatcgcggttgaccgatatctgtcgccgctttgccaaccgttcgccgaagcggctgatatttgaccgtcagctgcgcgaggcgaagcgcctgctgctgttttccgatagcgcggtcaatgagattgcctggcagctggggtttaaagaccccgcctattttgcgcgcttttttagccgccaggtcggctgctcgcccagcagctaccgggcgcaaaaagtaccggtgtcgtaa

SEQ ID NO: 210267 - DNA, 1563 bp, Klebsiella pneumoniae
atgaaacctgaagatttccgcgccgacgcgaaacgcccgttaactggcgaagagtatttaaaaagcctgcaggatggccgcgaaatttatatctacggcgagcgcgtgaaagacgtcaccacgcatccggccttccgtaatgccgcggcctccgtcgctcagctgtacgatgcgctgcacaaaccggagatgcaggattccctgtgctggggcaccgataccggcagcggcggctacacccataaattcttccgcgtggcgaaaagcgccgacgatctgcgccagcagcgcgacgccatcgccgaatggtcgcgcttaagctacggctggatgggccgcaccccagactacaaagccgccttcggctgcgcgctgggcgccaacccggcgttttacggccagttcgagcagaacgcccgcaactggtacacccgcattcaggaaaccggcctgtactttaaccacgctatcgtcaacccgccgattgaccgccacaagccagctgatgaagtgaaggatgtctacatcaagctggaaaaagagactgatgccgggatcatcgtcagcggcgcgaaagtggtcgccaccaactcggcgctgacccactacaacatgatcggcttcggctccgcacaggtgatgggcgagaacccggacttcgcgctgatgttcgtcgcgccgatggatgccgaaggcgtcaagcttatctcccgcgcctcctatgagatggtcgccggcgcgaccggatcgccgtacgactatccgctttccagccgtttcgacgagaacgacgcgattctggtaatggataaggtgctgatcccatgggagaacgtactgatttatcgcgactttgaccgctgccgccgctggaccatggaaggtggtttcgcccgcatgtacccgctgcaggcctgcgtgcgcctggcggtaaaactggactttatcaccgccctgctgaaacgctctctggaatgtaccggcaccctcgaattccgcggcgtgcaggccgaccttggcgaagtggtggcgtggcgcaatatgttctgggcgttaagcgattctatgtgctcggaagcgacgccgtgggtcaacggcgcatggctgccggatcacgccgcgctgcagacctatcgcgtgatggccccgatggcctacgccaagatcaagaacatcatcgagcgcaacgtcaccagcggcctgatttatctgccgtccagcgcccgcgatctgaacaacccgcagatcgaccagtatctggcgaagtacgtgcgcggctccaacggtatggaccacgttgaacgtatcaaaatcctcaaactgatgtgggacgccatcggcagcgaattcggcggccgccatgaactgtatgagatcaactactccggtagccaggatgaaattcgcctgcagtgtctgcgccaggcgcagagctccggcaatatggacaaaatgatggcgatggtcgaccgctgcctgtccgagtacgaccagaacggctggacggtgccgcatctgcacaataatgctgatatcaacatgttggataagctgctgaagtaa

SEQ ID NO: 210268 - DNA, 513 bp, Klebsiella pneumoniae
atgcaattagatgaacaacgcctgcgttttcgcgatgccatggccagcctgtcggctgcggttaacgttgtcaccaccgcaggcgaagccggccgctgcggcattaccgccacggcggtatgctcggtgacggatacgccgccatcggtgatggtttgtatcaacgccaacagcgcgatgaacccggtgtttcagggtaacggcaagttgtgcatcaacgtgctgaaccacgaacaggaaatcatggcccgtcatttcgccgggatgaccggggtgacgatggaagagcggtttgccctcagcggctggcagcagggcgcgctcgggcagccggtgctgaaaggttcgctggccagtctcgaaggcgagattagccaggtgcaaaccattggtacccacctggtgtatctggtggagatccgcaatattaccctgagcccgcaagggcacggcctgatttactttaaacgccgtttccacccggtgatgatggaaatggaagtcgcagtctaa

SEQ ID NO: 210269 - DNA, 822 bp, Klebsiella pneumoniae
gtgagaatatataagattttttttagaagtattgccatggtcattatggttatgatcctttctgattgtcgtcagtcgtattatattgccagaaatacggggcgcaatataatgaccttatccgaccatcagcgcgctaaatcggcgttaaacgctaacgatttaaatgcagctcagggctacctgacgggagaaaaatacaataatcgctacaggcctgttagcggtgaggaatcctggggaagtttacaatatcgggcggcgaaaatcgtcgccaacgccgcggcgaacggtcaaaaagtgcgtgatgatgcgctctatctcgcttatatctctttgtttgaagcagaagagggagtgcccgaacatcccgatattatgttgggttacatgcataaagccatggcgctactgttagcgaatccgcaattactcgataaaatcgattctaaaaatgtcagtactttacccagccagtttacccttgaacgctatgctgtatggcaatatttatacgatggcggcgagattgactggaccaaaaaagcgcctgaaggtgaaggttatacaattgctggtgaaagctatcagacctggaatatcaagttaaaaaaagccatctggaatcggggagacgcttttttaacaaatataggtaaacaacaatttattcatgacgctatagattattcgcaatttccggttattgcctgtaccgccaggcgaaaaggctggcacttaacattacctgctgactaccgggaacaaaatttccgcggcggtggacgttttgattgggcttcatgtcgcgctgttgaataa

SEQ ID NO: 210270 - DNA, 624 bp, Klebsiella pneumoniae
atgaaatttgtaaagataatgatcatcgccagtgctttttacttaacatatgctcatgcaagagagatacatcaggctgttgatgagccggcagccccttataatttgcgctgggggatgagttacgatgaggccagaaacacgcctttatattctctggaggtatcagatatcaattatgccggaaaagacccggatctgattatctcaacgctgactccccaggaagtgggggcgttgaaatatcaggagatgaagctttattttgataagaataaagggctgaaaagtgtttttgttagcgctgatgttgattccagtcagcaggcctataaagttgatgatggccgggaagcactcgccttatataatgaggaagttaaggttcttgatcgagaatatgggccagcgacaatcaaagaagagttcattgcagaaaaagggaaattctatcaaagtctttccgcctgcattgcaaaacagcaggagtggtataataaaagattagatctgaataaaataaaaaaatgttcaacctggcaacgtacttataaaaaaggtcgggtaaccgttttgctatacatcgaaccgagacaagtttccaaacattatatttataaataa

SEQ ID NO: 210271 - DNA, 2151 bp, Klebsiella pneumoniae
atggataccaaaaaactattcaagcacataccctgggtgattctcggaatcatcggggcattttgcctctcagtcgtcgccctacgccgcggtgagcacgtcagcgccctgtggatcgtcgtcgcatcggtttctgtgtacctcgtcgcctaccgttattacagcctgtacatcgcgcagaaggtgatgaagcttgacccgacgcgctccacgccggcggtcattaataacgatggcctgaactatgtgccaaccaaccgctacgtgctgtttggccaccactttgccgcgatcgccggcgctggcccgctggttggcccggtactggccgcgcagatgggctatctgccgggcaccctgtggctgctggccggcgtggtgctggcgggcgcggtacaggacttcatggtgctgtttatctcctcgcggcgtaacggcgcctcgctgggcgagatgattaaacaggagatggggccggttccgggctctatcgccctgttcggctgcttcctgattatgatcatcatcctcgcggtgctggcgctcatcgtggtgaaagcgctggcggaaagcccgtggggcgtgtttaccgtctgctcgacggtgcctatcgccctgtttatggggatctacatgcgcttcctgcgcccaggccgcgtcggtgaagtgtcggttatcggtatcgtgctgctggtggcctctatctggttcggcggcgtgattgcccacgacccgtactggggcccggcgttgacctttaaagataccactatcacctttaccctgattggctacgcgttcatttccgcgctgctgccggtatggctgattctggcgccgcgcgattatctggccaccttcctgaaaatcggcgtaatcgtcggcctggcgctggggatcgttatcctcaacccggacctgaaaatgccggcagtgacccagtacattgatggtaccggtccgctgtggaaaggcgcgctgttcccgttcctgtttatcaccatcgcctgcggcgcggtctccggcttccacgcgctgatcgcctccggcaccacgccgaagctgctggccaacgaaaccgatgcccgctttattggctacggcgcgatgctgatggaatcctttgttgcagtcatggcgctggtcgccgcctcgattatcgaaccgggcctttatttcgcgatgaacaccccgccggcaggcctgggcatcgtcatgccgaacctgcatgaaatgggcggtgaaaacgcggcgatgatcgcagcgcagttgaaagaagtcaccgtccacgcggcggcgaccgtcagctcctggggctttgtgatttcacctgagcagatcctgcagacggcgaaagatatcggcgaaccttcggtactgaaccgcgctggcggcgcgccgacgctggccgtcggtatcgcccacgtattccataaaatcatcccgatggcggatatgggcttctggtaccacttcggtatcctgtttgaagcgctgtttatcctcaccgcgctggatgcgggtacccgcgcaggccgctttatgctgcaggatctgttgggtaacttcgtgccgttcctgaaaaaaaccgactcgctggtcgccgggattatcggtaccgccggctgcgtcgggctgtggggctacctgctgtatcagggcgtggtcgacccgctgggcggcgtgaagagcctgtggccgctgttcgggatctctaaccagatgctggccgccgtggcgctggtgcttggcaccgtggtgctggtcaagatgcagcgcaccaaatatatctgggtcaccgttatcccggcggcatggctgctgctgtgcaccacctgggcgctgggcctgaagctgttcagcagcaacccgcagatggaaggcttcttctttatggctcagcagtataaagagaagattgccgccggcggcgagctgaccgcgcagcagatcgccaacatgaaccatatcgtggtcaacaactacaccaacgccggcctgagtattctgttcctggtggtggtgtatagcatcatcttctacggcatcaaaacctggctcaatgtccgcaacaataaggtgcgtaccgacaaagagactccgtatgtgccggtaccggaaggcggcgtgaagacctcgtcacatcattaa

SEQ ID NO: 210272 - DNA, 204 bp, Klebsiella pneumoniae; identical to SEQ ID NO: 139580

SEQ ID NO: 210273 - DNA, 957 bp, Klebsiella pneumoniae
atggcaccgattgcagtcaccctactcaccggttttctcggcgcaggaaaaaccaccctcctgcgccatatcctcaatgagcagcacggtttcaaaatcgccgtgattgaaaacgaattcggcgaagtctccgtcgacgatcagctcatcggcgaccgcgccacgcagattaaaaccctgaccaacggctgtatctgctgtacacgctccaacgaactggaagacgccctgctcgatctcctcgacagtcgcgatcgcggcgaaatcgagtttgaccggctggtgattgaatgcaccggcatggccgacccggggccgattatccagacctttttctcccatcaggtgctctgcgagcgctatctgctggacggcgtgatcgccctggttgacgccgtccatgccgaccagcagatggatcagttcaccatcgcccagtcgcaggtcggctacgcggaccggatcctgttaaccaaaaccgacgtcgccggcgacaccgaaaagctgcgtgaacggctggcgcgcattaacgcgcgggcgccgatttataccgtcattcacggcgatatcgatttaagccagttgtttaacaccagcggttttatgctggaagagaaggttgtcagcgccacaccgcgctttcattttgtggcagaaaaacagaatgacgtctcgtcgattgtggtcgagctcgactatccggtggatatcagtgaagtttcacgggtaatggaaaatctgctgctctccttcgccgagcaattgatgcgttataaaggcatgctgtggatcgacggcgagccaaatcgcctgctgttccagggcgtgcagcgcctctacagcgccgactgggatcgcccgtggggcgatgaaacgccgcacagcacgctggtgtttatcggcattcagttgccggaagaggaaattcgcgcggcgtttgccggtttacgacgctaa

SEQ ID NO: 210274 - DNA, 159 bp, Klebsiella pneumoniae
atgagaaagcttaacatccttattcttgcagccctgaccgcggtctctggttccgccatggcggtggggtttaccgttgaacagggtaaaaacttcactaatctgaatatggaaatgggtaaatcctcttctggcctgtacgccgaaagccactgctga

SEQ ID NO: 210275 - DNA, 354 bp, Klebsiella pneumoniae
gtgggcgcgggttacaacctggaagtgggcccggtgatgctcaacgccggcgcgaaagccatctacctcgggccgaaaaaaggcgataacggcgtcgcgtttccggtcggcggcggggtgaacgtgaccctgaccgacagcatccacgtgtttggcgaagggtatgtcgcgccggatggtctgaacaacagcgtgaaaaactatgttgaagcgaacggcggcgtgagctggtctccgattggtccagtgacgttgaaagtgggttaccgccatgtgagcgttgacggtaaagagggtcgcccgaaccacaccctgattgatggcgcctatgtgggcggcggggtcaccttctga

SEQ ID NO: 210276 - DNA, 1371 bp, Klebsiella pneumoniae
atggcctatcagacggtgaatcctgcgaacaatcagcttattaaaacgtacccggcgcacagcgatgcggacgtggaggcggcgctgcagcaggcggatgcgctctaccattctgcctgggcaaaaggcgatattgaaccgcggctggcggtactgcataagctggcggatctgatcgatagccgggcggaggagctggcaaaaatcgctagccaggagatggggaaactcattaagcagagccgcggcgaagtgaaactttgcgctcagatcgcccgctattacgccgataacgccaaatcgttcctggcgccggtgaagtatccctccgaactgggtgaagcctgggttgagcaccatcccattggcgtcttactggcggtggagccgtggaacttcccctattaccagctgattcgcgtccttgcgccaaacctggcggccggtaacccggttatcgccaaacacgccagcattgtgccgcactgcgcggagacctttgcccatctggtgcgtgaggccggcgctccggagggggcgtggaccaacctgtttatctcccaggatcaggtggcgaagattatcgccgacgatcgcgtgcagggcgcggcgctcaccgggtcggagaaagccggcagcgtggtggcggcgcaggcggcgaagcatattaagaaatcaacgctggaactgggcggcaatgatgtgtttgtcgtgctggacgatgccgacctggagcgcgcggtgaaaatcggcgtccaggcgcggctgaacaacgccggccaggtgtgtaccgctgccaagcgctttatcctgcacgaaaatatcgcggatgcgttcctgacaaaatttagcgaggcgtttcgccaggtgaaaatcggcgatccgctggatgaaagcaccacgctggggccgctctcttccaaagatgcgctggataccctaagcaaacaggtggacgaggcggtgaaaaatggcgctaagctgcatctgggcggcaaagcggtggctcgagaaggcaatttctttgaacccaccattttgaccggtatcacccgtgataatccggcgtacttcgaagagttctttggcccggtggcgcagatctacgtggtgaaaaacgatgaggaggcaatccagctggccaatgattcccactatggtctgggcggtgcggtgttcagtcaggatatcgaacgcgccaaacggatggcctccgccattgaaaccggaatggtttatatcaactggctcaccgataccgcgccggagctgccgtttggcggcgtgaagcgttccggttacggacgggagctctccgatctcggcatcaaagagtttgtgaaccagaagctggtggtggtgcgccgctaa

SEQ ID NO: 210277 - DNA, 927 bp, Klebsiella pneumoniae
atggcaaagggcaccacctcgacgccgcatgatgcggtgtttaaacagttcctcactcaggccgacaccgcgcgcgattttctggcgatccatctaccgcctgcgctgcgtcagcgctgcgacctcgataccttacagctggaatcggcaagctttatcgaggagagcctgcgggcctggtactccgatgtgctgtggtcactcaaaaccgcctctggcgagggctacatttatgtggttatcgaacatcagagctcgccggatgcgcagatggccttccgcctgatgcgctacgccatcgccgcgatgcagcgccatcttgatggcggtcatacaaaactgccgctggtggtgccgatgctcttctatcacggagcgaccacgccatacccgtggtcactcaactggctggactgttttgccgatccacagctggcgagtgagctttatatctcgccctttccgctggtggatgtcacggtgatccccgacgatgagatcgttcgccaccggcgcgtggaattactcgagctgatacagaagcatattcgccagcgcgatttaatgggcattgttgagcaactgacgacgattttacttagcggggacgctaatgacagacagctaaaaacgctgtttaattatctgctgcagactggcaacgcgcgccgctttggccggtttatccacgaagtggcgcaacgggttcctcagcacagggagagattgatgactattgctgaaagattacaggaagtgggccgcagaaaaggcaaacgggaaggccggcttgaaggcagacaagaaggacagcatgccgaggcgctgcgcattgcccagaggatgctggccgacggcattgcccgcgagacggtggtgaaaatcaccggcctgaccgccgacgagatcgccgcgctggcgcattga

SEQ ID NO: 210278 - DNA, 816 bp, Klebsiella pneumoniae
gtgaaccatacccgagatatcccccaaaccttctggcgagacgatcgtctgccgtggctggagctgcgcagcacctggcgcagccgccaggcctataagcaccacagccacccccagctctcggtgggggcgattatcgagggggaaacgcgctgcctgtgcgctggccaggagtacctgctgcaacccggggatctgatcgtgatcccgccgcacgcgccgcatagctgtaatccgctgcatggcaggccgcgcagctatcacatgctttacctggacgcgacatggtgccacgcgcagcgcccggatattccccctggcgccagtatcacctcgccgcagccgctgctgcgcgacagccctctctttgccagtttccagcaggttgtcgccctgatgagccgcgggagccttgaacaactgcccgcccggctggcgcaactcctgcacgcgctgccgctgtgcgccgccgcgccgcaggcgccacatcacgccagcgccctgctgtttcagcgcctggcgatggatctgccggcgtcgccgtcgctggataagctggcccacgacagcgcgcttcgtaaagagaccgttatccgcgccgtgaaacaagataccggcctgacgcccgctagtttgatcaacatggcgcgcatcgaatatgcgaaaacgcgcttacgcgccggggatcctatcgccgacgtcggctatcaggctggctttgccgatcagagccatttccataaaacctttgtcagctataccgccgccacgccgcggcagtatgcgcaaagcagatcaatatctgacaataagtaa

SEQ ID NO: 210279 - DNA, 663 bp, Klebsiella pneumoniae
atgcataccttatcgacgctctttcccgccgtcttcccggcgctagccctgtcccactttgtcgctctgctcagtccgggccctgatttttttctgctggtcggctacgccgtgcgctaccggatccgcggcagcatcggattgtgtctcggcatcgccgcaggcaatgcgctgtatattgtgctcgccatcgtcggctgggggcttctgcgccaggcgccgctgctttttttgctcatcgagctgctgggggcgggctatttattgtggattggcagcctgctgatacgcagccgtcccgcgacgctggcgatggagagcgttcgcgcagcgcgtccggggttcggcaggcagctgctgctagggctggggtcatcgctgctcaaccccaaaaacgccctgttttatctggcgctgatgacttccctgctcggggcggctgtgaccctgcttcagcaaacggtgagcgggctgtggatggtcagcgtggtgttcttctgggatttactgctggtgagcgcgattgcgctgccacagatacagcgccgcctgggcgccatcgtctggcgagtcgagcgggcggcgggggcgatcctgatgctcttcggcctggggattatctggcgatttttgcacgacctcgccgtcaggctatatgcttaa

SEQ ID NO: 210280 - DNA, 1293 bp, Klebsiella pneumoniae
atgcttaagcatatggaaaaactcgctgaactgaaacgcgccaaactgctggcgctgtcgctgctgctgattgcagccgccatttttatcactaccctcgcgctaccaccgtcgccctgggtcggtgcgctaaaagctatttccgaagcggcgatggtcggggcgctggccgactggtttgcggtcgtggctctgtttcgccgtattccgctgccctttgtcgcccgccatacggcgattattccgcgcaataaagaccgcatcgccgacaacctcggccgctttgtcgaggaaaagttccttgataccccgtcgctggtcgcgctgatccgccgctatcagccagccctgatgctcggcaactggttcagccagccggagaacgcccggcgggtcggccagcacctgctgcaggtgatgagcggttttctcgaactgaccgatgacgcgcgcattcaacgtctgctgcgacgcgcggtgcataaggctatcgataaggtcgacctgacgcagaccagcgccatgatgctggaggggctgacccgcgacaatcgccatcaaaagctgctcgattcgctgataaaccaactgattgccctgctgcagcgcgacagctcccgcgcctttatcgcccgcggcatcgtacactggctggagaccgaacacccgctgaaggccaaactcctacccaccgagtggctcggcgagcacagcgctgagatggtcaccgacgcggtgaataccctgctggacgaggtgactcacgaccgtacgcatcagatccgtcagacttttgaccgcgccgtgcaaaagcttatcgataacctgaaatccgacccggatatggcgcagaaggccgataacatcaaagcctggctaaaaaatgatgagacctttaaccactatcttggcgaagtatggggcgacctgcgcggctgggtaaaaaacgatatcagcagcgacgactcacgtattaagcagcgtatcgccgaggcggggcagtggttcggtgaaaccttactccgcgacgacgcgctgcgcgaatcgcttaacgaacacctggagcaggcggcgcaccgggtggcgccggagttcgccgccttcctcacccgccatatcagcgacacagtgaagagctgggacgcccgcgatatgtcgcggcagatcgagctcaatatcggtaaagatctgcagttcatccgcatcaacggtaccctggtggggggaaccatcggcctgttgttgtggctgctctcgcagatcccctcgctgctgcatctgcatattggttag

SEQ ID NO: 210281 - DNA, 1242 bp, Klebsiella pneumoniae
atgatgcacaggatttcccactggctgagccgacacgccgccgcgctgttcttcccggcggcgttaattctatatgatttttccgcttatctcactaccgatctgatccagccggggatcctgcacgtggtgcgggatttcaatgctgatgtggcgctggctccggcctcggtgagcctgtatatggccggcggcatggcgctacagtggctgctggggccgctctctgaccggataggacggcgtccggtgctgctcaccggcgcgctgattttcaccctcgcatgcctggcgaccctattcaccacctccatgacgcagttcctgattgcccgcttcgtgcagggcaccagcatctgctttatagccaccgtcggctacgtcaccgtacaagaggcctttgaggaaaaaagatcgatcagactgatggctgtgatcacctccgtcgtgctggtggcgccgatcgtcggtccgctctccggcgcggcgctgatgcatttcattcactggaaagcgctgttcggcattatcgccgccatgggattggtggcctggctcggcctgctgttgaccatgccggagacggtgcgccgcggcgatgtgccgttcagccccgtgggcgtgctgcgcgattttcgcaacgtctttcgcaaccgcatctttttactcggcgccgccacgctgtcgctgagctatattccgctgatgaactgggtggcggtatcgccggtgattttaatggacgccggcggactgaccaccagcgagttcgcctggagccaggtgccggtcttcagcgccgttatcatcgccaacctgtcggtggcgcgctgggtaaaagaccccacccgcccgcgctttgtcctcagcgcggtgccggtacagatgctcggcctggccatcctgatcgttggcaatctggtatggccccacgtctggctgtggtcggtgctcggcacctgcttctacgccttcggcatcgggctgattttcccgacgctgtttcgctttaccctcttttccaacgacctgccgaaaggcacggtctccgcctcgctgaatatcgtgatcctcagcgtcagcgcgttatcaattgaaggcgcgcgctggctgtggttccatggcggcagactccccttccacctgttggcggtggccgccgggattgtcgccgcctgctgcctggccggactgttacgccaccagcgcggacaagcggtgatcgaagcccggcagtcgtga

SEQ ID NO: 210282 - DNA, 240 bp, Klebsiella pneumoniae; identical to SEQ ID NO: 135831

SEQ ID NO: 210283 - DNA, 1152 bp, Klebsiella pneumoniae
atgtcgcttatcaccgatctacccgccatttttgaccagttctcagaagctcgccagaagggctttctcaccgtcatggatcttaaagagcagaacgtaccgctggtgggcacttactgcacctttatgccccaggagatcgccatggcggcgggcgccgttgtcgtctcgctgtgctcaacctccgatgaaaccatcgaggaagcggaaaaagatctcccgcgcaacctctgcccgcttatcaaaagcagctacggcttcggcaaaaccgataaatgtccctacttctatttctctgacctggtggttggggaaaccacctgcgacggcaaaaagaaaatgtatgagtacatggccgagttcaaggcggtccacgtcatgcagttgccgaacagcgccagcgatgccgcctcgcgcgcactgtggaaaacggagatcctgcgcctgcagcaggtgattgaggcccgatttggcacgccgattagcgaggcggcgctgcgcgaagccatcgtgttgaaaaatcgcgagcgccgggcgctggcccacttttatcgtctcgggcagctcaatccgccggcgctcagcggcggcgacatcctgaaagtggtgtacggcgccacttttcgtttcgacaaaaccgccctgattgatgaactgcatgccatggcggagcgcatccatcaggagtggcagcagggtaaacggctggaacctcgtccgcggatcctgatcaccggctgcccgatcggcggcgcggcggaaaaagtggtccgcgccatcgaggaaaacggaggctgggtggtcggctatgagaactgcaccggcgcgaaagcgaccgagcgctgcgtggcggaagagggtgacgtctacgacgccttaaccgataaatatctcgccatcggctgctcctgtatctcccccaacgaccagcgtctgcagctgctgagccagatggtggaggagtatcaggccgacggggtgatcgacgtcattttgcaggcctgccatacctatgccgtggaatcgctggcgattaaacgccatctgcgccaacagcacgatcttccttacatggcgattgaaaccgactattcgacagcggacctcggccagctcagcacccgcgtcgccgcctttatcgaaatgctgtaa

SEQ ID NO: 210284 - DNA, 768 bp, Klebsiella pneumoniae
gtgaactatacggttggcattgattccggctccaccgccacaaaaggcatcctgctggcggacggcgtcatcgtgcgccgcttcctctgccccaccccctttcgccccgccgacgccatccacgaggcctgggagacactgcgcgctggcctcacggagacgccttttttaaccctcaccggctatggccgccagctggtggattttgccgataagcaggtgacggagatctcttgtcacggcctcggcgcccgcctgctggcgccggacacccgcacggtgattgatatcggcggccaggacagcaaagttatccagctggacgccgggggcaacctcagcgacttcctgatgaatgacaaatgcgccgccggcaccggccgctttctggaagtcatttcacgcaccctcggcgccagcgtcgaacaactggacgccattaccgacggcgtggaaccgcacgccattaccagtatgtgcacggtgtttgccgaatcggaggtcattagcctgcggtcggccggcgtcgcgccggaggcgattctggccggggtgattaacgccatggcccggcgcagcgcgaactttattggccgcttatcggcgcaggggccgctgctgtttaccggcggcgtcagccactgcgccgcctttgcccggatgctggaaagccatgtcggcatggcggtgacaacccatcccgacgcccagtttgccggggcgatcggcgcggcgctgatcggccagcgccagcggaggcgcggatga

SEQ ID NO: 210285 - DNA, 255 bp, Klebsiella pneumoniae
atgacaacgtttctgtttttatttcactccacggtgggggtggttcggatgcgcaaagccatgcaggcggcgggagtagccttcgaggtcaaagatataccccgccagctgcgcagcggctgcgggctgtgcatcctgctggaggggacggaagccgatgcgcgaggctggatcgtcccggaacagacggcggcgctgtatcagcagaacggggaagcatggcgctgtctcgccaccttcccacctgcaggttaa

SEQ ID NO: 210286 - DNA, 1065 bp, Klebsiella pneumoniae
atgtctattaataccctggcgcatgtctttaccccgcacggcaatatcgtctacacggcgaatgattttcgccagacggtgcgtatcgccgtggccgggaccattgcgctcagcatctccaccttctacgacgtacagtacggcgtatttttcgtcgtttatccgctgatgctgatgtcgctggtaccgatgttcaacctgcacgtcgcccgccagtttatatttagcgcggcggtaaactgtgtcgaaatggtgctaattgtcggctatttgtcgcagtggccggtgatcatgaccctggtggtgtttgccctgtacgtgatgcgtttccgctttatgagccagggaccgctgttcctgttgggatcaatgggggtggtgtgccagagcacgatgctcaactttatgagctatcccaccagcaactggcacaccctgatgttctccaatatggaagcctgcgtgatggccgtggcgctgagcgcgctgctgcattacctgatcccggacgtcgaaccgcgcaagccgccgccgcggattgagaaagacgccgcccgcatccgtcatgagtcgctgctctccggtacggtagcgacgatcatctttgtggtgtttcagatctgcgatctcagcgactcgctgtcggcgctgatggccgggatcctgatcctgttcccgatgcactatcgtggggcggtgatcagctcgatctggcgcgtcgtcggggtggtgctggcctgtctctatatactggtggtgcagctgattatctatgatttcagcaaccacatgatcctgatgatgccgctgattggtctcgggctggccttcagcgcccgcctacacgtgatggagaaagtgggcgccggggtgggcttcgccagcatcactaccatcggcattatgttcggccagaatttacatccgtatcaggatctggtgttcagcgatctgtaccgcatcacctcggtgacggtctcgctggtggtgacgctgaccctggtttttctcatgcaccgcctgctgaactgtttcgcggcgacgcgttttgtggtgagcgattaa

SEQ ID NO: 210287 - DNA, 1068 bp, Klebsiella pneumoniae
atgatgacgcctgaacaaaaatttgcccgctgggtacgggtgagtattgccgcttttctgggaatattcgcctggtttatcgttgccgatatctggatcccgctgacgccggactccaccgtcatgcgcgtggtgaccccggtttcgtcgcgggtctccggctatgtctcgcacgtctacgtgcacaacaacagccaggtgaaaaagggcgacctgctgtatgagctcgacccaacgccattcattaataaagttgaagcggcgcagatcgccctcgagcaggcgaaactgagcaaccagcagctggacgcgcaaatcgccgccgcccgcgccaacctgcgcactgcgcagtacaccgcgcgtaacgataaggtcacgctcgatcgctaccagcgcttgagtacgatgcagaacgtctcgcagtccgacctcgataaggtgcgaaccacctggcagaccagcgagcagtcggtctcggcgctgaacgcgcagatccagaacctgctgatccagcgcggcgagcgcgacgataagcgcaacgtcaccctgcagaaataccgcaacgcgctggaggaggcgcagctgaacctggcctggaccaaagtgcgtgcggaaactgacggcatggtcagcaacctgcagctgaacccggggatctacgccaccgcggcgacggctgtgctggcgctggttaacaacaacactgacatcgtcgccgacttccgcgaaaaaagcctgcgccacaccgcggtgaataccgatgcggcggtggtctttgacgccctgccgggtcaagtcttcccggcgcacgtgaccagcagcgacgccgggattctggcgggacaggaggcggtgaacggccagctgtcgcagccggagcagtccacccgctgggtgcgcgacgcccagcggatgcgcattcacgtcgcgctggatcagccgctggacaaaccgctgccgaccggcgcccgcgctacggtgcagctgtacaatagcgagggaccttttgcccgcaccttcgccggcctgcagatccacctggtgagctggttgcactatgtctattaa

SEQ ID NO: 210288 - DNA, 465 bp, Klebsiella pneumoniae
gtgactgaagacgaactgtttgcccgccgcccgctggggatgcggatggctatggtggtgcgccagtggcgcgccattattgacttcgctatcaccgataccggactcacccagtccagctggacggtgctgatgcaactgcatcagctgggagacaacgtctcggtcagcgaactggcggaggtgcagggcattgaactgccgccgctaatgcgcaccctctcattactggaaaagcagggctatctggtgcgttccacatcgccatatgacaaacgcattcgcctgctgacgctgaccgctgaggggcgggctattctggaaaaactgagctgcgtgatcgagacctatcaggagcgcgtaacccagaccatcccggaggccgatctcgctaccttcagcgccacgttaaatcaaatcgcctgccgtttgcggaatatccgcgaagaagataacaagatctaa

SEQ ID NO: 210289 - DNA, 165 bp, Klebsiella pneumoniae; identical to SEQ ID NO: 135824

SEQ ID NO: 210290 - DNA, 1413 bp, Klebsiella pneumoniae
atgacccgctaccaacatctcgctacgctgctggccgaacgcatcgaacagggcctgtatcgccatggcgaaaagctgccgtcggtgcgcagcctgagccaggagcacggcgtcagcatcagcaccgtccagcaggcctatcagctgcttgagcagcagcagatgattgtgccgcagccgcgatcgggctatttcgtcgccccgcgcaaagcccagccgccggtgccgccgatgtcgcgtccggtccagcgcccggtggagataacccagtgggatcaggtgctgaccatgcttgacgcccgctacgataaatcgatcatccccttcggcggcggctcgccggacgtgacgcagccaagcctgaagcccatctggcgtgaactgagccgggctatccagcacaacctcactgaggtgttgaactatgacgaactggccgggcgtcgcgagctacgggagcagatcgcccgcctgatgctcgacggcggatcggtggtaactgccgacgatctggtgctcaccagcggctgccacagcgcgctgtcgctggccctgctgtcggtgtgccagccaggggacatcatcgccgtggaatccccctgctactacggcaccatgcagatgctgcgcgggctgggattaaagacgattgagatccccaccgatccggaaaccgggatcagcatcgaggccctggagctggcgctggatcagtggccgatcaaaggggtgatcctcgtgccaaactgcaataacccgctgggctttatcatgccggacgcccgcaagcgcgcggtgctgaaccttgcccaacgctacgatatcgttattttcgaggatgatatttacggcgagctggccaccgaatacccgcgcccgcgcacgatccactcctgggatatcgacggccgggtgatgctctgcagctcctttaccaaaaccatcgcccccgggctgcgtatcggctggatcgcccccgggcgctactacgacaagctgctacagatgaagtacgccgccagcgggaccaacgtcccctccactcagctggcggcctgcaattttattcgcgaaggccactaccaccgccacgtgcggcggatgcggcagatctatcagcgcaatatcgagatctacacctgctggctgcgggaatttttcccctgcgggatctgcgtcacccggccgaagggcggttttatgctgtgggttgagctcccggagcaggtagatatggtctgcgtcgccaagcagctgtgccggctgaagatccaggtcgcgccgggctcgctgttttcggcagcgggcaagtatcgcaactgcgtcaggatcaactgcgccctgccgccgaccgaaaaacataaagcggtgatggtgaagctgggagaagcggtgaaggtggcgatggagtga

SEQ ID NO: 210291 - DNA, 420 bp, Klebsiella pneumoniae
atgctgagtggactgaatcacctgaccctggcagtcagccagctggcgccgagcgtggcgttttatcagcagctgctgggcatgacgctgcatgcccgctgggacagcggggcttatctctcctgcggcgatttgtggctgtgcctgtcgctggatccgcagcggcgcgttactccgccggaagagagcgactacacccattatgcgtttagtattagcgaagccgattttgctagcttcgccgcccgccttgaggctgccggcgtggcggtctggaagctgaaccgtagcgaaggtgcctcgcactatttcctcgatcccgatggccataagctggagctgcacgtcggcagtctcgcccagcggctggccgcctgccgcgagcagccgtataaggggatggtgttttttgaacagtga

SEQ ID NO: 210292 - DNA, 909 bp, Klebsiella pneumoniae
gtgattattttacagcgtctggatctcaatctgttgcgcaccctggatgtgctgcttagcgaaaacaacgttacccgggcggcgcagcggctgaatctgtcgcagccctcggtaagtattcagctcgccaggctgcgggagattttcgccgatccgctgctgatgccgggcccgcgcggcatgcagcccaccgcccgcgccgatgagcttcgccagccgctgcgcgccgcattagccgcgctggagcaggcggtggcgccggtcagcccttttgatccggccacggcggcggagacctggcgggtggcggcgacggactatatggcctcggcgatcctcctgccgatgctggctgggttacgccaggcctctcccggcagtcggctggcggtattcgaactgcagccggcgcggctggagcagcaggcggccagcgatacagtagatcttttctttcatacccgcgagggcgcgccgccggggctgcatcagcgcctgctgtttcgcgaacgctacgtgctggctggccgggcggaacattcggcgctgcggcctgggcttagcctggaaacgttctgtcagctggagcacgtgatcgtctccccggacgggggcggcttcagcgcggcgaccgatatcgcgctggcgaacctcggactgatgcggcgggttgtcctttccgtgccacatttcctgtttatgctggagaccctgcgcaatagcgatctggtggcggtcctgccggagcggctggtgcgcgggcagagcgggctggtggtcgtcgagccgccgctggcggtcgccggctttgagatgctgatgctgtggcacgagcgctggcaccgcgacccggcgcatcaatggctgcgtcagttcattgtgaattcactggaggaacagacatgctga

SEQ ID NO: 210293 - DNA, 783 bp, Klebsiella pneumoniae
atgaaagtactgctgatttacgcccatccggaaccgcgctcgctcaatggcgcgctgaaaaatttcgccgtccgccatctgcagcaggccgggcatgaagtgcaagtctccgatctctacgccatgcgctggaaggccgggtatgacgccgacgacagcggcgccccgccggtcggcgagttctggcggccgaccctcgattccaaacaggcctttgcccagggcacccaaagtgcggatatcgcagccgagcaggaaaagctgctgtgggccgatacggtgattttccagttcccgctatggtggttctcgatgcccgccatcatgaagggctggatcgacagggtgtacgcctggggctttgcctatggcgtcggcgagcacagcgaccgccactggggggatcgctacggggaaggcactttcgtcggcaagcgggcgatgctgatcgtcaccgccggcggctgggcggaacactattcaccgcgcgggatcaatggccccatcgacgacatcctgttccccattcagcacggtatgctgttctaccccggctttgaggtgcttccgccgctggtgttctaccgcacggataaaaccgatgccgggcagttcgccgatcagtgcgccgccctggccgagcggctggacacgctgtggcaaaccgagcccattccattccgccgccagaatcatggcgattatctgatcccgtcgctgacgctgcgcccggagctggcgccagggcaaagcggcctggcggtgcatttgcgtagcgaataa

SEQ ID NO: 210294 - DNA, 957 bp, Klebsiella pneumoniae
atgaaaaaatcgtggcgcaacaacgttgagttttacctgatcggcctgctgctgctgatggttatcgcctttagcatcgccatgccaaacatcttctggtctgtcagcaatttccagtcgattgcctcgcaaatgccggtgctggggatcctggcgctggcgatggccatgactatgctttgcggcggcattaatttgtcaattatcgcgacggctaacgcctgctcgctggtgatggcctgggtggcgacgagctatccgcctgggggcgctaccgcgctggcgacgctgctggccggcggaggggcggcgatgatcattggcctgtgcaacgggatattgatcgccgggatccgcgtttcgccgatcctggctacccttggcatgatgaccctgctcaaagggataaatattctgatcaccggcggcagcgccatcgctaactatccgcagtgggtgctgtggctgaatcacgcccagtggttcggtattccgctgccaatgtggctttttgcggtggtggcggccgggctgtgggtgctgctggagaaaagcccgctgggtcgggcgatcatgttgatcggatccaacgaacgggcgacccattattccgggatcaatacccggcgggtgttgatgtgggtatatgtcatctcggccctgctctgcgcggtggctgcgtttctgatgatgtcgaagctgaactcagccaaagcatcttatggggaatcgtatttgctggtgtcgatcctcgcggcggtgcttggcggcgtgaatccggatggcggtagcgggcgcatcgttgggatggtgctcgcgctgttcctgctgcagattattgagagtgggttcaatatcctcggtatcagcccctatctgacgatggcgctgtggggcgtattgctgctgtgctttatccaggcgcgaggcatgctgggactggagagagccgggtaa

SEQ ID NO: 210295 - DNA, 972 bp, Klebsiella pneumoniae
atggctaatctgttgaaacgacatgaattctggttaggcatgttcattattgcgctgtgcctgctgctgggctggcgcagtgaggaatttttcactttcggcaatctttacgacctcgctaataactatgcgatgctgaccattctcgcctgtggtctgttcgtggtgctgatcgccggcgggattgatatctccttcccggctatgaccattatcgcccagtacggcatggtggtgatgctgcaaaaagtaggcggcaacttcgcggtggcttttgtgcttgccggcggcatcggcgtgctgctggggctggtgaacgcgctgttggttaatcgtctgcgggtcccctcgatcattatcaccatttctacgctcaacattttctacggtttgctgctgtggttaagcaaaggtgtctggctctacgacttccctccgtggtttgaaaagggggttatgctgttcaaatataccgatgccgatggttacgattacggcctggggctgccgctgctgacgatgatcgtcgtggtgctgttgaccgcgtttatcatgaatttcactaccgttggccgcaagatctatgccatgggcggcaaccgggaatccgccagccgcgtcggcttcagcgtgctccgcctgcagctgttcgtttatggctatatggggctaatgtcgggggccgcaggtgtcgtgcaggcgtggacagtgatgaccgttgcgccggattcactgctgggctatgagctgacggtgctggcggcggtggtgctgggcggcaccagcctgattggcgggcgcggaactctcaccggtacgctgctgggggtgattttactggcggtgatgcagaacggcctgaacctgctaggggtctcctcctactggcagaccctgatcactggggcgatcatcgtcgtcagcatcagcgtaacggcatggagccagcatcagaaccggagcttgttatga

SEQ ID NO: 210296 - DNA, 1485 bp, Klebsiella pneumoniae
atggaacctttcctttcccttcgacacgtcagcaaaaccttccacgccaaccgcgcgctcaatgatatcagcatcgactttatgcccggagaagtgcactgcctggccgggcagaacggttgcgggaagtcgacgttgatcaaaattatctctggcgtctatcgcccggatgtgggcgcagcgatgacgctgggcggcaagacgtggcccaaactgacgccagcggcctctgtcgcccatgggatccaggtgatttatcaggatctgtcgctgtttcccaatctcagcgtgtgggagaacattgctataaaccactatcatcgcggcgtactggtgaggcgcagcgaactgcgacgcagtgcggagcaggcgatgcgcagtattaacgtctcgctgccgctggatgccgccgtggaatcgctctccatcgctcgctgtcagctggtggctatctgccgcgcgctggcgcaggatgcccggcttatcattatggatgaacccacggcctcattgacccatcaggaagtggagggactattgcatgtggtgcgccagctgcgtgagagggggatctgcatcgtcttcgtaagccaccgtctggaagaggtcatggccgtatcggaccgcatcagcgtgctgaaggatggcaatctggtcggcaccttgccggcggcagaggtaaccacccgccggctcggttttctgatgacgggccaggagtttgactatcaggtgcgcgatctgtggcaggggcagggcagtacgccggtgctggaggtgcgcaatctcagccgcaaaggggaatatcataacgtctccctgaaggtcgaagccggagaagtggtgtcgatagtcggcctgttgggcgccgggcgaacagagctgtgcctgagccttttcggcatgacccgccctgacagcggcgagatcctgataaatggccagccggtgcggttgcgtagcaatcaggacgctatccgccacggtatcggctatgtctccgaggaccgtatgtcgcgcggcctggtgatgagtcagtcgattgaaaacaacattatcagcaccgtgtttcataaagtgaaaggcgcttgcggactattgagtgatagtaaagctcagcagctggtcgcaagaatggtcaacgcgttgaccattaaggcgccggatacgcatctgccggtgaataccctctccggtggtaatgcccagcgcgtttctatcgccaaatggctggcgatctctcctaagctgctgatcctcgatagcccaaccgtgggggtggatatcgcaaacaaagccgggatctatcatatcatcagcgatttggctgcccatggtatcgccgtgctgatgatttgcgacgagattgaagaggcgtggtaccagagtcatcgcatcctggtgatgaagcagggcgagttgacccatagcttcctgccggacagcagtacccagcagcagatagcggaggtggtcaatggctaa

SEQ ID NO: 210297 - DNA, 984 bp, Klebsiella pneumoniae
atgcataaacgtctggtcgttaatattttttcatcattgctgttgggggctgcgcttatttccgcgccggtatatgcggcggaaaaaaccgtagtcaatatttcaaaagtggacggcatgccatggtttaaccggatgggtgaaggggtagtccaggccgggaaagagtttaacctcaacgcctcccaggtagggccgtccagcaccgatgcgccgcagcaggtgaaaattattgaggacctgattgcacgtaaagtggatgccatcactatcgtgcctaacgatgccaacgtgctggagccggtattcaaaaaagcccgtgacgccggcatcgtggtgctgaccaacgaatcgcccgggcagccgagcgccaactgggatgtggagatcatcgataacgagaagttcgctgctgaatacgtggagcatatggccaagcggatggggggcaaaggcggctacgttatctatgtcggtagccttacggtaccgcagcacaacctgtgggccgatctgctggtgaaataccaaaaagaacattacccggacatgcatgaagtcacccgccgaatgccggtggcggaaagtgttgatgattcccgccgtaccacgctcgatctgatgaaaacttacccggatctgaaagcggtggtctcttttggttcgaatggcccgattggcgcggggcgcgcggtgaaagagaagcgtgcgaaaaataaagtcgcggtctacgggatgatgatcccctcgcaggcggcttctcttattaagagcggcgatattaccgaagggatcacctacgatccggcgacagccggctatgccctcgcggccgtcgccagcaccctgctgaacggcaaaaccattgagccgggatttgaactgaaagagctcggtaaagcggaagtcgatagcgacaagcatattatccgcttccataaagtgctgctggtaaataaagacaatattgattcgctctactaa

SEQ ID NO: 210298 - DNA, 1008 bp, Klebsiella pneumoniae
atgaaccatccacaaaccatcctcaccggcgaccgcccgaccggccaacttcatcttggccactacgtcggctcgctgcgccagcgcgtcgcgctgcagcataaccaccagcaatttatcctgatcgccgacctgcaagggctcacggacaacggcagcaatccgcaaaaaatcagccaccatatcctcgaagtcatggccgattatctggccgtcggcatcgaccccaggctcaccactatttgcctgcagtccgccctgccggcgctggcggagctcagcgcgctgtatatgaatatcgtcaccgtcgcccgcgtagaacgtaatccgacggtcaaaaatgagattgcccagaagggattcgcccgctcgctaccggtgggttttcttgcctatccgattagccaggcggccgatatcaccgcgttcaaggccgaactggtgccggtgggcgacgatcagctaccgatgattgagcagaccaacgagatcgtccacaagatgaatagcctcaccggcgagccggtgctgcgccactgcaaggcgctactcagcgaagtgagtcgcctgccgggcgtcgatggcaacgccaaaatgtcgaaatcgctgggcaatacgctgacgttatcggccacagaggaggagatccaccacgcggtcagcgcgatgtataccgacccgacgcacctgagagtcagcgatccggggcatgtcgagggcaacgtggtgtttacctatctcgatgcattccacagcgataaggtgcgggtggcagagatgaaagcccactatcagcgcggcgggctgggcgatcgccagtgtaagaatgagctggaaacctgcctgcagacgctactggcgccgatccgcgaacgcagggccacttttattcaggataaagggatgctgctggagctgctgcgccagggcagcgaacgcgcccaccacctcacacagcagacgctgcatgaggtgaagcgtgggctgggtctgcctgtgctgttctga

SEQ ID NO: 210299 - DNA, 1068 bp, Klebsiella pneumoniae
atggacaaaataaagaaacgttgggcagggtattttgtcggcttactggtggtgctcgccgccgccgcatggtggctgctgcgcccgccgggactcccggcggggtttgccagcagcaacggccgaatcgaagccaccgaagttgatattgccagtaaaatcgccgggcgtatcgacaccattctggtcaaagagggtcagttcgtgcaccagggagaggtgctggcgagaatggatacccgggtactgaacgagcagcgtcttgaagccgccgcgcaaatcaaggaagcggaaagcgcggtcctggccgccagagccttgctcgatcagcgacaaagtgaaatgcgtgccagcgaagcggtagtgaagcagcgccaggcggagctggattccacggcgaaacgccatgttcgctccaacaccctctcccagcgtggcgccgtctccgcccagcagctggatgacgatcgcgcggccgcagagagcgcccgcgcggcgctggaatcggcgaaagcccaggtctccgccgcccgcgccgccatcgaagctgcccgcaccagcattattcaggcgcaaacccgcgtcgaagccgcccaggcgaccgagcggcggatcctcgccgatattgacgatagcgagctgaaagccccccgcgatggccgcattcagtatcgcgtcgctgagccaggcgaagtcctggccgccggtggccgggtactgaacatggtcgatctcgccgatgtctatatgaccttttttctgcccaccgaacaggcaggtctgctggcgctcggcagcgaagcgcgcttggtccttgatgccgcgccggatctggtgatcccggccaatatcagctttgtcgccagcgtcgcccagttcacgccgaaaacggtcgagaccagcgacgagcgcctgaagctaatgttccgcgtcaaagcgcgtatcccgccggagctgctggcgcaacacctggagtatgtcaaaaccggcctgcccggtatggcttacgtacggctggataaacaacaaccctggcctgaagccctggcggtgaggttgccgcaatga

SEQ ID NO: 210300 - DNA, 2745 bp, Klebsiella pneumoniae
atgaaactaacgccgcaggatacctcgccccccgtcgccctgctggaacatgttggtcagcagtttggcgccaccatcgcgctgcgcgatatcagtctggcgatcccggcacggcgtatggttggcctgattggcccggacggcgtcggcaaatcgagcctgctttcgctgatcgccggggcgcggaccatcgagcaggggaacgtgatggtgcttggcggcgatatgcgcgatgtgcatcaccgccgcgaggtgtgtccgaaaatcgcgtggatgccgcaggggctggggaaaaacctctatcacactctctcggtgtatgaaaacgtcgacttcttcgcccgcctgttcggccacgataaagccgagcgcgaactgcgcatcaacgagctgctgcagagtaccgggctggcgccgtttcgcgatcgccccgccggaaaactctccggagggatgaagcaaaagctcggcctgtgctgcgcgctgatccacgatccgcagctgctgatccttgatgaaccgaccactggcgtcgatcccctctcccgggcgcaattctgggagcttatcgacagtattcgccagcgccagccggcgatgagcgtgctggtggccaccgcctacatggaagaggccgagcgatttgactggctggtggcgatgaacgccggcgaggtgctggcgaccggcagcgccgcagagctcaaagcccagaccggcagccagaccctggagcaggcgtttatcgccctgctgccagaagcacagcgtcaggcgcatagggcggtagttatcccaccgcgcgacagccgtgaggaagagatcgccatcgaagcgcgcggcctgaccatgcgctttggcaactttgttgccgtcgaccacgttaatttccgcatcgcccgcggtgaaatcttcggcttcctcggctccaacggctgcggcaaatccaccaccatgaagatgctcaccggcctgctgcccgccagcgaaggtgaagcctggctgttcggccagccggtcgacccgaaggatatcgccacccgccagcgggtgggctatatgtcgcaggccttctcgctctatagcgaactgaccgtccggcaaaacctcgagctgcacgcccgcctgttccatattccggacggcgaaatccccggccgggtggcggaaatgtgcgagcgctttatgctgaccgaggttgaagacgcgcttcccgccgatctgccgctggggatccgtcagcgcctgtcgttagcggtggcggtcatccatcgcccggagatgctgatcctcgacgagccgacctccggcgtcgacccggtggcgcgggatatgttctggcagctgatggtagacctcgcgcggcaggatcaagtgaccatttttatctccacccactttatgaatgaggcggaacgctgcgatcgtatctccctgatgcacgccggcaaagtgctggccagcgatacgccgcaggcgctggtcgagcagcgcggttcaaacagcctggaagaggcgtttatcgcctggcttaaagaggcccagccgtcctctccagtaccagaagaacccacgtctgctgtggcatcgtattcccgacacacgactccacggcaggccttcagtcttcgccggctgtttagctatagccgccgcgaggcgctggagctgcgccgcgatccggtacgatcgacgctggcgctgctggggacggtgatcctgatgtttatcatggggtatgggatcagcatggacgttgaggatctgcgctttgccgtcctcgaccgcgatcaaaccctcagcagccagggctggtcgcagaatctcgctggctcacgctactttatcgaacaggcgccgctgcacagctatgacgaactggaccgccggatgcgcgacggcgagctggcggtggcgatagagatcccgccgaactttggccgcgatatcgcccgcggcacgccggtgcaaatcggcgtgtgggtggacggcgcgatgcccaaccgcgcggaaaccgtgcgcggctacgtacaggcgatgcatctggcctggctgcaggagatggccggccgccagagcagcccgcggcgcgatacctcgctcatctccatcgagacccgctatcgctacaatccagatgtgaagagcctgccggccatcgtcccggcggtgatcccgctgctgctgatgatgatcccggcgatgctcagcgccctgagcgtagtgcgtgagaaagagctcggatcgattatcaacttgtacgtgacgccaaccacccgcagcgaattcctgctcggcaagcagctgccttacatcgtactggggatgtttaacttcttcctgctgtgcgcgctgtcggtctttgtctttggcgtcgcgcataaggggagtttcctgacgctgaccctggcggcgctgctgtatgtcaccatcgccactggtctggggctgctgatctcaacctttatgaagagccaaatcgccgctattttcggtaccgcgattattacgctgatcccggcaacccagttttccggaatgatcgatccggtggcctcgctggaaggtcccgggcgctggattgggcaaatctacccgaccagccacttcctgactatcgcccgcgggaccttttcgaaagcgctgaatattagcgatttgtggggctcattcattccgctactgattgcggtgccgctggtgctcgggttgagcgtgctgctgctgaagaaacaggagggatga

SEQ ID NO: 210301 - DNA, 1125 bp, Klebsiella pneumoniae
atgcgcggattacgcaatatttataatcttggcgtcaaagaactgcgcagcctgctcggtgataaagctatgctggcgctgatcgtgtttgcgtttaccgtgtcggtgtactcctcggccacggtgatgcccggttcgctgcacctggcgccgatcgcggttgctgatatggataaatcccagctctcctcacgcattattaacgctttttaccgtccctggtttcttgagccggagctgatcaccgctgatgagatggacgccgggctggatgccgggcgctacacgttcgccatcaacatcccgcctaacttccagcgcgatgtactggccgatcggcagccggaaatccaggtcaacgtcgacgccacgcgcatgagtcaggcctttaccggcaacggttacatccagaatattatcaccggcgaagtaaacagttttatcgcccgctatcgggataacagcgtgctgccggtagagctggcggtcaggatgcgttttaatcctaaccttgagcaggagcgctttggcgcggtgatggcgatcatcaacaatatcaccatgctggccattgtcctcaccggttcggcgctgatccgcgagcgggaacatggcaccattgagcatctgctggtgatgccgatcacgccgtttgaaattatgctggccaagatctggtcgatgggcctggtggtgctggtggtctccgggttgtcactgatactgatggtacaggggattttgcaggtgcccattgaagggtcgattcccctgtttatgctgggggtggcgctcagcctgttcgccacgacctcgatcggcatttttatgggcaccctcgcccgctcgatgccgcagctggggctgctgatgatcctggtcttactgccgctgcagatgctctccggcggatccacgccgcgagaaagtatgccgcagctggtacaggatattatgttgaccatgccgaccacccacttcgtcagcctggcgcaggcgatattgtatcgaggcgccagcttcgccatcgtctggccgcagttcttaaccttgctggctatcggcggagtgttctttactatcgcgttgctgcgttttcgtaagactattggtgagatggcataa

SEQ ID NO: 210302 - DNA, 318 bp, Klebsiella pneumoniae
atgaaaatcctgcttaactggtcgccattgcgccagctcttcacttacattcaggagcgctttacctttctggtgctgctctgctggccagcgattatctggttgttctgccgggtcggcgtgtggctcaccgataacgtttatgaactgctgggaaaatcaccagcccagtccttcaccgtgtatctgcagccgtttatgacccccggcacgctgctgcgcatctccatcagctgggtggtgttgctgttcattctcttcagtatggcgatggccttcacctggggtttacgtcgctttatgaatcgccataaataa

SEQ ID NO: 210303 - DNA, 885 bp, Klebsiella pneumoniae
atgagcgtctggcacatgcaaccggatctcgccgccagccggcggcagcataagcagctctatcaggtccaggggcgctacctgcgctacgtcgggctggtggcgctggcctgcctgctctattacgtctggttttttctgcagttcggcgtcagcggcgagcagctgaccaccggcctgcagcagattggccgctacctggcgcggatgttcgtctggcacgacttctggaactggccgttcggctattactttacgcaaatcggcgtcaccctggccatcgtcttcgccgggacgctgaccgccacggtgctggcgctgctgctctccttcttcgccgcccgcaacatcatgcgcggcgtggtgctggggaccctagccctgctgatgcgccgcctgtttgatgtactgcgcgggatcgacatggctatctgggggctgattttcgtgcgtgcggtcggcctcgggccgctggccggggtgctggcgatcatcatgcaggacaccggcctgctgggacggctgtacgcggaaggtcacgaagccgtggaccgatctcccgggcgtgggctgaccgccgcgggcgcgaacggcctgcaaaagcatcgctttggcatttttacccagtcgttcccgaccttcctcgcgctgagcctgtatcagattgaatccaacacccgctccgcggcggtgctgggcttcgtcggcgccggcggtatcgggcttatctatgccgagaatatgcgtctgtggaactgggatgtggtgatgtttatcaccctgctgctggtggcggtggtgatgatcatggacaccctttccgcctggctgcgccgtcgctatatcggcggcgccgcggtgccgctgtatcagggcggacgctag

SEQ ID NO: 210304 - DNA, 873 bp, Klebsiella pneumoniae
atgaagacaacccacaccgaatttgaacgctattaccagcaggtacgctcgcggcaaaagcgcgatgccgtctgctggtcgctgctgctgctggcgctctattttgccgccggcagcgccgcggaatttaatctgctgactatctggcactcgctgccccacttctttgactatatggcagagaccattccgcccctgagcgccggcaacctgttcgccgatgtgcagaccaaagggtcgctggcctggtggggctatcgcctgccgatccagctgccgctgatctgggaaaccctgcagctggagctggcctcgaccctggtggcggtcgccatcgccacggttttcgcgtttcttgccgccaataacgcctggtccccggcgccggtgcgctttgccattcgcgtgctggtggcgtttttgcgcaccatgcccgagctggcgtgggcggtgatctttgtgatggcgttcggcatcggcgcgatcccgggctttctggcgctgatgctgcataccgtcggcagcctgaccaaactgttctacgaggcggtggaaagcgcgcaaaacaaaccggtacgcggcctggcggcctgcggcgcgtccccgctgcagaaaattcgcttcgccctctggccgcaggtgaaaccgctgtttctctcctatggctttatgcggcttgaaatcaacttccgctcgtcgaccattctcgggctggtgggcgcgggcggcatcggccaggagctgatgaccaacatcaagctcgaccgctacgatcaggtgagcatcaccctgctgctgatcattctggtggtgtcggcgctggacatgctgtccggtcgtctgcgcctgtgggtactggaggggaaaaaatga

SEQ ID NO: 210305 - DNA, 939 bp, Klebsiella pneumoniae
atgaaaaaatatatgactggcgcagttcgtttatccgcaatggtcgcgggcatgatgatggcatggcaggcagcggcggcgcagccgaaagagctcaatctgggcattctcggcggccagaacgccacccagcaaatcggcgataaccagtgcgtgaaggccttcctcgataaagagctgaacgtggataccaaactgcgcaactcttccgactattccggggtgatccagggcctgctggggggcaaagtcgacgtggtgctgagcatgtccccctcctcctacgcctcggtttatctcaataatccaaaagcggtggatatcgtcggcatcgccgtggacgacaaagatcagtctcgcggctatcactcggtggtgattgtcaaagccgactccccgtacaaaacgctggacgatttaaaaggcaaagccttcggcttcgccgatccggattccacttccgggtatctgatccctaaccatgcgtttaaagaaaaatttggcggtaacgccgacaacaaatacaacaacaccttctccagcgtcaccttctccggcggccatgagcaggacatcctcggcgtgctgaatggccaattcgcgggcgcggtcacgtgggcctcgatggttggcgattacaacaccggctacactaccggcgcgttcaaccgcctgattcgcatggatcatccggatctgatgaagcagatccgcattatctggcaatcgccgctgatcccgaacggcccgatcctggtgagcaatgcgctgccggcggactttaaggcgaaggtcgtggcggcagtgaaaaagctggacaccgaggatcacgcctgctttatcaaagcgatgggcggtactcagcacatcggcccgggcagcgtggctgacttccagcagattattgatatgaaacgcgagctggtgagcgcgcgttaa

SEQ ID NO: 210306 - DNA, 843 bp, Klebsiella pneumoniae
atgaacagctctcttgccgcggtggccgaaactgatttccagccgttcaccgatcccgctgccggccggcagcggaaggtcttaagcgtgcgtaatctgagtaaagcttatcaagcccagcacaaggtgctggacggcatcagctttgatctgcacgccggggaaatggtcggggtcattggccgctccggcgccggtaaatcgacgctcctgcatgtcctcaacggcacccacagcgccagcggcggagaaattcttagctacccggaagtcggtaccccgcacgatgtctcacagctgaaaggccgcgcgctcaatgcctggcgtagccactgcggaatgatttttcaggacttctgcctggtgccgcgcctcgacgtgctcaccaacgtcctgctgggccgcctcagccagacttcaaccctgaaatcgctgtttaaaatctttcccgcagccgaccgggcgcgcgccattgcgctgcttgagtggatgaacatgctgccgcacgcgctgcagcgggcggagaacctctccggcgggcagatgcagcgggtggcgatctgccgggcgctgatgcaaaaccccgggatcctgctggccgacgagcctgtcgcctcgctggatccgaaaaacactcagcgcatcatggatgtgctgcgcgagattagcgagcagggtatcagcgtgatggtaaacctgcattcggtggagctggtcagggcctactgcacccgggttatcggcgtcgccagcggccagcttatttttgacgatcacccctcccggctgacgcaggatgtgctgcagcggctgtacggcgatgaagttagccaattgcattaa

SEQ ID NO: 210307 - DNA, 543 bp, Klebsiella pneumoniae
atggaatataaaagctgttccgataagtatatttggtctgccgatgactcctatttctataaaggactgtccgaactgattgtagacatcgacgaattaatttatctctcactggagaaaatcagaaaagattttgtgtttatcaatctcaatacggcttcattaaacgaatttatcaggcgcgacagcgaatggctatccgcggtaaaggggaaacaggtcgtattgattgcggccaggaaatcagaggccttagcgaactactggtattacaatagcgatattcgcggggtggtatatgttggtctgagtcgcgatattcgaaaagaactggcctatgtaattaatggcaggtttctccgcaaagatattaagaaagataaaattacagatcgggaaatgaaaattatccgcatgaccgcccagggcatgcagccgaaatcgatcgccagaattgaaaattgtagcgtgaagacagtgtatacccatcggcgtaatgctgaggccaaactgtattccaaaatatataagttagttcagtaa

SEQ ID NO: 210308 - DNA, 588 bp, Klebsiella pneumoniae
atgaaaaaaaaggttctggcaatagctctggtaacggcgtttaccggtatgggcgtggcgcaggctgctgacgtaacggctcaggctgtagcgacctggtctgcgaccgctaaaaaagacaccaccagcaagctggttgtgaccccgctcggcagcctggcgttccagtacgccgaaggcattaaaggctttaactcgcagaaaggtctgtttgacgtggcgattgagggggacacaacggcgaccgcctttaagctaacctcgcgtcttatcaccaacaccttaacccagctggatacctccggctccacgctgagcgtgggcgtggattataacggcgccgcggtggaaaaaactggcgataccgtgatgatcgataccgccaacaatattatgggcggcaacctcagcgcgctggctaatggctacaacgccagcggccgtaccaccgcgcaggatggtttcactttctccatcatcagcggcaccaccaacggcaccaccgccgtgaccgattacagcaccctgccggaagggatctggagcggcgacgtcagcgtacagttcgacgccacctggaccagctga

SEQ ID NO: 210309 - DNA, 669 bp, Klebsiella pneumoniae
atgaaaaagcaccttctggccctcgggctgctgcttgccggggcgtcgccggcgcaggcgctggatgtcggcgatatttcatcctttatgaacagcggcagcagcacgctgagcaaaacgatcaagaacagcacagacagcggtcgactgatcaatatccatctcgaacggctctcttccccgctggacggcgggcaggttatcccgatggacaaaccggatgaggtgctgcttacccccgccagcctgctgctacccgcccaggccagcgatgtcatccgcttcttctacaaaggcccggcggatgacaaagagcgctactaccgcattgtctggttcgatcaggcgctcagcgatgcccagcgcgataacgctaaacgcagcgcggtggccacggcgtccgcccgcatcggcaccattctggtggtggcgccgcgtcaggtgaactaccgctttcagtacgccaacggctctctgaccaacaccgggaatgcgacattgcggatcctcgcctacggcccctgcctgaaggccgccgacggtaaggagtgtaaagagaattactacctgatgccgggtaaatcgcgccgttttacgcaggtgaatacggcagataaaaaaggacgggttgcgctttggcagggtgagcagtttgttcccgtgaaatag

SEQ ID NO: 210310 - DNA, 2526 bp, Klebsiella pneumoniae
atgcctctacgacggatttccccaggactgaaaacgcggcttgccttcggcatgatatttttgttcgttcagcccgacgccagcgcggctgccccaggcgcgcagcagattggcggggtgattattccgcaggccttcagccaggcgctgcaggacggcatgagcatcccgctctatattcatcttgccggcagccagggcatcaaggacgatcagcggatcggcagcgcctttatctggctggacggcggccagctgcgcgtccggcagatccggctggaggacagtgaaggtaacgccagcgtcagtgaacagacccgtcagcagctgatcggcctggccaacgccccgttcagcgaggcgctcaccattcccctgaccgacagcgcccagctggatcttagcctgcgccagctcctgctgcagctggtggtcaagcgcgaggcgctgggcaccgtgctgcgctcgcgcagcgaagacatcggtcagtccagcgtcaataccctcagcagcaacctgagctataacctcggcgtctataacaaccagatgcgcaatggcgggagcaacacctccagctatctgtcgctgaacaacgttaccgcgctgcgggagcatcacgtggtgctcgacggctcgctgtatgggatcggcagcggccaacaggacagtgaattatataaggccatgtatgagcgcgatttcgccggccaccgttttgccggcggcatgctcgacacctggaacctgcagtccctgggaccgatgaccgccatttcggccggcaagatttacggcctttcctggggaaaccaggccagctccaccgtcttcgacaacagccagtcggccacgccggtgattgcctttttaccggcggcgggcgaggtgcatctcacccgtgacggccggttgctgagcgtccagaacttcgccatgggcaaccatgaagtggatacccgtggcctgccgtacggtatttacgacgtggaagtggaggtgatcgtcaatggtcgggtggtcagcaaacgcacccagcgggtcaataagctgttcagccggggacgcggcgccggcgcgccgctggcgtggcaggtatggggcggcagttttcatatggatcgctggtcagagagcgggaaaaagacccggccggcgaaagagagctggctggcaggcctttcggcctccgggtcgctcagcaccctgagctgggcggctacgggctatggctacgacaaccaggctgtgggggaaacccgcctgacgctaccgctgggcgagtcgatcaacgttaacctgcaaaacatgctggccagcgacagctcgtggagcagcgtcggcagcatcagcgccacgttgcccgggggattcagttcagtgtgggttaaccaggagagaacccgcattggcgatcaattgcggcgcagcgatgccgacaaccgggcgatcggcggcaccctcaacctgaacgcgctgtggtcgaagctggggacgttcagcgtcagctacaacgatgaccgtcgctacaacagccattactacaccgcggattactatcagacggtctacagcggcgcctttggctcgctcggcctgcgggcggggatccagcgctataacaatggcgacagcagcgccaacaccgggaaatatatcgccctcgatctgtcgctgccgctgggcaactggttcagcgccgggatgacccatcagaacggctacaccatggctaacctctcagcgcgcaagcagtttgatgaaggcactattcgcaccatcggcgccaatctgtcgcgagccatctccggcgataccggggatgacaaaaccctcagcggcggcgcgtatgcccagttcgacgcccgctacgccagcggcacgctgaacgtcaacagcgcggcggacggctacgtcaacaccaacctcaccgccagcggcagcgtcggctggcagggcaaaaatatcgccgccagcggacgaaccgacggcaacgctggggtgatcttcaacaccgggctggaggacgatggtcagatcagcgccagggttaacgggcggatcttcccgctcagcggcaagcgtaactacctgccgctctctccctatggtcgctatgaggtggagctgcagaacagcaaaaactcgctcgacagctacgacatcgtcagcgggcgcaagagtcatctgaccctttatccgggcaacgtcgcggtgattgagccagaggtgaagcagatggtcaccgtctccggccgtattcgtgcagaagacggcacgctgctggcgaatgcgcggattaacaaccatatcggccgtacccgcaccgatgaaaacggcgagtttgtcatggacgtggataagaaataccccactatcgatttcagctacggcggcaataaaacctgcgaagtggcgctggagctcagccaggcgcgcggcgccgtctgggtgggggatgtggtctgcagcggcctctcgtcgtgggcggcggtgcagcagtcaggagaagagaatgaaagttaa

SEQ ID NO: 210311 - DNA, 1644 bp, Klebsiella pneumoniae
atgaaagttaatgcactgatggcgctggcgatcctcgcgctgctctggccggcagccgcgctcagggcggcggtgaccaagaccacctggtcggatgcgccggcgcgcgagtttgtgtttgtggaaaacaactccgacgacaactttttcgtcacccccggcggggcgctggatccgcgtatgaccggcgctaaccgctggaccggcttaaaatacaccggctccgggaccatctatcagcagagtctcggctatatcgataacggctacaacaccgggctcaatgccaactggaagtttgatatgtggctggaaaactcaccggtttcacaccccttaaccggcctgcgctgcatcaactggtacgccgggtgcgatatggctaccagcctgatcctgccgcagaccaccgacgccagcgggttttacggcgcgacggtgaccagcggcggcgcgaagtggatgcacggcatgatgtcagacgccttctatcaatatctgcagcagatgccggtcggcggcagctttacgatgaccatcaatgcctgtcagacctcggtgaactacgatgccagcagcggcgcgcgctgtaaggatcaggcctccggtaactggtatgtgcgcaacgtcacccacaccaaagccgcgaacctgcggttgattaatacccactcgctggcggaggtgtttatcaacagcgatggcgtgccgaccctcggggaagggaacgccgactgccggacgcagaccatcggcagccgctcaggattaagctgtaagatggtcaactataccttgcagaccaacggcttaagcaacacctcgatccatattttcccggcgatcgccaactcgtcgctggcctcggccgtcggggcgtacgatatgcagttcagcctcaacggcagctcctggaagccggtgagcaataccgcttattactacactttcaacgagatgaagagctcagactcgatctatgttttcttctccagcaacttctttaagcagatggtgaacctcgggatcagcgatatcaacaccaaggatctgttcaactttcgctttcagaacaccacctcgccggagtcaggctggtatgagttttccacctccaacacgctgattatcaagcctcgtgatttcagcatcagcattatctccgacgaatatacctcggcgccgtcgcgcgaggggtatgtcggcagcggcgaaccggcgctcgatttcggctacatcgtcaccaccagcggtaaaacggccgccgatgaagtgctgatcaaggtgaccggaccggcgcaggtgattggcgggcgttcctactgtctcttcagctccgatgacggtacggcgaaagtgccgttcccggcgacgctctcttttatcacccgcagcggcacgactcagacctacgatgccgggtgcgatgacagctggcgggatatgaccgatgcgctgtggctgaccacgccgtggaccgatatctccggcgaagtggggcagatggataagaccacggtgaaattttcgattccgatggataacgccatttcgctgcggacggtagacgataacggctggtttggcgaagtcagcgcttcaggagagattcatgtccaggcgacgtggcgcaacattaactaa

SEQ ID NO: 210312 - DNA, 711 bp, Klebsiella pneumoniae
atgtccaggcgacgtggcgcaacattaactaaggccctgctgacggtgggctgcctgctggcagcgccgctggcgcaggcgatctcggtcggtaacctgaccttttccctgcctgccgaagcggatttcgccagcaaacgggtggtcaacaacaataaaagcgcgcggctgtaccgcatcgccgtcagcgccatcgatcgcccgggcggcagcgaagtccgctcccggccggtggatggcgaactgctgttcgccccccgccagctggtgctgcaggcaggtgagagcgagtattttaaattttactatcatgggccgcgggataaccgcgagcgctactatcgggtctcgtttcgcgaaatccccacccgcaacctgacgaggcgcagcccgactggcggcgaggtcagcatggagccggtggtggtgatggataccattctggtggtgcgcccgcgcgaggtacagtttaaatggtctttcgataaggtggccgggacggtgagcaacaccggcaatacctggtttaagctgctgattaagcccggatgcgattcgaccgaagaggagggggacgcgtggtatctgcgtcccggggacgtggttcgccagccggcgctgcgccagccggggaaccactatctggtctataacgacaaatttattaagatcagcgatacctgtccgctgaagccccgtcccgcggagtga

SEQ ID NO: 210313 - DNA, 690 bp, Klebsiella pneumoniae
atgaacgctaatctggcggtgatcgccgataacctcgattacctgctgtggggccgactggcggagggccagcccggcggcgtggcgctgaccctgctgatggccatcggcgccaccctgctggcgctgccgggaggcattgcgctggcgggcctggcctggcgctacggcgggctggtgcggcgtctgctgtttctgtgggtggaaattatccgcggcatcccgctgatatttgtcatcttctggctgtggtatctgctgccgatgctgaccggcggcgatctgcccggcgcggtgaccgtgaccctggcgctggcgtggtttaccgccgcctcggtgatgcactcggtgctggccgggctgcagtcgctgccgaaaggacagtatgaggcggcgctgacccaggggttcgctcccgggcaaacgctgcgcctggtgctgctcccgcaggcgctgcgcaacgttcagccgtcgctggtggggatctttatcggcctgctgaaggacacttcgctggcgtttatcgtcaacgtcccggagctgaccaccgtggccggccaggtcaacaaccgggtgcagatctatcccctggcgatcttcgtcttcaccggcgcggtgtactacctgctgtgctgcggtctgagcctgctggccagccggcgctttacccgccgcgcgaccaccagataa

SEQ ID NO: 210314 - DNA, 753 bp, Klebsiella pneumoniae
gtgacgccgatgcttgactggcacggcgtcctgagcgggcagccgttgcaatggattatctctggttttctcaccaccatctgggtcagcgtcgccgggatcctgctcgccaccctgctggcggtcctgctgctggccctgcgcctcggcggcggacgcgcggggcgcggactggtggccgcgtgggtctcgttgtttcgcaacactccgctgctggtccagctgctgttctggtactttgccgcctggaacctgctgccgctggcggtgaaggaggtggtgaacgacgaacacgcctggtccattttgccgggtaacgtctggtggctgacgccggagttcctctgctcgatgtgggggctgggggtctttacctccgcctttctggtggaagagatcgcctccggactgcgcgccgtcagccacgggcagcgggaagccgcgctgtcgcagggctttacgccgtggcaggagctgcgctttatcctcctgccgcaggggctgggcaacgcctggcagccgattgtcggccagtatcttaacctgatgaaactctcatcgctggccagcggcatcggctttgcggaactgacctatcaggtgcggcagattgagagctataacgcgcacgccctggaggcgtttgccgtcggcaccgcgctgtacctggcgctgggggtggcgatgggcgtggcgctcacgcgtctcggcccgggaagaaaactgcaacggagcgcccgacatgaacgctaa

SEQ ID NO: 210315 - DNA, 819 bp, Klebsiella pneumoniae
atgttctcgggtttactctcccactccgcggctccggccgcggatttttcacgtctgcagcgcgccagcattacgttccgtgatgtggccaagcgctacggcgatcatcaggtacttaacgccatcaacctgcaggtcgagcccggcgaagtggtggcgatcctcggcccttccggttcgggaaaatcgacgctgatccgcttgatcaaccagctcgaatccttaagcggcggcgagatcctgatcgacggcaaacccaccagccggctgagcggcagcgccttgcgccagctgcgcagccgcgtcggctttgtcttccagcagttcaacctttatgcccacctgacggcgcaggagaacatcactctggcgctggagcgcgttcatggctgggaaaaaagcgcggctcaggcgcgggcgctggcgctgctgcgtcaggtcggactggaagaaaaagcgcagcagatgccggcgcagctctccggcggccagcagcagcgggtggccatcgcccgcgccctggcctcatcgccgcagattatcctgttcgatgagcccacctcggcgctcgacccggagatgatcggcgaagtgctgcaggtgatgaaaaccctcgcccacagcgggatcaccatgctggtggtgacccacgaaatgcagtttgcccgcgaaattgccgaccgggtggtgtttatcgacggcggcgacatcctcgaagtcgccccgccggctgagtttttcgcccatccgcagcatgcccgcgcgcggcgttttctgcagaaggtgctggatccgctgcaccaggagagcctcgagtga

SEQ ID NO: 210316 - DNA, 810 bp, Klebsiella pneumoniae
atgcgcaataaaaccacaaaaatcgcactggcgctgggtatgctgctgctcgcctcgcaggcacaggcggaccagctggctgacatcaaagccgccggcgtcgtaaaagtcgccaccttcgacgccaacccgccgttcggctccgtggacgccaaaacccaccatatcgtcggctacgacgtcgactttgcccaggcgctggcgaaagcgctcggcgtcaaactcgagctggtggccaccaacccggccaaccgtattccgctgctgcagtccggtaaagccgacctgatcgtcgccgacattaccatcaccccggagcgggcccaggttattgatttctcaacgccgtatttcgtcaccggccagcagttcctcgtgccggccggctctccggataagctcgatgagtacagcaaagcgcgcatcggcgcggtgaaaggcaccaccggcgaacaggccctgcaccagcgtttcccgcaggctcgcgtcctctcctatgacgatattccgctggccctgaccgccctgcgcaacggcaacgtccaggccatcacccaggacagcaccatcctcgccggtctgctggcggaagcgccggataaagccaagtttaaaattctgcccgacctgctcagcaaagaagagattggcgtgggcgtgaagaaaggcgaaccggccctgctgaaggccgtcaacgatgagctggtgaagctggagaaaaccggcgaagccgcgaaaatttacgatgtctggtttggccctgccaccaaaacgccgcagccgcgcgcctttaccatagaagcgaaataa

SEQ ID NO: 210317 - DNA, 171 bp, Klebsiella pneumoniae; identical to SEQ ID NO: 136789

SEQ ID NO: 210318 - DNA, 696 bp, Klebsiella pneumoniae
atgcttaacgcccgggaactgaaggtcttttacggcgtgatccagggtctgaagggcgtcgatatcgatgtctatgaccgggaaatcgtcaccctgatcggcagcaatggcgccggtaaaacctccaccctgaacgggatcgtcaacctggtgcgctccagtgggcgcgtcagcttcctcaacgacgatatctcacgcagccagacccaccagatcgtgcgtcgcgggctggcgctggtgccggagggacggcgcgtctttaccaacctgaccatcgaagagaacctgcgcatgggcgcttacaataatctcgccggctacgcccgcctgcgcgatcgcatgtacgccctctttccgcggctcaaggagcggcgccatcagatggcgggcaccatgagcggcggcgagcagcagatgctggccatcgcccgggcgctgatgagcgagccggtgttattgatgctggatgaaccgagcctcgggctggcgccgaaaattgtcggcgagctgttcggcatcattaagcaactgcgcgaagagaatatgacggtgctgctggtggagcagaatgcgacggccgcgctggcgatcgccgatcgggtgtatgtcctggagaatggccggatcaccttgtcaggcgcggcgcgggagatgctgactaatccggaaattaagcggatgtatctggggggatag

SEQ ID NO: 210319 - DNA, 783 bp, Klebsiella pneumoniae
atggcggaaaataacgttatcctgcaggtgcaggacgtcaccatgcagttcggcggcctgcgggccatcgacaacgtcagcttccatgttgacgaggcggagatctttggccttatcggccctaacggcgcgggcaaaacaaccctgtttaacgtcattaccgccaactataaacccaccagcggcagcgtcaccctggcgggcacgtcgctgaaggggctgaagcccaaccaggtggtgaacgccgggatcgcccgcaccttccagaatatccgcctgtttaactccatgacggtgctggagaacgtgatggtcgggctcgaccgcgccagccgctactcgctgctggaggcggccctgcatattggtcgctactttccggccgagcgggcggcgaaagccaaagcgatggccatcctggaggatatcggcatcgcccacttcgcccatatgcaggccacaaacctaagctatggcaaccagcgcaaagtggagatcgcccgcgcgctggccaccgcgccgaagctgctcctgctcgatgagccggccgccgggatgaacccgaaggagaccgaggatctggcggagctgatcttccgcatgcgccatgactatcagctcagcgtcctgttaatcgagcacgatatgcccttcgtcaaccgcctgtgcgagcgggtgatggttctggagtacggtaagccgctgttcagcggcctgatggccgaggcgatccagcatccggacgtcatttccgcttatctgggagaagccaattatgcttaa

SEQ ID NO: 210320 - DNA, 1050 bp, Klebsiella pneumoniae
atgctcaacgcgacgacgaccgccggggcgcagctgcgcaacctggccattattgtcatctgtatcgcgctgctggccggaatcaacgtggttttcaatgactacattgttcgtgtcatcagcaccatttttatctttatgatcctcgcggtcagctacaacctgatcaacggcgtgaccggccagctgtcgctggagccgaacggcttcgtggcggtgggcgcctacgtgaccgccctgctgatcctctccagcgacagcaaggtagacatgtttgaaatggccgcccccagcccgtggatcctcagcctgcacgcgggcttcctccctgccctgctgataagcggcctgtgcgcggcggcgctggcggtgtgcctcgccgtgccggtcttccgggtacgtggcgactacctggccattgtcaccctcggctttgggtttatcatcaagatcctcgccattaacaacccgcaaatcaccaacggcgccatcgggctgaacgatattccgcagcagccgcatctcctgttctggtgcgggctgttcgccctgctggccaccggcatgatcctccagctggtgtggtcgaagtatggccggatgatgaaagctattcgcgacgatgaagatgcggcgatcgccatgggggtcaacaccttccgcattaaaacctgcgccttcgccaccagcgccttcttcgaagggatcggcggcggtctgctggcttccctgctgaccaccatttccccggggctgttcgactttatgctcaccttccagctgctgattattatcgtcctcggcgggctcggcagcaccaccggcgccctgctcggcaccgtgctggtggtcggcagcggcgagtggctgcgcttcctcgatcagccgctgcagttcttcggtcacgatctcggcgcgtacccgggcctgcgaatggtggtcttctccctgctgttgctgatcatcatgctcttcgcccgcgaggggctgttggggaaaaaagagatttggcagaccggaagaaggagcggcggctatggcggaaaataa

SEQ ID NO: 210321 - DNA, 900 bp, Klebsiella pneumoniae; identical to SEQ ID NO: 136784

SEQ ID NO: 210322 - DNA, 1137 bp, Klebsiella pneumoniae
atgaaatcgttttccgggaaagcgtctttaatggccacgctggttgccgcgctggtcggcgccagcagcgcgcaggcagcggaaattaaaatcggggtggtattacccctgagcggcgccctcagcggctatggccagccgtcgcagaaagggctggacattattcaggccatcaccccaacgttaaaaaatggcgataccatcaagcttatcgttatcgatgataaaagcgacaaagtcgaagcggccaatgccatgcagcgcctggtctccagcgataaagtggatgccgtgatcggggaagtcacctcctccaacaccctggcgatgaccaaaatcgccgacgacagcaaaacgccgctggtctcctccaccgccaccaacgaccgcgtcacccgcaaccatccctacgtcagccgggtctgcttctcggacagcttccagggggtggtcggggccaatctggcctcccgcgatctgaaagccaaaaccgccgccatcgtgtttgacagcagcaacgactactccgtcggcctggcgaaagcgttccgcacccagttcctgaaaaacggcggcaccattcccatcgaggtccaggccccgggcggcagcaaggactttaaagcccagctggcgagcgtcaaggcgaagaatgtcgacatgatttacatgccgatctactacaccgaaggggcgctgattgccgtgcagtctaaacagctggggctcaacaaaccggtggtgggcggcgacggtctggccgcggatcaggtcttcttcgatgtcggtaaagacgcggtcaacggctatatgaccaccgattactactcgccgaacgccaaagagcagaccccggcgggggaaaccttcatcaaagcctgggaagccaaataccagcagccgacccatacctggggcgcaatggcggcggacgcctataacgtcatcgtcaacgccatgaaccagtgcagcgatccccacgatcgggtctgcgtaaatgaaaaaatccgcgccaccaaagatttccagggggtgaccggcacgctgacgttacagaacggcgacgccattcgcagcgcggtcatcaacgaagtgaaagatggcaagctggcgtttcgtaccgtggttaacccttaa

SEQ ID NO: 210323 - DNA, 777 bp, Klebsiella pneumoniae
atgaaccgtcccgatgcctggaacccgctgcgtgaatttaccgatgcgcggatcgccctggggcgcagcggcgccagtctgccgacccgcgaagtcctcaactttggtctggcccatgccagagcgcgggatgccattcatcagccgttcgccagccaacaattggtggcgccgctggcggcgctcggcctcgacgccctgacggtgcacagcgccgcgccggaccgtcatacctatctgcggcgcccggatctcgggcggcggctcgccgacgagagtcgcgccgacctcgccgccagcggcgtccgccccgccgacctgctgctggtgatcggcgacggcctctcttcctgggcggtagagcgccaggcggtgccgttgatccgcgccctgctgccctatctgcagacgctgggtatcggcctggcgccggtggtgctggcgcatcagtcgcgggtagcgctgggagatgatattggcgaaaccctgaaagcccgcgcggtggcgatcctgattggcgaacgaccgggtctctcctcgccggacagcctcggcgtctacctcacctggcagcctcatcgtcagcgcctggagtctgagcgcaactgtatctccaatattcggccggagggattaagccatgacgccgccgcctttaaactggcctggctgctggagcaggcttttttgcgccggcttaccggggtgggtctgaaagatgaaagcgataatccggcgctgcatggtaaaataaaaccgttgccccctttaaaataa

SEQ ID NO: 210324 - DNA, 1389 bp, Klebsiella pneumoniae
atgtataaaaccacgctatcgggccaggtatggcgctttgatagtctgaaaacgctgatggcgaaagcgtcgccggcccgttccggcgacgccctcgcaggggttatcgccacctcagccgaagagcggatggcggcgaaaatggccctcgccgaggtgccgctgaccgacattctcgacaacccgcttatcccttacgagcaggacgaagtgactcgcctgatcctcgacacccatgatgcgcagggctttgccgccctgcgtcacctgacggtcggcgattttcgcgactggctgctggatgatgctaccgataccgccacgctgcagcgggtcgcccgcgccatcaccccggagatggcggcggcggtcagtaagctgatgcgcaatcaggatctgatccttgccgccagcaaatgccaggtggtgacgcgctttcgcaacaccatcggcctgcccggccacctcagcgtacgcctgcagcccaaccatcccaccgacgacctgaaaggcatcgccgccagtatgctcgacgggctgctgtacggcgccggggacgcggtgatcggcatcaacccggccagcgacagcttaccggtgctggcgcagctgaacgtcatgctggacgatattattcagcgcttcgccatccctacccagtcctgcattctgacccatgtgaccaatacgctgcagctgattgagcgcggcgcgccggtggatctggtgtttcagtcggtggcgggaaccgaagcggccaacagcggcttcggcatcaaccttgccatgctgcaggaggcccgcgaggcggccctgagcctcaggcgcggtaccctcggcaacaatgtgatgtattttgagaccggccaggggagctgcctgtcggccaacgcccaccacggcgtcgatcagcaaacctgtgaggcgcgggcctacgccgtcgcccgccactttgaaccgctactggtcaataccgtggtcggttttatcggtccggagtatctctacgacggcaagcagattattcgcgccgggctggaggatcatttttgcggcaagctgatgggcctgccgatcggctgcgacgtctgctataccaaccacgcggaagcggatcaggatgatatggacaccctgctgaccttgctgtgcgccgccgggctcaccttcctgatcggtgtgcccggagcggacgatatcatgctcaattaccagagcacctcgttccatgacgcgctgtacgcccgtcgcctgctgggcttaaagcatgccccggagttcgccgactggctggcgaaaatgcaaattatcgatccgcacggcgcgctgcggctcaccgacgcccgccatccgctgctgtccgtcctgccgcaaggagcctctgtatga

SEQ ID NO: 210325 - DNA, 1380 bp, Klebsiella pneumoniae
atgacagagcaaaccaccaccttaaaaagaacgctcggcagttttcgtttatgggggatcgccgtcggactggtgatatccggggagtacttcggctggagctacggctggtcgcaggcgggcacgatggggtttatggtcgtcgccctggcggtcgccgccatgtactgcgcctttattttcagctttaccgagctgaccaccgccatcccgcacgctggcggccctttcgcctatgcctaccgcgccttcgggcccaccggcggctttatcgctggttttgccaccctgattgaattcgtcttcgccccgccggccatcgccatggccatcggggcctacctcaacgtgcagtttccggcgctggatccgaaatgggtcgcctgcggcgcctacgtgatctttatgacgctcaatattctcggcgtcggcatcgccgccaccttcgagctgatcgtcactctgctggccatcttcgagctgctggtgttcatgggcgtggtcgcccccggcttctcctggagccacttcaccactaacggctgggcgggcgcggacagcttcagcggcctggcgctgccggggatgttcgccgccattccgttcgccatctggttcttcctcgccattgagggggcctccatggcggccgaagaggccaaagatccgcagcgcaccattccccgcgccctgggcggcggcattctgacgctgacggtgctggcgatcggcgtgatggtcttcgccggcggcgtcggcgactggcgcgcgctgtccaatattaacgatccgctgccccaggcgatgaagacggtcgtgggcaacggcagcggctggctgcatatgctggtgtggctggggctgtttggcctcgtcgcctccttccacggcatcattatgggctactcgcggcagatctactccctcgcccgcgccggctatctgcccgccgggctggcctccctcaaccgccgcacccgcaccccgcatatggcgatcctcgccgggggcgtggtcgggatcgccgcgatcttctccgactcgctgatcaccatcagcggcatgccgctgaccgcctgcatcgtcaccatgtcggtatttggggctattgttatgtatatcacttccatggcggcgctgttcaaactgcgccgtagcgagccgaagctgatccgtccgttccgcgccccgctctacccgctggcgccggcctttgccctcggcatggcggtgctctgcctggtggcgatggtctggtataacctgctgctggcgctgattttcgcggcgatgatgctcggcggctacctgtggttccgcaaaaccgcagcggcccgtgaacgggcgccagtggatcctcaactgcgcacggtctcctga

SEQ ID NO: 210326 - DNA, 1410 bp, Klebsiella pneumoniae
atgcaaagcacaacacaacaacaaggtgggcagctgaagcgcaccatgaaaacgcgccatctgatcatgctgtcgctcggcggcgtgattggcaccggcttattcttcaataccggctatatcatctccaccaccggcgcggccgggacgctgctggcgtatctgattggcgccctggtggtctggctggtgatgcagtgccttggcgaactgtcggtggcgatgcctgagaccggcgccttccacgtttacgcggcgcgctatcttggcccggcgacgggctataccgtggcgtggctctactggctaacgtggacggtggcgctggggtcgagcttcaccgcggcgggattctgcatgcagtactggttcccgcaggtgccggtctggatctggtgcgtggtgttctgcgcagtgatcttcggccttaacatcatttcgacgcgcttcttcgccgaaggcgagttctggttctcgctggtgaaagtgatcaccatcgtcgcgtttattattctcggcggcgcggccattttcggcatcattccgatgcaggatggctcgccggcgccgggcctgcgcaatatcaccgccgaaggctggttcccgcacggcggcctgccgatcctgatgaccatggtggcggtgaacttcgccttctccgggacggagcttatcggcattgccgccggagagacggaaaacccgcataaagttattccggttgccatccgcaccaccatcgcccggctgattattttctttatcggcaccgtgtttgtgctggcggcgctgatcccgatgcagcaggcgggagtggagaaaagccccttcgtgctggtgtttgagaaggtgggcatcccttatgcggcggacatgttcaacttcgtgatcctgacggcgatcctgtcggcggctaactccggcctgtacgcttccgggcggatgctgtggtcgctgtcgaacgagaagacgctgccggcctgctttgccaaagtcaataaacggggcgtgccggtgaccgccctgtcggtgagtatgctgggcggcgtgctggcgctgttctccagcgtggtggcgccagatacggtgtttgtcgcgctgtcggcgatctccggttttgcggtggtggcggtgtggttgagcatctgcgcctcgcactttatgttccgccgccgccatctgcagcagggtaaggcgctgagcgatctccagtatcgcgctccctggtatccggtggtgcccgttctgggctttgtgctgtgcctggtggcctgcgtgggcctcgcttttgacccgagccagagaattgcgctgtggtgcgggatcccctttgtggccctgtgctatggtgcctggtatcttactcgttcacggaatatgactcaggagccccaacatgtcgcagactaa

SEQ ID NO: 210327 - DNA, 933 bp, Klebsiella pneumoniae
atgtcgcagactaatccgtttaccgccctgcttgccgcccagcctttcgtgctgctggacggcgccatggccaccgagctggaggcccgcggctgcgatctggccgacagcctgtggtcggcgaaagtgctgctggagaacccgcagctgatccgcgatgtgcatcttgactactttcgcgccggggcgcaggtggcgatcaccgccagctatcaggccactccggcgggctttgccgcgcgcgggctggatgaggcgcagtcccgggcgctaatcggcaaaagcgtcgagctggcgcgcaaagcgcgcgaggcgtacctcgccgagaacccgcaggccggtacgctgctggtggccggttcggtggggccgtatggcgcgtttctcgccgacggctcggagtatcgcggcgattatcagcgcagcgcggcagagttccaggccttccaccgcccgcgcgtcgaagcgctgctggatgccggcgccgacctgctggcctgtgaaaccctgccgtcattcgctgagatccaggccctggcggccctgctgcaggagtatccccgcgcccgcgcctggtactccttcacgctgcgcgacgccgaacatctcagcgacggcacgccgctgcgcgaggtgatggccgccctggcggataacccgcaggtggtggcggtggggatcaactgtatcgcgctggaaaatacgcccgcggcgctggcgcatttgcacagcctgacggccctgccgctggtggtctatcctaactccggcgaacattatgatgcggtgagcaagacctggcaccatcatggcgaagcctgcgccagcctggcggattatctgccgcagtggctggcggccggggcgaagctgatcggcggctgctgccgcaccacgccgaaggacatcgccgcgcttaacgcgaagcgctaa

SEQ ID NO: 210328 - DNA, 963 bp, Klebsiella pneumoniae
atggcattcacatcgcgaattactcttctggcggcgctggctgtcgccgccttccaggcgcaggcggtcaacgttaccgtggcgtatcaaacctccgctgagccggcgaaagtcgcccaggcggacaacaccttcgccaaaaccagcggggcgaccgtcgactggcggaaatttgacagcggcgccagcgtggtacgcgccctggcctccggcgatgtgcagatcggtaatattggctccagcccgttggcggtggccgccagccagcaggtgccgattgaagtgttcctgcttgcctcaaagctcggcaactccgaagcgctggtggtgaagaaaagcattaccaaaccggaagatctgatcggcaagcgcatcgccgtgccgtttatctccaccacccactacagcctgctgtcggcgctcaaacactggggcatcaagccgggccaggtacagattattaacctgcagccgccggcgattatcgccgcctggcagcgcggggatatcgatggcgcttacgtctgggcgccagcggttaacgaactggaaaaagagggcaaggtgctgaccgattcttctcaggttggggagtggggcgcgccgacccttgacgtctgggtggtccgtaaggacttcgccgagcagcatccggagatcgtcaaagcgtttgctaaaagcgccatcgacgcccagcagccctacatcgccaacccggaggcatggctgaaacagccggacaacatcagcaagctggcgcgcctgagcggcgtgccggaagccgatgtccccggtctggtgaagggcaatacctatctcaccgccgctgagcaggcgcaggcgctgaacgggccggtcaatcaggccatcgtcgataccgcgcgcttcctgaaagagcagggcaaagtgcctgcggcgggaaccgattatcgtcagtacgttactgaccgctttgtgaagtaa

SEQ ID NO: 210329 - DNA, 768 bp, Klebsiella pneumoniae
atgctgcaaatctcgcatctttccgccgactacggcggtaaaccggcgctggcggatatcaacctgacgctggagagtggggagctgttggtggtgctggggccttcgggctgcggtaaaactaccctgctgaacctgattgccggattcgtgccctatcagcacggcagcatcaccctcgaaggtcagcgggtggccgggccgggcgcagagcgcggggtggtcttccagaacgaaggtctgctgccgtggcgcaatgtgcaggataacgtggcgctgggcctccagctggcgggcgtggataaagcgcagcgccggcaagcggcggcgcagatgctgaagaaggtggggctcgaaggggcggaaaagcgctttatctggcaactgtccggcggtcaacgccagcgggtgggcatcgcccgggcgctggcggcgaatccgcagctgttgctgctggatgagcccttcggcgcgcttgacgcctttacccgcgagcagatgcagacgctgctgctgaaactgtggcatgagaccggcaaacaggtgctgctgatcacccatgatattgaagaggccatcttcatggcgaccgagctggtgctgctgtcgccggggccgggacgggtggtggagaggctgccgcttgatttcagccgtcgctttgtcgcgggcgaatcctgccgcagcatcaaatccgacccgcgctttattgaacagcgggaatacattctgagccgggtgtttgaccaacgggaggctttctcatga

SEQ ID NO: 210330 - DNA, 828 bp, Klebsiella pneumoniae
atgagcgtggtactgaacgacaaaccgcgtcagtcgacgctgaagtggcgctggccgctctcccgtgagctcaccctcagcgtggcgaccctggcggtgctgctggccgtctggtgggcggtcgcggcgttgcagctgattagcccgctgtttctgccgccgccgggccaggtgctgcagaagcttatcaccatcgccgggccgcagggctttatggatgcgacgctctggcagcacctggcggcgagcctgacgcggatcgttatcgccctgttggcggcagtgcttattggcgtaccggtggggatcgccatggggctcaactcgacggtgcgcgggatcctcgacccgctgatcgaactctatcgtccggtgccgccgctggcctacttaccgctgatggtgatctggtttggcatcggtgaaacctcgaagatcctgctgatctacctggcgattttcgcgccggtagccatgtcggcgctggcaggggtaaaaagcgcgcagcaggtgcggattcgcgctgcccgttcgcttggcgccagccgggcgcaggtgctgtggctggtgatcctgcccggcgcgctgccggagatcctcaccggactgcgcattggtctcggggtgggctggtcaacgctggtggccgctgagctgatcgccgccacccgcggattaggatttatggtgcagtctgccggcgagtttctcgccaccgatgtggtgctggcggggatcgcggtgattgccattatcgcctttttactggaactgggtctgcgcgcgctgcagcggcgcctgacgccctggcatggagaagtacaatga

SEQ ID NO: 210331 - DNA, 852 bp, Klebsiella pneumoniae
atgagtgaacgtctgagcattaccccgctggggccgtatattggcgcgcaggtgagcggggcggatttaacccgtccgctgagcgacaaccagtttgaacagctgtatcacgcggtgctgcgtcatcaggtggtattcctgcgcgagcagaatatcaccccggcgcaacagcgcgacctggcgctgcggtttggcgacctgcatatccatccggtctaccctcatgccccaggtgtggaggagattatcgtcctcgatacccacaacgataatccgccggataatgacaactggcataccgatgtcacctttatcgacacgccgcccgccggcgccattctggcggcgaaagagctgccgatgaccggcggggacaccctgtggaccagcggcatcgccgcctgggaagcgctgtcagaacctttccggcagctgctgagcggcctgcatgccgaacacgatttccgcaaatcgttccaggagtataagtacaacaagaccgaagccgagcatcggcgctggcaggaagcggtggcgaagcatccgccgctgctgcatccggtagtacgtacccacccggtgaccggcaagcaggcgctgttcgttaatgaaggctttaccacgcgaattgtcgaggtgagtgagaaagagagcgcagcgctgctgaacttcctgtttgctcatgtcactaaaccggagtttcaggtgcgctggcgctggcagccgaacgatgtcgctatctgggataaccgggtgacccagcattacgccaacgccgactatctgccgcagcggcggatcatgcaccgggcgacgatcctcggcgataagccgtattaccgggcggggtaa

SEQ ID NO: 210332 - DNA, 1719 bp, Klebsiella pneumoniae
atgtttagtctcgacaacgtactcgatgacctgtggcctcaggcgaggcccgccccctggcaaaagaaactgttaaaaaagctattttatgaggaagagtttcaacaatttgccgaccgtcaccgccacctgaaggggcttgatacggtcgaacaggtgctggaatacctcaatatccgctgcgccatcccggcgcacgatctcgaacaaatccccgaatatggcccgctggtcattatcgccaaccaccccaccggcaccctcgacggcctggcgctcctgtatgcggtatcccgcgtgcgccgcgatgtcaaagtggtcaccaaccgcatgctcacccaccttgagcccctgagctcgctgtttatcccggtagataatattcatggccgcaccgctaaagcggcgctgcagcagatggaccagcagctgcaggccggcggggtgctgatcttcttcccggcgggggaagtctcccgcctcacccgtcgcggcatccgcgataaaaaatggcactccggctttattaagctggcggcaaaataccgtgccccgctgctgccggcgtggattaacgcccgcaacagcgccctgttttacgccagcacgctgatatcagacaacctgccgctgctcctgctgatgcagcagatgtttcgccggcgcaacagcagcctgccggtgcgtatcggccagcagatcccctggtcgaactggttcgatgcgcagtccagcgctcgcgagcttaccggccgctgctatcagcaccttgaacagctgcgcaaagggctgccggggcggtttaaaaccgaaagcgctatcgcccgtccggaagaccgggcgctgctcaaacgcgaactgcacaaggccgaatgcctgggccgcaccgccgatggcaaagcgatttacctctggcagcgcaacggccaggaggacgcgccgctgctgcgcgagctgggacgcctgcgggaaatcgccttccgcgcggtcggggaaggcagcggcaaacggcgggatatcgacgggtatgacgacgactatctgcatctgatcctgtgggatgaagaagacctcgagatcgtcggcgcttaccgctttatgccgacggccatccagctggcaaagcgcggcctggaggggatctacagttacagtctgttccattacgacgggcggatggacgatgtcctgcagcacggcattgaactggggcgcagctttatccagccgcgctactgggggcgtcgcgggctggactacctgtggtccggcatcggcgcttatctggcgcgctatccgcactatcgctatctgtttggtccggtgtcgatttctggcggattgccgcccgccgcccgcgatctgctggtggcattctaccggctgtggttcccggcgacgcatccgctggcggagtcgcgtcgaccttatccggcgtcgctgcccgacgtgctggcgcagtttggcggggaggattacaacgacgacctggcccggctgaagtccctgctcggcaacctcggctgcgcgatccccccgctgtataagcagtactcggaagtgtgcgagccgggcggcgtgcagtttatcgatttcggcagcgacccggatttcaataactgcgtggatggtctggtgctggtggatttgacctatctgaaagcgaaccgctatcagcgctatattggcgcgcatctgggtgcgcaaaaatcggcataa

SEQ ID NO: 210333 - DNA, 975 bp, Klebsiella pneumoniae
atgacagatttaatcactcgcccccgccgcctgcgtcaatccgctgcgctgcgcgccctgtttgaagagacaacactgagtttgaacgacctggtgttgccgatctttgttgaagaagaaattgatgattacaaagcgatcgaggccatgcccggcgtgatgcgcattccggaaaaatatctggcgcgcgagatcgaacgcatcgccaacgccgggatccgctcggtgatgacctttggtatttctcatcacaccgatgccaccggcagcgatacctggaatgaaaatggtctggtggcgcgtatgtcgcggatttgtaagtccacggtgccggagatgatcgtcatgtccgatacctgcttctgcgaatatacctcccacggccactgcggcgtgctgtgcgaccacggggtggataacgacgcgaccctggaaaacctcggcaaacaggccgttgtcgccgccgccgcgggggcggatttcatcgctccttccgccgcgatggacggacaggtgcaggcgattcgccgctcgctggacgccgccggcttcaccaatacggcgatcatgtcctactcgaccaagttcgcttcttccttctacggtccgttccgcgaagcggccggtaccgcgctgaagggcgatcggaaaacctatcagatgagcccgatgaaccgccgggaggccattcgcgagtcgctgctcgatgaagcccagggcgccgactgcctgatggtgaaaccggctggcgcctacctggatattctgcgcgatatccgcgaacgcagcgatctgccgctcggcgcctatcaggtcagcggggagtacgcgatgatcaaatttgctgcccaggcgggcgctatcgatgaagagaaagtggttctggaaagcctcggcgctatcaaacgcgcaggcgccgacctgatcttcagctatttcgccctcgatctggccgagaaaaagatcctccgttaa

SEQ ID NO: 210334 - DNA, 1161 bp, Klebsiella pneumoniae
ttgaaacgtagtttgctcatttttgctgcgctgtgcgcggcgtcgtggacctcggtgcaggccgcacagcctaccgttgacccggttttcgcctcggatgtggtcgatcgttacgccaatcatatctactacggcagcggcgccaccggcatggcgctggtggttatcgatggcaatcagcgtgtttttcgcagctttggcgaaacccgcccggggaataatcagcacccgcagctcgactcggtgatccgtatcgcctccctcagcaaactgatgaccagcgagatgctggtgaagctgctcgaccagggggtggtgaaactcaacgatccgctgagtaaatacgccccgccgggcgcccgggtgcctgactggcagggaaaaccaatcaccctggtgaatctcgcgacccataccagcgccctgccgcgcgagcagcctggtggcgccgctcatcgtccggtgtttgtctggccgacccgccagcagcgctggaactggctctctaccgcgaccctgaaagccgcgccgggctcgcaggcggcctactccaacctggccttcgatttactggcagacgcgctcgccaccgccgccggcaaaccgtatccgcagctgtttgaagagcagatcacccggccgctggggatgaaggacaccacctttaccccgtcaccggatcagtgccagcggctgatgatcccggaaaaaggcgccagcccatgcaacaacaccctggcggcgatcggcagcggcggagtctactcgacgccgggggatatgatgcgctggatgcagcagttcctgtcatccgatttctatacccgcagccagcaggccgaccggatgcagacgctgatttatcagcgtaaccagctgacccgggtgattggtatggacgtgccgggccgcgccgacgcgctgggcctcggctgggtgtatatgaagccgaagaacggccatccggggattattcagaaaaccggcggcggcggcgggtttatcacctatatggcgatgaatccgcaggctaacgttggcgcctttgtggtggtaacccgctcgccgttgacccgcttcaacaatatgagcgatggcatcaacgacctggtcagcgagctgagcggcgcacagcccaacatgcagacggccagccagtaa

SEQ ID NO: 210335 - DNA, 534 bp, Klebsiella pneumoniae
atgacggctcaacgggtagtgatggtcgtggatatgcaaaacggcgtgttcgccacgccgcgtctggcgcgcgagcgctgcgtcgcgcaaattaatcgtctggtgcgcgcggcggacaaggttattttcattcagcatgatgaagccggcggcctcgaagccggcagcgaaggcttcgccctgcttcctgagctggagcagccggctggcgcgctgtatgtcaccaaaaccgcctgcgatgccttctatcacacctcgctggcgcaggtgctggacgaacacgacattcagcagttcgtcatctgcggctgcgccaccgactactgcctcgataccaccattaaaaatggcgccagccgcgggtacgttattgttatcgcggaagatgcccacaccaccgccgaccgccccgccgcgcaggccgcgacgcttatcgcccactacaatgaggtgtggcgtaccctgaccattcctggcaatcctttacaggtgaaacccacagaaacaattctgcacgcatggcagcagaactaa

SEQ ID NO: 210336 - DNA, 1221 bp, Klebsiella pneumoniae
atgtttaaatcttttttccccaaaccggggccgttttttatttctgcctttatctggtcgttgctggccgtgatcttttggcaggcgggcggcggcgactggctgctgcgggtcaccggggcatcgcaaaatgtggcgatcagcgcggcgcgcttctggtcgctcaactatctggtgttctacgcttactatctgttttgcgtcggcgtgttcgcgctgttctggtttgtctactgcccgcaccgctggcagtactggtcgattctcggcacctcgctcatcatcttcgtcacctggtttctggtggaagtcggggtggcgatcaacgcctggtatgcgccgttctacgacctgatccagagcgcgctggccaccccgcataaggtcagcatcaaccagttttatcaggaaatcggcgtctttctcggcatcgcgatcatcgcggtgattattggcgtgatgaacaacttcttcgtcagccactacgtcttccgctggcgcacggcgatgaacgagcactatatggcccactggcagcatctgcgccatatcgaaggcgccgcgcagcgtgtgcaggaagataccatgcgttttgcttccaccctcgaagatatgggcgtgagctttatcaacgcggtgatgaccctgatcgccttcctgccggtgctggtgacgctctccgaacatgttcccgacctgcctatcgtcggccatctgccgtatggcctggtgattgccgctatcgtctggtcgctgatgggtaccggcctgctggcggtggtggggattaagctgccgggcctggagtttaaaaaccagcgcgtggaagcggcctatcgtaaagagctggtttacggcgaggacgatgaaactcgcgccacgccgccgacggtgcgcgagctattccgcgcggtgcgtcgcaactatttccgtctctatttccactatatgtatttcaatatcgcccgcatcctctatctgcaggtggataacgttttcggccttttcctgctgtttccgtcgatcgttgccggtacgattaccctcgggctgatgacgcaaattaccaacgtcttcggccaggtgcgcggctcgttccagtacctgatcagctcgtggacaacgctggtggaactgatgtccatctacaaacgtctgcgcagttttgaacgcgagctggacggcaaaccgctgcaggaagcgatcccgacattacgttaa

SEQ ID NO: 210337 - DNA, 1107 bp, Klebsiella pneumoniae
atggccgcacgtttatcgcgcattattcccgtttcattgacgctgctggcggccatggcgctgagcgcctgtaccagccagcaggctccggcgctgaaagagggcgagaagcctgttgacgtggcgtcggtggtgcggcagaaaatgccggccagcgtcaaggatcgggaggcctgggcgcaagccatcgccaccgcgtttgacagccagaagctggcgccgacggaagaaaacgtctgctcggtgctggcggtcgcgcagcaagagtctaactatcagtccgatccggtggtgccggggctgaataaaatcgcctggcaggaaattgaccgccgggcggaaaaaatgcacattccgccgtttctggtccataccgcgctgaagatcacctcgccaaacggtaaaagctatagcgaccgtctggacaatgtgaagacggaaaagcagttgagcgccatttttgatgactttatcgggatggtgccgatggggcagaagctgttcggttcccttaacccggtgcacaccggggggccgatgcaggtcagcattgcttttgccgagcagcacacctccggctacccgtggaaaatgaacggcacggtgcgccaggaggtcttcagtctgcgcggtggcctgtggtttggcacctatcatctgctgaactatccggccagttatagtgcgccattgtaccgctttgccgacttcaacgccggctggtacgccagccgtaacgccgccttccagaacgcggtggtgaaagccagcggggtaaaactggcgctcgacggcgaccttatccgctacgacagcgaggagccgggcagcaccgagctggcggtgcgtcgcctggcgagccagctggggatgagcgacagcgagatccatcgtcagttgaaaaagggcgacagcctggcgtttgagaagaccgatctctatcagcaggttttccgtctcgccgagaaaaagacgggcaaaaccctgccgcgggagatgttgccagggatccagctggagagtccaaaaatcacccgaaatctgacgacggcgtggtttgcgaaacgggttgatgagcggcgggcaaactgtatggcgcggcgttaa

SEQ ID NO: 210338 - DNA, 303 bp, Klebsiella pneumoniae
atggctgaattcagtttttcaaaatcgcttttgggaaataaaaaaaggggggcgctgaccggcagccatgtcgcctacgggctgttcgtgttgatctgctgctgggccggcgcgcagatgctcagcatgctgatccacgccccgggggtatttgaacgcctgatgcaagcccaggacgccagccgtccgcaagtcgacatcagcctcgccgtgggtaccctctttggtctgatccctttcctgatcggctgcacgttcatcggggtactggcgcttatcgtgcgctggcgtcagcgccgttaa

SEQ ID NO: 210339 - DNA, 204 bp, Klebsiella pneumoniae; identical to SEQ ID NO: 134656

SEQ ID NO: 210340 - DNA, 1098 bp, Klebsiella pneumoniae
atggcaaagatgagggttgggatcgtttttggcggcaagtcggcggagcatgaagtgtcgctgcagtcagcgaagaatatcgtggaagcgattgataaatcgcgcttcgatgtggttctgttgggtattgataaacaggggctgtggcatatcaacgacgccggcaactacctgctcaacgcacaggatcctgcccgcattgccctgcgcccttccacggtgactctggcgcagatcccgggccgcgaagcgcagcagctgattaacgccgaaagcggccaaccgctggcggccatcgatgtgattttcccgatcgtccacggcacgctgggtgaagatggctccctgcaggggatgctgcgcatggcgaatctgccgttcgtcggctccgatgtgctgggctctgcggcctgtatggacaaagacgtgaccaaacgtctgctgcgcgacgccgggctcgccgtcgccccgtttatcacactcacccgcgccaaccgcgcgcagttcagctttgccgatgtcgaagcgaagcttggcctgccgctgttcgttaagccggctaatcagggctcgtcggttggcgtcagcaaagttaaaaacgaagagcagtaccatcaggcggtggccctggccttcgaatttgaccataaagtggtggtggagcaaggcattaaagggcgggaaattgagtgtgcggtgctgggtaacgaccacccgcaggccagcacctgcggtgaaatcgtcctcaacagcgagttttacgcctacgacaccaagtatatcgacgatcagggcgcacaggtggtagtcccggccgctatcgcccctgagatcaacgacaaaattcgcgctatcgcggtgcaggcctaccagaccctgggctgcagcggcatggctcgtgtcgacgtgttcctcaccgccgacaacgaggtggtgatcaacgagatcaacaccctgccgggctttaccaacatcagcatgtatccgaagctgtggcaggccagcggtctcgactacaccagcctgatcacccgcctgattgagctggcgttggagcgccatgccgcggaccgggcgctgaaaacctccatgaactaa

SEQ ID NO: 210341 - DNA, 684 bp, Klebsiella pneumoniae
gtgagaggaaagacgctgctggtgctggccgggctgctcggcgcgggcctgttgggataccgcaatctgccgccgcacctgaatccgctggcgccgctggcgctggacgatcccccgggctggctgacgtcgtttaagctgcgcaggctgacggcagaccagtgcgcctccttgctggcggaagccaatcgccggcggcttatcgccagccggccggtggccgacagcgagggaagctgccctctgcgtaacgtggtgcgggtggcgaattttggctcggtgcagctgagcagtagttttctcgccagctgcccgctggcgctgagcagtgcgctgtacatcgagcagcaggcgaagccgctgacccggcagctgatggcgagcgatctgcgtcagatcgatcatctcggcagctttgcctgccgcaatatttaccatcgtcaacaggcgcggcgcagtgaacacgccacggcggacgcgctggacgtcagcggtttccgtctggcggacggtagacgcgttagcgtcctgcagggctggcggagcgagacttcgcgcccctggctggcggcgctgttgagcagcagttgccattacttcggtaacgcgctggggccagagtacaacgcggctcacgccaaccattttcatttcggcatgcgcgggcagggcttctgcttttga

SEQ ID NO: 210342 - DNA, 1200 bp, Klebsiella pneumoniae
atggaatcctggaaggttaatctcatctccgtctggtttggttgcttttttaccggcctggcgatcagtcaaattctcccctttttacccctctacgtctcccagctcggcgtcacctcgcatgaagcgctatcgatgtggtcggggctgaccttcagcgtcacttttcttgtctcggcgatcgtctcgccaatgtggggaagcctggcggaccgtaaaggccgcaagctcatgctgctgcgcgcctcgttggggatggcgattgccattttactgcaggctttcgccaccaacgtctggcagctgtttatcctgcgggcgatcatgggcttaacctccggttatattcccaacgccatggcgctggtggcctcccaggtgccgcgcgagcgcagcggctgggcgctaagcacgctgtcgacggcgcaaattagcggggtgatcggcggtccgctgctgggcggtttcctggcggaccacgtcgggctgcggatggtcttttttattacggcgatcctgctgaccatcagttttctggtgaccctgtttctgattaaagagggcgttcgcccgcaggtcagcaaaagcgagcgtctcaccgggaaacaagtctttgcctctttgccctatccggggctggtgatcagcctgttcttcaccaccctggtgatccaattgtgcaacggctcaatcggcccgattctggcgctgtttattaagtcgatggcgccggacagcaacaatatcgcttttctggccgggatgatcgccgcggtgcccggcgtgtcggcactgatttctgcgccacggttgggtaagcttggcgaccgcatcggcacctcgcggatcctgctggcgacgctctgctgcgcggtggtgatgttcttcgccatgtcctttgtcaccaccccgctgcaattgggtacgctgcgttttctgctcggctttgccgatggcgcgatgctcccggcggtgcagaccttattgctgaagtacagcagcgacagcgtcaccgggcgtatctttggctataaccagtcgtttatgtatctgggcaacgtcgccgggccgctaattggcgcctctgtgtcagccatggccggcttccgctgggtgtttattgccaccgccattatcgttttcattaacctctggcagctggcgtggatgctgcgccaaacccgccgggctaacgcctga

SEQ ID NO: 210343 - DNA, 261 bp, Klebsiella pneumoniae
atgaagaatctcattgctgagttactggttaaactggcgcaaaaggaagaagaagcaaaggaactgacggtgcaggttgaagcgctggagatcgtggtcaccgcattattgcgccatatggagcatgatgcccagcaggcattgattcaggatattgaacaggcgattgaccaggtgaccccctgtccaccggtcaacgaccatgatgcgatgctgttgcagcaatatctaaagaagctgttgcggcatcctcgtagctag

SEQ ID NO: 210344 - DNA, 1416 bp, Klebsiella pneumoniae
gtgaaattaagcgccctgtttattgccctgattcctctactgggctcgccggttattcatgcagaaactactgctgcgccggttctggaaaatcgcgctgcgcagggagatatcaccactcctggcggcgcgcgtcgtttaacaggcgatcaaaccgaagcgctgcgcgcctcgttaatcaataagccagctaaaaacgttattttgctgattggcgatggcatgggtgattcggaaattaccgctgcgcgaaactatgccgagggggcgggcggtttctttaaaggaattgatgctctgccgttaaccgggcagtacacgcattattcgctggataaaaaaaccgggaaaccggactacgtgaccgactcggcggcctccgccaccgcctggaccaccggcgtgaagacttataacggcgcgctgggcgtcgatattcatgagaatgcgcatcagaccatcctcgagctggcgaaagcggcggggctggccaccggcaacgtttccaccgccgagctgcaggacgccacccccgcggcgttggtagcgcatgtgacatcgcgtaaatgctacggcccgacggtcaccagcgaaaaatgccccagcaatgcgctggaaaaagggggcaaaggctccattaccgaacagctgctgaacgcccgaccggatgtcaccctgggcggcggcgcgaagacctttgccgaaacggcgacggcgggcgagtggcagggcaaaaccctgcgcgagcaggcgcaagcgcgcggctaccagattgtgaccgacgcggcttctcttgccgccgcgacggaagccagtcaggataaaccgctgctgggactctttgccgatggcaatatgccggtacgctgggaagggccgaaggcgtcttatcacggtaatatcgataagccgccggtgacctgtacgccaaacccgaagcgtgacgcctcggtgccgacgctggcgcaaatgacggagaaagcgattgacctgctgagtcgcaacgagaaaggtttcttcctgcaagtcgaaggcgcttccatcgataagcaggaccatgcggccaatccgtgcggccagatcggcgaaacggttgatcttgacgaagcggtgcagaaggcgctggaattcgcgcgaaaagacggtaataccctggtgatcgtcaccgccgaccatgcgcatgccagccagatcatcccggcggatagcaaagccccggggctgacccaggctctgaacacgcacgatggcgcggtgatggtgatgagctacggcaactctgaggaagagtcgatggagcacaccggcacccaactgcgcattgcggcctacggtccgcatgcggctaacgtcgtcggcctgaccgatcagaccgacctgttcacgaccatgaaagctgccctgagtctcaaataa

SEQ ID NO: 210345 - DNA, 318 bp, Klebsiella pneumoniae; identical to SEQ ID NO: 134662

SEQ ID NO: 210346 - DNA, 810 bp, Klebsiella pneumoniae
atggataagaaaattggctttatcggctgcggcaatatgggtaaggccattctgggcgggctgatcgccagcggtcaggtacagccgggacaaatctgggtctacaccccgtcgccggacaaggttgcagctctgcgcgaccagtatggcatcaacgccgccagcagcgcccaggaagtggcgcagattgccgatatcgtcttcggcgcggttaaaccggggatcatgaccaaagtgctgggcgatatcgcctccagcctgaataaagagtcgctggtggtctctatcgccgccggcgttacgcttgagcagctggcgcgcgcccttggccacgatcgcaaaatcattcgcgcgatgccgaatacgccgtcgctggttaacgccggtatgacctccgtcacgcctaacgccctggtgagcagcgaagatgttgccgaagtgctgactattttccgttgctttggccaggcggagcaaattgccgagccgatgatccatccggtggtgggggtaagcggttcggcgccggcctatgtctttatgtttatcgaagcgatggccgatgccgccgtcctcggcggaatgccgcgcgctcaggcctataaattcgccgcccaggcggtgatgggctccgccaaaatggtgctggagagcggagaacacccaggggcgctgaaagatatggtctgttcccctggcgggaccaccatcgaagccgtgcgcgtgctggaagagaaagggttccgctcggcggtaatcgaagccatcacccagtgtatggaaaaatcagagaaactgagccgctcctga

SEQ ID NO: 210347 - DNA, 459 bp, Klebsiella pneumoniae
atggccatttgggtggatgcggacgcgtgtccgaacgtgattaaagagattttgttccgcgcggcagagcggacccagactccgctgacgctggtggcgaaccagccgctgcgcgtgccgccgtcgcgtttcatccgcaccctgcgggttgagcagggttttgacgtggcggataatgaaatcgttcgccagtgcgcggcgggagatttagtgatcaccgccgacatcccgctggcggcggaggtgctggcgaagggcggggcggcgctgaatccgcgcggggaacgttacagcgaggcgacgatccgcgagcggctgacgatgcgggattttatggagacattacgggccagcggcgttcagaccggcggcccggatagtttatcgcagcgcgatcggcaacagtttgccgccgagctggagaagtggttgctggcggttaagcgtcgccagggttaa

SEQ ID NO: 210348 - DNA, 711 bp, Klebsiella pneumoniae
atgcaatctgaagaacaacgccttattgatggactgttttcccggctgaaagaggctgaggcgcacagcgcatcgcgcgatgccagcgccgaggagcggattgcccaacacgtgagcgcgcagccggcggccccctactatatggcgcaaaccattcttatccaggaagccgcgattaaacagcttaacgatcgcatccaggcgctggagagtcaggtcagccaactgcaggcggcaaagcccagcagcggcggcttcctctctggcctgtttggcggtggcggctcgtcacgcggttctgaccctatcccgggcgcggagcaatatggtcgcccgcaggccagcgctcagccgcagtatacgccaccaccgcagcagaactatgccccgcaggctgccgcacgcggcggcggctttatggcgggcgcgctgcaaacggccgctggcgtggcaggcggcgtggtgctgggcaatatgctgaccaatatgttcagcggctcgcacccgcaggagatcgtcaatatcatcgaagagaagccgcagcctgatgccgcctccgcgcaggacagcatcgcgcaggacaccaccgcaggtgacgatccgttccgccagggagacgatcagttccttgccgacaatacctggaacgacgacttcgacgccggctttggcgacgatgattttggcagcgatgacgatagctgggtttaa

SEQ ID NO: 210349 - DNA, 534 bp, Klebsiella pneumoniae
atgacacagcctatctttcttattgggccacgcggctgcggtaaaaccaccgtcggccatgcgctggcgcgagcgcggcattttcagttctccgataccgatcatcggctacaggcccatgagcagcggacggtggctgagatcgtgcaggcggaagggtgggcgcgttttcgcgaactggagaccctgtcgctgaaggccgtgaccctgccgaatacggtaatcgccaccggcggcggtattgtgctggcggaaggtaaccgtcagtttatgcgggagaatggcgtggtgatttatctgcaggcctcggtgtcggcgctgattgaccgtctggaagcctacccgaaagccgaacagcggccgacgctgaccggaaaaccggtgcgcgaggaagtgggcgaggtgctggcgcagcgcgaagcgttataccgggacgctgcccaccatattgtggatgccacggcctcgccggatcgggtggtggagcagattatgtccatgctatgcagcgcgacggcaaccccggtaagttaa

SEQ ID NO: 210350 - DNA, 192 bp, Klebsiella pneumoniae; identical to SEQ ID NO: 134667

SEQ ID NO: 210351 - DNA, 666 bp, Klebsiella pneumoniae
atggcaattttgaccatcggcgttgtgccgctggcgggagtattgccgctcctgaccgaacatatcagggaagaacagatcgcccacatcagcctgctgggcgagatgacgcctgacgaggtaatggccgagtacgccgtaggtgacggcgagaaaggactcctgaccttgctcagtaataaccagttggtgatggtgtcgcgacagaaaattgagcgcgatgtccgcagcgcgatcgcgatgctggatcgacaacattatgatgtgatcctgctgctcagttccgaacagctgaccggttttaccacccaccacgcgatcctcctcgagccgcagcggatcatcccgccgctggtggcatcgatcgtcgatgggcaccaggtaggggtgatcgtgccggtggaagagatcatgcccatgcagcggcaaaagtggctctcgctggaaaagtcgccatactacgcgctggccaatccgtttaccggcagcgacagcgagctattaaccgccggcaaaacgctgctggagcagggcgccgacgtgctggtcctcgactgtctcggttactatcagcatcatcgcgatgtgttacaaaaagccctcgatgttccggttttgctgtcgaatgtgctggtttcccgactggcggcagaactattggtctaa

SEQ ID NO: 210352 - DNA, 285 bp, Klebsiella pneumoniae
atgcttcaaagcaatgaatactttgacggaaaagtgaaatccattggcttcaccagcagcagtaccggtcgcgccagcgttggcgtgatggcggaaggggaatacacctttggtacggcgcagccggaagagatgacggtagtcagcggggcgctgaatgtcctgctgccgggtgagactgagtggaaagtttacgctgccggcgaagttttcaatgtgccaggcaacagcgaatttcatctgcaggtggctgagccaacctcttatctgtgccgctatctgtaa

SEQ ID NO: 210353 - DNA, 912 bp, Klebsiella pneumoniae
atgctgtggttcaaaaatttaatggtttaccgtctcagccgcgatatcgaattgcgcgccgaggagatggaaaaacagctggccgagctgacatttaccccttgtggcagccaggatatggcgaaaaccggttgggtgtcgccgatgggatcgcacagcgacgcgctgacgcatacggcaaacggccagatcattatctgcgcgcgtaaagaagagaagatcctgccgtcgccggtgattaagcaggcgctggaggcaaagatccagaagctggaagccgatcaggggcgcaagctgaagaagaccgagaaagattccctgaaagatgaagtgctgcactcgctactgccgcgcgccttcagccgcttcagccagacaatgatgtggatcgacaccgtcaacggcctgatcatggtcgactgcgccagcgcgaagaaagcggaagatactctggccctgctgcgtaaaaccctcggctcgctgccggtggtgccgctgaccctggagaatccgattgagctaacgctgaccgagtgggtccgctccggcaccgtggcgcagggcttccagctgctggacgaagccgagctgaaagcgatgctggaagatggcggcgtgatccgcgccaagaagcaggatctggttagcgacgaaatcgctgtacacattgaggccgggaaggtcgtcaccaagctggcgctggactggcagcagcgtattcagtttgtgatctgcgacgacgcgtcaattaagcgcctcaagttctgcgatgaactgcgcgaccaaaacgaagatatcgatcgggaagatttcgcccagcgctttgacgccgactttatcttaatgaccggcgagctggctgccctgatccaaagcctggtggaagggctcggcggcgaagcgcagcgctaa

SEQ ID NO: 210354 - DNA, 915 bp, Klebsiella pneumoniae
gtgcgtattggtattgatttaggtggaacaaaaaccgaagtgatagccctgagcgaccagggagagcagctgtttcgccaccggttacccacgccgcgggaggactaccggcaaaccatcgagaccatcgccaccctggtggcgatggccgagcaggcgaccggacagcagggtaccgtggggatgggcattcctggctcaatttcgccttataccggggtggtgaaaaacgccaactcgacctggctcaacggccagccctttgataaggacctcagcctgcgccttgagcgggaagtccggctggctaacgatgccaactgtctggcggtgtcggaagcggtggacggcgcggcggcgggggcgcaaacggtattcgcggtgattatcggcaccggctgcggcgccggggtggcgctcaacgggcgggcgcatatcggcggcaatggtaacgctggcgaatggggacataacccattgccgtggatgaacgacgatgagctgcgctaccgtgcggaagtcccttgctactgcggcaaacaggggtgtatcgaaacctttatctccggcaccggtttcgccaccgactatcagcggctgagcggcaaagggttaaccggcagcgagattatgcgcctggtgggagaaggtgacgaaaaggctgaactggcgctgagccgctatgaacagcggctggcgaaatcgctggcccacgtggtgaatatcctcgacccggacgttatcgtgctgggcggcgggatgagcaacgtcgaacggctgtatcagacggtgccggacctggtgaagcagtgggtcttcggcggcgagtgtgaaacgccgatccgcaaagcgatgcacggcgactccagcggggtacgcggcgcggcctggctgtggccgctccaggggacctga

SEQ ID NO: 210355 - DNA, 3138 bp, Klebsiella pneumoniae
atgaaaatcctcagtctgcgtctgaaaaacctcaactccctgaaaggggaatggaagatagactttaccgccgagccgttcgccagcaatggcctgttcgccattaccggcgccaccggggccgggaaaaccacgctgctcgacgccatttgcctggcgctctatcatgaaacgccgcgcctgaataaagtctcccagtcgcaaaacgacctgatgacccgcgataccgccgagtgtctggcggaagtcgagtttgaagtaaaaggcatcgcctaccgcgctttctggagccagaaccgggcccgtaaccagccggatggcaatctgcaggcgccccgcgtcgagctggcgcgctgcgctgacggcaaaatcctcgccgataaagtctcggacaagctggagcaaaccgcgacgcttaccggcctcgactatggtcgcttcacccgctcgatgctgctttcccaggggcaatttgccgccttcctgaacgcgaagccgagcgatcgcgcggagctgctggaggagctgaccggcacggaaatctacggccagatttcagccatggtctacgaacagcacaaagccgctcgccacgcgctggagaagttcgaagcccaggcggcgggcatcgtcctgttgacggaggcccagcagcaggcgctgcaggaaagtttgcaggtacttactgacgaagaaaaagccctgctggcccagcagcagagccagcagcagcagcttcagtggctgacccgccgcgacgagctggcgcagcagcagcagcaggccgccacccggcagcagcaggcccgccaggcgctggcggacgccgccccggcgctggcgaagcttgagctggcccagcccgccgcccaactgcgtcccctgtgggagcgccagcaggagcagacggcaggcctggcgcaaacccggcagcggatcagtgaagtaaatgctcgcttacttgccagcacggcgctgcgcgcgcgcatccgccagggcgccttgcgcgctcagcagcagcgtcaggctgaactggccgatctggcgcagtggctggccgcccatgagcgtttccgcttatggggtcaggagatcgccggctggcgagcgcaattctcgcaactgacgcgggataaacaacagctaacggctcagagcacccgcctggccgcgctacgccagaagctggccacgctgccagccagccctctcaccctgagcgcggatgacgttgccgcagcgatagaacagcaaacccaatcgcggccgctgcgccagcgcctgctctccctgcatgaacagcatcagctgctgcgcaagcgtctgcgccagaacgccgacagcgtccagcaggcgcaagcggagcaggtaaaacttaacgctaccctgacgctgcgccgggaacaatataaagacaaaaaccagcactatctcgacctgaaggcgctctgccagcgggaagaaacgattaaagacctggaaagctaccgcgaccggctcgaggcgggaaagccctgtccgctgtgcggcgcctgtgaacacccggcgattgaacaatacgcctcgttgacgctcacggataatcagcgccgccgcgatgcgctggaaaaggaggtcgccgcgctgaaagaagaaggcctgctgatcctcgggcaggtcaaggccctgacgcaacagcttcagcgtgacaccgaagcggccgggcggctcgcagaggaagagcaagcgcttactaaagcgtggcaggagacctgcgcctctctgcacatcacgcgggatattgcgcaagagataaacgactggatgcaggagcaggagcgctacgagcagcagctctatcagctcagccagcgcctgatgttgcagagtcagcttaacgatcagcaggcgctggagcgccaggccgagcagcagctggcggccacgcgccagggactggaaagcgccctgcaggccctagccctgagcctgccggcagaagggacagaagccgcctggctgcacgctcgcgaaagcgaatttgcccagtggcaggcgcaacagacccaacatgatgccattcagcagcaaatcgctgctctgcggccactgctggagacgctgccgaccagcgacgagacagaggttgaagctgagtcggccatcccggacaactggcgcgaaatccacgaggaatgcctgtcgctgcacagccagcttgtcgcccagcagcagcaggaaacccaggaaaaggcgcgtctggaccagtcgcaggcgcaattcacctccgccctggccgccagccgctttagcgatcgggaggcgttcctcgccgcgctgctggatgacgagaccgcccagcggctgacgcagttaaaacagacgctggagcagcagcttcagcaggcggccgcgctctgcgagcaggcgacccggcaacatgaggcgcacctggcgctgcgtccgcaaggggtggacgctgacgtccccaccctgcaaacccagctgcacgccctggcccagcggctgcgggataacactacccgccagggtgagatccgccagcagctcaggcaggacgcagagagccgtcaacagcagcaggcgctggggcagcagattgcagaggcggcgcagctggcggacgactggggctatctcaattcgctgatcggctccagcaccggcgaccggttccgcaaattcgcccaggggctgacgctggataatctggtctggctggcaaaccagcagctcaaccgcctgcatggccgctatctgctacagcgcaaggccagcgaggcgctggagctggaggttgtcgatacctggcaggccgacgccgtgcgcgacacccgcaccctctccggcggcgaaagtttcctcgtcagcctggcgctggccctggcgctgtcagacctggtgagccataagacgcggattgactccctgtttcttgatgaaggcttcggcaccctcgacagcgaaacgctggacacggcgctggacgccctggatgcccttaacgccagcggtaagattatcggggtgatcagccacgtggaggcgatgaaagaccgcattccggtgcagatcaaagtgaagaagattaacggcctgggctatagccggctggacaaagcgtttgcggtggagtga

SEQ ID NO: 210356 - DNA, 1206 bp, Klebsiella pneumoniae
atgcgcctccttcacacctccgactggcacctgggccagaatttttacagcaaaagccgcgcggccgaacacgacgcttttcttacctggctactggaccgcgcgcaggagcatgaagtcgacgccattatcgtggctggcgatatttttgataccggctcgccgccgagctacgcccgcgaactgtataaccgtttcgtcgtccagttgcagcagaccggctgtcgcctggtggtgctggcgggcaaccacgactcggtggcgatgctcaatgaatcccgcgatatcctcgcctttttacacaccaccgtggtggcgaacgccggctacgcgccgattgagctgccgctgcgcgacggcacgccgggcgccatcttctgtccggtgccgtttttacgcccgcgcgagctggtgaccagccaggccggtcactccggtcgggaaaaacagcagctgctgctgcacgccatcagcgactattatcaggagcagtatcagcaggcctgcgcgctgcgcggcgatcggccgctgcccatcattgccagcggccatctgaccaccgtcggcgccagcaaaagcgatgccgtccgcgacatttacatcggcacactggatgcctttccggcgcaacacttcccccctgccgactacattgcgctgggccatattcaccgggcgcagatggtcggcggctgcgagcatatccgctacagcggctcgccgctgccgctgagcttcgatgaaaccggcaaagcgaaatcggtgcatctggtgagctttagcgaggggcgacttagcgccgtggaaaccctggaggtgcccgtgacccagcctctggcggtaatcaaaggcgatctggccgccatcaccgcccagctggagcagtggcgcggcgtcgagcaggacccgccggtgtggctggatatcgaaatcaccaccgaggactatctgcacgatattcagcggcatattcaggcgctgacggaggatctgccggtggaagtgctgctggtgcgccgcagccgcgagcagcgcgagaaaatactgctcaacgcccagcgggagacgctcagtgaactgaaggtggaggaggtattcgagcgccggctggcgctgaccgaaattgacgatatgaagcgcgcccggctgcatgagctgttcgcccatacggtgcatacgctcaccgcggaggacgaaaacgtatga

SEQ ID NO: 210357 - DNA, 690 bp, Klebsiella pneumoniae; identical to SEQ ID NO: 134673

SEQ ID NO: 210358 - DNA, 1296 bp, Klebsiella pneumoniae
gtgctggaacggctgtcatggaaaaggctggcgctggagctctttttagcgtgtattccggccctgattctgggggcgtttgtgggtcatctgccgtggtttttactggcggcagtgaccggtttgctgatctggcatttctggaatttgatgcgcctgtcgtggtggctgtgggtggaccggagcatgactcctccgcctggccgcggcagttgggagccgctgctgtatggtctgcaccagatgcagatgcgtaataaaaagcgtcggcgcgagctgggaagcctgattaaacgctttcgcagcggggcggaatcgttaccggatgcggtcgtcctgaccacggaagagggggctattttctggtgtaatggcctggcgcagcagattctaaacctgcgctggccggacgacagtggccaaaacattcttaaccttctgcgctatcctgagttcgccaactatctgaaacagcgcgatttttcaaagccgctcaatctggtgctgaataacgcccgtcatctggaaattcgcgtgatgccctacagcgacaagcagtggctgatggtggcgcgcgacgtgacgcagatgcatcagctggaaggggcgcggcggaactttttcgccaacgtcagccatgagttgcgcaccccactgacggtgctgcagggctatctggagatgatgcaggagcaggtgctggagggggcgacccgagaaaaagccctgcacaccatgcgggagcaaactcagcgtatggaaggtctggtgaagcagctgctgacgctgtcgcgtattgaagccgcgccggcgctggcgatgaatgatcgcatcgacgtgccgatgatgctgcgggtggtggagcgcgaggcgcaaactctcagccaggagaaacagacgctgatcttcaccgtcgatgagcagctcaaggtgctgggtaatgaggagcagctgcgcagcgccatctccaacctggtctataacgcggtgaaccacaccccgccggggaccgaaattcgcgtcagctggcagcgaaccccgcagggagcgctgttcagcgtcgaggataacgggccaggcattgcgccggagcatattccccgtctgaccgagcgtttttatcgggtggataaagcccgttcccggcaaacggggggcagtggcctgggactggcgatcgtcaaacacgcggttaaccatcatgacagccggctggaaatcgacagcacggtgggcaagggaacccgctttagcttcctgctcccggaacgattaattgccaaaaatgacgcctga

SEQ ID NO: 210359 - DNA, 1404 bp, Klebsiella pneumoniae
atggccgctgtatcgtccctgagaggggagcgcggtatttttccatttttttacaacaccacatccacaggcagtaatgaatttatgacccatcagttaaaatctcgcgacatcatagcgttgggctttatgaccttcgcgttgttcgttggcgcaggcaacattattttccctccgatggttggtttacaggcgggcgagcacgtctggacggcggcgatcggcttcctgatcactgcggtgggtctgccggtgctgacggtggtggcgctggcgaaagtcggcggcggcgttgaaagcctgagcaccccgattggtaaagtggccggtatcctgctggcggtggtgtgctatctcgcggtaggaccgctgttcgcgacgccgcgtaccgcgaccgtctcctttgaggtcggtattgcgccgctgaccggcgacggcccgctgccgctgctgatctacagcgttatttacttcgcgctggtgattctggtctccctctatccgggcaaactgctggacaccgtgggcaatttccttgcgccgctgaaaattatcgccctgattgtgctggcggtcgccgccatcatctggccagcgggcccgatcagcgacgcgctggaagcgtatcgtacggcgccattctccaatggcttcgtcaacggctacctgaccatggataccctcggcgcgatggtgttcggcatcgtgattgttaatgccgctcgctcacgcggcgtcagcgaagcgcgtctgttgacccgctataccgtctgggctggtctgatggcgggcgtcggcctgaccctgctgtatctggcgctgttccgtctgggctctgacagcgctactctcgtggatcagtccgccaacggcgcggcgatcctccatgcctacgtgcagcacaccttcggcggggcgggcagtttcctgctggcggcgctgatcttcatcgcttgcctggtgacggcggtgggcctgacctgcgcctgcgctgagttctttgcccagtatctgccgttctcctatcgcacgctggtctttgttctcggcctgttctccatggcggtctccaatttgggccttagccatctgatccaggtatcgattccggtgctgaccgctatctatccgccgtgtatcgcactggttgtattaagctttacccgcagttggtggcataattcgtcccgcgttatcgcgccggccatgtttatcagcctgatgtttggtatcattgacgggattaagtcatcggcatttgccgcgattctgccggactggaccgcgcgtctgccgctggcggagcagggcctggcctggctgatgcccaccgccgtgatgaccattctcgcggtgatctgggatcgcgcagtcggacgtcaggtgacttccagcgcgcattaa

SEQ ID NO: 210360 - DNA, 1374 bp, Klebsiella pneumoniae
atggaaagtagtaacaagcttaagcgcgggctaagcacccggcacattcgctttatggccctgggttccgccatcggcaccgggcttttttacggctcggccgacgccattaaaatggccggacccagcgtactgttggcctacattatcggcggcgtcgcggcatatatcattatgcgggcgctcggtgagatgtcggtgcataaccctgccgccagctcattctcccgctatgcccaggaaaacctcggcggactggcgggctatatcaccggctggacctactgctttgaaatcctgatcgtcgccatcgccgacgttaccgccttcggcatctacatgggcgtctggttcccgacggtgccgcactggatctgggtgctcagcgtggtgctgatcatctgcgccgtcaacctgatgagcgtcaaggtgtttggcgagctggagttctggttctcgttcttcaaagtggccaccattatcatcatgatcctcgccgggttcggcatcattatctgggggatcggcaacggcggccagccgacggggattcataacctgtggagcaacggcggcttcttcagcaacggctggctgggaatggttatgtcgctgcagatggtgatgttcgcttacggcggcatcgaaatcatcggcattaccgccggtgaggcgaaggacccggagaaatccattccgcgcgcaatcaactcggtgccgatgcgcattctggtgttctacgtcggcacgctgttcgtcattatgtccatctacccgtggaatcaggtgggaaccgacggcagccccttcgtcctgaccttccagcatctgggcattaccttcgcggccagtattcttaacttcgtggtcctgacggcttcgctgtcggcgattaactccgacgtgttcggcgtgggccgtatgctgcacggcatggctgagcagggcagcgcgccgaaggtgttcgctaaaacgtcgcgtcgcggtattccgtgggtgacggtgatggtgatgaccattgcgctgctgtttgcggtatacctaaattacatcatgccggagaacgttttcctggtgatcgcctccctggccaccttcgccacggtgtgggtgtggattatgatcctgctgtcacagatagccttccgccgccgtctgtcgcccgaagaggttaaggcgctgaaattcaaagtccctggcggggtggtgaccacggtgatcggcctgctgttcctggcctttattatcgcccttatcggctatcatccggacacccgcatctcgctgtacgtcggtatggcgtggattgcgctgttgctgctcggctgggtctttaagacccgccgtgagcgccgcctggcgcaggctcagtaa

SEQ ID NO: 210361 - DNA, 1818 bp, Klebsiella pneumoniae
atgttgaaggcatggcaccttccggttgcaccctttatcaaggtgcaacaggaccgactgtttattactctgtggttaagcggtgagtcgctgccgcagcggatcacgctgcgcgcggaagaggataacgaagagctgtcgctgccgatgcagcggctccgccaggcgccgcagccaggcgtggtggcatggcgcggcgaaatctctctcgccagcggccagccgcgccgccgctacagctttaagctgctgtgggccgaccatcagcgctggtttacgccacaaggcttcacccgattcccgccggcccgactggagcagttcgccattgacctgccggacgccggcccgcagtgggtggccgatcaggtgttctatcaaattttccccgatcgctttgcccgcagcgccgcgcgtgacgccgaccaggatgcggtctattaccatcacgcggcgggacgggagattgtgcgcaaggcgtgggacgacccgcttaccggcgaggcgggcgggtcgacgttctacggcggggatctcgacggcatcagcgaaaaacttccctacctgaagcagctcggcgtaaccgctctgtatctgaatccggttttcgccgcccccagcgtgcataaatacgataccgaggattatcggcgcgtcgatccgcagtttggcggcgacgcggcgctgctccggctgcgccacaacacccagcgggcgggaatgcgcatgatcctcgacggcgtgttcaaccataccggcgattcccatccctggttcgaccgtcaccagcagggcagcggcggcgccggccacgatccggactccccgtggcgcgactggtttaccttctcagaggaggggcaggcgcacaactggctgggctatgccagtctgccgaagctcgactatcggtcgaccagcctggtcaacgagatctatgccggtgaagacagtatcgtacgccactggctgaaggcgccatggagcatggacggctggcgtcttgacgtggtgcatatgctgggcgaaggcggcggggcgcggaataacctgcagcatatcgccggcattacccaggcagcgaagcaagcgcagccggaagcttttgtctttggcgaacattttggcgacgcgcgccagtggctgcaggcggatgccgaagacgcggcgatgaactatcgtggcttcaccttcccgatctggggattcctcgccaataccgatatctcttacgatccgcagaaaatagacgcccagacctgtatggcgtggatggataattatcgcgccgggctgtcgcatcagcagcagctgcggatgttcaaccagctcgacagccatgatacggcgcgttttaaatctcttcttggcaaagacgtagcgcgcctgccgctggcggtggtgtggctgttcagctggccgggggtaccgtgcatctactatggcgacgaggtgggcgtggatggcaataacgatccgttctgccgcaaaccgttcccgtgggatccggcgctgcaggatacccagctgctggcgttgtatcagcggatggcgaaactgcgtaaggcccaccaggcgctgcgctacggcggctgtcaggtgatttacgccgaggataacgtggtggtgtttgtccgcgtctacaaacagcagcgggtgctggtggtgattaaccgcggggaagcctgcgaggtggttatcgaagattccccgctgctgaacgtggccgggtggacgctgcaggagggcgccggcgccttccaggacggggtgctgaccctcccggccatctccgccaacgtctggtccggccgttaa

SEQ ID NO: 210362 - DNA, 903 bp, Klebsiella pneumoniae
atgcgcgtaaactttgatgttttgatgatccttgatgcccttgaccgccacggatccttcgccaccgccgcggagtcgctgtataaaacccccgccgctctgagctatatgatccagaaactggagagcgatctgaacatcgtgctgttggatcgttccggccatcgggcaaaatttaccgataccgggcggctgatgctggagaaggggcgacagcttttaagtgccgccagagatctggaaaagcaggcccagcagctgagcgcgggctgggagcgagagctagccatcgcccttgacgcctcatttcccttttcggccctgctgccgctgatcgccgagttttacgcgcaaaacccacagacgcgactgaacttcagccatcacaccctcgccggttcgtgggaagagctgacccatcatggggcggatattatcctcggcgccatcaatgagccgcccacatccgcggagtggtcatggcaaaccctcggcgcgttggataacatcttcgtcgtcgccccccatcacccgctggctcaggcgaaggagccactggccaataaacagctcagccagcatcgggccatcgtgatccgcgacagcgcccgctattgccatccgctcaacagcaatctcctcgacgagcagccgcaaatcggcgtcgatgatttcgccagtaaagtcgaactattgtgcgccgggctgggctgcggctttctgccgcgccatatcgctcgcccgtggctggtaaaaggcagtctggtggagaaaagcgtcgcctgctggcgggaaaaggatattacctatatggcctggcgcagcgggaatgatgggctggctcagcgctggtggcgggaggcgctcctccgcggcgacctgctgagccagctctaccattaa

SEQ ID NO: 210363 - DNA, 153 bp, Klebsiella pneumoniae; identical to SEQ ID NO: 134679

SEQ ID NO: 210364 - DNA, 642 bp, Klebsiella pneumoniae
atgtctattcgtgaactgctcgatcccactaattccgcgcttatctttattgaccatcagccgcaaatgtcctttggcgtggcgaatatcgatcgccagaccctgaaaaataacaccgtggcgctggcaaaagcgggcaaaatttttaatgtaccggtgatttatacctccgtagagaccaaaagctttagcggctatatctggccggaattattggccgtgcatcctgacgtcaagccgattgaacgtacctccatgaactcctgggaagacgatgcgtttgtggcagcggtgaaagcgaccggccgtaaaaagctggtgatctccgctctgtggaccgaagtctgcctgaccttcccggcgttgatggcgctggaggcgggctacgaggtctatgtagtgacggatacctccggcggcacctctgtcgacgcccatgagcggtctattgaccggatggtgcaggcgggggcggtgccggtgacctggcagcaggtgctgctggagtaccagcgcgactggtcgcgcaaagcgacctacgatgcggtaatggacctggtgcgcgaacacagcggcgcctacgggatgggcgtcgattacgcttataccatggtgcatggcgcgccggagcgtaaagcgtaa

SEQ ID NO: 210365 - DNA, 546 bp, Klebsiella pneumoniae
atggcgcagcaaaaatcggtgaccctggttatcagccatctgctcgatccgcaacacagccagcgctacgaagagtggctcggtaaaattatgcccattgcggcagaatttcccggccatcttggggcgaatgtgatccggcccgccgcagggcagaatctgtggagcgtcataatccgcttcgataccctggagcacctctacgcctggacgcagtcggaaacccgtcggcaactggtggctgagattgccccactgctgacggaaggcgatcggactgaggtgcggactgaaccggccttctggtttaccccgccgacggtgaacgtacgccagccgcggcgctggaaacagtttctgatcaccctgctggtgattttccccagcaccaacctggtgcctgcggtgaccggcatgctgctgccgtcgcttaaggggagcctgctgctgcacctcatcaatgatgcctgcgtggttgcgctggtggtctggttctggatgcccatcgtgacccgcctgtttgctggctggttgaagaaaaactga

SEQ ID NO: 210366 - DNA, 1869 bp, Klebsiella pneumoniae
atgtcgcaaactgccacactgattctgacccacggtcagattcataccctcgatcgtgcgaatcccctggcggaagccgtggccatcgccgacggaaaaattgttgccaccggaagtcacgatcggatcatgagctttgccgccgaggggacgcaaatcgtcgatctcaaagggcatacggtgatcccgggcctcaacgattctcacctgcacctgatccgcggtgggttgaactacaaccttgagctccgctgggagggcgtcccctcgctggcggatgccctgcgaatgctgaaggatcaggcggatcgcacgccgtccccgcagtgggtgcgggtggtcggcggctggagcgaatttcagttcgccgagcggcggatgccgaccctggaagagctgaacgaggcggcgcctgatacgccggtgtttgtgctccatctctacgatcgcgcgctgttgaaccgtgcggcgctgaaagccgtgggatataccaaagagacgccggatccggcgggcggcgagatcgtccgcgatagccacggcaacccgaccgggatgctgatcgccaaaccgaacgccatgatcctttacgctacgctggccaaggggccgaagctgccgctggatctgcaggtgaactccacccgtcaatttatgcgcgagctgaaccgactggggctgaccagcgccatagacgccggcggcggcttccagaactatccggaagattacgaaattatcgaacagctgcacgcgaaagatcagatgaccgtgcgcatcgcctacaacctgtttactcagcggccgaagcaggagctggaggatttcgaacgctggaccgacatgctgaagccggggcaggggactgacttctatcgcgccaacggcgccggcgagatgctggtattttcggcggcggattttgaagatttcctgcagccgcggccggatctgccgcaaggcatggaggatgagctggagcgggtggtacgccatctggtggagcatcgctggccgttccgcctgcatgccacctacgatgagtccatcagccggatgctggacgtgtttgagaaggtgaaccgcgatatcccgtttaatggcctgcactggttcttcgatcatgccgagaccattaccgagcgtaacattgagcgggtgaaggcgctggggggcggtattgcggtgcagcatcggatggccttccagggcgaatattttgtcgatcgctacggcaaagaggcggtgaaacataccccgccggtagcaaagatgctggcgctggacgtgccggtggggctgggcaccgatgcgacccgcgtcgccagctataacccgtggaccgcgctgtactggctggtctccgggcgcaccgttggcgggatggcgatgtatgacgacgccaaccgcctgccgcgcgatgtcgcgctggagctgtggacggcgggcagcgcctggttctccagcgagcagggcaagaaaggccgtctggccgccggtcagcttgccgatctggtggtgctgtcgaaagactacttcagcgtcgcggaagaggagatcaaaggcattgagtcggtgctgacggtggttgacggcaaagtggtgtacgccgccggtcacttctcgccgctggcgccgccgcctattccggtgctgccggagtggtcgccggtggtgaaggtcccgggccattaccgttccgctccgccggcgacggctaaaatcggcgccatggtgcagatgcaccagtgctgcggtagctgtggcgtccacggccatcagcatgatattgcgcgtaagtcgtcgattccggtctctgacgagcaggccttctggggcgtgctgggctgttcctgctttgccttttga

SEQ ID NO: 210367 - DNA, 861 bp, Klebsiella pneumoniae
atgttagtgtcgatgaaggacatgcttcagcatgccctgcgggacggctacgccgtcggtcagttcaacattaataatctggaatgggtcggcgccgtattaagcaccgcccagcagtgccgctcaccggttattttgggggtgtccggcggcacggttaagcatatgctcgggttaaaatgtattcatgacattgtggttaacgccatggagtatttgcatattgatgttccggtggcgctgcatctggatcatggcacctcccgggaggcctgcgaagcggcgatcgccgccggcttcagttccattatgtttgatggctcgcatctgccgttcagggaaaacctggccattacccgccacctggtgacgctggcccacagcaaaggtatctctgtggaggccgaactggggaccatcgccggcagtgaagacggcattgtcaattccgaagtcatctacgccgatccccaggagtgctacaccctggtgacagaaacccaggtggattgcctcgccgccgcgctgggctccacccatggtctgtataaaggtaaagcccgactgggatttaccgagatgaaagccattgccgagcaggtgaaggttccgctggtgctgcatggcggcaccggtattgccgatgaggatatgcgccgggcgattgcctgcggcaccgccaagattaacgttaataccgaaaatatgtacgcctggtgccaacaggtgaaagcaattttcgccgccgacaccggacacgatgtgaacgatccgcggaaagtcatcgcccagggactgcagccggtacgcgagatgattgcccgccgcatggcgctctttggctcagagcagcgctattga

SEQ ID NO: 210368 - DNA, 963 bp, Klebsiella pneumoniae
atggctattttgtccattggatttgcttgtttcgatcagtttttctttctcaatgaatggccccaggagaataccaaaaacttttgtcatgattttattgaaagcggcggcggtccggcggccaatgcggcctggctgctgggattatggggcgaggaggtttattacattggtcatctgcagcaggacctttacggtcagcgcattatcgatgagtttgccgaggcgggggtggataccagccaggtggttttctccgatgacatgatcaccccgctggcctcggtgctggtcaatcgcttaacgggttcgcggacgattattacccgcaagatgcaaacgccgccttccctgacctacgagcaaaagctcaaactggacgacctcgccgagcgactgattgccagcgaggagccggttaccattttaattgacggccatgaggcggaaatcagtgaatatttaattaagaaactgcccaacgccagggtcgtgatggacggcgggtcactgcgcgccagcaatattaaactggcggcctggactgactattttgtagtgagcgaacatttcgcccgcgattatatgagctatcgctcgctgagcaccgaagcagaaattaaagcggccctgattgagttgaataaaatttgccgcggtgaagcatttattacccttggcgaaaaaggctgcgcttttttaaaaagcggtatgctgcagatcgtcccgtcctggctgtgcaatgccgttgataccaccggcgccggggatgtatttcacggcgccttcacctatggcgtccattactcatggcatatcgataacattattttatttgccagcctgaccgccgccatttctattgagaaaaaaggggttcgggaatcgatgcctgacctggcggtcgtccaccactcgttaaatagctacgagagaaacttaacgcaatattttgaagaataa

SEQ ID NO: 210369 - DNA, 1392 bp, Klebsiella pneumoniae
atgcaggctattcttagtttcttaacggaaatattcagtcaacccgcctttttaatggggcttatcgcctttgttggtttagtggcgctgcgctcccccggtaacaaactgcttaccggcacattaaagccgattttaggctatttgatgttgagcgctggggcaggcgttatcgttgccaatctcaatccgctgggcggtattatcgaggccggatttaatatccgcggcgttattccgaacaatgaagccattgtctccgtcgcccagaaaatgctgggcgtggaaaccatgagtattttactgttaggctttattttcaatctgattatcgcccgctgtaccaagtataaatatatctttctgaccggccatcattcgttctttctcgcctgcctgttctccgccgttctgcaggcggcggagttccagggctggatgttgatcctgatcggtggattcctgttgggctcatggtcggccatctccccggccatcggtcagcgttacaccaggcaggtaaccgaagacggcgggatcgccatgggccatttcggctctctcggctactacctctcggcatggatcgccagccggaccggcaatccggcaaattccttcgccgataccgaaatttcagaaaagtggggctttctgcgcgataccacggtcaccaccggtatcgtgatgtttgttatctactttgtctgcagcgctgtcgccgggtcggcgtacctgagcaccatcaccgaccaaaacatgctgatcttctcggtgctgaccggtctgcagttcgccgttggcgtagccattgtctataacggcgtgcggctgatcctcggcgatctggtgccggcgttccagggcatcagccagaagctgatcccggattccatcccggccgttgactgcgcggtgttcttcacctttagccccaccgcggtggtagtgggattcatcagttcctttgtgggcgggctggtcgggatgctcttgctcggcgggctgggcatggcgctgattattcccggcatggtgccgcacttcttctgcggcggcacgtccggcgtcttcgccgacaaactgggcggtaagcgcggatgtatcatcgcctcctttatcggcgggatcttcctggccttcctgccggcgatgctgctgccggcgctcggcaacctcgggtttgaaaacagcaccttcgccgatttcgacttcgcggtatggggcatcattatcgggaatgcgttcacccagtttggtcagatcactatctatctgatttgtctggcgctgctcgtcgcgctgctggcgcctttctgcttccgtcacgtccaggtggtgggcaacacgctcagctatgaggagcttacggcgaagcagaaaaatgaataa

SEQ ID NO: 210370 - DNA, 288 bp, Klebsiella pneumoniae
atgttagttatcagaacggtttgtggtaacggtattggcagctcattgatggctgcgaataatgtgaaaaagatttgtgacgaattaggcatcaaagcggacgtcgcctcggtcgattttgctaacgccgtcggggaaaaagccgacctttacgtcacgatcaaagaactggcaaatcaatttccggcccactgtcatgtcgccatcattcgcagctacgtccataaagcgaagatcgccgaggatattaccgacgcgctgatgaaaattgctgcgactcactcttaa

SEQ ID NO: 210371 - DNA, 444 bp, Klebsiella pneumoniae; identical to SEQ ID NO: 134685

SEQ ID NO: 210372 - DNA, 603 bp, Klebsiella pneumoniae; identical to SEQ ID NO: 134686

SEQ ID NO: 210373 - DNA, 582 bp, Klebsiella pneumoniae
atgaattttctcgcccacctgcacctggcccatctcgccgacagttcgctgcccggcaacctgatggccgacttcgtgcgcggcaacccgcagggcgactatccggcggagatcatcgacggcatctatatgcatcgccggattgacgtgatgactgacaacctggcggaagtcaaagaggcgcgggagtggtttcgcccgcagacccgccgcgtcgcccccatcaccctcgacgtcatgtgggatcatttcctgtcccagcactggacgcagctctcccctgacctgccgctggacgagttcgtacgctacgccgagcggcagatcgtccccatcctgcccgactcgccgccccgcttcgtcaatctcaatcaatatctgtggtcggagcgctggctggagcgctatcgggaaatggattttattcagcgcgtgctgaacggcatggccagccgccgtccacgtctcgaggcgctacgcgactcctggcaggatctggatacccattacgaccgtctggagacgcagttctggcgcttttatccgcagatgatgcgccaggcagaaaacaaacagctgtaa

SEQ ID NO: 210374 - DNA, 1065 bp, Klebsiella pneumoniae
atgcgcgttaccgattttgcttttgaactacccgaatctctgatcgcccactatccgatgcctgagcgcagtagctgtcgcttgctctccctggacgggccgacgggcgcgctgacgcatggcaccttcaccgacatcctcgataagctcaatcccggcgatctgctggtgtttaacaacacccgggtgatcccggcgcgtctgttcggccgcaaggccagcggcggcaagattgaagtgctggtggagcggatgctggatgataagcgcatcctggcccatattcgcgcctcaaaagcgccgaagccgggcgccgagctgctgctgggcgatgacgagagcattaaggccacgatgctggcgcgccacggcgcgctgtttgaagtggagtttaacgacgagcgcccggtgctggagatccttaacgggatcggccatatgccgctgccgccctatattgaccgcccggacgaagacgccgaccgcgagctctatcaaaccgtctatggcaccaggccgggcgcggtagccgccccgaccgccggtttgcatttcgacgaaccgctgctggacaaactgcgcgccaaaggcgttgagatggcgtttgtcaccctgcatgtgggggcgggcaccttccagccggtgcgcgtcgacagcattgaagagcacaccatgcactccgaatatgccgaagtgccgcaggaggtggtcgatgcggtgctggcggcgaaagcgcgcggcaaccgcgtgatagcggtgggcaccacctcggtacgttcgctggagagcgcggcgcaggcggcgaaagacgcgctgatcgcgccgttcttcgacgatacgcagattttcatctacccgggttatcagtaccaggtgatcgatgcgctggtgactaacttccatctccctgaatccacactgattatgctggtgtcggcgtttgcgggttatcagcacaccatgaacgcctataaggtggcggttgagcagaaatatcgcttttttagctacggggatgcgatgtttatcacgtacaatccgcaggctatttctgagcgtccctga

SEQ ID NO: 210375 - DNA, 1128 bp, Klebsiella pneumoniae; identical to SEQ ID NO: 134690

SEQ ID NO: 210376 - DNA, 333 bp, Klebsiella pneumoniae
atgagcttttttatttctgatgcggtagcggcaacgggtgcaccggcgcagggcagcccgatgtctctgattctgatgctggtggtgttcggtctgattttttacttcatgatcctacgtccacagcagaagcgcaccaaggaacataagaacctgatgaactccatcgccaaaggtgatgaagtgctgaccaacggcggtctggtcggtcgcgtgaccaaagtagcggaaactggctacattgctatcgcgctgaacgataccactgaagtggttatcaaacgtgacttcgttgctgccgttctgccgaaaggcaccatgaaggcgctgtaa

SEQ ID NO: 210377 - DNA, 1815 bp, Klebsiella pneumoniae
atgctggtcgtcgtcattgtcgtcggcctgatctatgcgcttcccaacctgtatggtgaggatccggctgttcaaatcactggcgcgcgcggcgtcgccgccagtgagcaaacgctgatccaggtccagaaaactttacaagaagaaaaaataaccgcgaagtctgtggcactggaagagggcgctattcttgcgcgcttcgacaccactgatacccagctgcgcgcgcgcgaagcgctgcttaacgtgctgggtgacaaatacgtcgtggcgctgaaccttgctccggcaaccccacgctggctggcggcgctctatgccgagccgatgaagctgggtcttgatctgcgcggcggcgtgcacttcctgatggaagtcgacatggacaccgcgttaggcaaactgcaggaacagaacatcgatagcctgcgcagcgagctgcgcgacaaaggcattccttacgcgaccgtgcgtaaagaagacaactacggtctgagcatcgtcttccgcgacagcgcggcgcgcgaccaggctatctcttatctcagccctcgccatcgcgatctggttatttcctctcagggtgacaacagcctgaaagcggtgatgaccgatgagcgcctgaaagaagcccgtgagtacgcggttcagcagaacattaatatcctgcgtaaccgtgtgaaccagctgggcgtcgccgagccgctggttcagcgtcagggcgctgaccgcatcgtggttgagctgccgggtatccaggataccgcgcgtgcgaaggaaatccttggcgcgaccgcgaccctcgagttccgtctggtcaatactaacgtggaccagtccgccgccgcctctggccgcgtgccgggcgactcggaagtgaagcagacgcgtgaaggccagccggtagtgctgtacaagcgggtgatcctgaccggggaccatatcaccgactcgacctccagcatggatgagtacaaccagccgcaggttaacatctcgctggacagcgcgggcggtaacatcatgtctaacttcactaaggacaacatcggcaagccgatggcgaccctgttcgtggagtataaagacagcggtaagaaagacgctaacggtcgcgctatcctggcgaaagaggaagaggtgattaacatcgccaacatccagtcgcgtctgggtaacagcttccgtatcaccggtatcagcaatccgaacgaagcgcgtcagctgtcgctgctgctgcgtgccggcgcgctgattgcgccgattcagatcgtcgaagagcggactatcggcccaaccctgggaatgcagaacatcaagcagggtctggaagcctgtctggccggtctggtggtctctatcctgttcatgatcctcttctataagaagttcggcctgattgcgacctcggcgctgattgccaacctgatactgattgtcggcattatgtccctgatcccgggggcgacgctgaccatgccgggcatcgcgggtatcgtgttaacccttgcggtggcggtcgatgctaacgttctgatcaacgagcgtatcaaagaagagctgagcaacgggcgtaccgttcagcaggcgattgacgaaggttatcgcggcgcgttcagctcgatcttcgacgccaacgtgacgacgcttatcaaagtgatcatcctgtacgcggtcggtaccggtgccattaaagggtttgcgattaccaccggtatcggtatcgcgacctcaatgtttaccgctatcgtcggcacccgtgccatcgtgaacctgctgtacggcggcaagcgcgttaaaaagctgtctatctga

SEQ ID NO: 210378 - DNA, 972 bp, Klebsiella pneumoniae
gtggcacaggaatatactgttgaacaattgaaccacggccgtaaagtctgggactttatgcgctgggactactgggccttcggcatttcaggttttctgctaattgtgtcgatcgccatcatcggcgttcgcgggtttaactgggggctcgatttcaccggcggtacggtgattgaaattacccttgagaaaccggtcgatctggaccagatgcgcgattccctgcagaaagcgggctttgaagagccgcaggtgcagaactttggcagcagccgcgacatcatggtacgtatgccgccggtgcatgacgccaacggcagccaggagctgggcagcaaggtcgtgacggtgattaacgaatcgaccagccagaatgcggcagtgaagcgtattgagtttgtcggcccgagcgtcggggcggacctcgcgcaaaccggcgccctggcgctgattgcggcgctggtctgtatcctgatctacgtcggcttccgcttcgaatggcgtctggccgccggggtggttatcgccctggcgcacgacgtggtgatcaccatgggcgtgctgtcgctgttccatatcgagatcgacctgaccatcgtggcctcgttgatgtcggttatcggctactcgctgaacgacagtatcgtggtatcggaccgtatccgtgaaaacttccgtaagatccgccgcggtacgccgtacgagatctttaacgtgtcgttgacccagacgctgcaccgtaccttgatcacctctggtaccactttgatggtgatcctgatgctgttcctgttcggcggcccgattctggaaggcttctcgctgaccatgctgatcggtgtttccatcggtacggcttcctctatctacgtcgcctccgcgctggcgttgaagctgggcatgaagcgcgagcatctgatccagcagaaggttgagaaagaaggggcggatcagccgtctattctgccgtaa

SEQ ID NO: 210379 - DNA, 366 bp, Klebsiella pneumoniae
atgaacaacgtgattaactggtttgaaattccggtcgccgatatggatcgcgccgtcgcgttttatgagccggtgatgcaagtgtcgctgcgtcgcgaaaccatggactgcgccgagctggcggtgttcccgcatcaggatccggcccccggcggcgcgctggccaaatttgaaggtatcgcgccctcggcgcagggcgctattatttatctgcatactgatcatcttgccgccacgctggagcgcgttgcctcggcgggtggggcctgtgtcttcggcccgctgacgctgccgaatgatattggcaccatcgccctgtttaccgacagcgagggcaaccgcgtcggcctgcaccagccggcttaa

SEQ ID NO: 210380 - DNA, 696 bp, Klebsiella pneumoniae
atgacccgacgcgccgaccgtttatttcagattgtgcagatcctgcgcggcaggcggctcactaccgccgcgctgctggcggagcggttgggcgtgtcggagcgtactgtctatcgcgatattcgcgatctctccctctccggcgtaccggtggagggcgaagcgggcagcggctaccggctgctggcgggctacgatctgccgccgctgatgctgaccaccaaagaatccgaggcgatgatcgctgcgattcggctgctaaaaacctggggcggtgaggcgctgtcgcagtcgctggagtccgcccaggaaaaaatgctggcgatcctgccggaggcgcgtcggcgccaggcggagcagactcgcctgtttgcccctgaccttggcgcgcatcgctatgctaaaacccattttgacgttatccaccaggccgtatccaatcagcaggtattacagcttcactaccaggatgaatccggtcaggtgacgtggcgtgaagtgctgcccctggggctgtttttctggggcgaacgctggctgttggtggcctggtgcgaactgcgcaatgattaccgcaattttcgcctcgaccgttgtctggaggtcagaaggaccgaacgtcgattcagcgagtgcgccgaccgctcgttaagcgattttctgcgcaaggtccggtgcgaggtgcgggagaaataa

SEQ ID NO: 210381 - DNA, 885 bp, Klebsiella pneumoniae
atgaaaaaaacattactggcagcgggtgcggttgtggcgctctccactacttttgccgcgggcgcggcagaaaacgacaaaccgcagtatctgtctgactggtggcaccagagtgttaacgtggtgggcagctaccacacccgttttggaccgcagatccgtaacgatacctacctggaatacgaagcgttcgccaaaaaagactggtttgatttctacggctatattgatgccccggtattcttcggcggcaacagcacggcaaaaggtatctggaacaaaggttccccgctgtttatggagatcgaaccgcgtttctctatcgataagctgaccaataccgacctgagcttcgggcctttcaaagaatggtatttcgccaacaactatatctacgatatgggccgcaacgactcccaggagcagagcacctggtatatgggtctgggtaccgatatcgataccggcctgccaatgagcctgtcgctgaacgtctacgccaagtaccagtggcagaactacggcgcctccaacgaaaacgaatgggacggctatcgcttcaaagtgaaatactttgtgccgctgaccgacctgtggggcggttcgctgagctacatcggcttcaccaacttcgactggggttctgacctcggcgatgacaacttctacgatctgaacgggaagcacgcgcgcaccagcaactctatcgcctccagccacatcctggcgctgaactacgcgcactggcactactctatcgtcgcccgttacttccataacggcggccagtgggctgatgatgcgaagctgaacttcggcgatggtccgttcagcgttcgctcgaccggctggggtggttacttcgtggtcggctacaacttctga

SEQ ID NO: 210382 - DNA, 540 bp, Klebsiella pneumoniae
atgacaagacgttacctgaagctcgccatcgcgggctgcctgttcaccctgaccgcctgcgcccagcaaagcgaaatccgccagatgcaccagagcgtgagtacgctgagccaggagatgacccagctcaaccagcaaacgatcaaaatcacccagcaaaacgcgctgaacgccaaatccacccgcggcgtctatctgctgccggaggccaagaccccggcgcggctggagagccagatcggcaccctgcgcatgtcggtgggcagtattaccccggatggcgatgggtcacgcctgaccttacgcattcagggcgaatccaacgatccgctgccggcctttaccgccaccgtcgcttccggacagatcaccggcaccacccacagctatcaggaagtcaatgttcaggatcagctgattagcgcgccggccagcaccctcgcccccagcgatgtcgatatcccgttgcgcctcaatgtaacgccagataaagtcggttttattcgcgtacacgatatccagcccgccgccgcccagtaa

SEQ ID NO: 210383 - DNA, 450 bp, Klebsiella pneumoniae; identical to SEQ ID NO: 136545

SEQ ID NO: 210384 - DNA, 1104 bp, Klebsiella pneumoniae
atgcaggacgaaatgtacatggcgcgtgcgctgaagcttgccgcgcgcggtcgctttactacccatcctaaccctaacgtcggctgcgtcattgtgaaagacggcgagatcgtcggcgaggggtttcactatcgcgccggcgagccgcatgctgaagtgcacgccctgcgcatggctggcgaaaaggcgcgcggcgccaccgcctacgtcactcttgagccctgcagccaccatggccgtacgccgccatgctgcgatgcgctgattgccgccggcgtcagccgcgtggtcgccgcgatgcaggatccgaacccgcaggtggcggggcgcggtttgtatcgcctgcagcaggccggcattgaggtcagccatgggctgatgatgaacgaagcggaagcgctgaataagggctttctgaagcggatgcgcaccggttttccctgggtgcagctgaagctgggcgcctcgctggacggccgcacggcgatggccagcggcgaaagccagtggatcacctccccgcaggcgcgacgcgacgtgcagcgtctgcgcgcccagagccatgccatcctgaccagcagcgccaccgtgctggcggacgatccggcgctgaccgtgcgctggcaggagctgagcgccgatacccaggcgctttatcccgaagagaatttgcgccagccgctgcgcgtcgttatcgacagccagaaccgcgtcacgcctgagcatcgtattgtgcagcaggcgggggaaacgctgtttgcccgcctgcgcgccgatgcacggcagtggccggaaagcgcccgcacgctgctggttccggagcataacggccatctcgatctggtgctgctgatgatgatgctcggcaaacagcagatcaacagcgtctgggttgaggcaggggctacgcttgccggggcgctgctgcaggcgggtctggtcgacgagcttatcgtctatattgcgcctaaactgttaggcaatgcggcgcgtggattatgcgcgctgccggggcttgaagagctgagccaggccccccattttaaattcaatgagatacgtcaggttggcccggatgtctgcctgcatttaaccactgcgtga

SEQ ID NO: 210385 - DNA, 471 bp, Klebsiella pneumoniae; identical to SEQ ID NO: 136543

SEQ ID NO: 210386 - DNA, 420 bp, Klebsiella pneumoniae; identical to SEQ ID NO: 136542

SEQ ID NO: 210387 - DNA, 972 bp, Klebsiella pneumoniae
atggcatgcggcgaattctccctgattgcccgttattttgatcgcgttaaaagcgcccgccttgatgttgaaaccggcatcggcgatgactgcgcgctcctgcatattcccgagaaaaaaacgctggcaatcagcaccgacaccctggtggcgggcaatcacttcttacccgatatcgacccggccgacctcgcttataaagcgctggcggtgaacctgagcgacctcgcggcgatgggcgcggagccggcgtggctcacgctggcgctgaccttgccggaggtggatgaagtctggctggaagccttcagcgacagcctgtttgtccagctggactattacgctatgcaactgattggcggcgacactacccgtggcccgctctccatgacgctgggtatccacggctttgtgccgccgggacgcgccatgaaacgcgctggcgcgaagccgggggactggatctatgttaccggcactccgggagatagcgccgccggtctggctgtactgcagaatcgtctaacggtggatgaaccgtctgacgccgactacctgctggcccgtcatctgcggccgatgccgcgcgtgctgcagggccaggcgctgcgtgacctggcgacatcggctatcgatctctccgacggcctgatctccgatctgggccatattctcaaagccagcggctgcggcgcacgtatcgatctcgatgccatgccgtactccgatgcgatgctgcgccaggttgattctgagcaggcgctgcgctgggcgctcgccggcggggaagattacgagttgtgctttaccgtaccggagctgaaccgcggggcgctggacgtggctcttggccatcttggcgcgcgttttacctgtatcggacagattgcgccggagagcgaagggctgcagtttatccgcgacggtaagccggtcgcgcttgatttaaagggatacgatcactttgcgtag

SEQ ID NO: 210388 - DNA, 504 bp, Klebsiella pneumoniae
ttgcgtagtcgagacgaggcgcttagccgcctgagtatgcgtaatccgtggcatctgctggcgaccggctttggcagcggcttaagcccggtggtgccggggacgatgggctcgctggcggcgatcccgttctggtatctgatgacctttctcccctggcagctttactcgctggtggtgatgatgagcatctgtatcggcgtctatctgtgccatcgcacggccaaagatatgggcacccatgaccacggcagcatcgtctgggacgagttcgtcgggatgtggatcaccctgatggcgctgccgaccatggactggcagtgggtggccgccggcttcgtgattttccgtatcttcgatatgtggaagccgtggccgattcgctggtttgatcgcaatatccacggcggaatggggattatggtcgatgatatcgtcgccggcgtgatctccgccggcgtgctgtacatcattggccatcactggcccatcggtctgctttaa

SEQ ID NO: 210389 - DNA, 975 bp, Klebsiella pneumoniae
atgcactatatccccctcggtgatactgccttacgtgtttcccgactctgcctcggctgcatgaccttcggcgagccggaccgcgggaggcacgcctggacgcttccggaagagagcagccgtccgcttatccagcacgccattgaaggcggcatcaacttcttcgataccgcaaatagctactccgacggcagcagcgaagagatcgttggccgcgccctgcgcgactttgcccgccgcgacgaggtggttgtcgccaccaaggtgtatcaccaggtcggcgatctggcggaaggactttcccgggcgcagatcctgcgctccatcgacgacagcctgcgccgtctcgggatggactatgtcgacctgctgcagatccaccgctgggactataccaccccgattgaagagacgctcgaagcgctggacgaggtggtgaaagccggcaaagcgcgctatatcggcgcctcgtccatgcatgcccggcagtttgcccaggcgctggcgctccagcagcagaacggctgggcgcgcttcgtcaccatgcaggatcactacaacctgatttaccgggaagaagagaatgagatgctgcccctgtgccaacgtaacggcgtagcggtgatcccgtggagtccgctggcgcgcggcaggctaacccgcccctggggtgagaccaccgcccggctggtctcagatgagttcggcaaatcgctgtacagcgccagtgaagaaaacgatgcgcagatcgccgagaatctcgcggacgtggcggaagaactcgacgccagccgcgcccaggtcgctctcgcctggctgttaagcaaacccggcgtcgccgcgccgattatcggcccgtcgcgtcaggaacagctcgatgatctgctgcaggcggtggatttgacgctctccgcggaacagatcgacaagctggaggcgccgtatcagccgcatccggtggtgggatttaagtga

SEQ ID NO: 210390 - DNA, 1863 bp, Klebsiella pneumoniae
atgagttttgatattgccaaatacccgaccctggcgctggtagattccacccaggagttgcgcctgttgccaaaagagagcctgccgaagctatgtgatgagctgcggcgctatctactggacagcgtcagccgttccagcggtcactttgcctctggcctcggcacggtggaactgaccgtggcgctgcactacgtgtataacacgccgttcgatcgcctgatctgggacgtcggccatcaggcctacccgcataaaattctgaccggtcgccgggacaaaatcggcaccattcgtcagaaaggcggcctgcatcccttcccgtggcgcggtgaaagcgagtatgacgtgctgagcgtcggtcactcctccacttccatttccgcgggtatcggggtggctatcgccgccgcgaaagaggataagcagcggcgcgcggtgtgcgtcattggcgacggggcgatcaccgccggcatggcgtttgaggcgatgaaccacgccggggatatcaaacccgacctgctggtggtgctgaatgacaatgaaatgtcgatttccgagaacgtcggcgcgctgaacaatcatctggcgcagctgctctccggtaagctctactccaccctgcgcgaagggggcaaaaaggtcttctccggggtgccgccgattaaagagctgcttaagcgtaccgaagagcatatcaaagggatggtggtgccgggcacgctgtttgaagagctgggctttaactacattggcccggtggatggccatgacgtgctcggtctggtcagcacgctgaagaacatgcgagacctgaaaggcccgcagttcctgcatattatgaccaaaaaaggccgcggctatgagcctgccgagaaagacccgatcaccttccatgcggtgccaaaattcgaccataccagcggcgtactgcccaaaagcagcggcggcctcccttcctactcgaaaatcttcggcgactggctgtgtgaaacggcggccaaagacaacaagctgatggcgatcacgccggcgatgcgcgaaggttcagggatggtggagttttcgaagaaattccccgatcggtactttgacgtcgccattgccgagcagcatgcggtcaccttcgccgccgggctggcgattggcgactacaagccggtggtggcgatctactccaccttcctgcagcgagcctacgatcaggtgatccacgatgtggctatccagaagctgccggtgctgtttgctatcgaccgcgccgggatcgtcggcgcagacggtcagacgcatcagggagcgttcgatctctccttcctgcgctgtattccggatatggtggtaatgaccccgagcgatgaaaatgaatgtcgccagatgctgtacaccggctaccactacagcaacggcccctgcgcggtgcgctatccgcgcggtagcggcaccggcgcgacgctcgagccgctggcatcgctgccgatcggcaaaggggtggtgaaacgtcagggcgagaaaatagcgatcctcaactttggcaccctgctgccggaagccgcggcggtagcggacaaactcaacgccaccctggtggatatgcgctttgtgaagccgctggataccgcgctgatcctccagctggccggcgagcacgacgcgctggtgacgctggaagagaacgccatcatgggcggcgccggcagcggcgtgaacgaagtgctgatggcccatcgccgggcggtaccggtgctcaatattggcctgccggattattttattcctcagggcactcaggaagagatccgcgccgacctcggccttgatgccgccggtattgaagccaaaatccgcgactggctggcataa

SEQ ID NO: 210391 - DNA, 900 bp, Klebsiella pneumoniae; identical to SEQ ID NO: 136537

SEQ ID NO: 210392 - DNA, 243 bp, Klebsiella pneumoniae; identical to SEQ ID NO: 136536

SEQ ID NO: 210393 - DNA, 1449 bp, Klebsiella pneumoniae
atgaagtttatcattaaattgttcccggaaatcaccatcaaaagccaatctgtgcggttgcgcttcattaaaatcttaaccgggaacattcgtaacgttctcaaaaactatgatgagacgctggccgtcgtccgtcattgggatcatatcgaagttcgcgcgaaagatgaaaatcagcgcccggctattcgcgatgcgctgacccgtatccccggcatccaccatattctggaagtcgaagacgtgccgttcacctcgctgcacgatattttcgagcagacgctgccgctgtggcgcgaggcgctggaaggcaaaaccttctgcgtgcgagtgaagcgtcgcggcaaacatgaattcacctcaattgaagtggaacgttacgtcggcggcggtctgaatcagcatattgaaacggcgcgcgtgaagctgaccgacccggacgtcactgtcaatctcgagattgaaaacgatcgcctgctgctggtgaaaggccgctatgaaggcatcggcggtttcccgatcggcacccaggaagatgtgctgtcgctgatctccggcggctttgactccggcgtctccagctacatgctgatgcgccgcggctgccgcgttcattactgcttctttaaccttggcggcgccgcccatgagattggcgtccgccaggttgcgcattatctgtggaaccgcttcggcagctcacaccgcgttcgctttgtggcgattaactttgagccagtagtcggcgaaatccttgaaaaagtggacgacggccagatgggcgtcgtgctcaagcgcatgatggtccgcgccgcgtcaaaagtcgcggaacgctatggcgtgcaggcgctggtcaccggcgaagcgctcggccaggtctccagtcagaccctcactaacctgcgcctgatcgataatgtctccgatactctgatcctgcgcccgctgatttcgcacgataaagagcacatcatcgacctggcgcgtgagatcggcacggaagatttcgcccgcaccatgccggaatattgcggcgtgatctccaagagcccgaccgtgaaggcggtgaaggcgaagattgaagcggaagaagaacacttcgatttcagcatccttgataaagtggtagaagaggcgagcaatatcgatatccgcgagatcgcccagcagacggaagagacggtggtggaagtggaaaccgtgaccggctttggcgccaacgacgcgatcctcgacattcgctccatcgacgagcaggaagacaagccgctgaaggtcgagggggttgaggttgtttccctgccgttctacaagctaagcaccaaatttggcgatctcgatcagagcaaaacctggctgctgtggtgcgagcgcggggtgatgagccgtctgcaggcgctttatttgcgcgagcagggcttcagcaacgtgaaagtttatcgcccgtaa

SEQ ID NO: 210394 - DNA, 477 bp, Klebsiella pneumoniae
atgtcccggagcgcaaccgattctcgcgatcttgtaatcagccgcctgctcagcgcgcccgccccagccctgtggcgcgcgtgggccgacccggcattactccgaacctggtggtgccctaagccctggcaaaccgaggttctggcctttgattttcgcgccggcggggcctttcacaccgtgatgcacgggcctgacggtgaacgcagcgataaccccggctgttttcttgaggttatcccgcaacaaaaaatcgtcatgacctcgatgctgacggcggattatcgccccgccgtttcccccttcgcgatgacggccatcatcacctttgccgatgaacaggtcgggtgtcgctatacggctacggtgctgcatgccgatgatgaaacccgcgagcagcatgagcagatgggatttttcgagggctggaatattgtcatcgatcagctcaatgacctggcgctgaccctgcgctaa

SEQ ID NO: 210395 - DNA, 594 bp, Klebsiella pneumoniae
atgagcgcgtcggcactgatttgcctcgcccctggtagcgaagagaccgaagcggtcaccactatcgacctgctggtccgcggcggagtaaaggtgaccaccgccagcgtcgccagcgacggcagcctgaccatcgtctgttcgcgcggcgtcaaactgctggcggatgcgccgctggtcgaggtggccgatggtgatttcgatatcatcgtcctcccgggcggtatcaagggcgcagagtgcttccgcgacagcacgctactggtggaaaccgtccgccagtttcatctctctgggcgcattgtggccgccatctgcgccgccccggcgaccgtgctggtaccccataatctgttcccgatcggcaacatgaccggttttccggcgctgaaggaacatatccccgccgagcagtggcaggataaaagagtggtctgggatccgcgggtgaatctgttaaccagccagggtccggggacttcgattgatttcgccctgaaaatgatcgatctgctggtggggcgcgagaaagcgtatgaggtcgcctcacagctggtgatggccgctggcatctataattactacgaagcctga

SEQ ID NO: 210396 - DNA, 912 bp, Klebsiella pneumoniae
atgaaagtaaccgtactgggatgcggtgcgctgggacaactatggctgaccgcgttgtacaaacagggacatgaagtccagggctggctgcgcgtaccgcagccattctgtagcgtcaacgtcattgaaaccgatggctcagtgttcaacgaatcgctgacggccaacgaccccgattttctcgccagcagcgagctgctgatcgtcaccttaaaggcctggcaggtgtcgaatgcggtaaagcacctggccgggatcctgccggacaccacgccaattttgctggtacataatggcatgggcaccgtcgaggagctgcgcggcgtgaaacagccgttgctgctggcctccacgacccaggcggcgcggcgcgatgggaatgtcatcatccacgttgcccagggcaccacgcatatcggaccggcaaaaagctacgagggggactacagctatctcgcagaagttctgcagagcgtgctgccggatgtcgcctggcataacaatatccactcggccatctggcgcaagctggcggttaactgcgtgattaaccctctgaccgcgctcaaagggtgtaaaaacggcgatctgcgcgactatacgcaggaagttgcggccatttgtcgcgaggtggcggcggtgatggagcgcgaaggtattcatacctcggcggaaaacctgctattttatgtcgaacaggtaattgaaagtacggcagaaaatatctcttccatgctgcaggacgttcgcgcccagcggcatacagagatcgactacatcaccggttttctgctcaaccgcgcccgcgcccacggcgtcgccgtaccggaaaacgcccgcttatttgaattgatcaagcgtaaggagaatgaatatgagcgcgtcggcactgatttgcctcgcccctggtag

SEQ ID NO: 210397 - DNA, 492 bp, Klebsiella pneumoniae
atgccatctttcgatattgtctctgaagttgatcttcaggaagcccgtaacgcggtggacaacgcgagccgcgaagtcgagtcgcgttttgattttcgtggcgttgaagccacttttgaattaaacgacgccaacaagaccattaaagtgctgagcgagtctgacttccaggtgaaccagctgctggatatcctgcgcgccaagctgctcaagcgcggcattgaaggcacctccctcgacgtaccggaagatatcgtgcacagcggtaaaacctggtttgttgaagcgaagctgaagcaaggcattgaaagcgcggtgcagaagaagatcgttaaactgatcaaagacagcaagctgaaagtgcaggcccagattcagggcgaagagatccgcgtgaccggtaagtcccgcgacgatctgcagtcggtgatggcgctggtgcgcggtggcgatctgggacagccgttccagttcaaaaacttccgcgactaa

SEQ ID NO: 210398 - DNA, 1365 bp, Klebsiella pneumoniae
atgaacgataacaaaatgacgccaggggaactgcgcgcgacctggggtttggggacagtattctccctgcgcatgcttggcatgtttatggtcctgccggttctgaccacgtatggcatggcgttgcagggtgcaagtgaagcgctgattggcctggcgatcggtatctacggcctggcgcaggcggtgttccagatccccttcggactgttatctgaccgtattggccgtaagccattgatcgtcggcggcctgcttatcttcgtgctcggcagcgtcatcgccgcgctcaccgactccatctggggcatcattcttggccgcgccctgcagggctccggcgccatcgccgccgcggttatggccctgctttccgatctcacccgcgaacagaaccgcaccaaagcgatggcctttatcggcgtcagcttcggcgtcaccttcgccatcgccatggtgctggggccgattgtcacccaccagctgggtctgcacgcgctgttctggatgatcgccatcctggcgaccgtcggcatcctgctcaccctgtgggtggtgcccaacagccataaccatgtccttaaccgcgaatccgggatggtgaagggctgctttagcaaggtgctggcggagccgcgcctgctgaagcttaactttggcatcatgtgcctgcacattatgctgatgtccacttttgtcgccctgcccggacaactggaggccgccggcttcccggccgccgagcactggaagatttacctggtcaccatggttatctcgttcatctcggtggtgccgtttatcatctacgccgaagtgaagcgcaagatgaagcgcgtcttcctgctctgcgtcgccatcctgctgattgcggaaattgtcctctggggcgccggaggctacttctgggagctggtggcgggcgttcagctcttcttcctggcgtttaacctgctggaagcgctgctgccgtcgctaattagcaaggagtctccggcgggctacaaaggcaccgcgatgggcgtctactccaccagccagtttctcggcgtggcgattggcggcgcgcttggcggctgggtcgatggtttctttgattcgcaaaccgtgtttctgctgggcgccctgctggcgatgctgtggctgctggtggccagcaccatgagcgagccgccgtacgtcagcagcctgcgggtggaggtgccggacggcgtggtggtcgacagcgcgctgcaggcgcgtctgctgagcgccagcggggttcatcaggcgctggtggtacccgaggagcgttcggtgtatatcaaaatcgacagcaaggtcaccaaccgcttcgagatagagcagctcatcaaaggggtataa

SEQ ID NO: 210399 - DNA, 1179 bp, Klebsiella pneumoniae
atgttaaacggcctgaaacccttatcccgttccctgcgctggggcatggtcggcggcgggggaaccagtcagatcggctacagccaccgctgtgcggcgctgcgtgacaatgtttataccctgctggccggcgcgcttgacgtcaatgccgagcgcgggcgagcgttcggtgagcaactgggcatcgcgccggagcgctgctacgccgactaccagaccctgtttcgcgaagaggcgcagcgccctgacgggatcgaggtcgtctcggtcaccaccccgaacaatacccatttcgccatcaccaaagcggcgctggaggcgggactccacgttatctgcgaaaagcccctctgctttaccgccgaagaggcgcgcgagctggtggatctgagcaaaaaacagaacaaaatcgtcggcgttacctacggctatgccggctatcagatgatccagcaggcgcggcagatgattgccgatggactgctcggcgagatccgcatcgttaacatgcaattcgcccacggcttccataaccaggccgtcgagctgcaggcagaatccacccgctggcgagtaacgccgaagtttgccgggcccagctatgtgcttggggatctggccacccatccgctgtttgtcgccgagaccatggcgccgcagctcaatatcaaacggctgatgtgctcccgtcagagctttgttccctcccgcgcgccgctggaagataacgcctttgtcctgatggaatatgacaacggcgcggttggctcaatgtggaccagcgcggtcaacagcggcgccatgcactcgcaaaaagtgcgcatcgtcggcgaaaaagcaagcatcgaatggtgggatgagcatcctaaccagctcagctatgaggtgcagggcgagccggcgcgcattctggaacgtgggatgccctacctgtcgccgaacgcgctggcggatgaccgcattggcggcggccatccggaagggctgttcgaagcctgggccaacctctatcgccgctatgcgcaggcgattgacgccacggaccgcgacgatcgcgccttcctgcaagacttctggtatccggacgtcgaagccgggctgcacggcgtctattgggtagagcagtgcgtcaaatcggctgacgctggcagccagtgggttgactttactttaccttaa

SEQ ID NO: 210400 - DNA, 1365 bp, Klebsiella pneumoniae
atgacacagactcaacgcctggatgtcagagagttaataaatcgtaacccgctgagccgatttcagaagctgattatatttctcggcttttgcgtcatcgctctcgatggttttgatatcgcgatcatgggctttatcgccccgacgctaaagctggaatggggggtaagcaaccaccagctgggtctggtgatcagcgccgcgctgatcggcctcgcgctgggggcgattttctccggcccgctcgccgactggctgggacgtaagaaaatcatcatcaacagcgttttcttcttcggtttctggaccatcgccaccgccttctcgcacaacgtagaacagatgatgttctttcgctttatgactggcctcgggctgggcgccgcgatgccgaatatcgggacgctggtgtcggaatacgccccggaacgccagcgttcatttattatcaccgtcatcttttgcggcttcaccttcggcgcggcggcgggaggattttcggcatcgtggctgatcccccagtttggctggcactcgctgatggcgctcggcggtattctgccgctgctgtttgcccccctgctcatctggctgctgccggaatcggttcgttttctggtgatcaaacaagcgcccgcggcgcgcatacgcgccattcttaaccgtctctatcccggacaaatcagcgacaacgtgaggtttatcctgccggcgcagccggcggccggcaacgcgatgcgcattgtcctctcccgccagtacggtttcggctcgctgatgctatggctggtctactttatggggctgttcctggtctatatcctcggcagctggctgccaacgctggttaaagcggtaggaatgaccgttagccaggcggccatcatgacggcgatctaccaggcgggcggcaccctcggctcgttgtttgccggctggctgatggacaggatcaacccccatcgcgcgctggggataatctacgccgttggcggcctgttcaccatggcgatgggctacgccgcgggcagctttgccttgctctgtatgctggcgtttatcagcggcgcctgcctgaacggcgcgaataccggcatgaacgccctctccgcccgctactaccctacacaggcgcgggcgacgggctccagctggatgcacggcgtcgggcgcatcggcgccattctcagcgcctttgccggcgccgagatgatggcgctcaacctgccctttgaaagcgtctttttgatcctcggcatcccggcagccctcaccgtcgcaggcctggcggcgaagggcatctttgcggccggtcatcctcccgtcgcttcaacttcccccgcgtctgtgcgcggagcgtcatag

SEQ ID NO: 210401 - DNA, 819 bp, Klebsiella pneumoniae
atgaacaagcgtaccctatcgctcgccgcgctgaccctgctcgatgtccctccccccgaacaggtgcggattgcggccagaaccggttttacccacgttgggctgcgactgctccccgccacaccgaccgacccggactacgacatgctgggcgataccccggccgtccgggcgacgctcgccgcgttgatggaaactggcatccgcgtgtcggacgtggagatcgtccgcctgacccccgggtttaccctcgacgatcggctgcagcgttttatggagaccgccgcgcgtcttggcgccggacaggtgttagtcgccggcaatgatgacaaccttcagcgcagcgctgacaacctcgccatcctcgccgcggccggtcgtccatttgggctgaccatgaatcttgagccgatgccctggacccagttgcgcaacatcgccgcagcgcaagcactaatcgccgccagcgggcgggaagacatcggcattctggtggacgctctccatttctggcgcgcgggagaatcgctcgccgccctctccagcctgcccgcgcatcatctcaactatatgcaactctgcgatggcgcggcgcagaggccggagagcgagcaggaacttatccgccaggcccgctcggcgcgcaacgtgccgggggaaggcggtctggatctgcatggtctgatgtcggccctgccggcgacgctgccggtctctctcgaagtgccgcttgacggcgagcaaggcgccctgccgcctcttcagcgggcgcagttactgttcgatgccgcgcagccctacctgcgcgcctgcgcataa

SEQ ID NO: 210402 - DNA, 1698 bp, Klebsiella pneumoniae
atgagcgggcctgtgaaggtggatgtgctggtggtcggctccggcgccgcggggctctctgccgcggtgactgcggcgatgcacggcgccagcgtcatggtggcggagaaagcgtcagtactcggcggaaccagcgcctggtccggcggctggctgtggatcccccgcaacccgctggcgcgggcggagggcatcgacgaagcagccgacgcgccgctgacctatctgcagcatgagatggggggcgaagccgccgatattcgtctgcaaaccttcctgcgttacgggccggagatggtggaatttttccatcagcggacggcggtgcagtttctctcgggcagcgccatgccggactttcacccgtcgccgggtgcggcgaacggtgggcggtcggtcaccgcgcaaccctacgatggccgcctgctcggcgactggctccatcgcctgcgtccgccgctggagaccattagcctgggcgggatgggcatcgccggcggcgcggatatggcgcattttttcaatgccacccgctcgccgcgctccgcgctgtatgctgcccgccgcctgctgcgccacggctggcagcggctacgcgccggacgggggcagcatctggtcaatggcaatgcgctggtcgcccgtctgctgcgatccgccctcgacgccggcgtgcgttttcagctcaatgccccggtggtccggctgctgcagggtccgccgggcgtgtccggcgcggtgctgcgcagcgacggcggggagattcacgtcgaagctggcgccgtggtgctggcctgcggcggttttccccacgatcgccagcggctggcgcaggtggtgcctcacgctgcggagggttacggccatttctccgccgcaccgccggacaatcagggcgaggggatcaggcttggcgaatccgtcggcggccagttcgacacttccctgcgccacccgctggcctgggcgccggtgtcccgcgtcactctggccagcggccagcagctaatgtttcctcatctggtggagcgcgccaaacccggggtgatcgccgtcctgcccaacggcaaacgttttgttaacgaggccgactcttatcatgactttatcgccgccctgctggcggccacacccgcgggcgacacgccgcaggcgtggctgctggccgatcgtcgcgcgctgcgtcgctacggcctgggccacgccagaccgttcccgttcacccccaccgcctggctgcgtaccggctatctgcagcgaggaaacaccctggcggagctggcgaagcagtgcgctatcgacgccaatgcgctggcggaaaccgttgaacgctttaaccacttcgccagcgctggcgaagacgtcgattttcaccgcggggcatcagcctataaccgcgcccagggtgaccatcaggtgacgctcggaccgctgcgcgaagggccgttctacgcggtgcgcattctgcccggctcgctgggcaccttcagcggattgcaaaccgacgaacacgcccgggtgctggatgaacagcagctgccgataccgggcctgtacgccatcggcaacgacatgtcgagcgtgatgcgcggctattaccccagcggagggatcaccctcgggcccgccatgaccttcggctatctggtgggtaaaggcctgacaaaaaaaacaaatataaacaataatataacttga

SEQ ID NO: 210403 - DNA, 321 bp, Klebsiella pneumoniae
atgatctacgaaaaacgcacgtacaccatcaatccgctgaaaatggccgactggctggcgctgtaccaaagcgatgccctggcggtgcaaaccgaccatctcggccagctaatcggcttcttttttaccgagatcggcgtggtcaatcaggtagtgcatatctgggcttatgaaagcctggacgatcgtctggtgcgccgcgcgcggatggcccaggacgaacgctggcagaccttctcgcgcaaaaatcgcgaactggccgccgtggaacgcctcgagtcggtgctgatgcgccccaccgctttttcacctctgcagtaa

SEQ ID NO: 210404 - DNA, 1677 bp, Klebsiella pneumoniae
atgaagagctgggatgtgatcgtcatcggcagcggcgcggccggttttgccgccgcggtcaccgcctgctgtaaagggctgtcggtgctgatgctggagaaagccggccagttcggcggcacctcggccatctccggcggcgccgtgtggctgcacgataccgaccaggcgcgcgccgagggcaaaagcggtagcgccgaggcgatgaaaacctacctgcgaaccattatcggcgagggccagtaccgagaagatcttgccgaagcgtttgtcagcgccgggcgggaggcgctggcctttctcgagcgtgagggggcagtaaagtacagcctgcgtccgctctcgcccgattactatccggatgaacccggcgcagtcgacgtcggtcgtgcgctggaggtggtggagtatgacggccgtgaactgggggacgcgtttcgcgacctgcgttcaccgccgccggggatgctgctgtttggcgggatgatggtcaaccgcgtcgatattcaacattttctcgacatgcgccgctcgctgcgctccctggcccattgcacccggctgctgctgcgctatgcccgcgaccgggtgaagtaccctcgcggtacccgcctggcgatgggcaatgcgctgattgcccgcatggcgactacggcgctgcgtaaaggcatgaacctgcggctgaatgtcaatgttctgacgctgtgcgaagcgcaaggcgcggtccgcggggtggagattgagtatcaggggcaaagagagacgctgcacgcccgccgcggggtggtgctggccgcaggcggcttcgccgcgggcgcgctggcggcgcgctatcggccgcacacccgcgagcatttcaccatgtcgccgccggccaacgatggcgccgcgctgcatctcgcggcggcgtttaacgctcgcgagggagccgatcgggcctccaactttttctgggcgccggtatcggtgctgacccgggccgacggcagcgaggagcgcttcccccatctggtaaccgatcgcgcaaaaccgggcgtgattgccgtcaatcagcgggcggtacgcttcgtcaacgagtccagctcctatcaccatttcgccagcgcaatgcaggatgcagcggaaaatgccccctgttttttactctgcgacgcccaggcgatgaagcgttatggcctcgggctggcgcgcccggcgccggtcaataatgacgccctggtcgccgctggctatctgcacaaagccgataccctggccgcgctggcgcaacagcttggtctggatgcccaaaccctgagcgagacggtagcccgctacaaccgtgacgccgcgcagggcgtagatcgggaatttgctaaaggcggcaacagctataaccgggcgatgggcgatccgggccatcagcctgacgcctgtaatgcccccctgctcagcgcgccgttctatgccatcaaactttataccggcgatctggggacctcacggggcctggtcaccaccgccgatgcccaggtcgtcaatacccaaggaaaccccatcccggggctgtacgcggtgggaaacgacatggattcgctgatggccggcacctatccgggccccggcatcaccctcggcccggggctgacgtttggctatctcgccgcctgccatctggcacaacactccacccactaa

SEQ ID NO: 210405 - DNA, 822 bp, Klebsiella pneumoniae
atggtcagtggaactacccaggttgtcgccgtgattggtcatccgatcgcccaggtgaaatcgccagataacttcaaccgctactttgccgaacagcacatggacagcattatgatcccggtggatatcgtcccggacgcggtggccgcctacctcaacgccctgcgcggctggcagaacatgaccggcgtgctggtgacggtgccgcataaacaacgcgccgccgcgctggtcgacgacctcacgccgcgcgcccgccgactcaacgccgtcaatgtgatccgcaagctggcggatggccgcctgcagggcgatatgctggacggcgtcggctttcagctcgccgccgaggcgcagggttttcagccggcaggtaagcaggcgctgctctccggttgcggcggcgtcggcagcgccatcgcctggggactgtgcgaggcggggatccgtcggctggccctgcacgatcaaaccccggccacccggcagcgcctgcatgaccttctggctgaggcctttccggcggtgcaactgagcgcgctgccagacaccctttacggcctcgatctactggttaatggctcaccggccggcatggccggatttgatgagctgcctctaccgcaggcgctgctggatacgctcgacagcaccactcatgtggccgacgttgtcaccgccccggtgatgacgccgttgctcactttcgccgccgcacgtggttgtaaagtacagaccgggccggaaatggcgctggcgcagatgaggctgatgggccagtttatcggcgccatcccacaggcgcagggagcggcggcatga

SEQ ID NO: 210406 - DNA, 759 bp, Klebsiella pneumoniae
atgcaaaacaccattcatccacgcgatctgatcgtcggtttacaaaaagggctggcgctaattcagcttttttccaaaacctgcccaaagctcaccgtcgcccagacggcgaaaatgagcggcctgacgcaaagcgccgcgcgacgttttctgctgacgctcctgcatgagcgctatctgcaaaccgacgggcgctattactggcttaccccaaagacgctgcggcttggccaggcctatgtcgattcggcgcagtttcctcgcatggtacggccgattgtcgaatacatcgccagccggaccgaagagcacgcctcggtgggggtggtggatgaagatgaactggtctatatcgcccgcagtcggcatacgccgttcaactctacgtcggtgcggcttggggagcgggtgcccattttctgtaccgccggggggcgactgtggctggcttcgctgccggaagcagagtgtgagaccgtcctgcagcgcataacccgggaacaacgtaccccctatacggtgaccgatatcgcgtcgctgatggagaaaatcgcccaggtacggcgccagggatacgccaccattgagcaggagtttgagattggcatgctggtgctggcggtgccgttaaccgacagggaagggacctggtggggggcgctgagtctgaccagtcatcaatcgcgcacttcgctggaagcgttatgccgcgatcacctcgatctgctctacagcgcgcaggcgatgctggtgggttaa

SEQ ID NO: 210407 - DNA, 333 bp, Klebsiella pneumoniae
atgaaagagttaacactgaacgaaatggagtatatctccggtggctttaatctgttcggcgcagccagcagcttcgccagctttgtcgccaactctggcgtcggcttcacctcttttgttctgacctccggcaccgcatttgcctccttcgtcggcgacagcgcgatggcgtttggttccttcctgaccggacagtcaaactgggaaacctttgtgaccgccggaaaggaaaactggggaagctttgttaacaccgccggcaacagctggaatactttcgtgaataacgcggccagcgactggaacacctttctgaccaaagcgtcggcctaa

SEQ ID NO: 210408 - DNA, 888 bp, Klebsiella pneumoniae
atgtttaagcaatacctgcaagtaacgaaaccaggcattatttttggcaacctgatctccgtgatcggcggtttcctgctggcctccaaaggccacatcgactatccgctgttcgtctggacgctccttggagtatccctggtggtcgcctcgggttgtgtattcaacaactacatcgaccgggacatcgatcgtaagatggaacggacgaaaaaccgggtgctggtcaaagggctgatctcgccagaagcttcgctggtgtacgccaccttgctgggtattgctggcttcatgctgctgtggttcggcgctaacccgctggcctgctggctgggggtgatggggttcgtggtttatgtcggcgtctacagcctgtacatgaaacgccactccgtctacggcacgctgattggctcactctccggcgctgcgccgccggtgattggctactgcgcggtcaccggtgatttcgacagcggtgcggcgatcctgctggctatctttagcctgtggcagatgcctcactcctacgccatcgcgattttccgctttaaggattatcaggcggcgaatattccggtgctgccggtggtgaaaggcatttcggtcgccaaaaaccatattacgctgtacatcgtcgcctttgccgtggcaaccctgatgctctcgctgggcggctacgccgggtataaatacctggtcgtggcggcagcggtcagcgtctggtggctgggcatggcgctgcgtggctataaagtggccgatgataaagtctgggcgcgtaagctgttcgtcttttctatcgtcgccatcaccgcgctgtccgtgatgatgtccgttgactttatggtgccggattcacatagtctgctggcttacgtgagataa

SEQ ID NO: 210409 - DNA, 330 bp, Klebsiella pneumoniae; identical to SEQ ID NO: 138995

SEQ ID NO: 210410 - DNA, 612 bp, Klebsiella pneumoniae
atggcaactgatactcttgcgcatactgcccacgcgcatgaacacgggcaccatgatacaggaccgatgaaggtattcggtttctggatctacctgatgagcgactgcattatcttcgctacgctgtttgctacctatgccgttctggtgaacggcacggccggcggaccgacgggcaaagatattttcgaactgccgttcgttctggttgaaaccgcactgctgctgttcagctccatcacctacggcatggcggctatcgccatgtacaaaaacaacaaaagccaggtggtttcctggctggcgttgacctggttgtttggcgccggatttatcgggatggaaatctatgaattccatcacctgatcatggaaggctttggtccggatcgtagtggcttcctgtccgcgttcttcgcgctggtcggcacccacggtctgcacgtgacctccggtcttatctggatggcggtgctgatgttccaggtttcacgtcgtggcctgaccagcactaaccgcacgcgtatcctgtgcctgagcctgttctggcacttcctggacgtcgtgtggatctgcgtgttctcggttgtctatctgatgggggcgatgtaa

SEQ ID NO: 210411 - DNA, 1992 bp, Klebsiella pneumoniae
atgttcggaaaacttacactggatgcagtgccctaccacgaacctattatcgtggtaacggtggctgcgattatcattgggggactggcgcttctggcagccatcacttacttcggtaagtggtcctacctatggaacgagtggctgacttctgtcgaccacaaacgtctcggtatcatgtacgttatcgtggcaatcgtcatgctgctgcgtggctttgctgacgccatcatgatgcgtagccagcaggtgctggcttcggccggggaagccggcttcctgccgcctcatcactacgatcagatctttaccgcccacggcgttatcatgatcttcttcgtggcgatgccgtttgttatcggtctgatgaacctggtggttccgcttcagctcggcgcgcgcgacgtagccttcccgttcctcaacaacctgagcttctggttcaccgttgtgggcgtgattctggttaacctgtctctgggcgttggtgagttcgcgcagaccggttggctggcctatccgccgctgtcgggaattgagtacagtcctggcgtaggggttgattactggatttgggcgctgcagctctccggtatcggtactaccctgaccggtattaacttcttcgtgaccattatcaagatgcgcgccccgggcatgaccatgttcaagatgccagtattctcctgggcatctctgtgcgctaacatcctgattatcgcctcgttcccaattctgaccgtcaccatcgcgctgctgaccctggatcgttacctgggcacccatttctttaccaacgatatgggtggcaacatgatgatgtacatcaacctgatttgggcctggggtcacccggaagtgtacatcctggttctgccggtgttcggggtcttctccgaaatcgccgcgaccttctcgcgtaagcgtctgttcggttacacctctctggtatgggcaaccgtctgtattaccgttctgtcgttcatcgtttggctgcaccacttcttcaccatgggtgctggcgcgaacgtaaacgccttcttcggtattactaccatgattatcgcgatcccgaccggggttaagatcttcaactggctgttcaccatgtatcagggtcgcatcgtcttcaactcggcgatgatgtggactatcggctttatcgtgaccttctccgtaggtgggatgaccggcgtgctgctggcggtaccgggcgcggacttcgttctgcacaacagcctgttcctgattgcgcacttccataacgttatcatcggcggcgtagtgttcggttgcttcgcaggtctgacctactggtggccgaaagcctttggcttcaccctgaacgaaacctggggcaaacgcgctttctggttctggatcatcggcttcttcgtggcgtttatgccgctgtacgtgctgggcttcatgggtatgacccgtcgtctgagccagcagatcgatccgcagttccacccgatgctggttattgcagcttgcggtgcggcgctgatcgcctgcggtattctgtgccagctgattcagttctacgtgtctattcgcgaccgcgatcagaaccgcgacctgaccggtgacccgtggggtggccgtacgctggagtgggcaacctcttctccaccgccgttctacaacttcgctatcgttcctcaggttcacgaacgtgatgccttctgggaaatgaaagagaaaggtgaagcgtacaaacagcctgctcactatgaagaaattcatatgccgaaaaacagcggcgccggcatcgtgattgccgccttcgctacggtatttggtttcgccatgatctggcatatctggtggatggcgatcgccagcttcatcggcatcgtagcgacctggattattaagagctttgacgaggacgtggattactacgtaccggttgcagaagtcgaaaaactggaaaaacagcatttcgatgagattaacaaagcagggctgaaaaatggcaactga

SEQ ID NO: 210412 - DNA, 945 bp, Klebsiella pneumoniae
atgagactcaggaaatacaataaaagtttgggatggatgtcattaatcgcaggtactgtattactcagtggttgtgattctgcactccttgacccaaaaggacagattggactggagcaacgctctttgattctgacggccttcggcctgatgatgattgtcgttattcccgccgtcttgatggcagtaggatttgcctggaagtatcgcgcgagcaataaagatgcgaagtatagcccgaactggtcacactccaacaaagtggaagctgtggtctggacggtacctattctgatcatcctgttcctggccgttctgacctggaaaaccactcacgcactggagccaagcaaaccgcttgtccatgacgagaagccaatcaccatcgaagtcgtatcgatggactggaaatggttctttatctatccggaacagggtattgctaccgttaacgaaatcgccttcccggcgaacgtaccggtacacttcaaagtgacctctaactcggtgatgaactcgttctttattccgcgcttaggtagccagatttatgcaatggccggtatgcagactcagctgcacctcattgctgacgaagctggtacttatgacggtatctccgctagctacagtggcccgggcttctcaggtatgaagttcaaagcgattgccaccccggatcgggcgactttcgatcagtgggttgcaaaagcgaaacagtctccgaactccatggactccatggccgcgttcgagaaagtggctgtgcctagcgaatacaacaaagtggaatatttctctaacgtgaaaccggatctgttcaaagatgttgtgaacaaattcatgtctcacgagagcatgaacatgtctaaacctgaaggcgagcacgctgctcacgacgggatggaaggcatggacatgagccacgcggaaaccgctcactaa

SEQ ID NO: 210413 - DNA, 1476 bp, Klebsiella pneumoniae
atgtccagtcattacttacgcatttttcagcagccgaaatcagccattttgctgatccttggtttcgcctccggtctgccgctggctctcacctccggtaccctgcaggcctggatgacggtggaaaatatcgatctgaaaacgatcggttttttctcgctcgtcggccaggcctatgtctttaaattcctctggtccccgctgatggaccgctacacgccgccgtttcttgggcgtcgtcgcggttggctgttgaccacccaggtattactcctgctggcgatcgcgacgatgggctttcttgagccggtcacccaattacgctggatggcggcgctggcggtggtgatcgccttctgctcggcgtcgcaggatattgtgttcgacgcctggaaaaccgacgtgttgccagcagaagagcgtggcgccggcgccgcgatcagcgtgctgggctatcgcctggggatgctggtctccggtggactggccctgtggcttgccgaccgctatctcggctggcaggggatgtactggctgatggcggcgctgctggtaccctgcattatcgccacgctgctggcccccgaaccgagcgacgttatcccggtccccagatcgctcgagcaggcggtagccgaaccgctgcgcgattttttcggccgcaacaacgcctggctgattctgctgctcatcgtcctttataagcttggcgatgcgtttgccatgagcctgaccaccaccttcctgatccgcggcgtgggatttgacgctggcgaagtgggaatggtgaacaaaaccttaggcctgttcgccaccattctcggcgccctgtacggcggcgtcctgatgcagcggctgacgctgtttcgggcactgctcattttcggtttgctgcagggggtctctaacgccggctactggctgctgtcgattaccgataagcacctctattccatggcgaccgcggtattctttgaaaacctgtgcgggggaatggggacggcggcatttgtcgcgctgctgatgacgctatgtaataagtcgttctccgccacccagttcgcgctgctctcggcgctctctgcggtcggtcgcgtatacgttgggccgattgccggctggtttgtcgaggctcacggctggtcgaccttctatctcttctctgtcgttgcggcggtgccggggattgccctattgctgctgtgccggcaaacgcttgagcatacccaacgcaccgcaagctttatgccgcgtagcgagttcccgcaggcctatgcgctggcgctggggatcctgacactgggctgcctgctgctcgcggcgtggctggcgctgctgatcctcaacgcgctggattatacgtcgttctccttcctgtccggcctgctggaggttgccgcgctcaccgccgtcggcgggattttgttcggcggcctgcttgactatctggcgctgcgtaaaacccgcctgatttaa

SEQ ID NO: 210414 - DNA, 579 bp, Klebsiella pneumoniae
atgcttaagaagattcttttcccgttggtcgccatgtttatgctggcaggatgcgccacgccgccgaccaccattgaagtatcgccgaaaatcacgctgccgcagcaggatccaagcctgatgggcgtgaccgtcagcatcaacggcgccgatcagcgtccggaccaggcgctggcgaaagtgacgcgtgacaatcagctggtcactctcaccgcctcccgcgatctgcgcttcctgctgcaggaagtgctggagaaacagatgacgtctcgcggctacatgattggcccgaacggcgcggtcgatctgcagatcatcgtcaacaaactctatgctgacgtctctcagggtaacgtgcgctataacatcgccaccaaagccgatatcgccatcatcgccaccgcggcaaacggcacgaaaatgaccaaaaactaccgcgccagctactccgttgaaggcgccttccaggcctcgaacaaaaacatcgctgatgccgtcaacagcgtcctgaccgataccatcgccgatatggcgcaggacaccagcatccacgatttcatcaagcaaaacgcgcgttaa

SEQ ID NO: 210415 - DNA, 315 bp, Klebsiella pneumoniae
atgatacgtgaacagatcgaagcaaaacttagagcagcgttcgacccgatgtatctcgaagtcgtggatgaaagttatcgtcacaacgtccctgcgggctctgaaagtcattttaaagtggtgttagtgagcgatcgcttcactggcgagcgtttcctcaatcgccaccgtatgatctacggcacgctaaccgaggagctgtcgaatacggtgcatgccctggcgctgcacacctacacgattaaagaatgggaagcattacaggatacggtatttgcttcgccgccgtgccgcggcgcagggagtatcgcttag

SEQ ID NO: 210416 - DNA, 1299 bp, Klebsiella pneumoniae
atgcaagtttcagttgaaaccactcagggccttgggcgccgtgtaacgattactatcgccgctgacagcatcgagaatgctgtcaaaagcgagctggtcaacgtagcgaaaaaagttcgcattgacggcttccgtaaaggcaaagtgccgatgaatattgttgctcagcgctatggcgcttccgttcgccaggacgtgctgggcgacctgatgagccgtcatttcgttgacgcgatcatcaaagaaaaaatcaatccggccggcgcgccgaactacgttccgggcgaatacaaactgggcgaagacttcacctacgcggtagagttcgaagtgtatccggaagttgaactgcagggtctggacgcgatcgaagttgaaaaaccggttgttgaagtcaccgacgctgacgttgataccatgctggaaactctgcgcaagcagcaggcgacctggaaagaaaaagaaggcgcggttgacgctgaagatcgcgtaaccatcgacttcaccggttctgttgacggcgaagagttcgaaggcggcaaagcctctgacttcgtactggcgatgggccagggtcgcatgatcccgggcttcgaagacggtatcaaaggccacaaagcgggtgaagagttcaccatcgacgtgaccttcccggaagagtaccacgcagaaaacctgaaaggtaaagcggctaagttcgttatcaacctgaagaaagtcgaagagcgtgaactgcctgagctgaccgaagagttcatcaaacgtttcggcgtggaagagggttccgtcgctggcctgcgcgctgaagtgcgtaaaaatatggaacgcgagctgaaaggcgctgtgcgtaaccgcgtgaagtctcaggctatcgaaggtctggttaaagccaacgagatcgacgttccggctgccctgatcgacagcgaaatcgacgtgctgcgtcgtcaggctgctcagcgtttcggcggcaacgagaaacaggctctggaactgccgcgcgagctgttcgaagagcaggctaaacgtcgcgtcgttgttggtctgctgctgggcgaagtgatccgcaccaacgagctgaaagctgacgaagagcgcgtaaaagccctgatcgaagagatggcttctgcgtacgaagatccgtctgaagtcgttgagttctacagcaagaacaaagagctgatggacaacatgcgcaacgtggcgctggaagagcaggctgttgaagccgtgctggcgaaagccaaagtgtctgaaaaagccacttccttcaacgaactgatgaaccagcaggcgtaa

SEQ ID NO: 210417 - DNA, 624 bp, Klebsiella pneumoniae; identical to SEQ ID NO: 139494

SEQ ID NO: 210418 - DNA, 1275 bp, Klebsiella pneumoniae
atgacagataaacgcaaagatggatcgggcaaattgttgtattgctctttttgcggcaaaagccagcatgaagtgcgtaagctgatcgccgggccatccgtgtatatctgcgacgaatgcgttgatttatgtaacgacatcattcgcgaagagattaaagaagtggcgccgcaccgcgagcgcagcgcgctgccgacgccgcacgagattcgccaccaccttgatgactacgtcatcggtcaggaacaggcgaagaaggtgttggcggtcgcggtatacaaccactacaagcgtctgcgcaatggcgataccagcaatggcgtagagctgggtaaaagcaacatcctgctgatcgggccgaccggttccggtaaaacgctgctggcggaaacgctggcgcgcctgctggatgtgccgtttaccatggcggacgccactaccctgaccgaagccggttatgtgggtgaggacgtcgaaaatatcattcagaaactgctgcagaagtgcgattacgacgtgcagaaagcgcagcgtggcatcgtttatatcgacgaaatcgacaaaatttcgcgtaaatccgataacccgtcgattacgcgcgacgtctcaggcgaaggcgtgcagcaggcgctgctgaagcttatcgaagggaccgttgccgccgttccgccgcagggcgggcgtaaacatccgcagcaggagttcctgcaggttgatacctccaagatcctgtttatctgcggcggcgcgttcgctggcctggacaaagtgatttcccaccgtgtggaaaccggctccggcattggttttggcgcgacggtaaaagcgaagtccgacaaagcgagcgaaggggaactgctggctcaggtcgagccggaagatctgatcaagtttggtctgatcccggagttcatcggccgtctgccggtagtggcgaccctgaacgagctgagcgaagaagccctgatccagatcctgaaagagccgaaaaacgccctgaccaagcagtatcaggcgctgtttagccttgaaggcgcagagctcgaattccgcgacgaagcgctggacgctatcgccaagaaagcgatggcgcgtaaaaccggcgcccgtggcctgcgctcaattgtggaagcggcgctgctggataccatgtatgacctgccttcgatggaagatgtcgaaaaagtggtcattgatgagtcggttatcgccggtcagagcaaaccgctgctgatctacggcaaaccggaagctcagcaggcatctggtgaataa

SEQ ID NO: 210419 - DNA, 2355 bp, Klebsiella pneumoniae
atgaatcctgagcgttctgaacgcattgaaatccccgtattgccattgcgcgatgtggtggtttatccgcacatggtcatacccctgttcgtagggcgggaaaaatctatccgttgcctcgaagcggccatggaccatgataaaaaaatcatgctggttgcgcagaaagaagcgtcgacggatgagccgggtgtaaacgatcttttcaccgttggaaccgtggcgtctattttgcagatgctgaagctgccggacggcaccgtgaaggtgctggtcgaagggctgcagcgtgctcgcatttctgcgctgtctgataatggcgagcatttctcggcgaaagcggagtatctcgactcgccggcgattgacgaacgcgagcaggaagtgctggttcgcacagctatcagccagtttgaaggctatatcaagctgaacaagaagatcccaccggaagtgctgacgtcgctgaacagcatcgacgatccggcgcgcctggcggataccatcgcggcgcacatgccgctgaagctggctgacaagcagtctgtgcttgagatgtccgacgttaacgaacgtctggaatatctgatggcgatgatggaatcggaaatcgatctgctgcaggttgagaagcgcattcgcaaccgcgtcaaaaagcagatggagaaatcccagcgcgagtactatctgaacgagcaaatgaaagcgattcagaaagaactcggcgagatggacgacgccccggacgaaaacgaagcgctgaagcgtaagatcgatgcggcgaaaatgccgaaagaggcgaaagaaaaaaccgaagcggaactgcagaagctgaagatgatgtcgccgatgtctgcggaagcgaccgtcgtgcgtggctacatcgactggatggtgcaggtgccgtggaatgcgcgcagtaaggtcaaaaaagacctgcgtcaggcccaggagatcctcgataccgatcactatggcctggagcgcgtgaaggatcgcatccttgaatatctcgcggtgcagagccgggtgaacaaaatcaaggggccaatcctttgtctggtgggaccgccgggggtaggtaaaacctcgctgggtcaatccatcgccaaagcgaccggacggaaatacgttcgtatggcgcttggcggcgtgcgcgatgaagcggaaatccgcggtcatcgtcggacctacattggctcgatgccgggcaaactgatccagaaaatggcgaaagtgggggtcaaaaacccgctgttcctgttggacgagatcgacaaaatgtcttccgacatgcgcggcgacccggcttccgcgttgcttgaggtgctggatccggaacagaacgtggcctttaacgaccactatctggaagtggattacgatctcagcgacgtgatgttcgtggcgacttccaactccatgaacattccggcgccgctgctggaccgtatggaagtgattcgtctctccggctataccgaagatgaaaaactgaacatcgccaaacgtcatctgctgccgaagcagatcgaacgtaacgcgctgaagaaaggcgagctgaccgtcgacgatagcgccattatcggcattattcgttactacacgcgggaagcgggggtacgtagcctggagcgtgaaatctccaagctgtgccgcaaggccgttaagcaactgctgctggataaatcgctgaaacacatcgaaattaacggtgagaatctgcatgattatctcggcgtacagcgcttcgactatggccgcgccgatagtgagaaccgcgtcggtcaggtgaccggtctggcgtggacggaagtgggcggcgatctgctgaccatcgaaaccgcctgcgtgccgggcaaaggcaagctgacctacaccggctcgctgggcgaggtgatgcaggagtcgattcaggctgcgctgacggtggtacgttcgcgggctgacaagctgggcattaacgccgacttctacgagaagcgtgacattcacgtgcacgtgccggaaggggcgacgcctaaggatggtccgagcgcgggtattgccatgtgcacggcgctggtctcctgcctgacaggtaacccggtacgcgctgatgtggcgatgaccggtgaaatcactctgcgtggtcaggtgctgccgatcggcggtctgaaggaaaaactgctggcggcgcatcgcggcggcattaagactgttctgattcctgatgagaacaaacgcgaccttgaagaaattccggataacgttatcgccgatttggatatccatccggtgaaacgaatcgaggaagttctgacacttgcgctgcagaacgaaccgttcggcatgcaggttgtgaccgcgaaatag

SEQ ID NO: 210420 - DNA, 273 bp, Klebsiella pneumoniae; identical to SEQ ID NO: 138268

SEQ ID NO: 210421 - DNA, 1875 bp, Klebsiella pneumoniae
atgatggacaacctacgcacggccgccaacagcgtcgtgctcaagattattttcggtatcattatcgtctcgttcattttgaccggggtgagtggttacctgattggcggtggcaaaaactatgccgcaaaagtgaatggccaggagattggccgtgggcagtttgaaaacgccgtcgccagcgaacgtaaccgtatgcagcagcagcttggcgatcaattctccgagctggcggcgaacgaaaactacatgaaaaccatgcgccagcaggtgctgaaccgcctgatcgatgagtcgcttctggatcagtatgcccgcgagctgggcctcagcatcagcgatgagcaggtgaagcaggcgatcttccagacccaggcgttccagacgaacggtaagttcgacaaccagcgtttcagcggtattgtcgcccagatggggatgaccaccgatcagtacgcccaggcgctgcgtaaccagctgaccacgcagcagctgattaacgccattgcgggtaccgacttcatgctgccgggcgagtccgatcagctggcggcgctggtatctcagcagcgggtggtccgcgaagcgaccatcaacgtaaatgccctggcggcaaaacagaccgccagcgatgaggaaatcaacgccttctggcagcagaatcaggcccgttttatggcgccggagcagttccgcgtcagctacatcaaaatggatgccgccagcatgcaggagagcgcctctgacgacgagattcagtcatggtacgaccagcacaaggatcagttcactcagccgcagcgcaaccgctacagcgtgattcagaccaaaactgaagccgatgcgaaagcggtactggccgagctgcaaaaaggagcggacttcgccacgctggcgaaagaaaaatcgaccgatattatctctgcccgcaacggcggcgatatggggtggatggaagatgcctctaccgtgcctgagctcaaagatgccgggctgaaagagaaaggccagctgtctggcgtgatcaaatcctcggttggcttcctggtagctcgtctggacgacgtccagccggcgcaggtgaagccgctggctgacgtgcgtaatgacattgcggcgaaagtgaagcaggaaaaagcgttggatgcttactacgcgctgcagcagaaggtgagcgatgcggccagcaacgataatgaatcgctggcgagcgcagcgcaggtcgccgggctgaaggtcgtagaaaccggctggtttggccgcgataacctgccggaggagctgaactttaaaccggtcgctgacgctattttcaacggcggtctggtgggtgagaacggcgcgccgggcagcaactccgatatcattaccgttgacggcgatcgcgcttttgttctgcgcattagcgaacacaaagccgaggcggtgaagccgctggccgaagtgaaggcacaggttagcgatatcgttaagcacaataaagcggaacagcaggcgaaactggaggccgacaagctgctggcggcgctgaaagacggcaaaggcgatgaagcgatgaaggcggctggcctgagctttggcgcgccgcagacgctttctcgtaccggccaggatccgctgagccagctggcatttaccctgccgctgccgcagcagggtaaaccggtctacggcgtgggcagcaatatgcaaggcgatgtggtgctgatagcgctggatgaggtgaaagccggcagcatgccggaagagcagaagaaggccatggttcaggggatcacccagaacaatgcccaaatcgctttcgaagcgctgatgagcaacctgcgcaaggcggcgaaaattaagctcggcgacagcatcgaccagcagcagtaa

SEQ ID NO: 210422 - DNA, 369 bp, Klebsiella pneumoniae
atgaaatatggaataaaagcactgatggccgcgggcgttctggtttttgcggtaggggtacagggggcgctggcggcacccgccagcggcaaagcggcggtgaataaagaaaatgtgcaggcgtcctcttcggcgaaggcggaagcggtgcccggcgagtctgacatcggggcgacaaaggtcagcattaaccgcgccagcgccgaacagctggcgcaggcgttgaatggcgtaggattgaaaaaagcccaggctattgtcagctaccgcgaagagtacgggccgttcaaaaccctcgatgatctgaagcaggtcccgggaatggggagcgcgttggtggagcgcaatttagcccatctgacgctgtaa

SEQ ID NO: 210423 - DNA, 402 bp, Klebsiella pneumoniae
atgcagacacaaattaaagttcgcggctatcatctggacgtctaccagcatgtgaacaacgctcgctacctggagttccttgaggaagcccgctgggacggcctggaaaacagccccgcgtttcagtggatgatggagaaaaacatcgccttcgtggtggtgaatatcaatattaactatcgtcgtccggcggtactgggcgatgtgctgacggtgagcagcaaactggagcaactcaacggcaaaagcggcaccctaagccaggtggtcaccctcaaccccaatggcgaagtagtggccgatgcgctgattaccttcgtttgtatcgatttgaaaacccagaaggcgctgccgctggaaggggaattgcgtgcgaaacttgaccagatgaacctgcgctga

SEQ ID NO: 210424 - DNA, 702 bp, Klebsiella pneumoniae
atgaaacgcgccgtagttgtcttcagcggaggacaagattcaaccacctgtctggtgcaggctctgcaacagtatgatgaagtgcattgcgtcacttttgattatggccaacgccaccgcgcggaaatcgacgttgcgcgcgaactcgccctgaaactgggcgccgtcgcgcataaagtgctggacgtcactctgctcaacgaactggcagtcagcagcctgacccgcgataacattccggtaccggactatcagcctgatgccgagggcattcccaacacctttgtccccgggcgtaatattctgtttttaaccctgacggcaatctacgcctatcaggtaaaagccgaagccatcatcaccggcgtgtgcgagaccgacttctccggctacccggactgccgcgatgagtttgtcaaagcgctgcaccacgccgtcagcctggggatggcgaaagacattcgctttgagacgccgctgatgtggctgaataaagccgagacctgggcgctcgccgactactggggtcagctggatctggtgcgccgggaaaccctcacctgctacaacggcattaagggcgatggctgcggccagtgcgccgcctgtaacctgcgcgcaaacggactcaaccagtatctggcggacaaggtcggggtaatggcggtgatgcagcaaaaaaccggactggcgcaggcataa

SEQ ID NO: 210425 - DNA, 1701 bp, Klebsiella pneumoniae
atgcgactcttacaccgtttaaatcaataccagcgcctatggcaaccatcagccggggcgccgcagcaggtcaccgtcggcgaactggcggagcgctgtttttgcagcgagcgccacgtccgtactctgctgcgtcaggcgcaggaggccgggtggctaagctggcaggccagctccgggcgcggcaaacgcggacagctcttatttcacaaaaccccggaaagtctgcgcaacgagatgatggagcaggcgctgaacaacggtcagcaacaaaccgcgctggagctggcgcagcttgccccggtggagctgaaagccctgctccatcccttcctcggcggtcagtggcaaaacaatacccccacgctgcgtattccttactatcgcccgctggagccgctgcgtcccggctttctccccggccgcgccgagcagcatctggccggacaaatctatgccgggctgacgcgcttcgacgaaggcgacaatatgccgatcggcgatctggcgcaccactggcaggtctccccggacggcctgcgctggcatttttatatccgctccacgctgtgctggcacaatggcgatacggtggaaaccgcgcagttgcgacagcggttactgctgctgcttgagctgcccgccttgcggaccctcttcgccagcatcagccgtatcgatgtcacccatgcccagtgtttaacaataaccctgcatcgccctgactactggctgccgttccgcctcgccagctactgcagcgtgctggcgcatcccgacgatccggccattggctgcggaccgttccgcctgaagcggtttagtccggaactcgtccgcctggaaaaccatccccgctaccacctgcagcatccgctgatccaggcggtggagtactggatcactcctcagctctttgaccgcgatctcggcaccagctgccgccatccggtgcagatcaccatcggcgatcgcgaagagctgcataatctgcgtcaggtcagcaaccgtatcagccttggcttctgctatttgaccctgcgccacagccctcggcttagcaaagcgcaggcccagcggctggtgtcgataatccatcactcgtcgctactggatacgctgccgctggaggaggatctgattacgccaagccatgaggtgctgccgggatggtccatcccgcagggaccggcaaacaacgcggtaccgctgccggccaggctcaccctgctctatcatctgccggtcgagctacatgcgatggccgaacagctgaggcaacgtctggctctgctgggctgcgagctgacgctcctgttccacgacgctaaaaactgggaaggctgccagcatctggggcaggccgacctgatgatgggcgaccgtctgatcggcgaagcgccggagtacgccctggaacagtggctgcgctgcgatatgctgtggcctaatttgctgaccggggcgcaatatgctcatctgcaggcgacattagacgcggtgcagtctcagcccgacgctcgcagccgcaacgatgcgctgcgcaacgtatttaacagcctgatggaagacgccatcatgacgccgctgttcaagtataactatcggatcagcgcgccaccgggggtcaatggtctgcgcctcaacgcccggggctggttcgacttcgccagcgcctggctgccggcctcgtcgacgtga

SEQ ID NO: 210426 - DNA, 819 bp, Klebsiella pneumoniae; identical to SEQ ID NO: 138274

SEQ ID NO: 210427 - DNA, 1053 bp, Klebsiella pneumoniae
atgaatagcgcctgggttaaacatgccattagcgaaatcaacgctgactatcagcgctccgccgacacgcacctgatccgtctgccgctgcccgcttttccgggcatccacctgtatctgaaagatgaaagcacccaccccaccggcagcctgaagcatcgcctggcgcggtcgctgtttctctatggcttgtgcaacggctggatcaaagaaggcacgccaattatagagtcctcctcagggtcaaccgccgtttcggaggcctatttcgcccgcctgctggggctgccgtttatcgctgtgatgccttcctgcaccgccaagcgcaaaatcgaacagatcgagttctacggcggacgctgccattttgtgcagagcgccggcgaaatctacgcggcttccgaaacgctggcccgcgagctgaacggccattatatggatcagtttaccttcgccgagcgggccaccgactggcgcggcaacaacaatatcgccgacagtattttccgccagatgagccatgagccgcacccgcagccgtcatggatcgtcatgagcgccggcaccggcggcacctcagcgaccattggccgctatattcgcagccagggctacgagacgcagctgatggtcgttgatccgcagaattcggtgttcctcgattactggcagacccgcgacgccagcctgcgcagcccggtcggcagcaaaattgaaggcatcggacggccgcgcgtcgagccgtcgtttattcccgacgttgtcgatgagatgctgcgcgtgccggatgcggcgagcgtagccaccgccctgtggctggaaacgcagcttgggcgcaaggtcggcgcctcgaccggcaccaatatgtggggcgtattgcagctggccgcgcggatgcgcgaagaaggtcgcaccggctcgatagtgacactcctgtgcgacagcggcgagcgttacctggaaagctattacaacccgcagtgggtggcggacaatatcggcgatattgcgccctggcaggcggagatcgccggtctggtcgaaaggcgataa

SEQ ID NO: 210428 - DNA, 459 bp, Klebsiella pneumoniae
atgctagataaaattgaccgtaagctgctggcgctactgcaggaagattgcaccctctctttgcaggcgctggccgatgccgttaatctgaccaccacgccctgctggaaacgcctgaaacggctcgaagacgagggtattctccgcgggcgcgtcgccctgttggacgcggaaaaggtggggctggggctgacggcgttcgtcctgatcaagactcagcatcatagcagcgactggtactgtcagttcgtgagcgaagtgacgcagatggcggaagtgctcggcttctggcggatggcgggggagtatgactacctgctacgggtgcaggtggctgatatgaaacgctatgacgacttttataaacgtttagtgaacagtgtgcctggtctgtcggatgtcacttcgagttttgccatggaacagataaaatataccaccgccttgcctgtcgaataa

SEQ ID NO: 210429 - DNA, 1773 bp, Klebsiella pneumoniae
ttgcgattatttgctcaactcagctggtacttccgccgggagtggcgccgctatcttggcgcaattgccctgctggtcattattgccgtcctgcagcttattccgccgaaggtggtgggcattgtggtcgacggcgtgacgcaacaacattacaccgcggagaaggtgtggatgtggatcggcgcgctggtgctgatcgcggtgatggtctacctgctgcgctatgtctggcgcgtgctgttgttcggcgcttcttaccagttggcggttgagctgcgggaagatttttaccggcaactgagccgccagcatccggcgttctatttgcgccatcgcaccggggatcttatcgcccgcgccaccaatgacgtggaccgggtggtgtttgccgctggcgaaggagtattaaccctggtggattccctggtgatgggctgtgcggtattgattgtaatgtcgacgcagattagctggcagcttactctgctggcgctgctgccgatgccgctgatggccctggcgatcaaacgtaacggcgatgcgcttcacgaacgttttcgcgttgctcaggcggccttttccagcctcaacgatcgcacgcaggagagcctgaccagcatccgcatgattaaggcgtttgggctggaggatcgccagtcggcgcagtttgctgccgatgctgccgataccggcgcgaaaaacatgcgcgtggcacgcattgacgcccgcttcgaccccaccatctatatcgccatcggggccgctaacctgctggccatcggcggcggcagctggatggtgatccacggcagcctgaccctgggccagctgaccagcttcgtgatgtatcttggcctgatgatctggccgatgctagcgctggcgtggatgtttaacatcgtggagcgcggtagcgcggcctatggtcgtatccgcacgatgcttgaagaggcgccggcggtggatgacgggaccgaggcggtgccggcaggccgcggcgtcctgcaggttgctatccgcgatttcatctatccgcaggcgagcaaaccttcgctggagcaggtaaattttactctccagccggggcaaatgctgggcatctgcgggccgacgggcgccggcaaaagcaccattctggcgctgctgcagcgccattttgacgtcactcacggcgagatccgctttcacgatctgctgctgccgattctgcagctcgacagctggcgcgcccggttggcggtggtcaatcagacgccatttttattctccgataccgtcgccaataatatcgcgctgggaaaaccggacgcgacgcaggcgcagattgagcgggttgctcaactggccagcgtgcatgacgacattctgcgtctgcctcagggctacgagaccgaagtgggcgagcgcggcgtgatgctctccggcggccagaaacagcgcatctctattgctcgcgccctgctgctggaggccgaaattttgatcctcgacgatgccttatcggcggtggatggccgcaccgagcaccagatcctgcataacctgcgccagtggggggaggggcggacggtcattatcagcgcccaccgcctgtcggcgctcaccgaggccagtgaaattttggtactgcagcatgggcatattgcccagcgcggccgccacgaggcgctggccgtgcagcccggctggtaccgcgacatgtatcgatatcagcagctggaggccgcgctcgacgaggttccgcagacgcaagaggaggccctggatgcgtag

SEQ ID NO: 210430 - DNA, 1779 bp, Klebsiella pneumoniae
atgcgtagctttaccgaactctggccgacgcttaaacgcctgctggcctatggttcaccgtggcgcaagccgttggccatcgcggtggcgatgatgtggattgcggcggcggcggaagtgagcggcccgctgcttatcagctatttcatcgacaacatggtggcgaaacatacgctgccgctgaagctggtggccggtctggcggtagcctatatcggcctgcagctgctggcggcgctcctgcactataaccagtcgctgctgtttaaccgcgccgcggtcggcgtcgtccagcagttgcgcagcgacgtgatggatgccgccctgcatcagccgctcagcgagtttgatacccagccggttgggcagcttatctcacgggtaaccaacgatacggaagtcattcgcgatctgtacgtgacggtggtggctacggtactgcgcagcgcagcgctgatcggcgcgatgctggtggcgatgtttagcctcgactggcggatggcgctggtggcgatcgcgattttcccggcggtgctgatcgtgatgattatctatcagcgctatagcacgccgatcgtgcggcgggtgcgcgcctggcttgccgacatcaacgatggcttcaacgaagtgatcaacggcatgggcgtcatccagcagttccgccagcaggcgcgctttggcgaacggatgcgcgaggccagctatgcccactatctggcgcggatgcagacgctgcgcctggacggttttctgctgcgcccgctgctgagccttttttcctcgctggtgctgtgcgggctgctgatgctgttcggctttagcgcggtgggcacgatcgaggttggggtcctgtacgcgtttatcagctatcttggacgccttaacgagccgcttatcgagctgaccacccagcagtcgatgctgcagcaggcggtggtcgccggcgagcgcgttttcgagctgatggatcgcccgcgccaggcgtggggtacggatgacgcgccgctgagcagcggtcgggtggaaattgaccatctctcctttgcttaccggggggaccgtctggttctccaggatatcacgctggatattccctcccgcagcttcgtggcgctggtcggacataccggcagcggaaagagtaccctcgccagtctgatgatgggctattacccgttaacccacggcgagatccgcatcgatggtcgaccgctcgcatccctcagccacagcgcgttgcgtcggggcatcgcgatggtgcaacaggatcccgtagtgctggcggataccttctacgccaacgtcgcgctgggccgggacatcagtgaggcgcaggtttgggaagcgctggaggcggtgcagctggcggcggtggcgcgcagcatgagcgatgggctgtacacccaactgggcgagcagggcaataatctctccgtcgggcagaagcagctgctggcgctggctcgcgtgctggtggacaccccgcaggtactgattttggatgaggcgacggcaaacatcgactccggtaccgagcaggcgatccagcaggcgctggcgaaggtccgccagcataccaccctcgtggttattgcccatcggctgtcgaccattgtggaggccgataccatcctggttctgcatcgaggtcaggctgtcgagcggggcacccatcagcagctgctggcggcgaaaggccgctactggcagatgtatcagctgcagctggccggcgaagagctggcggccagcgccagagaggagtcgctcagcgcctga

SEQ ID NO: 210431 - DNA, 339 bp, Klebsiella pneumoniae
atgaagctggttaccgtggtaatcaaaccattcaaactggaagacgtgcgtgaagctttgtcttccatcggcattcagggcctgacggtcactgaagtcaaaggatttggccgtcagaaaggtcacgcggagctctaccgcggcgccgagtatagcgtcaactttctgccaaaagtgaagattgatgtggcgattgccgacgatcagctggatgaagtcatcgatgtcatcagcaaagcggcttacaccggaaaaattggcgacggcaaaattttcgtcgctgaattgcagcgcgtcattcgcatccgtaccggcgaagctgacgaagcggcactgtaa

SEQ ID NO: 210432 - DNA, 1287 bp, Klebsiella pneumoniae
atgaaaatggcaacaatgaaatcgggtctgggggcattagcccttctgccggggctggcgatggccgcgcctgcggtggcggacaaagccgataacgcgtttatgatgatttgcaccgcgctggttctgtttatgactatcccggggattgcgctgttttacggcggcctgatccgcggtaagaacgttctgtccatgctgactcaggtgattgtcacctttggcctggtctgcgtattgtgggtgatttatggctataccctggccttcggcaccggcggcagcttcttcggcagctttgactgggtgatgctgaaaaatattgagctgaaagcgctgatgggcaccttctatcagtatatccacgtggcattccagggctcgttcgcctgcatcaccgtcgggctgattgtcggggcgttggcggaacgtattcgtttctccgcggtactgatcttcgtggtggtgtggatgacactctcctacgtgccgattgcgcatatggtttggggcggcggtctgctggcgacccatggcgcgctggacttcgccggcggcaccgttgtgcacatcaacgccgcggtcgccgggctggtgggcgcctatatgatgggcaaacgcgtgggcttcggcaaagaagcgttcaaaccgcataacctgccgatggtgttcactggcaccgctatcctctacgtgggctggttcggcttcaacgccggctctgccagcgcagcgaatgaaattgcggccctggcgttcgttaacaccgtcgtggcgaccgctgcggctatcctggcgtggacctttggcgaatgggctctgcgcggcaaaccttcactgctgggcgcctgctccggggcaattgccggtctggttggcgttacgccggcgtgtggttatatcggtgtcggcggggcgctgatcgtcggtatcgcctctggcctggcgggtatctggggcgtgactgcgctgaaacgctggctgcgtgtggatgatccttgcgacgtcttcggcgttcacggcgtctgcggcatcgtcggctgtatcctgactggtatcttcgcggcgacttctctgggcggcgtcggttatgcggaaggcgtcaccatgggccatcagctgctggtgcaactggaaagtatcgccatcaccgtggtctggtccggcgttgtggcgtttatcggctacaaggtggcggatatgaccgtcgggctgcgcgtgccggaagagcaggagcgcgaagggctggacgtcaacagccatggcgaaaacgcctataacgcctga

SEQ ID NO: 210433 - DNA, 864 bp, Klebsiella pneumoniae
atgagtcaggcactctctaacctgctggcattattagatctggaaaaaattgaggaagggttgtttcgcgggcagagcgaagacctggggttacgtcaggtttttggcggccaggtagtgggtcaggcgctgtatgcggcaaaagagaccgtgcccgttgagcgtctggttcattcgtttcacagctactttcttcgccccggcgatagccagaagccgatcgtttacgatgtggaggtgctgcgcgatggcaacagcttcagcgcccgtcgggtcgccgccatccagaacgggaagccgattttctatatgaccgcctccttccaggcgccagagaatggctatgagcatcagaaagcaatgccggccgccccctcccctgacggcctgccttcggaaaccgatatcgctcgcaagctggcgcatctcctgccgccgcaggtgaaagacaaattcctctgcgataaaccgctggagatccgtccggtggagtttcataacccaatgaaaggccatatcgccgaaccggtgcgccaggtctggctgcgcgccaacggcgcagtccctgacgatctgcgtattcatcagtatctgctgggctatgcttcagactttaacttcctgccggtggcgctgcagccgcacggcgttggtttccttgagcccggcatgcaggtcgccaccatcgaccactctatgtggttccaccggccgtttaatattaacgaatggctgctttatagcgtcgaaagcacctcggcctccagcgcccgcggcttcgttcgcggcgaattctacacccaggatggcacgctggttgcctcaacggttcaggaaggggtgatgcgcaaccgcaacgcataa

SEQ ID NO: 210434 - DNA, 492 bp, Klebsiella pneumoniae
atgaaatttgcctatatgtttagtgccttagccgtcgccgcgacgctgaccgcctgtgctaatcaccactcgaacaattcttcgacgcaggcggccgcgcccgacccttacggtatcgcgacgctgagcgtggcgcagcagcagccgagcgtcacggggacgattaatatccgccagagaatcgctttaccgccggatgcggtactgacggtgaccctgtcggatgcttctctggcagatgcgccagcccgcgtattgtcgcaaaaagcggtgcgtaccgaaggcaaacaggcgccatttaactttgcgctgccttacaacccggcagatattcaaccgaacgctcgcattctgctaagcgcggcgatcacggttaacggccagttgatgtttattaccgataccgtgcagacggtaataaaccagggcggcactcatgccgacctgacgctggttccggtccagcagaccgccgttcctgtcgcccagtaa

SEQ ID NO: 210435 - DNA, 312 bp, Klebsiella pneumoniae
atggctccgcacgacacatttccccaacgcgtctggcacatcgtggcgtcgataccggaagggtatgtcacgacctacggcgaggtcgcccggctggctggttcaccgcgcgcggcgcgccaggtgggcggcgtattgaagcgcctgccggaagggtccaccctgccatggcatcgggtggtcaatcgccatggcgatatctccctcaccggccccgatctacagcggcagcgtcaggcgctgctggccgagggtgtgcaggtctccggcagcggccatatcgatctccagcattatcgctgggtttattga

SEQ ID NO: 210436 - DNA, 408 bp, Klebsiella pneumoniae
atgactgactcatcaccacagaccatcactctgcctttacctgctattgaagggatgaccatcgcctttcagggcgtaaactacctgcgtcctgaaaaaatgctcgacttcgcgaccatcagtcccgcgccggtgcgggcggttacgccgctggcgctgctctattccaccgtcggcgtgctgcgccaggtggagctacgcaagctgccggtctatatcagcggtcgggtggtgtaccctatctcgtcgttaaccatgccgggcctgcgcgcgaggctgatcatcaacgccacttcgcagcggttgaaatttcttgaaagtctcatcgccagctcagcctccgacaatgtccatggcatgcagatcctcggcctcgctctgacgttcaccgtcgaacaggccgcctga

SEQ ID NO: 210437 - DNA, 258 bp, Klebsiella pneumoniae
atgaccacagtggttttgaatgtaaaaattgacgcagagctaaaagaaaagttgcgtcattatgcggaagttaataacgagaacctgggaacggcaacggaaaagctgctgcagctggcttttcagctggaggagtcagcaggtgaggcgggggtgacggaagaggacattgacagccagcataccgaagaggaagcgacgccacttacccctaaagaaatcaaagcattaagaaaacttctgaagaagaaaaaatga

SEQ ID NO: 210438 - DNA, 216 bp, Klebsiella pneumoniae; identical to SEQ ID NO: 135670

SEQ ID NO: 210439 - DNA, 1428 bp, Klebsiella pneumoniae
atgtcagcccgacgctttggaacccaatcgctggtacgcctgctcggcaactggcaggagaccagctcacgcacgccgctatggcgccagctggcggaagcgctccgcctgctgatccttgatggtcgcctgacgctgcaaacgcgcctgcccggcgagcgcgagctggcggcggccctgaacgtcagccggaccaccatcgccagcgccctcggccagttgcgggaggagggctttctctacagccgccaggggagcgggtcacgcattgttttgccggaacgccccgccgatcttcctctgcctgccggcatctcatctacgcttaatctatctaccgccgccctcagcgccgggccggaggtccatcaggccttccagcacgctatgaccctgctgccgccctatctcgcacagactggctatgaccagcaggggctgccggtgctgcgggaggcgattgcccggcgctacagcgaacgcggtctgccgacgcggcccgatgaggtgatggtggtcaacggcgccctcagcgccttcgcgctgatcctgcgcctgttcaccgggccgggcgatcgggtggttattgacgcccccacctatccgatggccatcagcgccattcagggcgcctcctgccgccccgtcggggttgcgcttccgcagcagggatgggactgcgatggactggcggcgactattgcgcagactgcgccgcggctggcgtggctgatgccggattttcacaaccccaccggacgctgtatggatgcccccacccgccagcgggttgcggacatcgccgccaggacgcgaacaacgctggtaatcgacgagaccatggccgacctttggtataacgcgccgccgcccccgccgctggccagcttcaatcccgatgccgcggtgctcaccattggttcggccgggaaaagcttctgggggggactacgtatcggctggatccgcgccagcgcgcggaccatcgcctcgcttattcaggcccgcgattcgctggatttgggtacgccgctgctggagcaactggcctgcagctggctactggaaaatgccgccacactgctgccgccgcggcggaatatgctcaaggcgcgccgggacatgtgcgaaacgctgatggcggaatattttccccgctggcggttttcgccaccggaaggtgggctctctttttgggtggaacttcctgacatgctggccaccctgttctctgcgcgtgcggaaagccaggggatccatatcggcaccggtacgcggtttgggctggaaggggcgttcgatcgctatttacgtctgccgtttacgctgccggatgaagcattgcgccgggccttctccacgctacaaccgctgtggcaaagccttgctgaacagaaggaaaatacacgtttgcgaaaaataatataa

SEQ ID NO: 210440 - DNA, 615 bp, Klebsiella pneumoniae
atgcttcgtcgcctgctgcagttatatattggtctggtgctttacggcgtgtccacggcgctcttcgtgcatgccaatctcggcgccgatccgtgggatgttttccatctcggggtggctaaacagctgggtatcagtttcggtacggtgattatcctgaccggcgcggcggtactgctgctgtggatcccgatccggcaaatgccggggctcggcacggtgagcaatgtcatcgtgctgggactagcggcggacgccacgctggccgtcctgccgccgctggagtcgatggtggcgcgcagtgcgctgctggtaggagcgattgtgctgaacgctatcgctaccggaatgtatattggcgcgggctttggccccgggctgcgcgatggcctgatgaccggtctgcatgctcgcactggttggtcactgcgcggtatccggacggcgatcgagctttccgtactgctgattggctggctgctggggggcaaatttggcgtcggaaccgtcatctacgcgctgtcgattgggccgctgatccagctgtgcctaccgtggttcagccagcccgtcagccgcaacgcggtcagccctccccgggaaatagtctcctga

SEQ ID NO: 210441 - DNA, 882 bp, Klebsiella pneumoniae
atgaacgatttcacttcccttctgcagcagggcaatgcctggctgtttatacccagcgcaatactgctcggcgcgctgcacggcctcgaaccgggccattcaaaaacgatgatggccgcctttatcgtggcggtacggggaacgttaaaacaggcggtactgctggggctggcggccacggtttcccatacggcggtggtctggctgatcgccatggccggcctgtggtttggccgcggctggaacgcccaaacctctgaaccctggtttcagctggtctcagggattgtcgttgtgctgattgcctgctggatgctctggcgcacctggcgcgaatcgcagcctcacacgcaccatgagcaccaccatgaacatgagcaccaccatgaacatgatcaccaccatgaccatgatcaccgccatgaccatgatcaccgccatgaccatgatcaccgccatgaccatcaccatgcgtcctcatccgccgcgccgctggtggcggaggagtggcaggacgcgcatcagcgggctcatgctcaggagatcaaccggcgctttgatggccgccaggtgacgaccgggcagatcgtgctgtttggcctgaccggggggctgatcccctgcccggcgtccattaccgtgctgcttatctgtttacagctgaagaaattctcgctgggcgccacgctggtgctgggctttagcgttggtctggcgctgacgctggtggcttccggggccatcgccgccctgagccttaaacatgccacccgccgctggccgtggcttaacgacctctcgcgcaaggcgccctggttctcaggcttactgattattgtggtggggatctacatgatgcttcatggcctgagcggcctgtaa

SEQ ID NO: 210442 - DNA, 273 bp, Klebsiella pneumoniae
atgtcacatacagttcgacacaaaaagatgttactgacccggctgaagaaaattcaggggcagagtaccgcgttagagaaaatgcttaatcgcgagcatgagtgcgctgaaatattacagcagctggcggcgatccgcggcgcggtcaacggcatgatgctgcaggttattcaggggcatcttaccgaccatgtggtgaaagagcctgacgagacgcagcgcgaagcggatctggagacggtgatgcaggtgattaaatcctatctgaagtag

SEQ ID NO: 210443 - DNA, 1560 bp, Klebsiella pneumoniae
atgaggacccggcatctgatggcgctgtttacaggagtgctgatactggccatcatcctgcccatttcactcagcatctggcaggcggcgcggcaggccaaaatgcagttctatcgtgaactggatgactattccaaccgtatcgtcgttcggacgctgcaggttgccgaccaggcccgggaagcgttacgagaggctgacgcacacaccgccgcctcctgtagccctgaacatctgcttacgctccgccgcatcgcctatacccatcgctacattcaggaagtgctctggctgcgtgattccgtgccgcaatgctcctccctggaagaccatagcgtcgcggtcaccttccccccgccggaccacattgcccccgacggctatcgcacctggctgacctcaattaacgatcttggcctcgatcatcagatgacggccatgggcagccggcagcacatggtgatgatcgaccccgtctcctttattgatgtcgttcccgccagcgaagagaagatccataccatgctgtttggcctggaccaccagaaaatggtgatcagcagtcagccgctgccggcgaaagtctggcaacgcattaaagatccgcatgtggatatgcttactctggataacacagtctaccggatccagcgcattcccgagctgggctctggcatcgtaacctggtcttcaaccttgccgctgcagcagcgcattcgacagcagctgttcttctggctccctgccggcattttcaccagcctgctcgccacctggctgctgctgcgtctgctaaggcacctgcgctcaccgcgcaacagcatgctggacgccctcaattccgaagcgattcaggtttactatcagccgataatctcgttgcaggacgggaaaatcgccggggccgaggcgctggcccgctggcagcaacccgacggcacctttttatcgccggatatttttattcctctggccgagcagaccgggctgattacgcagctgacggaagatatcgtcaggaaaatttttaccgatctcggtccctggctgcggcagcggccggaagtgcacatatccatcaacctgtcggtagatgatttacgctcgcccaccctaccgacgttgttgcacgatcagctgcagcactgggggatcgccgccgaacagatcatccttgaaatcaccgagcgcgggtttgtcgacccggagaccaccatgccggtgatcgctcactaccgtcaggctggccatcggatctcgattgacgatttcggtaccggctactccagcctgagctatctgcagaaactggacgtcgacacgctgaaaatcgataaatcttttgtcgataccctcgagtaccggccgctgacgccgcacattattgaaatggccaaagcgctcaatctggccaccgtcgccgaaggggtggaaaccgaaagccagcgcgactggctgcgccagcatggcgttcagtacgcccaggggtggctttacagcaaagcgctgccaaaagagcagttcattctgtgggcagagcataacctccatgcgcattaa

SEQ ID NO: 210444 - DNA, 1110 bp, Klebsiella pneumoniae
atgtccaatatacgactgaggaatgtcaccaaaaggttcggcagcacggtgacgctgcaccaggtcaatctcgatattgaagatggcgagtttgccgtcttcgtcggcccttccggttgtggaaaatcgacgctactgcgcatgattgccgggctggaagaggtcagcgaaggagaagtactgatcggcgatgaggtgatgaatgatgtcgtgcccgcccgccgcggcgtggcgatggtcttccagtcctatgcgctctatccgcacatgacggtggcagagaacatgggctacgggctgaaggtgaataaagtgccgaaaacggagatccgtcgccaggtggaaatggtggctaaaacgctgcagctctcgcacctgctggatcgtaaaccgaagcagctctctggcggccagcggcagcgcgtggccattggccgggcgatcgtgcgtaatccccgggtatttatgttcgatgagccgctctctaaccttgatgcggagctgcgcgtcgatatgcgcctgcatattgcccgtctgcaccaggagctgaagaccactatggtgtatgtcacgcacgatcaggtggaggcgatgacgctggccgataaaatcgtggtcatgaactacgggaaagtcgaacaaatgggttcgccgatggcgctgtactacaatccggtcaacaaattcgtcgccggctttatcggctcgccgaagatgaactttctgccggctatcgtcagcgactggcagccggaacgcttaacggtcaccctcgcgcaggaccatcagctggccctgaatatcgccacccagccgctgaagcccggcgctgcggtgacgctggggatccggccggagcacctcaccccggaaatcaccaccggtaccgtggtggagtttcaatgtgaagtggtggagcgtctgggcaacaatacctatctgttcggccagtgctacggccacgacaacgtcaaggttctgctgcccggcgacgtccatttccgcccctggcagaaaattaatctggctttcgatgagcgcttctgcatggtgtttgatgagaacgacctgcgcatcagcgctgatatcccggcgccggatgcacactag

SEQ ID NO: 210445 - DNA, 1233 bp, Klebsiella pneumoniae
atgaaaaagaacacgcttgctgcactgatccttaccaccctggcggcgggacaactcgccagcctgcaggcgcatgccgccgggcagctcaacgtctgggaggacattaaaaaatccgctggcatcaaaaccgcggttagcgattttgaaaagcagtacaacgtgaaggtcaatctccaggagatgccctacgcccagcaactggaaaaactgcgcctcgacggcccggcgggcattgggccggacgtgctggtgatcccgaatgaccagctcggcggcgccgtggttcagggactactctcgccgctcagcgtcgatcaggcgaaacaggatgcctttacgccagcctccatcaatgccttccgcatggacaacgcgctgtatgggatcccgaaggcggtggaaaccctggtgcttatctacaacaaggacctgatcgacaagccgctggacagcctgcaggcctggctggactactcgaaaacccagcgcgagcagaacaaatacggcctgctcgccaagtttgaccagatctattacagctggggggcgattggcccgatgggcggctatatctttgctaaaaacgacagcggcggctttaacccgcagcaggtgggtctcaatacccccggcgccgtcgaagccgtcaccttcctgaaaaaattctatgccgagaaggtctttccggcggggatcctcggcgataacgggctgaatgccatcgattccctgtttaccgagaaaaaagcggcggcggtgatcaacggcccctgggctttccagccgtatgaagccgctggcattaactatggcgtggcgcccctgccgaccctgccggacggcaagccgatgagctccttcctcggcgtcaaaggctatgtagtatcgacctggagtaaagacaaagcgctggcgcaacagtttatcgagttcatcaaccagccgcagtatgtgaaagcccgctatgtcgccactggcgaaattccgccgctgaaggcgatgattgacgatccggtgattaaaaacgaccaaaaggccagcgccgtcgccatccagtcggcgcgagcggtggcgatgccgggcattcccgagatgggggaagtgtgggggccggccaacgccgcgcttgaactgagcctcaccggtaagcaggcgccgcaggccgcgctcgataacgcggtgaaacagatcacgatgcagatcgaagcgatgcaggccagcaatcagtaa

SEQ ID NO: 210446 - DNA, 1308 bp, Klebsiella pneumoniae
gtgagcatccattccagcgaaaattttagcgacgcacgcgggcccgggcgccatgcatggtgcggcctgctgctggcaatcgtgccgggtttcggtcagttttatcatcgccagtggctgaaagggctggtcttcctggtgctgctgagcagctttatggggattttttatgatttcctgcgtgaggggttgtgggggttatataccctgggtgaagaggtaccgcgggataactctatcttcctgttagccgaggggattatcagcgtgctgatcgtcgctttcggcgtgctgatctattttctctcgctgcgggatgcgtggctcaacggcaaaaaacgcgatgaggggatcgccctcaacagcgtgcgtaagcagtaccagatgctgctgagcgacggctttccgtacctgatgatcaccccgggctttattctgctggtgtttgtggtgatctttccgattctgttcggtttcgccatcgccttcaccaactacaacctgtaccacaccccgccggcgaagctggtggactgggtggggctgaaaaactttattaatattttcaccctctccatctggcgctccactttcctggatgtgctgcagtggaccgtggtgtggacgctgctggcgaccaccctgcagtgtacggtgggcgtgttgttggcgattctggtgaaccaaaaagatctgcgctttaagccgctgatccgcaccatctttattttgccgtgggcggtgccggggtttgtcaccattctcgtttttgccggtatgttcaacgactccttcggggtcatcaacaacgcgatcctgtccttttttggcatcagtccgaaggcatggctcaccgatccgttctggaccaaaacggcgctgatcatgatgcagacctggcttggcttcccgtttgtctttgccatgaccaccggcgtgttgcaggcgatcccggacgatctgtatgaagcggcgacgatggacggcgccagcgcctttacccgtctgcgcaccatcaccctgccgctggtgctgtatgcgatcgcgccgatcatcatcacccagtacaccttcaactttaataacttcaatatcatttacctgttcaacaacggcggccctgcggtggcaggctctaacgccggcgggacggatattctggtgtcgtggatctataagctgacgatgtcttcgtcgcagtacgccatcgcggcgaccatcacgatcctgctgtcgatctttgtcgtcggcctggcgctgtggcagttccgcgccaccaaatccttcaaaaatgacgacatggcgtaa

SEQ ID NO: 210447 - DNA, 852 bp, Klebsiella pneumoniae
atggctcaatcacccagtattaaacgcgaaaagtggatccggctctctctcacctggctggtggttattctggtctcagtggtgattatctatccgctggtctggacggtcggggcgtcgctgaacgccggcaatagcctgctcagtacctcaatcattccagaaaatgtgtcgttccagcactatgccgatctgttcaatggcaatgtgaattacctcacctggtactggaactcgatgaaaatcagcttcctgaccatggtgctgaccctgattagcgttagctttaccgcttacgccttctcccgcttccgctttaaagggcggcagaacgggctgatgctgttcctgctgctgcagatgatcccgcagttttccgcgctgattgccatctttgtgctgtcgcaactgcttggcctgataaacagccacctggcgctggtgctgatctacgtcggggggatgatcccgatgaatacctggttgatgaaagggtatctcgacgcgatccctaaagacctggatgagtccgctcgcatggacggcgccagcagctttcgcatctttatcgagatcatcatgccgttgtcgaggcccatcctcgcggtggtggcgctgttctcgttcactgggccgctgggggatttcatcctctccagtaccatcctgcgtaccccggataaatacacgctgcctatcggtctgtataacctggtggcgcaaaaaatgggtgccagctacaccacctacgcggcgggggcggtgctgatcgccgtaccggtggcgatcctctacctggcgctacaaaaatacttcgtctccggcctgacctcgggcagtactaaaggataa

SEQ ID NO: 210448 - DNA, 1203 bp, Klebsiella pneumoniae
atgaaaagattcacacccgcatggcttgcggtttgtctggcatgcagtttctccacttcttctctggccgcggacgcgcttgcaacccgcgcgtttcagggcatgccggcggactttatcaaaggcgcggatatctccacgctgctggacgccgaaaagcacggggcgacgttctacgatcagaataatcagcgcaaggatccgatcgccattctgaaagagaacggcgtcaactatgtccgcctccgtctgtgggtggatccgcaatcggcgagcggcgaggactatggcggtgggaacaatgatctggccaccaccctggcgctggcgaaacgggcgaaagcccaggggatgaagctgctgcttgattttcactacagcgatttctggaccgatcccggcaagcagttcaagccgaaagcctgggaaaagctggattacccgcagctgaaaacggcgattcatgactatacccgcgataccatcgcccgctttaagcaggcgggcgtgctgccggatatggtgcagatcggcaacgaaatcaacggcggcatcctgtggccggaagggaaaagctgggggcagggcggcggagagttcgaccggctggctggcctgctgaacgcggctatcgctggcctgaaggagaacctgcgccagggcgagcaggtgaaaatcatgctgcatctggccgaagggaccaagaacgataccttccgctggtggtttgatgagatcgacaagcgccatgtaccgtatgacgtgattggtctgtcgatgtacacctactggaatggcccgatcagcgccctgaaggccaatatggatgacatcagcaaacgctataacaaagacgtcatcgtcgtcgaggcggcctatgcctataccctggccaactgtgataacgcggaaaatagtttccaggcaaaagaggaaaaggatgggggatatcccgccagcgtacaggggcaatataactatattcacgatttaatgcaggcggtggttgatgtgccagagcagcgtggcaaaggtattttctattgggagcctacatggattgccgtgccgggaaatacctgggccaccccggcggggatgaaatatatccacgacgagtggaaagagggtaatgcacgtgaaaatcaggcgctatttgattgccagggaaaagtattgccgtcggtaaaagtttttaattaa

SEQ ID NO: 210449 - DNA, 2058 bp, Klebsiella pneumoniae
atgaataaatttgcacctttacatccgaaggttagtacgctgctgcatggcgcggattataatccggagcaatgggagaatgaccccgatattattgataaagacattgccatgatgcagcaggcaaaatgcaatgtgatgtcggtgggaatatttagctgggcgaaactggagccacgcgaaggggtatttaatttcgcctggctggatattatcctcgataaactgtatgccgccggcattcatgtctttctggccacgccgagcggcgcgcgcccggcgtggatgtcgcagcgctatccgcaggttctgcgggtggggcgcgatcgggtgccggccctgcacggcggccgtcacaaccactgtatgtcgtcaccggtctatcgcgagaaaaccctgcaaatcaataccctgctggcagaacgttattcctcacacccggcggtgctgggctggcatatttccaacgaatatggcggtgaatgccattgcgatctctgccagaaccgttttcgcgactggctgaaggcgcgttaccagaccctggagaacctcaaccaggcctggtggagcaccttctggagtcatacctatactgactggtcgcagattgaatcgcctgcgccgcagggcgagatgtcgatccacggtctcaatcttgactggcatcgctttaacaccgctcaggtgaccgatttctgccgccatgaaattgctccgctgaaggcggcgaatgcctccctgccggtgactaccaactttatggagtatttctacgattacgactactggcagctggcggaggcgctggatttcatctcctgggacagctatccgatgtggcaccgcgataaagacgaaaccgcgctggcctgttacaccgcgatgtatcacgacatgatgcgcagcctgaagggcggcaaaccgtttgtgctgatggagtccaccccgggcgccaccaactggcagccgaccagcaaactgaagaagccgggaatgcatattctttcctcgctgcaggcggtggcgcatggcgccgactcggtgcagtatttccagtggcggaaaagccgcggttcggttgagaaatttcacggcgcagtggtcgaccacgtcggacatattgatacccgcattggccgcgaagtctgccagctcggcgagatcctcagcaagctgccggaggtgagaggctgtcgcaccgaggcgaaagtagcgattatcttcgaccagcagaaccgctgggcgctggatgacgcccaggggccgcgtaatcttgggatggaatatgagaagacggtcaacgagcactaccgcccgttctgggagcagggcatcgccgtcgatgtgattgacgccgatgtcgatttaacgccgtatcagttagtgattgccccgatgttatatatggtgcgcgacggctttgccggtcgggcggaggcgtttgtcgccaacggcggccacctggtgaccacctactggaccggtatcgtcaatgagtccgatctctgctatctcggcggcttcccgggcccgctgcgcaatctgctggggatctgggcggaagagatcgactgcctgaatgacggcgagtttaatctggtgcaggggcttgccgggaatcagtgcggtctgcagggcccttatcaggtgcgccatctctgcgaactgatccatatcgagagcgcccaggcgctggccacctaccgggatgatttttatgccggacggccggctgtgacggtgaacgcgttcgggaaaggcaaagcctggcatgtggcctcccgcaacgatttagccttccagcgcgatttctttaccgccctgagcaaggagctggccctgccgcgggcgatagcgacggagttaccacccggcgtggtggcgactgcgcgcaccgacggtgacaacgcatttatcttcctgcagaactacagcgcgcaaaaccataccctgaccctgccgcaagggtatcgggattgcctgaccgacgcggcggtatcggctccactgaccctgtcggcatgggattgccgtattctccgtcgtcacgcgtaa

SEQ ID NO: 210450 - DNA, 315 bp, Klebsiella pneumoniae
atggtgagtttaaaatccttcctgcactatttctccccagcgcgtccggcacagccattaagcgaggcggaaaaacagcaaatcgaggcgctgattcaggcctttggtggcgaagcgaatattacgcaagtggacgcctgtattacccgtctgcgggttagcgttcgccatcttgcggccgtggactccgaagcattacagcagcagggcgcgctaggggttattattcttggtcagcaggtgcatgctattttcggtaaacagtccgatgcgctgcgtcagcttctggatgaacattttgccgcccggaaataa

SEQ ID NO: 210451 - DNA, 1272 bp, Klebsiella pneumoniae
atgaacactacactgcgcgccctttcagtcgcgttagccgctgcgctaatcgctccttccgcgtttgcggccaccgccgcgatcccaacgatcgatttccatggctatatgcgcgccggggttggggtctccggcgacggtagcgaagcggaatggcaaaaaaataagctaggccgtttggggaacgagtcggatacctacggcgagctggagctgggctctgaggtctataagaaagatgacgtcagcttctatctcgacagtatggtcagcatggtctccgacggctctaacgataatgaaaccacgctgaacgatgatgcacagttcggcttacgtcagttgaacctgcagataaaggggctgatccctggcgatccgaatgcggtgatctggggcggtaaacgttactaccagcgccatgatctgcatatcatcgataccaaatactggaacatttccggctccggagccggggtggaaaactacaccctcggcccgggcgccgtctcgctggcctggatccgcggcgatgccaacgatgttgactatcgcgtcgatggcgacagcaacgtcaatatcaactatatcgatttacgctacgcgggctggaagccatggacgggctcgtggaccgaattcggtatcgactacgcgatgccaaacaccaccaaaaaacaggatagctacggcggactgtacgatgctgacaacggcgtcatgctgaccggtgaaatcagtcaggatatgctgggcggctataacaaaaccgtgctgcagtacgccaacaaaggcctggcgcagaacatggtctcccagggcggcggctggtacgatatgtggaactacgtgaacgacgccaccggttatcgcgtgattaacaccggcctgatcccgattacagagaagttttctatcaaccacgttctgacctggggctcggcggatgacattaccgactataccgacaaaacgcggatgctgtcgctggtcgcccgcgggcagtaccagttcaccgactacgtgcgcctgattggcgaagtcggcggtttctatcagaaagacagctacaacaatggcaccagctacaaacaggccggtgagaaatacaccattgcgttgggcctggcggacgggccagactttatgtcacgtccggaattacgcatttttgcttcatatttgaatgattccgaagatggtaaaccgtttgaagaccagacggcgaataatacctggaatttcggcgtgcaggttgaggcctggtggtaa

SEQ ID NO: 210452 - DNA, 1071 bp, Klebsiella pneumoniae
atgaagtctaaaagcgctactctggaagacgtcgcacgccatgcgggcgtctcttaccagaccgtgtccagggtactcaacaaatcagctaatgtatccgaagcgacgcgtcgcaaggtggagaaatcgatagaggccttacgctatgtgccaaaccggctggcgcagcagctggtggggaaggagagccagacggtcgggctggtgactatttctctggcctggcatgcgccttcccaggtggcggcggcggtaaaacgctatgccaacctggaaggttaccaggttctgatttcgatgatcgatgagagcgtcaaccaaagcatccaggattccatcaatgagctgaaatctcagcgggtggataaagtcattatcaacgtgccgctggagaccgaacaggcgcagaaaatcgctgctgacaacgatgatatcgtctgcctgtttctcgacgttgatccctacagttccgtgtttaacgtttcgtttaacccggcggacggcacccgggccagcgtcaaatatctctatgagatggggcatcgggagatcgccctgctggcggggccggacagctcagtctcggccaaactccggttaaaaagctggctggagaccctggatggttacggtctgaagccggtgaccgtcctgcacggcaactgggatgcgcagagcggctacgccggcgcgctgcagatgctgcgcgaaacgcctaatttcagcgctgtgctggtgggtaatgatcagatggcgctgggggtgctcagcgccttccatcagcatcaggtggcggtgccgggtgagaagtcggttattggctatgacgatacctacgaaagctcctttttctatccggcgctgagtaccgtgtcgctcgacctcgacctgcaggggaaagaggcggtgcggcggatcctcgccagcaccagcggggcgcctcatacctcatccattctgccggcgcgcctggtgatacgccattccagcggcgcccgaatcgagcagggaaaagatctgcaggccattgcagaacagctccgcgccatcgcccaccgtctggcaccctga

SEQ ID NO: 210453 - DNA, 264 bp, Klebsiella pneumoniae
atgaaagcccatatccatcctccctatcgtacggtggtgtttcacgacaccagcgcgaatgagtattttaaagtcggctcaactatccgcaccgatcgcgtgattgaactcgatggcgaaacttttccgtatgtgacgatcgacgtctcctcgaaatcgcatccgtactacacgggcaaacaaaaaaccttcgccaatgaaggcagtgcagcccgattccgccagcgcttcggcggctttattgatgcgaaaaggaaagcatga

SEQ ID NO: 210454 - DNA, 141 bp, Klebsiella pneumoniae
atgcaggtcgtcaactcattacgtagcgctaaacagcgccacccggattgccagctggttaaacgcaaagggcggctgtacgttatctgtaagagcaacccccgcttcaaagcggtgcaggggcgcaaaaaacgccgttaa

SEQ ID NO: 210455 - DNA, 699 bp, Klebsiella pneumoniae
atgtgcgaatataatcagtttggccaggcgctcggcgtcgcgctgcctgactggcagccgcgcccctggccgacacgacaggtattacagggcagccgttgtcgactcgaaccgctgactcttgctcatgccagcgatctgttcgccgctcaccagctggcgccagacgcccgcagctggacgtggctgctgcgtgaacctgagagcaaccttgcagaattcagtgcctgggtggagcaggtcgccacgctggcagacccgattcattttgccgtcgttgaccagcagcgagggaaagcggtcggctcgctggcgttaatgcgtatcgatatcgctcacggtgtggtagaggtggggcatgtgcatttttcaccgttactgagccgaacggccatggccaccgaagcgcactggctgttgatgcagtatgtctttgatacgctcggctaccgtcgctatgaatggaaatgcaacagtcttaatatcccatcagcacgggcggcaaggcggctggggtttcagtacgaaggacgttttcgccaggcgctggtgagtaaaggacacaaccgggacacggactggttttcggtgatagacggcgaatggccggagctggataacgccatgcgccaatggctggccgccgacaattttaccgccgacggccaacagcgccgctcgctggagagtttccgttaa

SEQ ID NO: 210456 - DNA, 1452 bp, Klebsiella pneumoniae
atgaatataccggacgaggggttttttacgctgttgacgcaggggatgcggaaccgcacggtcgaaaccttacagcgcgccctttaccacaccttacgtgacgctatcctgcagggaaccctgacggcccgctgccgtttacccggatcgcgggtgatggccgaacggctacacctgtcgcggaatacggtcaatgcggcactggaacagctggcgctggaggggtacctgacacggagccgtcagggaacgcaggtggcaccactcgcctcctgccgccaggaggcgggtcagatgccgcccgtcgtgctgcctgagcggctgcaaaggctgccagccgcgatgcgccgcgactcaccgacgctggcatttacgccaggcatgccggcggtaaactatttcccgctgccgctgtggcggcgactgatggataacgtgctacgcgaagatggtagcgcgctgctgggttatggcgaagccgcgggcgatcctttgctgcgagaggctatcgctcgtcatctggcgctctcccggggcatccggtgcgatatccggcagatcgtcatcaccgaaggcgcgctggaaggcgtcaacttatgcgcctcgctactgaccaacccgggcgacagcgtgtggctggaagaaccggggtacctgggggcgaggagtggctttcagcgggcgggactgcgggtcagaggaatggctgtcgacgatgaagggatgtgtattgccaacggcgtcgcggagccgccccggctcattttcacctctccttcacaccagtatccctgtgggagcatcatgagcgccgggcgccgtctggcgctcgtggaatatgcccgccggcacggggcgtggattgtggaggatgactacgacagcgagtttcgccatagcggagaaccgatcccggcgatgctgggaatggtgcctgatgccccggtggtctatctcggcaccttcagcaaaacgctgtttccggcgttgcgtatcggttttatggttatgccgcccgcgctggcggatgctgctcaggacgccattggcgcgctgctgcgcgggggacaccgtgctgaacagcgggcgctggccagctttatcgagaagggacactatgcgcgccatctggcagcgatgcgccgcctgtaccgtaaacgtcagcaacagctgcgcgaggcgctggcgcaagagataaccgtgccgtgcgacgttctcggcgggggaggggggatgcacctgacggtggcgatggagggcgttaatgaccggacgcttgcgcagcaggcgcgccagtttcagctggcgcccgccgcgttaagtcatttctatctcgacccgcagcgagcgcggagcggactggtgcttgggtatggcaatacctctgcttctcgctatctcccggcgctgcggaccctaaatcgccttattgcgcagcaccggcgcgcgtga

SEQ ID NO: 210457 - DNA, 471 bp, Klebsiella pneumoniae
atgacagaaatacaacgcctgctgattcacaccattgacgaactcaacgtccaggaaaaacgcgataatcgcccgcgttttagcatcagttttatccgcaatcatccgggactgtttgttgccatgtatgccgcgtttctggcgacgctggtggtcatgctgcgctctgaaacgctggtagactcggtctggttgctggtggtgctgttcattctgttcaacgcctttttcttctttgacgtctatccacgctatcgctacgaggatatcgatgtcctcgactttcgcgtgtgctacaacggggaatggtacaacacccgctttgtcccccggcagctgatcgaccgtatcctgcagtcgccagacgtcgatagcgagcagaaggcgcagctcaaaaagatggtcgccaccaaaggcgagctctccttctacgacgtctttaccctcacgcgcgccggtgctgcgcaataa

SEQ ID NO: 210458 - DNA, 567 bp, Klebsiella pneumoniae
atgagtgaagaaaaacgcaaaatgatcgccggtgagctctatttatctggcgacccaacgcttcgcgccgatcgcctgcgcgccagacagttgttgcaccgttataatcattccgccccggatgaccaggaacaacgtcagcatattctggccgagctgttcgctcgcgccggcgatgcgtatatcgagccaagctttcgctgcgactatggttataatatttttctcggcgccggtttttacgccaattttgactgcgtgatgctcgacgtctgccctatccatattggcgataactgtatgctggcgccaggcgtccatatttataccgccactcatccgctggacgccgatgcgcgtaatagcggccaggaatacggcaagccggtaactattggccacaatgtgtggattgggggtcgggcagtgatcaatcccggcgtgaccattggcgataatgcggtcattgcgtccggcgcggtagtcaccaaagacgtacctgcctgtaccgtcgtcggcggtaacccggcgcagatcattaagcgccttccgccgacaaatccgtaa

SEQ ID NO: 210459 - DNA, 219 bp, Klebsiella pneumoniae; identical to SEQ ID NO: 135688

SEQ ID NO: 210460 - DNA, 375 bp, Klebsiella pneumoniae; identical to SEQ ID NO: 135689

SEQ ID NO: 210461 - DNA, 3147 bp, Klebsiella pneumoniae
atgcctaatttctttatcgatcgccccatatttgcatgggtgatcgccattatcatcatgctggctgggggattatcgatcctcaaattgccggtggcgcaatatccgacgattgcgccgccagcaatttccattaccgccatgtaccccggtgctgacgccgaaacggtgcagaacaccgtaactcaggttatcgaacagaatatgaacggtatcgatcacctgatgtacatgtcctcaaatggcgactccaccggtacggcaaccattacgctgaccttcgaatccggtaccgatccggatatcgcccaggttcaggttcagaacaagctggcgctggcgacgcctctgctgccgcaagaagtacagcagcaagggattagcgttgagaaagcgtccagcagcttcctgatggttgtcggcgtcattaacaccaacggcaccatgaaccaggacgatatttcggactacgtggcggccaacatgaaggatccgattagccgtaccagcggcgtcggcgacgttcagctattcggttcccagtatgcgatgcgtatctggatggatccaaacaaactgaacaacttccagcttacgccggtggatgtgatcagcgccctgaaagcgcagaacgcccaggtggccgcgggccagttaggcggtacgccgccggtgaaaggccagcagcttaacgcctcgatcatcgcgcagacgcgtctgaccaatacggaagagtttggcaacatcctgctgaaggtgaaccaggacggttcccaggttcgtctgcgtgatgtcgccaaaattgagctgggcggcgaaagctatgacgtagtggcgaagtttaacggccagccggcatccggtctgggtattaaactggctaccggcgcgaacgcgctggataccgccaacgctattcgcgctgaactggcgaagatggagccgtttttcccgtcggggatgaagatcgtttacccgtatgacaccaccccgttcgtgaaaatttctattcacgaagtggttaaaacgctggtggaagcgatcatcctggtgttcctggtcatgtatctgttcctgcagaacttccgcgccaccctgatccccaccatcgcggtaccggtggtcctgttaggcaccttcgcggtgctggcggcgtttggcttctcgataaacaccctgacgatgttcgggatggtgctcgccatcggcctgttggtggatgacgccatcgtggtggtagagaacgtcgagcgcgtgatggcggaagagggtctgccgccgaaagaagcgacgcgtaaatcgatgggacagattcagggcgcgctggttggtatcgctatggtgctgtcggcggtatttatcccgatggcgttcttcggcggctcaaccggggccatctatcgccagttctccatcactatcgtttccgcgatggcgctgtcggtactggtggcgttaatcctgacgccggcgctgtgcgccacgatgctgaaacccattcagaaaggcagccatggcgcgaccaccggcttcttcggctggtttaaccgcatgtttgataagagcacgcaccattacaccgacagcgtaggcaacattctgcgcagcaccggtcgttatctggtgctgtatctgatcatcgtggtgggtatggcatggctgttcgtccgtctgccgagctcgttcctgccggacgaggaccagggtgtattcctgagtatggcgcagctgcctgccggcgccacccaggagcgtacgcagaaagtgctggatgagatgacgaattactatctcaccaaagagaaggacaacgtggaatccgtgtttgcggttaacggcttcggtttcgccggccgcggccagaacaccggtatcgcgttcgtttcgctgaaagactggagccagcgtccgggtgaggaaaacaaagttgaagcgatcaccgcgagagcaatgggctacttctcgcagattaaagatgcgatggtcttcgcctttaacctgccggctatcgttgaactgggtaccgcgaccggctttgacttcgagctgattgaccagggcggtctgggccacgaaaaactgacccaggcgcgtaaccaactgtttggcatggtggcgcagcatcctgacgtgctgaccggcgtgcgccctaacggtctggaagatacaccgcagtttaaaatcgatatcgatcaggagaaagctcaggcgctgggcgtctccatcagcgacattaacaccacgctgggcgcagcctggggcggaagctatgtcaacgactttatcgaccgcggccgcgtgaagaaagtgtacatcatgtccgaagcgaaataccgtatgctgccggaagatatcggcaagtggtatgttcgcggcagcgatggtcagatggtgccgttctctgctttctcgacctcgcgttgggaatacggttcgccgcgtctggaacgctacaacggtctgccgtcactggaaatcctcggtcaggccgcgccaggcaagagtaccggtgaggcgatggcgctgatggaagagctggcgggtaaactgccttccggtatcggctacgactggaccgggatgtcttatcaggagcgactgtccggcaaccaggcccctgccctgtatgccatctcgctgattgtcgtcttcctgtgtctggcggcgctgtatgagagctggtcgattccgttctcggttatgctggtcgtccccttgggtgtggttggtgcgctgttagccgccaccttccgcgggctaaccaacgacgtttacttccaggtgggtctgctgaccaccatcggcctgtcggcgaagaacgcaatattgatcgttgaattcgccaaagacctgatggagaaagagggcaaagggctgattgaggcgacgcttgaagcagtacgtatgcgtctacgtccaatcctgatgacatctctggcgttcatcctcggggtaatgccgctagttatcagctccggcgccggctccggtgcgcagaacgccgtcggtacaggcgtaatgggcgggatggtgaccgcgacgatcctggcgatcttcttcgtgccggtgttctttgtggtggttcgtcgccgctttagcaaaaaatcggaagatatagagcacagccatcaggttgagcatcattaa

SEQ ID NO: 210462 - DNA, 1194 bp, Klebsiella pneumoniae
atgaacaaaaacagagggttaacgcctctggcggtcgttctgatgctctcaggcagcttagcgctaacaggatgtgacgataaaccggctcaacagggagcccagcacatgccggaagtcggtattgtgacgctcaaatccgcacctctacaaataaccaccgaactgccaggccgcaccagcgcctatcgcattgcggaagtccgtcctcaggtcagtggcattattttaaaacgtaacttcgtggaaggtagcgatatccaggccggcgtctccctgtatcagatcgatccagccacctatcaggccagctatgacagcgccaaaggcgacctggcaaaagcccaggcggcggcaaacatggatcaactgacggtcaagcgttatcagaaactgttgggcaccaaatatattagtcaacaagactacgataccgccgttgcgacggcgcagcagagcaatgcggccgtggtcgcggcgaaagcggccgttgaaaccgcgcgcatcaatctggcctacaccaaagtcacctcgccgatcagcggccggattggtaaatccaccgtgaccgaaggggcgctggtacagaatggtcaaacgaccgccctggcaaccgttcagcagctggatccgatctatgttgacgtcacccagtcgagcaatgatttcctgcgcctgaagcaggagctagccgacggccgcctgaaacaggaaaacggcaaagcgaaagtggagctagtgactaatgacggtcttaagtatccgcagtccggcacgctggaattctcggatgtcaccgtcgatcagaccaccggctcaatcacgctacgcgctattttcccgaacccggatcacaccctgctaccggggatgttcgtccgtgcccgtctggaagaagggattaaccctgacgccctgctggtaccgcaacagggtgttacccgtacgccgcgcggcgacgccagcgtcatggtagtgggggaaggcgataaagtcgaagtccgccaggtcactgcttctcaggcgatcggcgataaatggctggtcactgacggtctgaaatccggcgatcgcgttatcgtcaccggcctgcaaaaaatcaaaccaggtgtgcaggtaaaagcgcaggaagtagcttctgatgataaacagcaagccgcaggcaacgcgccatcagaacaaaccaagtcttaa

SEQ ID NO: 210463 - DNA, 651 bp, Klebsiella pneumoniae
atggcacgaaaaaccaaacaacaggcacgtgaaacccggcaactgattctggatgttgctctgcgtctgttttcgcagcaaggcgtatcatctacctcgttggcaacaattgcaaaagctgcgggtgtaacgaggggggctatctactggcatttcaagaataaatcagatttattcaacgaaatttgggagctgtcagacgccagtattagcgatctcgaaattgagtatcgggcaaaattccccaacgatccactctcagttatcagggagattctagtctatgttcttgaagcgacagtgacagaagaacgtcgacgattaatgatggagattatctatcataagtgtgagttcgtcggtgaaatgaccgtggtgcagcaggcccagcggcagctctccctggcgagttatgagcgtatcgagcagaccttgaaagaatgcatcgcggcgaagctgctgcccgccaatttactcacccggcgggcggccgtgttaatgcgcagctacctttccgggctgatggaaaactggctgtttgcccccgattcgttcgacctgcatgcggaagcgcgggactacgtcgctattctgctggagatgtatcaattctgcccgacgctacgcggcccggagagcttgtcagcttaa

SEQ ID NO: 210464 - DNA, 3348 bp, Klebsiella pneumoniae
atgctgcacacgatctccaggcaacgcgccacgttcatctttattatcacgctgctctgttttattggccttttcagcccagtccagggccgcgccgcggatctccccgatcgggcagaggtgcagagccagctcaatacgttaaacaagcaaaaagaactgactccgcaggacaaactggtccagcaggatctgactcagacgctggaaacgctggataaaatcgagcgtatcaaaagcgagacggcacagctgcgacagcaggtcgagcaggcgccggcgaagctgcgccaggcggtggagagcctcaataacctgagcgatgtcccgaacgacgacgcgacgcgcaaaacgctaagtacgctctccctgcgtcagctggagtcgcgcgtcacccagacgctggacgatctgcagaatgcgcaaaatgatctggcgacctataacagccaactggtttccctgcaaacgcagccggaacgcgtgcaaaatgcgatgttcaacgcctcccagcagctgcagcagatccgcaatcgtctgaatggcacctcggtgggcgacgagaccctacgcccgacccagcaggtgctgttgcaggctcaacaggcattgctcaacgcgcagatcgagcaacagcgcaagagcctcgaaggcaacactatcctgcaggataccctacagaagcagcgtgactacgtcaccgcctggagcaaccggctggagcatcagctacagctgctgcaggaggccgtgaacagcaaacggctgaccctgaccgagaaaaccgcccaggaggcagttacccccgacgaaacggcgcgtattcaggccaacccgctggtcaagcaggagctggatattaaccatcagctcagcgagaagctgatccaggcaacagagaacggtaaccagctggtgcagcgcaatatccaggtcaagaactggctcgaccgcgcgctgcagtctgaacgggatattaaagagcaaatttcagttctgcgggggagcctgctgctgtcgcgtattctttaccaacagcaacagacattaccgtcggcggatgagctgcaggatatgaccaaccgcatcgccgacctgcggcttgaacagtttgaggtgaaccagcagcgcgacgcgctgttccagagcgatgcctttgtcgccaaactggaggaggggcacagcagcgaagtgaacgatgaagtccacgccgcgctactggaagtgatcgacatgcgtcgcgaactgcttgatcagttcaacaaacagttgggcaaccagctgatgatggccatcaacctgcagatcaaccagcagcagctgatgagcgtctcgagcagtctgaaggaaattctgacccagcaaattttctgggtgaacagcaataaaccgatggactgggagtggattaaggccttcccggaggcgctgaaaggtcagtttaaggcgatgaaaatcaccgtgaactgggaaaaagcgtggcctgcggtgtttgtcgctttcctggccggtttaccgctgctgttgattgccggcctcatccgctggcgtctgcagtggctcaaggattatcaggcaaagcttgcttcccaggtgggacagctgcgcaacgatacccaactgcatacgccgaaggcgatcctgatcgatctgatccgcgccttaccggtggtgctgttgattctggctatcggtctgatcttactcaccatgcagttaaatattagcggactgctgtgggcgtacagtaaaaagctggctatgttctggctggtgtttggcctgtgctggaaagtgctggaaaagaacggcgtcgcggtcaaccactttaatatgccggcgcagttgaccagccactggcggcggcagattgttcgcgtcagcctggcgctgctgccgctgaatttctggtcggtgatttccgaactgtcgccgctgaacctgatggacgacgcgctggggcagttggtgattttcttcaacttactgctgatcgcggtgctggtttggccgatgtgccgggaaagctggcgcgataaagagtcgcacagcctgcgcctgctgacgatcacggtgttgtctatcgttccggtggccctgatggtgctgacggcaaccggctacttctacacgacgctgcgtctggcgggacgctggatcgagaccgtgtatctggtgatgatctggaacctgctgtaccagaccgtgctgcgcggcctgagcgtggcggcgcggcgtatcgcctggcgccgcgcgctggcgcgccgtcaacatctggtgaaggaaggggcggaaggcgccgagccgcaggaagagccaactatcgctctcgagcaggtcaaccagcagacgctgcgcatcaccatgttggtgatggtcgcgctgttcgcggtgatgttctgggcgatttggtctgatttgatcaccgttttcgcctacctcgacagcattaccctctggcactacaacggcaccgaggcgggggccagcgtggtgcgcagcgtgacgatgggcagtttattgttcgccattgtggcgtcaatggtcgcctgggcgctgatccgcaacctgccgggtttgctggaggtgctggtgctgtcgcggctcaacatgcgtcaggggacctcctacgccatcaccaccattctcaactatgcgattatcgctatcggggcgatgacggtattcggggcgctgggtgtctcctgggataaactgcaatggctggcggccgcgctgtcggttggtttaggttttggtctgcaggagatcttcggtaactttgtctccggcctaatcattctgttcgaacgtccggtgcgcattggggatacggtcactatcggaaccttctcggggacggtaagcaaaatccgtattcgcgccaccaccatcaccgatttcgatcgcaaagaggtgattatcccgaacaaggcgttcgttaccgagcgcttgatcaactggtcgctctccgacaccgtgacccgggtggtgatccgcctcggcgtcgcctatggctcagacctggataaggtgaaagaggtgctgctgaaggccgcgcacgatcatccgaaagtgatgcaggagccggcgccagcggttttcttcaccaccttcggggccagtaccctggatcatgaactgcgtctgtatgttcgagaactgcgcgatcgcagctacacggtagatgagctcaaccgcgccatcgaccgcctgtgccgggagaatgacatcaacattgcctttaaccagctggaagttcatctgcgcaatgaaaaaggcgatgaagtcaccgaagtgaaacgggacgggaaaggcgacgatctggcgcccaccaccgcgtcctga

SEQ ID NO: 210465 - DNA, 900 bp, Klebsiella pneumoniae
atggaaaaagtcagtcaaaccccacacgacgcggtgtttcgccagatgctcatgcatcaggcggtcgcgaaggattttttgcagttgtacctccccgcgccgtttctggcgatctgcgaactggattcgctgcagctggtctccggtagctttgttgaagaggacctgcgcgccagctattccgatatcctttactcactgcgcacgcgtcatggaccgggctatgtgtacgcgctgattgagcaccagagtaccccggacaagctgatgacgtttcgcctgctgcgctatgcgctggccgccatgcagcgtcatctggacgccggccacgacactctgccgctggtggtgccgattctgttttatcacggcaaagtgagcccctggccctgggcccgcaactggcaacagctattcgccgatccggcgctggcgaaggcgctctatagcaatgattttccgctggtggacctcaccgtaatgccagataatcagatcgcccgtcatcggcggatggccatgctggagctgctgcaaaagcatatccgccatcgcgatctggccgagctgcaggtgccgctgattacgctgatgacgcaaggctatctgacagaagcgcagctgaatacgctgctgcgctatatgttgcaggcgggaactacggaacatccgggggcgctgatccgcacgctggcggcgcagtcgcccaggcataaggagctgatgatgaccattgccgaatggctggaagagaaaggccgtaaacagggacagcaagagggtgagcaggaagctacccgcagcatcgccgccagaatgctggcgcgcggcctcgaacgtcaaaccgtgcaggagctcaccgggctgagcgatgaagaactcgccgcgctggcgccctga

SEQ ID NO: 210466 - DNA, 174 bp, Klebsiella pneumoniae
atgtcgctggaaaatgcatccgatgaggtcaaactggccgtcgatttaatcatgttgctggaatcgcatcagatcccggcgcaaaccgtgctgagcgcgctggaaattgtccggcgggattatgcaaacaagttaaaaaacgcggaaagcgggtcgcaaaacccagagaagtag

SEQ ID NO: 210467 - DNA, 528 bp, Klebsiella pneumoniae
gtgaaaactgctcaacttttacaaacgctgaacgaccagctgagtgagctggccgcgctggtggcgccgctggcggagcacgcgaccctcagcccgcgctttgaccgccagctcttccacacccgcagcacgctgatgcaggcctatctggcggaagcccaacacaactttaaccagctccgccaggccgtcgagcgccagcagctgccgcaagtggtctggattgccgagcgtctggcggcacaaatcgccgcgctgcgccgtgaaaccgccacctggtccttgcgcagttgggaccacgcgtcgccaacgttgagccgctggcagcgccgtcgcctgcagcatcaggagtatgagcgccgcctgctggcgatgcgcgaccaacgccagcgtcagctggcgcaggcgaccagccttgacgagcagcagcggctggggaaagaagttgaagcctacagcggccggttggcgcgctgccgacaggcgctggacaagattgaaaacgtactggcgcggctgacgcgctaa

SEQ ID NO: 210468 - DNA, 378 bp, Klebsiella pneumoniae; identical to SEQ ID NO: 138159

SEQ ID NO: 210469 - DNA, 552 bp, Klebsiella pneumoniae
atgaccgcaactgcacagcagcttgaatatctgaagaacagcatccagagtatcgaggattatccaaaacctggcattcttttccgcgatgtcaccagcttactggaagacccgaaggcctacgcgcttagcattgaactgctgaccgagcgctacaaagacgcgggtattaccaaagtggtagggactgaggcgcgtggcttcctgttcggcgccccggtcgcgctggcgctgggcgtgggctttgttccggtacgcaagccgcgtaagttgccgcgtgaaaccatcgccgagacctatgagctggagtatggcaccgatcagctggagatccacgttgacgccattaaaccgggcgataaagtgctggtggttgacgatctgctggcgaccggcggcactatcgacgccacggtcaaactgatccgccgcctcggcggcgaagtgcacgatgccgctttcattatcaatctcttcgatctgggcggcgaacagcgcctggagaagctggggatccactgctacagtctggtgccgttcccgggccactaa

SEQ ID NO: 210470 - DNA, 1908 bp, Klebsiella pneumoniae
atgagttatcaggtcttagcccgtaaatggcgcccacaaacctttgctgacgtcgtcggccaggaacatgtgctgaccgcactggcgaacggcttgtcgttagggcgcattcatcacgcttatcttttttccggtacccgcggggtcgggaagacctccatcgcccgtctgctggcgaaagggttaaactgtgaaaccggcatcaccgccaccccctgcggcgtgtgcgataactgccgggaaattgaacaggggcgctttgtcgatctgattgagattgacgccgcctcgcgaaccaaagtcgaagatacccgcgatctgctggacaacgtccagtacgcgccggcccgcggccgctttaaggtctatctcatcgacgaagtccatatgctgtcgcgtcacagcttcaacgcgttgttaaaaacgctggaggagccgccggcgcacgtcaaattcctgctggcgacgacggatccgcagaagctgccggtaacgatcttatcccgctgcctgcagttccacctgaaggcgctggacgttgaacagatccgccatcagctggagcatattcttggcgaagagcagattgcctttgagccccgcgcgctgcagctgttgtcgcgggcggccgatggcagcctgcgcgatgccttaagcctgaccgatcaggcgattgccagtggggaagggcagctgacggccgcatcggtgagcactatgctcggcacccttgatgacgatcaggcgctgtcgctgattgaagcgctggttgctgccgacggcgagcgggtcatggcgagcgtcaatgacgccgccgcacgcggcgtcgagtgggaggcgctgctggtcgagatgcagagcctgctgcaccgcatcgccatggttcagctgtcgccttcggcgctgggcgccgacatggccgcggtcgaagtgcggatgcgcgaactggcgcgaaccgtaccgcccggcgacgttcagctctactaccaaacgctgctgattggccgcaaagagctgccttacgccccggaccggcggatgggcgtcgaaatgacgctgctgcgtgccctggcgtttcatccgcgtaagccgctgccggagccggaggcgcagccggcacaggccgccgcgcccgcgccgcgtcagccggttgcccccgccgcgccgccgccacagtcgccgcagagtttgccgccgaccaccagccaggtgctggcggcccgcagccacctgcagcgcagccagggagcaaccaccccaaaaaagagtgaaccggcagccgcttcccgcgcgcggccggtgaataacgctgcgctggagcgactgagttcgattaccgagcgcgtccaggctcgtccggccgcggccgcgctggagcaggccccggcgaagaaagaggcctatcgctggaaggcgacgacggtggtggaagagagcaaagtcgaagtcgccacgcccaaagcgctgaaaaaggcgctggagcatgagaagacgccggagctggcggccaagctcgccgaagaagcggtcgagcgcgacagctgggcggcggaagtgagccagctggcggtaccgaagctggtcgagcaggtggcgctcaacgcgtggaaagagcaggagggcagccgcgtctgtctgcatctgcgtcccagccagcgccacctcaattccgccagcgcgcagcaaaagctggctgaagcgctgggggtgttgtacggtacgccggttgaattgaccatcgtggaagacgataatcccgcgatgcgtacgccgctggagtggcggcaggctatttatgaagagaagctcgcgcaggcgcgcgaagccattatcgcggataataacattcagaccctgcgtcgtttcttcgacgccgatctggatgaagagagtattcgccccatttga

SEQ ID NO: 210471 - DNA, 333 bp, Klebsiella pneumoniae; identical to SEQ ID NO: 134863

SEQ ID NO: 210472 - DNA, 606 bp, Klebsiella pneumoniae
atgcaaaccagcccgctgttaactcagcttatggaagcgctgcgctgtctgccgggcgttggcccgaagtcggcgcagcgcatggcgtttactctgctgcagcgcgatcgcagcggcggtatgcgcctggcgcaggcgctgacgcgcgcgatgtcggaaatcggccactgcgccgattgccgcaccttcaccgagcaggaggtgtgcaatatttgcagcaacccgcgtcgccaggaaaacggtcagatctgcgtggtggagagtccagcggacatctatgccattgagcagaccgggcagtattccggccgctacttcgtgctgatggggcacctgtcgccgctcgacggcatcgggcctgatgacatcgggctcgatcgcctggagcaacggctggaggcggagtcgatcaccgaggtgatcctcgccaccaacccgaccgttgagggcgaggcgacggccaactacatcgcagagctgtgcgcgcagtatggcgtcgacgccagccgaatcgcccacggcgtgccggtgggcggcgagctggagatggtcgacggcaccacgctgtcccactccctggccggtcgccacaagattactttctga

SEQ ID NO: 210473 - DNA, 1875 bp, Klebsiella pneumoniae
atgaaaggacaagaaactcgtggttttcagtcagaagtaaagcagcttctgcacctgatgatccattccctctattccaacaaagaaatctttctgcgtgagctgatttccaacgcctctgatgcggccgataagctgcgtttccgcgcgctgtcgcagccggatttgtatgagggagacggcgagctgcgcgtgcgggtttcgtttgataaagacaaccgcaccctgaccatcgccgataacggtatcggtatgaaccgggaagaagttatcgaccatctcggcaccatcgccaaatccggcaccaaagcgttcctcgaatcgatgggttccgaccaggcgaaggatagccagctgatcggtcagttcggcgtcggcttctattcggccttcatcgtggcggacaaagtgaccgtgcgtacccgtgcggcgggcgacaagccggaaaacggcgtgttctgggaatccgccggcgaaggcgaatataccgtagctgatatcaccaaagccgatcgcggcaccgaaatcaccctgcatctgcgcgaaggcgaagatgatttcctcaacgactggcgcgtgcgctctatcatcagcaaatattccgaccatatcgcgctgccggttgagattgaaaaacgggaagagaaagacggcgaaaccgtggtttcgtgggaaaaaatcaacaaggcgcaggccctgtggacccgcagcaaatccgaagttaacgacgacgaatacaaagagttttataagcatatcgctcacgactacagcgacccgctgacctggagccacaaccgcgtggaaggtaagcaggagtacaccagcctgctgtatatcccgtcgcaggcgccgtgggatatgtggaaccgcgatcataaacacggcctgaagctgtatgtgcagcgtgtgttcatcatggacgacgccgagcagtttatgccgaactacctgcgcttcgtgcgcggcctgatcgattccaacgatctgccgctgaacgtctcccgtgaaatcctgcaggacagcagcgtgacccgcaacctgcgcaccgcgctgaccaaacgcgcgctgcagatgctggataagctggcgaaagacgacgctgaaaaataccaaaccttctggaaacagttcggcctggtgctgaaagagggcccggcggaagatccgagcaaccaggaagcgatcgccaaactgctgcgtttcgcaaccacccataccgactcctccgcgcagaccgtgtcgctggaagagtatgtctcgcggatgaaagaagggcaggagaagatctactacatcactgccgacagctatgcggcggcgaagagcagcccgcacctcgaactgctgcgtaagaaagggattgaagttctgctgctctccgatcgcatcgacgagtggatgatgagctacctgaccgagttcgacggcaaagcgttccagtctgtcgctaaagccgacgagtcgctggacaagctggcggatgaagtggacgagtccaccaaagaagctgaaaaagcgctggagccgttcgttgagcgggtgaaaaacctgcttggcgaccgggtgaaagaggtgcgtctgacccatcgtctgaccgacaccccggcgattgtcactaccgatgccgatgagatgagcacccagatggcgaagctgttcgcggcagcgggccaggcggcgccggaagtgaaatacatcttcgaactgaacccggcgcatcagctggtgaaacgcgcagctgatacccaggatgacgcccagttcggcgaatgggtggaactgctgctggatcaggcgctgctggccgagcgcggcacgctggaagatccgaaccagtttatccgccgtatgaaccagctgctggcttcctga

SEQ ID NO: 210474 - DNA, 645 bp, Klebsiella pneumoniae
atgcgtattattctgcttggcgctccgggcgcgggtaaaggaactcaggctcagttcatcatggagaaatacggtattccgcaaatctccaccggcgatatgctgcgcgcggcggtaaaatccggctctgagctcggtaagcaagcgaaagacattatggacgctggcaagctggtgaccgatgagctggtcatcgcgctggtgaaagagcgtatcgcccaggaagattgccgtaacggcttcctgctggacggcttcccgcggaccattccgcaggctgacgccatgaaagaggcgggcattaccgttgattacgtgctggaattcgacgtgccggacgaactgatcgtcgaccgcatcgttggccgtcgcgtccacgcggcatccggtcgcgtataccacatcaaattcaatccgccgaaggtggaaggcaaagacgacgtgaccggcgaagagctgaccacccgtaaagacgatcaggaagagaccgtgcgtaagcgtctggtagaataccatcagatgacagcgccgctgatcggctactacaccaaagaagcgcaggcgggcaacaccaaatacgccaaagtcgacggcaccaaagcggtagctgacgtgcgcgccgaactggaaaaaatcctcggctga

SEQ ID NO: 210475 - DNA, 963 bp, Klebsiella pneumoniae
atgcatcagacgaaaacaggtatcttgctggccaatttaggcactcccgatgcgcccacccccggggcggtgaagcgctatctgcgacaattcctcagcgacaaacgggtggtggatacgtctcgtctgctatggtggccgctgctgcgcggcgtcatactgccgattcgctccccgcgcgtggcgaagctctatcagtccgtgtggatggaagagggatcgccgctgatggtgtatagtcgtcgccagcagcaggcgctggctgccaggctgccggataccccggtggcgctgggcatgagctatggttcaccgtcactggccagcgcggtggatgacttactggcgcagggggtggagcacatcgtggtgctgccgctgtatccgcaatattcctgctcgacggtggccgccgtctgggacgaactggcgcggattctggcgaaaaagcgcgccattccgggtatctcgtttattcgcgactatgccgaacatccggactatatccatgcgctggcggccagcgtgcgcgcttccttcgctgtccatggggaaccggatctgctgctgctctcctatcatgggatcccgcagcgctatgccaaccagggcgatgattatcctcagcgctgtcgcgatacgacgcgggaactggtttccgcgctggggctgccgccggagcgggtgatgatgactttccagtcgcgctttggccgggaaccctggctgaccccgtacaccgatgaaacgctaaagatgctcggcgagaaagggacgaagcatattcaggtgctgtgcccggggtttgccgccgactgtctcgaaacgctggaagaaatcgccgtccagaaccgggaaatattcctcgaagcaggcggcaagcaatatgaatatattccggcgcttaatgcggacgcagcgcatattgagatgatggtcaatctgacggcgccttatcgctga

SEQ ID NO: 210476 - DNA, 1305 bp, Klebsiella pneumoniae
atgaaatttcccggtaaacgcaaatctaaacactattttcccgttaacgcccgcgatccgctgctgcagcaaattcagccggagaatgaatccagcgtctcctgggtggtcggtatcgaccagacgctggtggatatcgaagcgaaagtggatgaggcgtttatcgtgcgctacggcctgagcgcgggccattcgctggtgattgaagatgacgtcgccgaggcgctgtaccaggagctggtgcgcaacaatctcattacccatcagtttgccggcggcaccatcggcaataccatgcacaactactcggtgctggcggacgatcgctcggtgctgcttggcgtgatgtgcagcaatatcgaaatcggcggctacgcctatcgttacctgtgcaatacctccagccgcaccgatctgaactatctgcagggcgtcgacggcgccattggccgctgctttaccctgatcggtgacagcggcgagcgcaccttcgccatcagcccgggccacatgaacaagctgcgtccggaaagcattccggaagcggtgatcgccggcgcctcggcgctggtgctgacctcttacctggtccgctgcaagccgggcgagccgatgccggacgcgacgatgaaggctattgagtatgccaaaaagcacgatgtgccggtggtgttaaccctcggaaccaaatacgtgattgccgataacccggcgtggtggcaggagttcctgcaggagcatgtctctattctggcaatgaacgaagaggaaggggaagcgctgaccggctttgccgatccgctgtcagcggcgaataaggcgctggactgggtcgacctggtgctgtgcaccgccggcccggcgggcctgtatatggcgggcttcaccgaagaagaggcgaagcgtaaaacccagcatccgctgctgccgggggcgatcccggagtttaaccagtttgaattcagccgcgcgatgcgtcaccaggattgcgttaatccgctgcgcatatattcccatatcgctccctatatgggcggccccgagaagatcatgaacaccaacggcgcaggcgacggcgcgctggcggcgctgctgcatgacatcaccgccaataactaccaccgcaataacgtacccaactccagcaagcacaaatgcaaatggctgacctactcctcgctggcgcaggtgtgtaaatatgccaaccgcgtgagctatcaggtgctgaaccagcactcgccgcgtttaacccgcggcctgccggagcgtgaggacagcctggaagaggcgtactgggatcggtaa

SEQ ID NO: 210477 - DNA, 1677 bp, Klebsiella pneumoniae
atgcaccacgcaacaccgcttatcaccaccattgtcggcggcctcgtgctcgcctttattctcggcatgattgccaataagctacgtatttctcctctggtgggatatctcttagcgggcgtgctggccggacctttcacccctggctttgttgctgacaccaaactggctccggaactggcggaacttggcgtcattctgctgatgttcggcgtcgggctgcatttctcacttaaagacctgatggcggtaaaatcgatcgccatccccggggctatcgcccagatagccgtggcgacgctgctgggtatggcgctctccgccgccctcggctggtcgctgatgaccggcatcgtctttggcctgtgcctctccactgccagtaccgtagtgctgctgcgcgcgctggaggaacgacaactgattgacagccagcgcgggcaaatcgccatcggctggctgattgtggaagacctggtgatggtcctgacgctggtcctgctgccggcgattgccggtatggcggagaaaggcaacgtcggcttcgcgtccctggccctcgacctcgggatcaccattggcaaagtggtggcctttatcgccattatgatgctggtcggccgccggctggtgccgtggatcatgtcgcgcagcgccgccaccggctcacgcgagctgttcactctgtcggtgctggccctggcgctgggcatcgccttcggcgccgtggagctgtttgatgtctcttttgccctcggcgccttctttgccggcatggtgcttaacgaatccgagctcagccaccgcgccgcccatgacaccctgccgctgcgcgacgccttcgcggtgctgttcttcgtctccgtcggcatgctgtttgacccgatggtgctggtccaacagccgctggcggtgctggcgacgctggcgattattatctttggtaaatccgcagccgcctttttccttgtgcggatgtttggtcactcgccgcgcaccgcgctgaccatcgccgccagcctggcgcagattggcgagtttgcctttattctcgccggcctgggaatggcgcttaacctgctgccgcaggccggacaaaatctggtgctggccggggcgatcatctcaattatgctcaacccggtgctgtttaccctgctggaaaaatatctcgataaaaccgaaaccctcgacgagcagacgctggaagaggtcctggaagacgagaagcaggtgccggtcgatatctgcaaccacgcgctgttggtcggcttcggccgcgtcggcagcctgctgggcgagaagctgatggcccaggggatcccgctggtggtggttgaaacctcgcgcacccgcgtggatgagctacgcgagcgcgggatcagcgcggtgctcggcaatgccgccaatgaagagatcatggagctggcgcatctcgattgcgcccgctggctgctgctgacaatccctaacggctacgaggccggagagattgtcgcttccgcacgggaaaaatgtccgaatatcgagattatcgcccgcgcccattatgatgacgaagtggactacattatcgatcgcggagccaatcaggtggtgatgggcgaacgggaaattgcccgcgccatgctgcggcttctggaaacgccaccggccggcgaagtggtcaccggctga

SEQ ID NO: 210478 - DNA, 1221 bp, Klebsiella pneumoniae
atgacaaccaaccaatccgctcaacccttgtccggccccgctgcgccgccgcaaaaagcacgcacctcgtttggcatcttaggcgcgatcagcctgtcccatttgcttaacgatatgatccagtcgcttattctcgctatctacccgctgctgcaggcggagttctcccttaccttcgtgcagatcggcatgatcaccctgaccttccagctcacctcatcgctattccagccggtgattggctacatcaccgataaacgctcgatgccgtggtcgctgccggtgggcatgtgcttcaccctctgcggtttgattctcctcgcgctggccggtagcttcggcatggtgctgctggccgccgcgctggtaggtaccggctcctcggttttccatccggaatcatcccgcgtggcgcggatggcctccggcggccgtcacggcctggcccagtcgctgttccaggtgggcggcaatttcggcagctcgcttggcccattgctggcggcggtgatcatcgccccgtacggcaaaggcaacgtcgcctggtttgtgctggccgctctgctggctattgtcgtgctgtcgcaaatcagccgctggtatgccgcgcagcatcgaatgaataagggcaaaccgaaaccggccatcgttaatccgctgccgcgcaagaaggttattctggcggtaggcattctgctgatgctgattttctcgaaatatttctatatggcgagcattagcagctattacaccttttatctgatgcataaattcggcttaacggtgcaaaacgctcagcttcatctgtttgccttcctgttcgcagtggctgccgggacggtaattggcgggcctgttggcgataaaattgggcgtaaatatgtgatttggggctctatcctcggcgtagcgcctttcacccttgttttaccctacgccagccttgaatggacggggattttaacggtgatcattggttttatcctcgcctcggccttttccgctattctggtctatgcgcaggaactgctgccgggacgcatcggcatggtttctggcctgtttttcggcttcgcctttggcatgggcggccttggcgccgcggtgttaggcctgctggcggaccataccagcatcgatctggtttataaaatctgcgccttcctgccgctgctgggattcctgacgatattccttcctgataaccggcaaaaagcctga

SEQ ID NO: 210479 - DNA, 1653 bp, Klebsiella pneumoniae
atgcattatttcaaacacagcgtagcgctggcgctattcgccgctttatcgctgggcagcctgtcggcacaggcctatgagcaggataaaacctataaaattaccatcctgcacaccaacgatcaccacggccatttctggcgcaatgactacggcgaatatggcctggcggcgcagaaaacgctggtcgatggcatccgtaaagaggtggcggcggaagggggaagcgtcctgctgttatccggcggcgatattaataccggcgtaccggagtctgatttacaggatgcagagcccgattttcgcggcatgaacctgatcggctacgacgcgatggcggtgggaaaccatgaattcgataatccgctgagcgtactgcgccagcaggaaaagtgggctaagttcccgttcctgtcggccaatatttatcagaaaagcaccggcgaacggctgttcaaaccctgggcgttgtttaagcgcggtgggctgaaaatcgcggtgattggcttaaccaccgacgatacggccaagattggcaatccggaatatttcaccgatattgaattccgcaaaccggcggaagaggcgaagctggttatccaggagctgcagcagaatgaaaagccggacgtgatcctggccaccacccatatgggccattacgacaatggcaaccacggctctaacgcgccgggcgatgttgaaatggcgcggagtttacctgcgggatcgctggcgatgatcgtcggcggtcactcgcaggatccggtatgcatggcggcggaaaataaaaagcaggtcgattatgtgccaggcaccccgtgcgctccggatcgtcagaacggcatctggatcgtccaggcgcatgagtggggcaaatacgtcggccgcgccgattttgagttccgcaacggcgagatgaagctggtgcactatcagctgatcccggtcaacctgaagaaaaaagtgacttacgataacggccaaagcgagcgggtgctgtatacgccgcagatcgccgagaacccgcagatgatgtcgctgctgacgccgttccagaacaaaggcaaggcgcagctgcaggtcaaaatcggcagcgtgaatggtcatctggagggcgaccgcagtaaagtgcgctttgtgcagaccaatatgggccacctgctgctggcggcgcaaatggcgcgcagcaacgcggatttcgcggtgatgagcggcggcgggatccgcgactccattgaggcgggggatatcacctacaaagatgtgatgaaggtccagccgttcggcaatgtgctgacctatgtcgatatgaacggcaaggaggtagtggattacctgaccgccgtcgcgcagatgaagccggattccggcgcttatccgcagtttgccaacgtcagtttcgtggccaaagacggtaagctgaacgatctgaaaatcaaaggcgaaccggtggatccggcgaagacctatcggatggcgacgctgagctttaacgccaccggcggcgatggctatccgaacatcgccgataaacccgggtatgtgaataccggctttatcgatgccgaagtgctgaaagagtatatcgagaagaactcgccgctggatgccgccgcctatgagccgaaaggcgaggtgagctggcagtaa

SEQ ID NO: 210480 - DNA, 480 bp, Klebsiella pneumoniae; identical to SEQ ID NO: 134872

SEQ ID NO: 210481 - DNA, 795 bp, Klebsiella pneumoniae
atgggcctgttaaaccggataaaaatgctgtggcgagccgccgtcggctcgtcttattcctggcctgcgatggatatcgtcctgcccggcgaacgctatttgcacctcgtcggcagtatccatatgggcacccgcgacatggcgccgccgccggcaaagcttctgaaaaaaatacgccaggccgatgcgttaatcgtcgaggccgatatcagcggcaatgaaaccccgtttagcaatctccccacttacccaccgctggcggaacgcctgagcgatgcgcagctgagcgagctagaggcgcgagccggcgagctgggcctgtcggtcgggctgttcgacagccagccgctgtggcaggtggcgatggtcctgcaggccacccaggcgcagaagctggggctgcgaccggattacggcatcgattatcagttgctgatggccgcccgcgagagcaacatagcggtgatggagctggaaggcgccgacagccaaatcgcgctgctgcgcgatctgcccgacggggggatggcgctgctggaggatacgctgacccactggcgcaccaacgcccgtttactgcaggtcatgatcggctggtggctggagcaaccgccgtcgcgcggcgcggtatcgctgccgacgacctttagccagtctttatatgatgtgctgatgcaccagcgcaacctcgcctggcgcgagacgctgctggccttgccgccggggcgctacgtggttgccgtcggcgcgctgcacctgtatggcgaagggaatctgccggatatgctgacataa

SEQ ID NO: 210482 - DNA, 2502 bp, Klebsiella pneumoniae
atgtctaacactatcgacctgacgctggatggcctctcctgcggccactgcgtcaaacgcgtgaaagagagtctggagcagcgtcctgacgttgagcaagcggaagtaaccctcactgaagcccatgtgacgggcagcgccagcgcgcaagcgctgattgataccgttaaacaagccggatacggcgcggagctcagccacccaaaggctaaaccgctggcagaatcatcaatcccgtcggaagcactgacagcggccactcctgagcttccggcagcccatgacgaagatgacagtcaacagctgctgatcaacggcatgagctgcgccagctgcgtctcccgggtacaaaacgcgcttgccgcggtgccgggcgtctcacaggcgcgggttaacctggcggaacgcacggcgctagtgatgggcagtgcgtccgccgcagaattagtgcaggcggtggagaaagccggctatggcgcggaggcgatcgaagacgatctgcaacgccgcgaacgccaacaggaaaccgccctcgcgacgatgaaacgttttcgctggcaggcgattgtcgccctgctggtcggcgtgccggtgatggtctggggcatgatcggcgataacatgatggtcagcgacgacaaccgttcgctgtggctggttatcggccttgtcaccctcgccgtcatggtcttcgccggcgaccacttctaccgcagcgcgtggaaaagcctgaaaaacggcaccgccaccatggatacgctggtggcgctcggcaccggcgtcgcctggctgtactcgatgagcgtcaacctgtggccgcagtggttcccgatggaagcccgccatctctattacgaagccagcgcgatgattatcggcctgattaacctcggccatatgctggaggcccgcgcgcgtcagcgctcctcgaaagcgctggaaaaactgctcgacctgacgccgccttcggcgcgggtcgtcacgcccgagggcgagaaagatctgccgctcgcggaagttcaggccggcatgacgctgcgcctgactaccggcgaccgcgtcccggtcgacggcatgataagccagggcgaagcctggtttgatgaagcgatgctcaccggcgaaccggtgccgcagcaaaaaggcgatggcgacgccattcacgccgggaccgtggtgcaggatggcagcgtgctgtttaccgccagcgccgtcggcagccagaccacgctggcaagaattatccgcatggtgcgccaggcgcagagcagcaaaccggagatcggccagctggcggataaaatctccgccgtatttgttccggcggtggtcgtcattgcgctgattagcgctgcgatctggtacttcttcggcccggcgccgcagatcgtctataccctggtcattgccaccacagtactgattatcgcctgtccgtgcgccttaggcctggcgacgccgatgtcgattatctccggcgttggccgggcggcggagtacggcgtgctggtgcgcgatgccgatgcgctgcagcgcgccagtgaactcgacaccctggttttcgataaaaccggcaccctgaccgaaggcaagccgcaggtggtggcggtgaaaactttcgctggcgttgatgagcataccgcgctgcgtcttgccgccgcgctggagcagggctcaagccatccgctggcgcgagcgatccttgataaagctgccgacggcccattgccggaagtcagcggcttccgcaccctgcgcggccttggcgtcagcggcgaggcggaaggtcatcgtctgctgctcggtaaccaggcgctgctcaacgagcagcatatcaataccgccgaggtggaaagcgagatgacagcccaggcctcacgcggcgccacgccggtgctgctggcggtggatggtcaggccaccgcgctgttcgccatccgcgacccgctgcgcgaagacagcgtcgacgccctggcgcgtttgcatcggcagggctaccggctggtgatgcttaccggggataaccccaccaccgcgaaggctatcgccaaagaagccggcattgatgaagtgatcgccggcgtgctaccggacggtaaagccgatgccattaagcgtctgcagagccaggggcacaaagtggcgatggttggcgatgggattaacgacgccccggcgctggcccaggcggatgtcgggatcgccatgggcggcggcagcgatgtcgctattgaaaccgcggcgatcaccctgatgcgccatagtcttcacggcgtggccgatgcgctggcgatttcgaaagcaacgttacgcaatatgaagcagaacctgctgggcgcgtttgtctacaactcgctgggtatcccgattgccgccgggatcctctggccgctgaccggcaccctgctcaacccggtggtcgccggcgcggcgatggcgctgtcgtcgatcaccgtggtgagtaacgccaaccgcctgctgcgctttaaaccaaaagagtaa

SEQ ID NO: 210483 - DNA, 411 bp, Klebsiella pneumoniae
atgaatatcagcgatgtggcgaaaaaaaccggcttaaccagcaaagcgattcgtttttatgaagagaaggggctggtgacgccgccgttgcggagcgaaaacggctaccgcacctatagccagcagcatctcgatgaactgacgctgctgcgccaggcgcggcaggtggggtttaacctggaagagtgccgcgagctggtggcactgttcaacgacccgtcgcggcacagcgccgatgtgaaaaaacgcacgctggagaaagtggcggatatcgagaaccatatccgcgagctgcaaaatatgcgcgcgcacctgctggcgctggccgaatcctgccccggcgacgacagcgcggagtgcccgattatcgataatctttccggctgctgccatcgcaaggcgcaggcttaa

SEQ ID NO: 210484 - DNA, 459 bp, Klebsiella pneumoniae
atgatcggcatgatcctcacacacccccatctgttctggctaagcctcggcgggctgctgctggcggccgagatgctgggcggcagcggatacctgctgtggagcggcgtcgccggcgtggtgaccggcgccctgacctggctcctgccgctgagctgggaatggcaaggcacgctgtttgccgttctcaccctgctggcggcgtggctgtggtcgaaatggctgcgcaagcgcgtcaaaacgcagcgcccggccgatgcccagctcaaccagcgcgggcagcaactggtgggccgccgcctgacgctggatgccccgctggtgaacggccgcggccacgtccgcgtgggcgacagctcctggccggtgattgccgatgaagacttcgcggcgggcagcaaggttgaagtgattgccgtagaagggattacgctacgaatcagacccgccgtccgttaa

SEQ ID NO: 210485 - DNA, 918 bp, Klebsiella pneumoniae
atgctaatttttattcctatccttattttcgtcgcgctggttattgtggccgcggcggtgaaaattgtcccgcagggctaccagtggacggtggagcgcttcgggcgttttacccagacgctgcagccgggattaagcttagtcgtgccgtttatggaccgtatcggccgcaaagtgaacatgatggagcaggtgctcgatatcccctcgcaggaggttatctcccgggataacgccaacgtcaccatcgacgcggtctgttttattcaggtgatcgacgcgccaaaggccgcctacgaggtcagcaatcttgagcaggcgatcgtcaacctgacgatgaccaacatccgtaccgtgctcggctcaatggagctggacgaaatgctctcccagcgcgacagcattaacacccgcctgctgcatatcgttgacgacgccaccaacccgtggggggtgaaaatcacccgcgtcgaaattcgcgacgttcgcccgccggcggagcttatcgcctcgatgaacgcccagatgaaagccgaacgtaccaaacgcgcgtacatccttgaggccgaaggggtgcgacaggcggaaattctgaaagcggaaggggaaaagcagtcgcagatcctcaaggccgagggcgaacggcagtccgcgttcctgcaggcggaggctcgcgaacggtccgccgaagcggaagcccgcgccacccaaatggtctcctcggcgatcgcctcaggcgatattcaggcgatcaactacttcgtggcgcagaaatacaccgatgcgctgcagcagattggcgccgctaacaacagcaaagtggtattgatgccgctggatgccagcagcctgatgggatcgatcgccgggatcagcgagctgatcaaagaaggcgctggcgatcggaaaaaatcatga

SEQ ID NO: 210486 - DNA, 678 bp, Klebsiella pneumoniae
atgaaggaaaataacgcgcttttgcgtctcgacggtgtggggtttaagaccgacgacgccgttattttacacaatatcaattttcagcttcgcgccggagaattcaagttgattaccggcccttccggctgcgggaaaagtaccttgctgaagattatcgcctcgctgctcagcccaacctccgggcgcctgttcttcgacgatgcggatgtcgcgacgctgtcgccggaaaggtatcgccaacaggtctcttactgcgcgcagacgccggccctgttcggtgattcggtttacgataatctgatttttccgtggcagatccgcaataaacaaccggaaccgcaggcgctgctggccgacctgcagcgctttggccttgacgaaaatatgctggaaaaatccattaacgaactgtccggaggggaaaagcagcgcgtatcgctgatccgcaatctacaatttctgccgcgcgtgctgctgctggacgaaattaccagcgcgctggatgaaagtaataaacagaatgtgaatgaaattattcatggctacgtaacggaaaaacaggtcgctgttctgtgggtcacccacgatcgcaatgaaatttcgcatgccgatgaagtgattacgctgcaacctgccggcggaaatatgcaggaggtacagcatgaacgggcataa

SEQ ID NO: 210487 - DNA, 783 bp, Klebsiella pneumoniae
atgaacgggcataacattacgaacgaatcgctggcgctgtcgatggtgctggtgctgatcgctattctggtcagctatcgggaaaagctggcgctggaaaaagatattatctggagtatttgccgggcgatcgtgcagctgataatcgtcggctatgtgctgaaatatatctttaacgtcaatcatgcggttctgacgctgttgatggtgctgtttatctgctttaacgcggcatggaatgcgaagaagcgcagtaaatatatcgacaaagcttttatctcgtcgtttatcgccatcactactggcgctggactaacgctggcggtactggtgttttctggcttgatcgccttcgtgccgatgcaggtgatcccgattgccgggatggtggccgggaacgccatggtggcggtggggctgtgctacaacaatatgggccagcgcttcagcagcgagcagcagcagattcaggagaaactgagcctcggcgcgacgccgaagatggcctcagcgcggctgattcgcgagagcattcgcgcgtcattgattcccaccgtcgattcggcgaaaacggtcggtctggtgagcttgcctgggatgatgtcggggctgatttttgccggtattgacccggtgaaggcgattaagtaccagatcatggtgacctttatgctgctgtcgaccgccagcctgtcgacgattatcgccggctatttgacctaccggaagttcttcaacgcccgccatcagctggtggtgacgcagctgaaaaagcgcccgtga

SEQ ID NO: 210488 - DNA, 855 bp, Klebsiella pneumoniae
atgtccgaacagaatattgtcaacattagcgaagcgaacctgcagcagacgctacagcagtccatgaacgttccggtgctgttttatttctggtctgcccgcagtcagcactgcgaacagctgaccccggtgctcgagcgcctggcagcccaatacaacggccagttcacgctggcgaaggtcgattgcgacgccgagcagatgctcgcctcacagtttggtctgcgcgccatccctacggtttatctgttccagaacggccagccggtggatggttttgaaggcccgcagccggaagaagcgatccgcgccctgctggataaagtcctgccccgtgaagaggagctgaaagctcagcaggcgctggccctgatgcaggaagaaaaatacgccgatgccctgccgctgctgaaggaagcctggcagctgtcgaatcaggaaagccagattggcctgctgctggcggaaacgctgattgctctgcaccgttccgatgaagcggaaagcgtgctgaaaaccattcctctgcaggatcaggatacccactatcagggtctggtggcgcagattgagctgctcaaacaggccgccgacaccccggaaatccagcagctgcagcagcaggtggaacagaatccggaggatgcgcagttggcctcccagctggcgctgcagctgcatcaggtcgggcgtaatgaagaagcgctggccctgctgttcagccatctgcagaaagatttaggcgccggcgatggccaggcgcgcaagatgctgcaggagatcctcgccgccctcggtaccggcgatgcgctggccgccaaatatcgtcgtcagctctattcgctgctgtactaa

SEQ ID NO: 210489 - DNA, 771 bp, Klebsiella pneumoniae
atgcaaaaaacggttttagtgacaggctgttccagcggaattggtctggaaagcgcgctggatttaacccgccagggctttcgcgtgctggcggcctgccgcaaagcagaggatgtcgcgcggatgcaggagctggggctaaccggtattttgctcgatctggatgacccgcagagcgtggagcgcgcggcagcggaggtgattgcgctgaccgataatcgtctctacggcctgttcaataacgccgggtatggcgtctatggcccgctgaacaccatcagccgccagcagatggaacagcaattttccgctaactttttcggcgcgcatcagctcaccatgctgctgctgccggcgatgacgccgcacggcgaagggcgcatcgtgatgacctcctcggtgatggggcttatcgccagtcccggccgcggagcctatgccgccagtaaatatgccctcgaggcatggtccgacgcgctgcgcatggagctgcgccacagcggtattcaggtcagcctgattgaaccgggcccgatccgcacccgctttaccgataacgtcaaccagacgcaaagcgataagcccgtagaaaatccgggcatcgccgcccgctttaccctcgggccggaggcggtggtggaaaaagtgcgccatgcttttaccagcgataaaccaaagctgcgctatccggtcaccctggtcacccacgcggtggcgatgcttaagcgcctgctgcctgcccgcgcgatggacaaaattatccacggctga

SEQ ID NO: 210490 - DNA, 1182 bp, Klebsiella pneumoniae
gtgttcgcgattaagcgagaacagcagatcggcaattttgtccccggtctggcgatcgaggttgccggtgggctcatcggcgaacagaatggccgggcgcccgttaaaggcccgggccagcgccacccgctgctgttcgccgccggagagctgcgccggcaggtggtgcaggcgtctgccaagtcccagctgctcaagcagcgcgcgggcatcgccccggctctggctatcgctggcgccgcgcaacagcgccggcagctcgacgttctccagggcgttgagcgtcgggatcagcataaacgactgaaaaacaaaaccaacgtgctgcgcccgcagcgccgcccgcgcctcttcatccatccggtgcagcggtttgcccagcatcgatacttccccgctgctgccatcgtcgaggccggcgaggatcgccagcagggtcgatttaccggaacccgactcgccgatcagggcgatggtctgccgcggtttgacaaccagctcaactccggtaaggatggagagctgatgctccccctgaccgacggacttcttaagatgatgaacttcaagtatgttttccgctggcatgtgcctttcctgttgttgttcctgtttacctgccgcgcgatggcggcggacacgctgctgatcctcggcgacagcctgagcgctggctatcggatggcggccaacgccgcctggcctgcgctgctcaatgagcagtggcaggcgaaaacgccggtggtgaacgccagcatcagcggcgatacctcgcagcaggggttggctcgcctgccagcgctgcttaagcagcaccagccgcgctgggtgctggttgagctcggcggcaatgacggactgcgcggttttccgccgcagcagaccgagcagacgctgcgcaccattattaaagatatcaaagcggccaacgccgagccgctgctgatgcaaattcacctgccggcgaactatggccgccgctataatgaagccttcggcgcgatttacccggccctggccaaagagttcgctattcctctcctgcccttttttatggaggaggtctatctcaagccgcaatggatgcaggacgacggcattcatccaaatcgcgacgcgcagccgtttatcgccgactggatggcgaagcggctggctcccttagttaatcatgactcctga

SEQ ID NO: 210491 - DNA, 2415 bp, Klebsiella pneumoniae
atgatcgcccgctggttctggcgcgaatggcgctcgccgtcgctgctgatcgtctggctggcgttaagcctcgccgtggcctgcgtgctggccctggggtcgataagcgatcggatggagaaaggccttagccagcaaagccgtgagtttatggccggcgaccgtacgctgcgcagttcgcgcgaggtacccgccgagtggatcgcacaggcgcggaagtcagggctgaccgtcggcgagcagctgagctttgccaccatgacgttcgccggggatacgccgcagctggcggacgttaaggcggtggacgaccgctatccgctgtatggcaccctcgagacgcagccgccggggctgaagccgcaggcggggagcgtgctgctggcgccaaggctgatggcgctcctgaacctgaaaaccggcgatacgattgacgttggcgatgccacgctgcgcattgccggggaggtgattcaggagccggatgcagggtttaaccccttccagatggcgccgcgactgatgatgaatatggccgacgtggcaaaaaccggggccgtgcagcccggcagtcgcgtcgcatggcgctataagttcgccggcgacgctgaacagctggccaattatgagcagtggctgctgccgaagctcggcccggagcatcgctggattggccttgaccaggacgacagcgcgctgggcaaatccctcgaacgctcgcagcaattcctgttgttatccgcgctgttgacgctgctgctggccgtcgccgcagtggcggtagcgatgagccactactgccgcagccgctatgatctggtcgccatactcaagacgctgggcgccggaaggtcgcagctgcgcaagcttatcgtcggccaatggctgctgctgttgacgctgtcggtgataaccggcggggtggcgggcctggcgctggagcgtctgctgctgctggttctcaaaccggtgctgcccgccgcgttacccgctgccagcggttggccgtggctgtgggctatcggggcgacaggcgtcatttccctgctggtgggcctgcgaccctatcgactgctgctggcgaccctgccgctgcgagtgctgcgtcaggatgtggtggctaacgtctggccgttgaaaatctggatcccggcggttagcgtcgtggtggtgggcctgttggcctggctgctgggcggcagcccgctgctgtggtcggtgctggccggggcggtggtgctggcgctgctgtgcggcctggtgggctggggattgctgtggctgctcaaacgcctgacgctcaaagccttgccgctgcgtctggcggtgaaccgcctgctgcgccagccgtggtcgaccctcagccagctggcggcgttttccctgtcgtttatgctgctggcgctcctgttggtgctgcgcggcgatctgcttgaccgctggcagcagcagttgcccccgcagagcccgaactactttctgatcaatatcgcccctgagcagatagtgccggtgaagaccttcctcgccgaacaccagacgcgggcggcggaattctatccgatcgtccgggcccgtctgacgcagatcaacggtcaatccacggacgggaacaaagacgaagcgctgaatcgcgagcttaatctcacctggagcgaacagcgtccggatcataatccgctggtggccggcagctggccgccgaagccgggcgaggtatcgattgaggaggggctggcgcagcggctggggataaagatcggcgatacagtgacctttaccggcgatacccaggagttcagcgcgaaggtcagcagcgtgcgcaaagtagactgggagagcctgcggccaaacttcttctttattttccccgccggggcgctggacgggcagccgcagagctggctcaccagcttccgctgggataacggtcccgcgatgttgacccagctgaaccgcgagtttcccaccgtcagtctgctggatatcggcgccatcctgcgtcaggtcggccaggtgctctcccaggtcagccgggcgctggaggtgatggtgggcctggtgacggcctgcggcgtgctgctgttgctggcgcaggtgcaggtcggtatgcgtcaacgccatcaggagctggtggtctggcgcacgctgggggcaggaaaatcgctgctgcgcgctacgctgtgggcggagtttgccctgctggggctggtttccggcctggtggcggcgataggcgcggaagtggcgctggcgatgctgcagacgaaagtctttgattttccctgggcgccggactggcgcctgtgggtgttgctgccgctgacgggagcggtgttgttatccctgtgcggcggcgggctggggctgcgtctgttaaaaggaaaagcgctattccgccagtttagccagtaa

SEQ ID NO: 210492 - DNA, 1146 bp, Klebsiella pneumoniae
atggcacacacaataaaagcgctggcgatctcgatcggcgcagcattagcgttaacgtcattgccttcccacgcggagattacgctgctgaaacaagatccgcaggcgggcgatccgttaagccggcttaactttaccgtcggcggcagtatccggccgcagttcaacatgatgaccggcgatggcgacaaaggctcctataagcgtaacggttttgacggcggcacccgcttccgcttcgcggcggattactacctgttcgatgatattagctggatcagctactatgagctgggcgtgaacattccggcgctgtttgactgggataaccactacgcggaaggcgcgaacaataccacccgccgcatgctgtataccggcctgaaaagcgatacctggggtacgttaacctacgggcagcagaacagcatttactatgatgtggtgggggtgaaaaccgatatctgggactacgatatgatcggtcaggccccggggaacggtattaatggcgattacgatggctcctatcgttcacgtaatatgctgaaatataagaaaactgtaggtgatgtcgatctttacggctcttatctgttcgaagacagcgaatacctgccgggtaacggcctgcgctacaagcgtaaaggcggtggttctgttggcgcggactaccacatcatgaaggatctgacctggggtaccgcgtggaactacacccgcgcggaaatgcgcgacccgtcaagcgccgacagcaaaacctatgaccagaatatcgtcggtaccgcgctgagctggaccccggataactggaccttctccttcggcggcggctggtatcagaacttcctcaccaccaagaaaaccgatgtgcataattactttgccggtgacgcctgggggattgaatattttgcgggctataaattcccgatcaatcaatacgctgttaaatctattcagccgtactttatgggcgaccgtctggaatatgtgaacggccgcaactatcagcgtatcgataacggtctggggattagcttccagctggattacggtttccgcgttgactacgaacacgtgtttacctccagcaccgacaaccttggcgatatgaacctggtccgtctacgctacgacttctaa

SEQ ID NO: 210493 - DNA, 1077 bp, Klebsiella pneumoniae
atgaccaatgggacggattatcgcgccattcttgccagcgatacgccactgattgacgtacgcgccccggtggagtttagccaaagcgcgatgccggcggcgatcaacctgccgctgatgaatgatgaagaacgcgccgcggtcggcacctgctacaagcgtcaggggccggaagcggcgctggcgctcggccataaactggtccagggtgacctgcgcgccagccgtactcaggcgtggctggaagcgtgcgcccgttacccgcacggttacctgtgctgcgcccgcggcggccagcgctcgcatatcgtccagcagtggctgaaagaagctggcgtggattaccccctgatcgtcggcggctataaagcgctacgccaggcggcgatccaggccaccgacgaactggtgcagcgcccgatcgtgctgattggcggctgcaccggcaacggcaaaactcaactggtctgctcgcgcccggacggtatcgacctggaagggcttgctcatcaccgcggttcttcattcggtcgaaccctgcaggatcagcatccgcaggccacctttgaaaaccacctggcggtcagcctgcttaaaaaagccgaacagcagacccgctgggtgctggaagatgaaggccatatgatcggcgccaatcatctaccggagagcctgcgcctccgcatggcgcagtcgccgctggcggtggtggaagatccgtttgacgttcgcctcgaacggctgcgcgaagagtatttcgatcgcatgtatcgcgactttatcgccgcgtatggcgaagagaaaggctggcaggcatacggcgagtatctgcatcacggcctgtttgccatccgccgtcgcctggggctgcagcgttttgctcagctcactgaacggctcgatgaggcgctggtgcagcagcagcgcaccgccagcaccgaggcgcactttgcctggctggtaccgctgctggaagagtactacgacccgatgtatcgctatcagttggggaaaaaagccgggaaaattctctttcgcggcagctggcaggaggtcgcagcctggctggcgaagtaa

SEQ ID NO: 210494 - DNA, 1068 bp, Klebsiella pneumoniae
atgaaacaggtatgcgtgctcggtaacggccagttaggccgtatgctgcgccaggccggcgagccgctgggcatcgccgtttggccggtcggcctggaagccgacccggaagcggtgccgttccagcagagcgtcatcacggcagaaattgaacgctggccggaaaccgccctcacccgcgagctggcccgccacccggcgttcgtcaaccgcgatgtcttcccgattatcgccgaccgcctgacgcaaaagcagctgtttgacaagcttggcctcgccaccgccccgtggcagctgctggcggataaaagcgagtggccggcggtgtttgcccgccttggcgaactggcgatcgttaagcgtcgcgttggcggttacgacggccgcggccagtggcgtctgcgggaaaacgaaatcgatcagctaccggccgataactacggcgagtgcatcgtcgagcaggggattaacttctccggcgaggtatcgctggtgggcgcccgcgctcatgacggtagcaccgtcttctacccgctgacccgtaacctgcatcaggacggtattctgcgcgccagcgtcgccttcccgcaggccaatgcccgccagcaggaacaagcggaaagcatgctgacggcgatcatgaacgagctgaactacgtcggcgtgatggcgatggagtgcttcgttaccgccgaggggctgctgattaacgagctggcgccgcgggtgcacaacagcggccactggacgcagaacggggcgtctatcagccagttcgagctgcatctgcgggcgattaccggcctgccgctgccgccgccggtggtcaacagcccgtcggtgatgatcaacctgatcggcaccgatcttaactacgactggctgaagctgccgctggtgcacctgcactggtatgacaaagaggtgcgcccgggtcgtaaagtcggccacctgaacctcaccgacagcgataccgatcgcctgagcgcgacgctggaagcgatcaagccgctgctgccgccggagtacaccagcggcctgttctgggcgcaatcgcagctcagctaa

SEQ ID NO: 210495 - DNA, 510 bp, Klebsiella pneumoniae
atgtcttcccgcaataattcggcgcgtatcgccatcgtgatggggtccaaaagcgactgggctaccatgcaatttaccgcagaaatccttgatgccctgaacgttccgtaccatgtcgaagtggtctcagcccaccgcacgcccgataagctgttcagctttgctgaaagcgccgaaagccacggttatcaggtgattattgcaggagcaggcggcgcggcgcatctgccgggcatgattgcggcgaaaaccctggtgccggtgctcggcgtaccggttcagagcgcagccttaagcggtgtcgacagcctctactccattgtgcagatgccgcgcggcattccggtcggtaccctggccatcggcaaagctggcgctgcgaacgccggcctgctcgccgcgcagatccttgcccagcatgatgcagaactgcaccagcgcctgagcgcctggcgtcaggcgcaaaccgatgaagtgctggataatccggatccgcggggtgcggcatga

SEQ ID NO: 210496 - DNA, 339 bp, Klebsiella pneumoniae
atgagcaggaaaaagtggagtcagccgctgatgtggggaatgatcatcgcgatcctcaatccgttaggggtaagttatatcgccttaatcggcgtcgttatcggcaacacgctgacgtttgtctggtgtgcgatgctggcgtgggctatctatttttatgccatttatttgctctgcacccgccctcacgatagccggctggtacaaatctatttactgcttatgggcaccctgatgctcccgtgggggttagtgctgcttatcacctgtatcatgagggagataaaggtcaatcaggcactcccgccatcacctccaggcgagacaaaagacggctaa

SEQ ID NO: 210497 - DNA, 723 bp, Klebsiella pneumoniae
gtggcgacactttttattgcagatttgcacctgcaaacagaagaaccggcgatcaccgccggttttctgcgttttttacagggagaagcccgccaggcagacgctctgtatatccttggcgatctgtttgaggcatggatcggcgatgacgatcctaacccgctgcaccaacaaattgcctcggcaatcaaagccgtcgtcgacgccggcgtgccgtgctacttcatccatggcaaccgcgattttctcgtcggccagcgctttgcccgccagagcgggatgatcctgctcgccgaagaagagcgactggacctctatggccgtgaagtcttgatcatgcatggcgacacactgtgcaccgatgaccaaggctatctggcgtttcgcgccaaagtccacaccccgtggatccagcgtctgttcctggccctgccgctgtttatccgccgtcgcatcgccgcccgcatgcgcgccgacagcaaagccgccaacagcagtaaatcaatggaaattatggatgtgaatccacaggcggtagttgacgcaatggagcggcatcacgtgcagtggctgatccacggccatactcatcgcccggcggtccatgaactgcaggccaacggccaacccgcatggcgcgtggtacttggcgcctggcacagcgaaggttcgatggtcaaggtgacgccggacgacgtcgaactaatccactttccgttctaa

SEQ ID NO: 210498 - DNA, 495 bp, Klebsiella pneumoniae
atggttactttccacaccaatcatggcgatatcgtaatcaaaacgtttgacgacaaagcgccggaaacagttaaaaacttcctggactactgccgcgaaggtttctacgacaacaccattttccaccgtgttatcaacggcttcatgattcagggcggcggttttgaacctggcatgaaacaaaaagcgaccaaatctccgattcagaacgaagcgaacaacggtctgaaaaacacccgcggcacgctggcgatggcccgtactcaggcgccgcactctgccaccgcgcagttcttcatcaacgtggttgacaacgacttcctgaacttctccggcgaaagcctgcagggttggggctactgcgtcttcgcggaagtggttgaaggcatggacgtggtagacaaaatcaaagcggttgccaccggccgcagcggcatgcaccaggatgtgccgaaagatgatgtgatcatcaaaagcgtcaccgtcagcgagtaa

SEQ ID NO: 210499 - DNA, 1386 bp, Klebsiella pneumoniae
atgttaaaaatttttaatacactgacgcgccagaaagaggaatttaaacctatccatgccggggaagtcggcatgtacgtgtgtggtattaccgtttacgatctctgtcatatcggccatggacgtaccttcgtctcctttgacgtcgtggcacgctatctgcgttttctcggctataagctgaagtacgtgcgcaatatcaccgatatcgacgacaaaatcattaagcgcgctaatgaaaacggcgaaagctttgtcgcgctggtcgatcgcatgattgccgaaatgcacaaagattttgacgcgctgaatattctgcgtcccgacagcgagccgcgcgcaacgcaccatattgcggagatcattgagatcaccgagcagctgatcgccaaaggccatgcttacgtggcagataacggcgacgtgatgttcgacgtgccgacggacccgaactacggtctgctgtcgcgccaggatctcgatcaactgcaggcgggggcgcgcgtcgacgtggttgacgtcaagcgtaacccgatggacttcgtcctgtggaaaatgtcgaaagagggcgagccgagctggccgtcgccgtggggcgcgggccgtccgggctggcatatcgagtgctcggcgatgaactgcaagcagcttggcaaccacttcgatattcacggcggcggttcggatctgatgttcccgcaccatgaaaacgaaatcgcccagtccacctgcgcccacgacggtgaatacgtcaactactggatgcactccggtatggtgatggttgaccgcgagaagatgtcgaaatcgctgggtaatttctttaccgtccgcgacgtgctgaagtattacgatgcggagacgattcgctacttcctgatgtccggccactatcgcagccagctgaactacagcgaagagaacctcaagcaggcgcgttcggcgctggagcgtctgtacaccgcgctgcgcgggacggacaaatccgtcgacgcggcggggggcgaagccttcgaagcacgctttatcgaggcgatggacgacgacttcaacaccccggaagcctattcggtgctgttcgatatggcgcgtgaagtaaaccgcctgaaaaccgaggacgcggccgcggcgaacgccatggcggcccacctgcgtaagcttgctgcggtactgggtctgctggagcaggagccggaggcgttcctgcagagcggcgcgcaggttgacgacgcggaagtggcggagatcgaatcgctcatccagcagcgtctggacgcgcgcaaagcgaaagactgggcggcggcggatgcggcgcgcgaccgtctcaacgagatgggcattgtgctggaagatggcccgcagggcaccacctggcgccggaagtaa

SEQ ID NO: 210500 - DNA, 213 bp, Klebsiella pneumoniae
atggcgacattttccttaggtaaacacccgcacgttgagctgtgcgatctgctgaagctggaaggctggagcgaaagcggcgcccaggcgaagatcgccatcgccgacgggctggtaaaagtcgacggcgcggtggaaacccgcaaacgctgcaaaatcgtcgctggtcagacggtgagctttgaaggccagagcgtgaccgtcacggcctga

SEQ ID NO: 210501 - DNA, 867 bp, Klebsiella pneumoniae
atggcagcaaaaattattgacggtaaaacgattgcgcagcaggtacgctctgaggttgcggaaaaagtgaaggctcgcgttgcggccggaaaacgcgcccctgggctggccgtggtgctggtcggcagcaacccggcctcgcagatttatgtcggcagcaagcgcaaagcatgtgaagaagtgggcttcgtctcccgctcttacgatctcccggaaaccaccagcgaagccgagctgctggagcttatcgacactctgaatgccgataagaccatcgacggtattctggttcagctgcccctgccggcagggatcgataacgtcaaagttctcgagcgcatcgcgccggataaagacgtcgacggcttccatccttacaacgttggccgcctgtgccagcgcgcgccgcgcctgcgtccgtgcactccgcgcggtatcgtgaccttgctggaacgctacaatatcgacacctacggcctcaatgcggtggtcattggcgcctccaatatcgtcggtcgcccgatgagtatggagctgctgctggccggctgcaccaccaccgtcacccaccgctttacaaaaaacctgcgccatcatgtcgaaaacgccgacctgctgatcgtcgcggtgggcaaaccgggctttattcctggcgagtggattaaagaaggggcgattgtggtcgatgtcggcatcaaccgtctggaaagcggcaaagtggtcggcgacgtggtgtatgaagatgccgccgaacgcgcgtcctacatcaccccggttcccggcggcgttggcccgatgaccgtcgccaccctgatccagaacacgctgcaggcgtgcgaagagtatcacgacgttgaggaggcctga

SEQ ID NO: 210502 - DNA, 1164 bp, Klebsiella pneumoniae
atgtcaatcaccctcaggggcggcgtgtggcactgtcatttctttacgccgtcaggaaaaagagttaggcgatctcttggcacgggggacaaaaagcaggctcaggagctccacgacaagctgaaggcggaagcgtggcgggttgaccagatcggcgacctgcccgtcagaaccttcgaagagtgctgcatccggtggctgcgcgaaaaagaccataagcgatcgctggatgatgacaaaaccaaaattgagttttggctgcagcatttttccggacgtgatatctcgaagataacggcggaggaagttcatgaagccgttaatgggatgaacaaccgtaagcaccttcaggtgtgggagagtaagcgtgatgccgcgatgaggaagggaaagccggttccggagtacaaaccacggcaggtttcgcaggcgacgaaggcgcaacacctttccttcattcgttcccttctcagggccgcggcgaatgactggggctggataaaaacagctccagttatcaaaacccgcaagccgatcagtaagaggatacggtggctgaccagagaagaagctgagcggttgatcgagtgcatgccggagagcattaagccagtggtgatatttgcactggcaaccggcctgcgccgctcaaacatcatcggtcttgagtggcagcaggtcgatatgcagagaaaggttgcatgggtaaatccggagaacgcaaaagcgggcaaggcgattggcgtagctctgaatgataccgcatgcagggtattaagggatcagatagggaagcactcccggtgggtgtttgttcacacgacggcaaagcatcgccctgatgggacactgacgcccgcggttagaaaaatgcgtgtggatgacaataacgcctggcgcgccgggttgaaaaaagcggggatcgaggatttccgttttcacgacctccggcacacttgggcgagctggctaattcagtccggcgtcccgctttctgttttacaggaaatgggaggatgggagagcatcgagatggtacgtcgttatgctcacctggcgccgaaccacctgaccgaacacgcacggaaaattgacgccatttttggcgctagcgacacaaatacgacacaaggaggaaatcaggctggtttaaaactggcgtaa

SEQ ID NO: 210503 - DNA, 216 bp, Klebsiella pneumoniae
atgccagaaatcattgatcaagccaacgagctggcagagcgccggctggaaatgaccatccagaacatgcgcatcaaccataacgcagtttcagctactcattgccgcgactgcggggaagagatacccgagcggcgccgggaactggtggcaggatgccagcgctgtgctgattgtcaggaagacgaggaattacgcggtaagcatcggaggtga

SEQ ID NO: 210504 - DNA, 219 bp, Klebsiella pneumoniae
atgacgccagaagaaaagaaaaatgcgctcagaagcatcgcgcgcagggctaacgatgaggttaaggcacaacggcggtcatctcccgctttaagttgcgacgagatatcacgaccgatcctcaacggatgcatgccgctgataaagcagcttgggttaacgccaagccatctctatgtggagataggtattttgaacggatatataaaggagcgctga

SEQ ID NO: 210505 - DNA, 768 bp, Klebsiella pneumoniae
atgagcaagggaaccattatctgcctgtgcgatatcactggcgtcatggctgagccatgggtcgaagcaggttatcgcgccgtcctggtggacccgcagcaccctgaaacttcgatcgacggtcctgttgagcgcatatcagcaaccatccttgaggcgatgccgcggctatctcagattatccgctctgaaaacgtcgtcatcgtcatcggcttcccgccatgcacggacgttgctgtttccggttcccgctggttcgagtccaagcgcgccaaagacccgcatttccagggcaaggctgcgctggtagctgagcaatgccggatggttggcttggcggctggctgcccgtgggcattcgaaaacccggtgagcgtgttcagtagcatcttcggctcagccgattacacgttccatccgtaccagttcactgggctgtgcgcggatgacaactacacgaagcagacctgcctctggacgggtaacggcttcaaggcgccggcagaggatattcacccgcaagtggcacaggcgatcgaacgcgtgaagcagtactttagccggatggtgccgaagaagaaggcactggaggtgttcaactttcatggtgagaacctcatcgctgactggtatccggacaaccgaattcacgaatgcccacccagcgacgagcgcgccaacattcgcagcgctactcccctgggctttgcaagggccgttttcctttcgaatgcaccccacctcaataagaaacgggaggcagcatga

SEQ ID NO: 210506 - DNA, 657 bp, Klebsiella pneumoniae
atgaaacgctactcacttatctatgccgacccggcctggtcttacgggaacacgatcagcaacggtgccgccgtcgaccactaccccaccatgagcttgctcgatatgaaacggctcccggtgtgggagctcgccgcggataacgccgtattggcgatgtggtacaccggcacccacaaccaggaggcgatcgagctggccgaggcctggggctttacggtgcgcacgatgaagggcttcacctgggtgaagttgaatcagctggccgagctgcgcattaccaaggctctggcagagggcgatgtgaccgatttttacgacttcctcgccctgctgaatgccgagacgcgcatgaacggcggcaaccacacccgcgccaataccgaagacgtgctgatcgccacccgcggcgccgggctggagcgcaagcacgccggcattaagcaggtggtctacagcccactcggcgcgcacagcgagaaaccgtgggaagttcgtcaccgactggagttgctatacggcgacgtaccgcggattgagctgttcagtcgcagcgcagcgccaggctggagccactggggaaaccaatgcgccaccgcttcagttgagctgatacctggatgcgccatcgacgttgttaagacggaggcagcatga

SEQ ID NO: 210507 - DNA, 159 bp, Klebsiella pneumoniae
atgaaacattaccgcgacgccataaccgtagggaaagtgaagtgcatgtactccgtccttcatcgtggctggctaatgccatctggtgaagtggtaagaaacccgttaaaggctcagcggctggctgaagagctggacacgaaaagaggtgcgcgatga

SEQ ID NO: 210508 - DNA, 681 bp, Klebsiella pneumoniae
atgacaccagaaattatcctcgagcgaactggcattgacgttacccgcgttgaacagggagatgaatcctggcaccgcttacgcctcggcgtgatcactgcctcggaagttcacaacgtcatttctaagcccaagtcaggcaagaaatggactgatatgaagatgtcctacttccttacgctccttgccgaagtgtgcaccggcgtggcgccggaagttaacgccaaggcgctggcctgggggaaacagtatgaggccgacgctcgcaccctgtttgagttcaccaccgacgtgaaggtaacagagtcgccgatccttttccgtgacgaaggcatgcgcaccgcctgctcacctgatggcctgtgcagtgatggtcgcggccttgagctgaagtgccctttcacctctcgcgacttcatgaaattccggcttggcggcttcgaggctatcaaatccgcctacatggcccaggtgcaattcagcatgtgggtaaccggtaaggatgcatggtatttcgcgaattatgaccctcgcatgaagcgagaaggcattcatcacgtggttgttgagcgcgacgacaaatacatgtccgacttcaacgaaatggtgccggagttcatcagcaagatggacgaatcgctggcggagatcggctttaccttcggggagcagtggaaatga

SEQ ID NO: 210509 - DNA, 846 bp, Klebsiella pneumoniae
atggctaacgaacttgtgattacagccagctctcttgctgagcgaggcattgacggcgccacctggagcgccctcaaaaacagtatttaccctggcgccaaggatgagtcggtgatgatggcattggactactgccgggccagaaacctcgatccgcttctgaagcccgttcatctggtgccaatgagcgttaaggactcgaagtcgggtaaaagcgagtggcgcgatgtggttatgcctggcatcgggctttatcggattcaggccgatcgctccggtgattacgctggcgctaaagaaccagagttcggcccggacgttactctgacgcttaccggtattgaggtgaccgtacctcaatggtgcaagtacacggtcagcaagcgcatgccgagcggggaaatcgtcgaattcagcgcgaaagaatactgggttgagaactatgccaccgccggccgcgacactaccgcgccaaatgctatgtggaaaaagcgcccttatggccagctggcgaagtgtgccgaggctcaggctctgcgtaaggcatggcctgaaattggccagcagcccactgccgaagagatggaaggtaaaacgctggaagtggatgcgcgtgacgtaacgccgcgcagcactccagaggcgccccccttggtggccagtgaggaaacgctgcaggcaattactgacctcctgacgtccctgaataaggactgggagcaggacttcctgcctctgtgcagcaacatcttcaagcgtgacattttccaggcatcacagctcaccgaagaagaagcgcagaaaggctttagcttccttcagaaaaaagcgcaggtggcagcatga

SEQ ID NO: 210510 - DNA, 285 bp, Klebsiella pneumoniae
atgaacgcataccgcgcatacgacgtgatcgaagagcgtaagtgggccgagcaaacgctcaccgaagagaagcaaaagtggattgaagatcgggcaaaagaggtctttgacagccttccagaggatccatacgcggcactacgccagtctgtatcgtccaaatcgtttccatatgaaggcctccgtagcgataaggctggcgaggtatacaacgatttgcgcacagcaatagcttacgcccaggcggaatacgactgggatcaccgcactggctgcccgttttaa

SEQ ID NO: 210511 - DNA, 195 bp, Klebsiella pneumoniae
atggctaactcaattcctaacaacggacgcgccgtgatgatgcgcaatcgccgcaccggcgccgcctggctggtcagcttcgactatcgcgacggcagctactggcacgagccgcagggcaatctgcgccacatccgccggccatacgcttcacgcagcattgagccgaacctggtaccagccgggacgcattaa

SEQ ID NO: 210512 - DNA, 690 bp, Klebsiella pneumoniae
atggatttctctgagcgtcttgctcgagcaatgtcattagctgggtatacgcaaggcaggcttgccaaagaggtcggcatggcgcagtccagcgtgaacaagctgcttaatggcgccaacggctctcgaaagacagtggaaatagcatctgtgttaggtgtgcgtcctgaatggctatccactggtgcaggtgaaatgcttgctgattccatacagatcacgcaaatgcagacgccagtaacaccgcaaaacggcatttatcgtgtggatgtcctcgatgtcaaagccagtgcaggaccaggtgcacttatcacgaacgatttcatagagacgattcgtgcgatcgaatacacatcggagcaggccagatcgctatttggaaatcggccagctcatcacataaaagtaatcaccgttaccggtgatagcatggatacaacgatctcacccggtgatgaaattttcgtagacattagcagtacccattttgacagtgatggcgtttacgtgtttgtttttggaaaaacccttcacgtcaagcgcttgcagatgcaaagggatcgactggccgtaatttcagataaccccatctatgaaaaatggtatgtagagccaggtgatgaagaccagttctacgttatggccagagtccttctcagacaatcgatcgaatataaacgattcgcataa

SEQ ID NO: 210513 - DNA, 234 bp, Klebsiella pneumoniae
atgaaaaaccccgcagtagaaaaagcgatttccatcgccggcagtcagaaagaattggccaagcgatgcggcaaagcgcagtccacgatctgcgactggctaaatgggaaaaagaggatttctcctgtgcatgttcccgaccttgtcgcggctgtaaatggagagattaaggcatatgagtttcgccctgatctgccctcgatttttccgccaccaaacaatagtgccgcctga

SEQ ID NO: 210514 - DNA, 222 bp, Klebsiella pneumoniae
atggagagttcaacgacacgcaacaaagtggaggctcgcaggatagaaagctggttacacagccagatagctgaactgggaaccacgaatatcgccaaagtggccggagtgaataagtcgacggtgagtcgctggcgggaaagcctgctgccgaacatgtcgctactgctggccatcctgatttctaacaggccgggagagaaaggtgattttgaagcatga

SEQ ID NO: 210515 - DNA, 147 bp, Klebsiella pneumoniae
atgcctaagagcaacagattttaccaggcacaaacacacaaaaatgttacccgcgaccgcttcattcgctcggttaacccggtggttggcatgaaaatgcgcgccatcctggaagagctgaaacggaaggaggaaggccgtgagtaa

SEQ ID NO: 210516 - DNA, 900 bp, Klebsiella pneumoniae
gtgagtaacgttctccgcatatccgattttagagggtctcagaagcccatggagaaacctcagccatcagggcaggggttggtattcctgcaccgtaaagtaagagaactgccgttctacaagaccgacagtgaagccgtccatctgtggatccatctcatcatggaggtgaattcagctgacgggatggtaaccacagagcttggtgagtatccggtttcccgcggtcaggtgatcaccgggcgacataccctgtcgaaagacacgggaatagcacctgacagggttaagtacctgctgaacaagttcgcgaaaatgggcatgatcaccaccctggcaaacaagaaatttacactcttaaccgtcaccaaatatgacgattatcagcaattttttgtgccaacagaatgccaacaaagtgccaacgcaaacccagtaaccacgctgcgtaccggcgaggttgtgccaacagaatgccaacaaagtgccacaaacaatatattaaataatatctcttctactgacgtagaagagagtgcatcagcgtcaccaaaatccgaacctaaaaaacagtccctcagctgtgagcaggttgtcgatgtttatcaccaggtgctaccggaagcgcaggggatcagggtcctcactgataagcgccgcaacctgatccgctcgttctggcagaaagccaacaaaattacccgtcagcttgatggccacagctttaccctggccgactgggagtcttacctgagctacatcgccagtaactgccgctggatgcttgagaatcgccctgatcagcgcaccgggaaaacctggcgccgcaagtcgctggaatacttcctgaacgtcgatgtctacgccaaaacgcgcgagggggcctgtgatgacctctga

SEQ ID NO: 210517 - DNA, 1431 bp, Klebsiella pneumoniae
atgacctctgatttcatgacccctccgcacagcattgaagcagagcagagcgtgctgggcgggctcctgcttgacgatgacaacagtgagcgtactcagaaggtgctttcgattctcaagccagaatcgttctacgcgcgccctcatcaggtcatttttgctgaaatgcgccagatgtaccgcgaccataagcctgtcgatctgctgaccctgtttgatgctctggaaagcaaggggctgacagagaccgttggtggctttgcatacctggctgaaatgtcgaagaacacgccaagcgcggcgaacatcgtggcatatgcgatgcgtgttcgtgagaccgctatggagcgctacggcatcgagaaaacaacgaaggcgatcgagttgctttatgcccgcaacggcatgacggcagaacagaagtttgacgcaattcagggattattcactgagataaccgagcacgtaaaaacagggcgacggactgggcttcgcacgttctatgacgctgttactgactggtcagcagaattcgacgaaaggctcaagccggatggccgttcccgcgggttgtcgaccgggatccgctctctggatgaacttctcggtgtgaagcgcattgtgcgtggcagcctgtttgttataggcgcacgcccgaagatgggtaaaaccacgctctacacccagatggggatcaactgcgcgacggtcgagaacgagccggcccttatgttctccctcgaaatgccggaagggcagatggtggagaaaatcactgcgcagaaggggaggatctctccaaacctgttttacccggacatgactaaggatgactacggctatcgcggggactggaacagcgatctgcaaaaggccaccggtgtaatgggcgcccttattgaaaccaacaatctcctgattgatgacacaccgggtatttcactggcgcatgtcatggctgagtcacgtcgcatcaagcgcgaacgcggcaaggtcggaatgatccttgttgactacctgacgctgatgactgccgataaggcagagcgaaatgaccttgcttacgggctgatcaccaaaggcctgaagattcttgctaaggagctggattgcgtcgtcgttctcctgactcagctcaaccgggatctggagaagcgaaccaacaagcgaccgctgccgagcgactcccgcgacacaggccagatagagcaggactgcgattactggctggccatataccgggagggcgcctacgacgagaacgcaaaccagagcgacacagagctcctcctgcgccttaaccggcatggtgagactggtgttgtctattgcgagcaacgtcacggagcgatttatgactgcgatcaggaagctgccagtcagcgccggcgcgagaaagagcaaaaaccaaccaagcggggtggattttga

SEQ ID NO: 210518 - DNA, 294 bp, Klebsiella pneumoniae
atgacaggaaaagacgcaattttgaactacctgaaaacgcataaaacctgcagttctccagatgtcgccgcagcgtccggaatgacgcatacctgcatcaaccaggctgcaaatatcctggcaaagcagggggtgctggtagcggaagctcgcgtgtggcgtacggtttactaccggttggccaccgaagaagagattgcaggcaggaagagcaccaatcagattttcaacgagtgtcggcaaagcccggcgatgaagcgggtactggctgtttacgggagaacatcagcatga

SEQ ID NO: 210519 - DNA, 507 bp, Klebsiella pneumoniae
atgactatcacactacaggcagtaaacaagctcatcgcctccatggagagcgcaggcgagctgtcgatcagagagcagaagttcctgaagctggctaaagagtttcgcatttgcagcgcttcactggatgccgccataaaaaccgggaatatgctggcagaccaaaatgctcaactggctgcggagaatgtggcgctgaaggacatcaacgcatggtgcaaaacggatgcattcaaaaacatgtaccgggagtttaaaacagcagaggcgcttggatgctctgatgcggattgcatgcatgatgcaatgcttgtcgcaattatgcatgcgcctgccacccccgccaccgatcgcatcgtagccgggattaaggctgacggggtggaggagtttgcggcaaaacttcgaattcctggtgatgaccagttttttgacgctttagcaaaagggattgcacttgctgctgacgacttcgccaagcaactgcgcgagggggccgacaaatga

SEQ ID NO: 210520 - DNA, 843 bp, Klebsiella pneumoniae
atgactgatatcaccgaactggcgcagagcctgaaagcggcggcagagaaagcgagtaacggcgactgggttaaagaatctggcgacggctgggaagcgtgttgtagcgcaaatgaccaggccaacggcggattcatcatcgcgcacttcgtaggtccagatgcagcggagaactgcgagttcgtccaggccgctaaccctgccaacgttctcgcgctggtagaggcgctggagtattacaagtcacgtgaagagcgcgtgacaagtctggtgcgcgacaactcaaaaagttgggatgagctgtatcgacaggttgaggccaaaggaaaacgaaacgttgagctggtagaggcactggaatcagagaaacgtatttgcgcaacgtggagaaaaacagctgagtcgaccagtgaaaagctggagaaggcgcaggcagccgagcgccgttggcatcgggtggcgtcccgggtacatgagcaggcttgcgaaagcgacgtgaaaattgatgagcttgaggccatccgcgcagcagccgaaaagcttgttcgctgcaaaggtcgctatcacagcgagcagaactatcgagcactggcggcgctgtttggcgtgaacactccagatctgccgccgctggagcatgaaaacgtccattatgccgatgctgcagagatggagattgaagcactgcgccagcgcatcgccgagctggagtcccgcacagtgaagctccctccaagggttgatagttcaaacgttccgtttgcagggaatgcctggaattgctgcctggatgaggttgagaaacgcctcaccgccgctggcatcaagatggaggctgagtga

SEQ ID NO: 210521 - DNA, 648 bp, Klebsiella pneumoniae
atgacaaataaccagttagcagaaaacagcgtcatccagcttttgaacagtgtcaaactggcgcgcgataacgcagaactcgccgacaatcgagttgaccactcgttttattacgcgctgacgattgctctggaagagctacaggaacgccgcaaggccgcaatggacagcgagccagtgttgtgggcatggcatcatctcgatatgtggcatgtcaccagtcacgatgggcgcgcaagagatttgtggttgagtggtttcaaggttattccgctctatcgccacgcgcagccagtgttggtaattcctgacgagatgacagcagagcaggcatatgaaataggatattactatggagacccagtagacgtgtttgcgcgtggggctaactggatgcgccagcatatcatcgactccacattagcagccgccccgcagtctcccggcagtgaccctgccaccgtaccgggtaaatggatttcggtaagcgagcggatgccggaaaatgatggggcatatctttgctgggataatcgttacgtaactacctacgcattcatatttggtgcttggcaggcaaaccaattcattgccaagaatataacccactggatgccgctgccggctgggccgcaggaggtgaggtga

SEQ ID NO: 210522 - DNA, 456 bp, Klebsiella pneumoniae
gtgaacatccctcaatgcggcatcaagctgcacaacggcaacttcagcgctataggcaagattcttcaggagcagctctctgacgggaaatgtcttcgcctgcaggtcaaagagtggcgtgaaaaacgcagcctgagccagaacgcactcagtcacatgtggtacgcggaaatcagcgaatacctgattaactcaggacgtaccgacgcaactcccgagtgggttaagcggaacctaaaaaagacctatctcggctgcgaagaggtgacatacaccgacttcatcaccggtgagaaaaccacaacctgggaaccccggcatacctccgatcttgataccggcgaaatgcacatcttcctgaccaaagtagaggcctggtgcgctcagtttggtctggctctcaccattccacacggttgcgaatatcagcaactgcagcaaaagcaggaggcctga

SEQ ID NO: 210523 - DNA, 171 bp, Klebsiella pneumoniae
atgagcagccttctcgccaaagtaattgagcgcggcatcttccgcgtgcctgcgcgccgcaagcgcaaggtcgaagataagccttccgacatcccgaccctgaaagactataccgcccgcctggtcgataagaagtggctacgcctgagagcacggaggccacatgcgtaa

SEQ ID NO: 210524 - DNA, 636 bp, Klebsiella pneumoniae
atgcgtaaaccagcacgtcgtaaatgcgcccactgccgcgaatggttccatcctgcccgggaagggcaggtggtatgcagttttgaatgcgctagcgcgatcggcaaaaaacagacagcaaaagcccgggaagcggcgaaggccagagcggttaagcgccagcgcgaatccgagaaagaggggcgccagcgccgtaaagcaagattggctgagctcagacctaacggttactacaaagcccaggctcagaaggcattcaacgcctacatccgcgctcgtgatgctgctttgccatgcatcagttgcggcgagaccaacccgcctgatctgcatggcggccagtgggactgcggccacttcaaaacggtcggcgcttaccctgagttgcgttttgaagagcgcaacgctcataagcagtgcaaatcgtgcaatgccggggccggtaagtacaccgccaaagagttgacggttgctcagcaatacgaagctggcctggtcgctcgttacggacaggagtatgtcgactggcttaacggaccccacgaaatgaccaactaccgccgggaagactttattcgtatccgcgatgagtaccgcgccaagctcaaagcactgaaacagcgggaggccgcatga

SEQ ID NO: 210525 - DNA, 138 bp, Klebsiella pneumoniae
atgaaccacgacattatcgaacgcatccgagaccgctggaaaaagctccgcctcttgcgtagccgcggaaccgtgctggttgactatttaattttgcgcaatttcatcgcaagtctctcaagggggagttatgagtaa

SEQ ID NO: 210526 - DNA, 531 bp, Klebsiella pneumoniae
atgagtaaatcagaaaaatcaataacccaagagctgttaaggactctccttgaatacgacccgcagaccggcatttttagatggaaaataaaggcctcatctagtgcgcaccctggcgatattgcaggatgcattgatggtcagggatacagagttattcgtatctatggaaagaacagaaaggcccacaggcttgcctggctatatgtgtacggggatgagcctgaggttatagatcacattgacaggaatcgttcgaataatgccattgaaaatttaagagccgttacattttctcaaaactcggcaaatagagcagctaaaagcaaaaataagtctggatttaccggggtgtactggaatgagttagggaagaaatggcaggcgagcatagtggccaacgggagaacacattacgttggtctttttgctactgcacaagaagcggcgaaagccaggactgagtatgccagacagttatatgcaaatttctatattccttcatttcacgaccaagaggctgccaaatga

SEQ ID NO: 210527 - DNA, 690 bp, Klebsiella pneumoniae
atgaacacccaatacctccagtatgttcgccagcagctgatagtggccaccgccgatctgagcggtgcgacgaaagggcaactggtggcctttgcagagaacgcgcaatttaccgctacggcgcgcagccgtggccggaagaaagtttatagcgaggcaaagcaaaaaatggttaacccggatggcccgccgatgagtggcagccagtcacgcgctaagggttcatcgatcgctctcgttctgcctgttgagtattcgacggccagctggcgccgggctctgctgtcgctggaagagcatcagaaagcgtggctgctgtggaattacagcgacaatatccgctgggagcaccaggagacgatcacccggtgggcatgggagcaattcagcaagaagctggccggcgtacgcattgcgaagaagactgtcgatcgccttcgtcaacttatctggctggccgcgcaggatgtcaaagccgagctggcagggcgggagacgtatgaataccagtcgctggcggagctggttggtgtagcaaagtccacatggacagaaacctacctccctcattggctggcgctgcgcagcagttttgtgaagcttgatagcgacgctctcatatcggtaacgcgatcacgttcacaacaaaaggcgacaaatttagatgtaagtcttgcaaaaccgaactga

SEQ ID NO: 210528 - DNA, 249 bp, Klebsiella pneumoniae
atgaaaatgcctgacaaaatcttttcggcggcctcgtactgcacgtcaggcggccttatatgcaccgggctggcaaggacctatgactggtttcatgggcttgactggaattttattgctctggccagcggcgtgataatcggtgtagcgacttacctgactaatctctactttaagcgccgctggacgaagatgtatcagcagtccctcgatcgtggttatggtggcccgccaccgcaggatgaatag

SEQ ID NO: 210529 - DNA, 531 bp, Klebsiella pneumoniae
atggctaacctgaaaacaaaactcagcgcggccatgctggcgcttatcgccgctggcgcatcagctcccgttctcatggatcagttcctgaatgagaaagagggcaagagcctcacttcataccgcgatggcgccggcatatggacgatatgtcgtggagctacccgggtagatggaagacctgtaacgcaggggatgaagttaacccaggccaaatgcgatcaggtgaatgccgtcgagcgcaatgaggcgctggcatgggtagatcagaatgtgcgtgttcgtctgacgcctcctcaaaaggtcgggattgccagtttctgcccatataacatcgggcccggtaagtgctttccttccaccttctaccgcaagctgaatgccggtgaccggaaaggcgcctgcgctgaaattcgccggtggatttttgatggcggaaaagattgccgcgtgcgttccaacaattgttatggccaggtttctcgccgtgatcaggaaagcgcactggcatgttggggaatagatgaatga

SEQ ID NO: 210530 - DNA, 465 bp, Klebsiella pneumoniae
atgagccgattagcagccattatcagcgccattgtgatctgcctggttgtttgccttgggtggctggccagtcactaccacgacaacgccaccgagttcaaaaggcagcgggacaaagcgactgagcagctcagcctggcgaaagacaccatcgctgacatgcagacccgccagagagaagtcgcagcgctcgatgccaaatacacgaaggagttagccgatgcaaaagctgaaaatgatgctctgcagcgtaagcttgataatggtggtcgggtgctcgtcaaaggcaagtgtccagtgtcagcctcaacccaaactgccggcgcccccagcatgggcgatgatgccaccgtcgaactctcttcagttgctggacgaaacgttctcggtatcagagccggcatccagcgagatcagacggccctgaagacgctgcaggagtacatcaacactcaatgcaattga

SEQ ID NO: 210531 - DNA, 330 bp, Klebsiella pneumoniae
atggttaagcttaaagatgtggtgcgcaatgtcatctctggagctaataaacagcttccagaccattcgacaacacaatctactgcatctactgctctggcaactgagatttacaccaaaatctcttgtataggtcccagagcgttaggcattggtggagataagcaatctgatttttccaatcaagctgctgaactggtgaccgatgaaaaatttcttgacgagcttcaagataaaattggtaatcctcaagccaatgagaatgaggacgaatttattcacagagccaaaaaagaaatgcgcaacctgttgaaatctaaattaaagtag

SEQ ID NO: 210532 - DNA, 162 bp, Klebsiella pneumoniae
gtgataaacatttttctgaaaattttcggtttttttgcctccatatggtcaggcctaagcaacgagcagaaagataaaatcatcaacatccttgttgatgcatttgaagggatttttcgcaagtattttcgcgatagtaaaaatgaggtgaagcatggttaa

SEQ ID NO: 210533 - DNA, 603 bp, Klebsiella pneumoniae
atggcaacaccggactgggaggccatcgagacggcgtaccgggccggggtgatgtccctccgtgaaattgcatcgcagcacggtatcagcgaaggtgctatccgtaagcgagcaaagcgtgacgactggtctcgcgacctgaatgcgaaagtgaaggaacgtgctgacgatctggtacgcaaagcagaggtacgcaagcaggtacgcagtgaagtcactttgaacgaacgcgtactgattgaagcgactgcagaggtaatcgccagtgtccgcatggagcatcgcggtgatatcaagcgcgcccggcagataacgaacgcgctgtttgatgagctaggcgccgagtgtgctgatgtggccgcgctggagaagctcggagagttgatgcttgaaccagacgacaagggacaggacaagcttaacgagatttaccacaaggtcatcagcatgccggagcgcgttaaatcggtgaaagctctcagcgaagcgctgaagaacctgatcggacttgaacgccaggcctacgacatcgacgggccggaaggcgacaattctgttaagcaactctctgaactgatggattccttgtctcagggggcgtaa

SEQ ID NO: 210534 - DNA, 1473 bp, Klebsiella pneumoniae
atgaagcctgagcatctcaagctgctagctgataaagactggcggctgaacaatctttactggatcaccgacaaagaaggcaagccgacccgcttcagaatgacgccggagcagcgggaatacttcgagggaatccatacccgcaacatcatcctgaaagctcgccagctcggcttcaccacagaggtgtgcatcatccagctcgacgctgctctgttcgagtcggcaaagtgcgcgctgatcgcccatacgctgaatgacgcaaagcgcctgttccgggaaaaggtgaaatatgcctacgacaagctgccggccgagataaaggcagccaatccggcgagcaacgactcagccggcgagctggtctttaagaagggcggatcactctacgtaagcacctcatttcgtggcggcacgctgcgttacctgcacgtttccgagttcggaaagatatgcgcaaagtatccggataaagcccgtgaaatcgtcaccggtgcgtttgaggcggtatcgacaggatgcttcgctactatcgagagcactgcagagggcagggcgggttacttcttcgattactgccaagcggcagagaaagcactgctgcagggcaaaccgttatctgcgctggactggaagtttttcttcttctcctggtggaagaatccgcagtacgcaattgacccggtagaactgctccctgcacgcctgattgagtactttgctgagatggaggcgaaacacggcatagtcgttaacgaacgccaaaaggcgtggtattacgccaaagaaaagacgctcggcgacgacatgaagcgcgaatacccgaccattccggcagaggcgttccagcagtcggtcgagggcgcgtactacgccaaacaattccgctggctctacaccaacaagcggatcggccaaatcccggataactcccatctaccggttaacacgttctgggatattggtgtgggggactccacggcgatctggttcgttcgcgaggtcggcgaagagttccacgtcatcgactactacgaaaactctggcgaagggcttcggcactacatgaaggtgctgaaagaccgcggctatgagtacggtgagcactgggggccgcacgacatcgagaaccgcgagtttgcagctgatgcgaagtctcgcaaagagctggcgcgcgagggatacgagattgacggccgggtgtattcgatgaacttccgcgttgtgcctaaagcggggatcgacaccggcattgagtcggtgcgtgaaatcctcaagtcctgcgttttcgatgaggagaagtgcgctgttggcatttcccacctcgaaggttaccgcaaggagtgggacgacaagcgcggctgctggaaagacaaaccccttcacgacttcacatcgcacggcgccgacagctttcgttactttgccgtggcgaagaacaaccgcaagcaggtcggcacagtattcttctaa

SEQ ID NO: 210535 - DNA, 1422 bp, Klebsiella pneumoniae
gtgagcgaacaagataacggccttcaactggctgtgaacaatctcgccactgaaatgcggcgagcgaattaccttaacgccatcggtatcggcggtggcaataccaagcgcccgacgctctatcaggaatttggctacccgcgaaccattaccttccatgacttctacaacatgtaccgccgcaacgccgcgggtttcgcagtggtgcatcgtcttctggatggttgctggcaggactatccggtcattgttgacggtgatgaagcgcagaaagcggagaaagcaaacgcctgggaaaagaaagtaaccaagtttatgaagaagttgtggccgaaggtgaaggatgccgatcgccgcaatatggtcgggcgttactccgcactgctgctgcaggtgaaagatagcaaggcatggagcgatccagtagataccaggctggtgaaatccctgggcgagtcagcgctggtaaaacttatcccggtatgggagccgcaactgacagttgccgaatgggataacgatcgccagtccgagacgttcggccagccgaagatgttcaacttcaacgagcagccggttggagacgaggctttcgtcggaccgacgcgcggtgagcctgtgcatccgagcagggtgatcctgttctgcgaaggctcagaggatgacaacgttctgtcgggtatccccctgcttgaggccggatacaacaaaggactcgaccttgagaagatttccggcggtggcgctgagggcttcctgaaaaatgccagccggcagatcgcggtcgagttcagcaaagaaacagacatggctacgctgtccgatctggcgaagaaggctggttatgccgacctcggcgaagcgatgggggacaaggtcaacaagcttaaccgcggcaccgatgcggccgccgtgatgcaggccgggcagatgcatgttctgagcgttacgccaggcgacccggggccgacgtgggaggtcaccgcgaacgaactggccgcctccgtacagatacctttcaccatcctgtttggacagcagaccggacgactggcgagcgatgaggataaaacagactgggccattcgccgcaatacccgccgcaacggcttcctgactgacagaatcacagccttgctggagcgcttctggaccctgggcattatagatccgccgacaaacggagaggtcaccatttcatggactgacctgctggcgcctggcgagaaggagaaaatcgagaacgcctcgaaactggctgatatcgtccagaaaacgtcgggcttctatggtggcgagccgccattcactgccaacgaactacgcgagattgtaggcctcgaccctcagcctgagccaaagcaaccacctaacccgaatgacaaggtgacaaccgatgatccactggccgatgacacctga

SEQ ID NO: 210536 - DNA, 1005 bp, Klebsiella pneumoniae
atgatccactggccgatgacacctgagcagacggcaaaggtggggctgccgatagttccgcgcagcaaggttgacccgactcgatcagcgaagcaggtcagcgcgatgttccgggatatcgaggaccgttatctcggcatcaagcgtgctctgaaagcactgtttgaccagcgtctgaccgggagagagcgagaggttaacagccacaactggcatttcctgtgtcacgttaacggtgcagagccaacgctctaccaggtcagcgctggcaagttcatctacgacatgtcagcgcaggaactggccgacctgctcgaagcggtacaggttattctcgacgattacctgctggaaggcggcgaacaaagcctgtgggcgatggattacgtcgccgcagaggcgcagcgcggcacgctggaggccttcaacaacctctcgcagcagtcgcaggtgtacgccagccagacgacgcttcagcagcttttaagcagccctgcataccagaaccagatcgccagtgcctacatcagcacgtatagcgactggaagctggaagctgaccgggcgcgcggtgacctggcgaacatcatcgcggatgccgttgggcgcggtgtgaatccccgcgaaacggcgcaggtggtaagcaagcgccttgatgtctctatgggccgcgcaaagactatcgctcagactgagcaggttggcgcactgcgccaggcgcaatggaacgaaacggactgggcagcggatcggcttgggctgaaaaccggcctgctgtggctatctgcgctcaaaccgaccacgcgcagctggcatgccagccgtcacggaaaggtatacaccaccgagcaggtgcgagacttctacgctgagaacggcaaccggtacaactgctactgcagccagattccggtgttgctcaatgacgacggtagcattttcaatcaggggttggctgagaagctggagaaagaacgtaaaagttggttagagacgacaccatag

SEQ ID NO: 210537 - DNA, 477 bp, Klebsiella pneumoniae
atgtccagatatgatgagcttcggagtgcggcattaaggaaaagtcagaaagaagacttgtactggagtggtttgtataaggtctataataaattcaataaggatttctcagaattccttggcgtcaacaacgaaataattaaagattcatcaaatgaacgaattccagtgctaacaattggcgtttatgatgaggaaaagcaatgcgttgatgatgcctttgacagccagttgccgaaggataataattttttatgcttctactgctgcctgagaataggtggggtgggtgcaagtgacggcacatcaaatatattatttgatataaacgtctgcagagacggagatgaatatgattttgtatccaatgcattaacaaatacaatcaaatgctatgaagttgacggtaatgtagatatgactcgtttctttgaagccatatacaacaaaatcattacagatttaaacacacggtag

SEQ ID NO: 210538 - DNA, 1386 bp, Klebsiella pneumoniae
atgaaacgcaaccgcgttaacgtgctgaccgtcgtcaactccgcttcaaacatcaccactgaaaccatcgacggcaagccacatatcgtggttcgcggcatcacgcctgtcgtggacgatatcgtgatgaaccggaagttgtacccggcagcagaaatcgaaaaggcctacaacacgcttgagcgtaacccgatgccgctgggccacccgaaggttgacggcaagcatgtgtctgctcgcgatgtccgggcggtgaatgaatatcacgtaggcgcatggctgcagaacgtcagccacgaagacgggaaggtgacgggcgatatgtacgttaaccgccagtacgccgagtcaagcgagaagggcaagcgcctgattaaccgccttgatgagatgatcgccggtaccaactcagaacccatccacatctccacaggactcttgtattccggcattgccgctaatggcgagtcgaagggaaagaagtacaacgagatcgccaccaacatgatgtttgaccatgtggcggtgctgctcgatgagcctggcgccggaactccggaagaaggcgtgggcatcttcgtcaactcagaaggtcatgagcagcagatcgaagttgctcgccttgctgatggtatcgactgcacccgcgaaggtctgctcaacaagacaaaattcttcttcaccaacgcctccaacttctcttttgacgacatttcacgcgccatcagcgacaagctgcgtgagggtgacacagaagataagtggctatggccagaaacggtgtggccagacagcttcatctaccgcgatgacaccagatacctaaagcagaagtacctcatcgatgatgacggcaaagccgtgttcgtcggcgaacctgtagaagtcgtgcgcaaacccattgagtacgagattaaaaccaacggagagaacgatccgatgaaagaactgattatcaatgcgctccaagccgcgggtaagccgactgaaggcaagtccgatgccgaactgatggacgcttacaaccagatgaaggccgaagaggtcaccgccaagaaaaagggcgatgaagaaatcgccccggatactggcgcacccaagaagacggaaaaggccgccaacaatgaagagatgcccgcctgggcaaaagctctgtccgatcaggttttggcgcttaacagcaagatcaacgcgaactcggaaagcgagaagagcaacatgcgcgcagcggtaaaagccaaatttggcatgaccgatatcgcggtcaacgcgctggacggcgagcccctgaaagagttgtttgctcaatgccagacttcaaccggcctgaatggcgctttccgccaggctaccaatatccaatcagtcagcgaaatgccggagtaa

SEQ ID NO: 210539 - DNA, 429 bp, Klebsiella pneumoniae
atggctaaagacggaaaacatgtaattcacgccggtggcgtattccctaatccgctgctcaaccgtgaaggccgcgccaccgcggtcaagcccggcaccctgggcttcttcgatgctggcgtcttcaaggtgtcggttgatggtagcgagacagcaattatctatgtcgctgacttcgattatctgcgctgcaaaacggtagatgacacgtttgctgtcgacgatctgctggttggcatccatccgctacctggcatgttcctgaatgtgcgcgcagcggccggcacctataaaaaaggcgacgctctttcaatcgttaatggccaggttaagaagtgggccaccggtgaaaacgatcgctgctattgcgacgaagagcgctcaattaccgccgctgctggcgatctcattcgcgtagtgatcaagtaa

SEQ ID NO: 210540 - DNA, 1095 bp, Klebsiella pneumoniae
atgcttgtttattctaaatcgctgggcgaaaagaccggcaacctagctgtgaaccaataccagtttggaatgctgagtatggagcgtaatgccgcgctgaaccatcagggtgtcaacgttatgcaggagatcgccgaccggcttaatgctgttaaccatctcaacggcatcaacgctgttcgctcacctgctgacctgtacaaggcctttgaccagaccgtgctgcgtcaattccagccgaacactgagttcacactgtttaacgacctgatgccgctgtcacgttcggtgcgcatcaatcagacggtgtatgaatacgccaagtctggcggccgcatgtgggctcatacctccatgtcaggccagatcggcgctgcgctggatgctgtgcagtaccagtacgacggtactatggttccggtgcacgatacaggcttcaagttccactggcgtgagcctcgcctgaacaacccggatgcgttcgacatcatctctgacgctcagtttgagtcaaccaacgaagtgcgccgccagtatgtggattacatctacaacggctatcgcgacgcggaaggtaactacatcaagttcgacgataagacctggaagggtctgaagaacgacgagcgtgtggcgatggttgacctgggcgcatctggactgaatatcgacttcaccagcgcatccgccactgctgagcagatccgtaacgcagcaattaagctgcgcgacacgctcaaactgaccaacaatcagtacgccgagcagacctggtacgtgtcgagcgccatcatttccaaccttgagcgctacttcagcgacaactatcagtctgacaccatcctgcaagagcttctgaaactgtccggcattgccgcgattaaagaagacgctcagttgaccggtaaccagatcctgattgtcccgcttaccgctggcgtgattgctccgattgtaggccaggctttcggcaccgttgccgatccgcgtccgttctacaacagcgattacatctggcgtacctggggcgctgctggtctgatggttaagaccgacatcaacagcaaaaaatcagtcatctacgcacacagctaa

SEQ ID NO: 210541 - DNA, 240 bp, Klebsiella pneumoniae
atggcactggtaaaagtgattagcgataaccttttctccggtgccaatctccagaaactggaggttggtgctcaggtttcggtaagcggcgatgtcgctaagcgttgggtagccgctggtctggttgaaatcattagtgatgacgatcaggtgctggaagtggccacacctggcaatgatgctgaagagcaggcagagcagcaggaagaatctgccagcaaatcgaagaaggcgaaataa

SEQ ID NO: 210542 - DNA, 381 bp, Klebsiella pneumoniae
atggctgacccaatcacagcggcagacgtgcaggcgttcctcggtgaattgggttactccatcccggccgctctgctcgatccgattctctgcgtggttaacaagattatcccgtgcctcgatggtgctggatacgacgaatgcacggcaaagctcattctgatgtatgccgctgcgctcatggcgacgtcatccggtgcccggcgaataaaatcgcagggggcgccatcaggagcgtcgcgctcgttcgattacggagacgacggcattacctggctgcgtgactcgctggcgaaactggataccagcggctgcaccagtgaacttccgatcagcgctggcaacactgtgggcctgtttatggtggtcggggactgctaa

SEQ ID NO: 210543 - DNA, 174 bp, Klebsiella pneumoniae
atggcgcgggtttcagttcagcaacggctgccgcggacgtttacccgggtgtgggtgatcaccgatgccggccaacaaacgacggcgtacgtgaaaagcaacggtgaatggttcattaactgcgaccgcatacgcgccacaggcgccgttgtattgcgatggagggatgactga

SEQ ID NO: 210544 - DNA, 363 bp, Klebsiella pneumoniae
atgtcttcggtagctaattggtcatacaccgcgacggcgacaatttggcggcgcatacgcgatgctgacggtagcgataccgacggcggcggtcagccgtatggatgggaagcgccgatcgctattctctgcgactaccagggcggactctctgcaaaaatcggtgaccttggccgggaaatcgtggttaaaaacacgatatggaccgagtacgaaacggcgcgggagggagattacatcctgattggcacgtcgacagatgcggctccgccggatgaggccgatgagattcggcagatcgtccagttcgcagatacgttcgagcgactggcggacgatttcgcactgattacgggagtctga

SEQ ID NO: 210545 - DNA, 426 bp, Klebsiella pneumoniae
atgggcgttaaagttcggggagtctccaaggtcagcaataacatcaaccggctgattgataatatcgaaaagcgaaaaaccatgcgggcgctctactctgctctgtttgagattgggctggagtccgcggtgctggttcctatcgataccagcactctggttaactctcagttcagagaggttgttatcaagggcaccagactaaccgggagaattggttattctgcaaattatgcggcgtacgtgcatgaggccaaaggtattcatcttggaaaaaacaccccgcgccctgtaagaaaaggcgaagcgcccggctcccgtggaaatatatgggatacatcaggcgagccaaaattccttgagaaaggtgctgaaaacgccagagacagagttgacgcagttatacgcagggagatggagctatga

SEQ ID NO: 210546 - DNA, 393 bp, Klebsiella pneumoniae
atgacgcctcctatgcacaggcgggttcgaaatgtctttgttgagtcaggattgactgccggatacatcgttcagtccctgttctggaatgataccggcaaggcatctgaccgctttattgtgttccgaccaaatggtggcacgtcagtagatcgtgatatggccgctgattactacgtcatggtggacgtgataagcaggggaaaggcatctgctgactatgcgcagtcagagaacgacgctcaggccatcatcgattacgtgcagcaaaacccgatgacgcacacctgccttgggcagatatccaacatgggcggaattccttcgcctgttatcacagctgaggggcgtatggtgtggcgcctgcagttcgcctgcctctttggcggataa

SEQ ID NO: 210547 - DNA, 753 bp, Klebsiella pneumoniae
atgcaaggctgctccgacaacggacaactaattggtcgcgctaagacgctggaactggcttacggctgtgccgaccagtttccggcggaaggcgactggaaactgatggggttgccaacatcggcaacgtgggaccttagcccggaggctctgacctctgatgcagataacggcggattcagttcaaaccttattgccagtctggatccgacctactccatcgaaggggaggttcgcgttaaagaccgcactgatgagtttggcattcagcagttcgtgaaatacatcgtcgatgaggttcgtgcccgccgccagccaggtgtatggatgcgtttccactggggcgattattaccacatcggctatatggtcccatcaggagccagtgacggcggtggtgtgaaagaaatcgtgacctacagctttgagttcaaactggctgacggtcagactttccagatcaccgaagctgatggtgacattctggttaccggtgtaagtgttgcgccgacgaccagctctattgctgctggctccagtactacattcgcagtgaatattgcaccggaagatgctgataacaaactgttcacagccagctcatccgtgccggcacgtgcaaccgtcgccatcactggtaatacggtaaccgtgtcagcgccgtcaggtgcaacggcgggaacagcaacaattactgtgaagacggttgatggtgaattcgtggctacccacgtggttactgtcacggcgtaa

SEQ ID NO: 210548 - DNA, 678 bp, Klebsiella pneumoniae
atggttccgctaaaagagctgggagaatgcctggtaaccgtcggggaccgggattattttttccggccatcattcatggctatgtcgcgcatcggcgagccagcagaaatagttcagacgttctatgacctttgcaacgatgaaataacacctctcattcagagggttgtcgaagcgtacggcagggtgcctgaatggctggctaaacacctgtctgctttacatcttgataagaaatctctactggccgcccacacggtcctcaccgcttgctgcaatgatgacataggtgatctggttggctggatgaagcccggcaaaaccaaaagaagggcgtttgtgtggcataagggcgtcatgaatccgcaggatatggtcatccttgcacaaagtctgatgatgcacggcattatcggaaaggccaaagtacgcaaacttcagcgccatgagacaaatgaaaaaaccagtgagttccgggctgccgattacgtcatcgctgcacgcaaccacttcgggatcagcagagaggaagctgaaaacctgacgatgaccgagtttcagttaatgctcatcgccaaatacccggatcagaaagggtataccagggaagagtatgacgatgcagccgatgcgtactttgcaagacgcaaacggaagcaggccaaagccaaccaataa

SEQ ID NO: 210549 - DNA, 756 bp, Klebsiella pneumoniae
atgtctaatatcatccctatgaattacgatgaccgctcattcccttttacagcagattgctggttcaatgccacagttgctgcaaagcatcacggcaagcttccaaaggactggctaaagactgaggcgacaaaaatttatatcgccgaactggctgaggagcttggaattgctagctctggcgtaaaagaggatttttctccccttttagtcagagtggaaaaagggcgaaacggcgggacctggcttcatccggagttggcggtggaattcgcccgctggttgtcagtaaaattcgcccgcgcctgtgaccgacacattaaaaatcttctgctgagtaaaaacttccagctcaccgaagatcagattgtcggcctgatggtgtgccagcaaccaacgtcctgggagaagcgctttaaagacccgttctatcaagcactgtcgaaaatgtccggccttccttactttggtcatatcggtggttgcccggctttgttcgggcagatcacctctcgctgggtgtacggtgtagcacttcctgattatgtctatcaggcagccaaacaagccgccggggacagcaaggagaagattcaccaacatcttaagcctgatgcactggagaaggtcgagcagcaactgatcgccgttaccaacattgccagttgtagcattgaccagaaggacttcgaggcccgttgcatggctgcgtttcccgttaagggtcagatgaaactgctgtatgcggcggcgtga

SEQ ID NO: 210550 - DNA, 255 bp, Klebsiella pneumoniae
atgaataaccgaatcgttgaatgcgcctccagagcggggcgcgacttctcggagttcatgaaaggcgagaagaacatgatggaggcgctgcgatcggctgaagagttcaccgagcagttacgcattcacggctgcgttaatcaccacttcgtcaatttcatgatgatgaaagcgatcgtaaaggtgtttgatgatttacgccgagaggagttgcgggaagagcgacgacgcaaacgtgaagagaagaagaaatga

SEQ ID NO: 210551 - DNA, 768 bp, Klebsiella pneumoniae
atgagccaaccacggtggtctttttactccctcatatccctgctaatctgtccaaaacaaaccaatggggatagggatatgaggggttttattacgcttagtcttttgatggcctcaggcgtggctgtggctaatgaaaatcttgtttgtgagtatgcagtcggggatttttcttcacctccaactcttctcactaaaggcagcgcaaatgtgatattcaacggaaaatcttttacagcatataggccaggaggctcttatgtagtaagcccaccactgactgaaaagaaagatggtatgattttcattgatgataaaacaaaggtatttgccgccagccaggacaaatctaactttgctgtatctgaccgaataaagaaaaccacggagcagtgggctaaatgcgaaatagataaggcatcggcactacaaaaaaaatcagaagatgaaatgaggatggttgagagtctctctggagcaaaagcaaagtcattttttatgaaagaaaagcacgcctttaccacaaactgcctagtgtgggaggatgttacaatgattactggccgttaccctgcaatgattatcgctggcagtgtaatgatgggtaagaatccacgatgggatggaagggaatattcctttaccttcaatggtggatcgatgatggctagatttgtaccaagtgaacctcgacacaaatttgtcattcaggctggtgataaattttatggctgtggtccatcagagatagatcataactatgaatga

SEQ ID NO: 210552 - DNA, 360 bp, Klebsiella pneumoniae; identical to SEQ ID NO: 195080

SEQ ID NO: 210553 - DNA, 171 bp, Klebsiella pneumoniae
atggatactttatatactgaaagaaaaagctctagcttccaattgcgtttgccagaagggatgaaggaagagatccgccgtatggctgaaatggatgggatatcgattaactctgcaattgtgcaacgtttggcaaaaagcctgcgtgaggagcgcatgaatggtcagtaa

SEQ ID NO: 210554 - DNA, 714 bp, Klebsiella pneumoniae
atggtcagtaaaaacagcgaagccccattggcggcaacctttggggcttctatcgaaaataaccgcgaaggaaatatcgacatgaacagtgtacagaataaagagctaagtttccacaatgtcaccctggttccggcacctgttgcggatggtatatggctgacatcggcagatatcgctaaggcactgggatatgcttctagcaaaagcgtttcgaccatttactcacgcaattcagatgagttcacaagcagcatgtcaatggtcatcaaaatgaagaccaatggaataaacaataacttacgtgaaaaatcggtccgcgtgttctctctccgcggttgccacctgatcgctatgtttgccactacagacaaagccaaagagttccgccgctgggtgttggatattctggatcgggaagtggcgcattcgccgattgcgaagcagttcagtgacgaagagctttgctcactgtcttacctgtggagatcaagcgcagttatgtacgaagcctgccataacatttacccgttattgctggccgcagagcacaaattactacctcgctttgcctcgatagtgaccaaccatgcgaggactataaacaggacgcgagatcttcttcgccgcgaaacgaaacatattgaagaacacccatggggggatactaactggaaaaatgtattttcatacgggacgggagtattgcagtga

SEQ ID NO: 210555 - DNA, 786 bp, Klebsiella pneumoniae
atgaattcgattatcaaacattttgagtttaagtcaagtgaaggtatggatgtaagcattgatgcagcccgcttcaaaggaaagcctgtatttcttgcggtgccgctcgcaagggcgttgggatataccaacccagcagatgcattgaaaaagcattgtaagtctctgattaaacttaattatagcgaatcgcgagaattggggttcggtgacaacccgcggggcattcaacttgttggtcaggcggatgtgtttcgcctcatcatgcgcagctcactcccttcagcagaacgtgtccaggattgggtatgtgaagaggtgctcccggcgctgatggatacgggaacttacaacatttcgagggacaagacttcatcaggacttcctgagtaccgtcttgccaaagccgaacagcttaaagctcaggcgctggagaaaaacatcgcatcagctcgggagttgatgtcaatgtttccgcggcttggtgaatcggctaaccaggtgattgttgccacccttgttaacccacttctcggtcacgaagttgtgccactgccggcgattgaagagcattactcaacggcgggtgaagtggcagcgcagctcggttgcactgcgaacaagatcggtcgcgtggccaataaacacaacctgaaaactgagcagtacggcaagttctttctggataagtcgaggcactcggacaagcaggttgaggcgttccgttacaacgccgaaggggttcaggcgcttcgccacctgatccatggtgctgatgtagcgtaa

SEQ ID NO: 210556 - DNA, 504 bp, Klebsiella pneumoniae
atgaaaaagacgatcttggctttgtgtgtagctgctatccctctggtatcaaccggcgctgaatatgtaacggaaggctcttggcaggttaagaaagaagaaaacaagatgaccgatatgactgatgttgtagccattaataggtcaccagatgtctatatgaggcaaggaattgaaagaagtacttccattgtcttgcgatgccgtgagggaaaaacggaagcatatctttccgtagatgagtatatggggattgatgacccgttaataaccatcaggtttgatggaggaaagccgcaaaaacgtagatggagtgctgcagaagggggcgaggcggcattcagccccaaggccatatccttcataaaggatatttcctctcataaaaaaatgatccttgggttcgagccatatggttcaacgatgcaagtagttgagtttgacctcactggagcagattcaatagcaaaagaaatttcctcttcatgtaagtggaaaatgtga

SEQ ID NO: 210557 - DNA, 3447 bp, Klebsiella pneumoniae
atggctggaacctttgatgctggcagcgttgtctatgaagtcgacatggatacttcgcgtttactggcagcgcgaagagaagttgatgcggcactgaacggtcttaatgggagcatgggccgccttgaagccagcgttaaccgcactgagcgctctattggatcgatggaacgaacaatgtccagcctttctggcgttgctaaaggcttgctggccgcgctttctgtgcaacaggttgcgagttacgccgatgcctggactgaactgaataacaaagtcgctaactcggttcgtactggagagacgcaggccgaagttatgcagcggatctttgatgtttcacaagcaacccagtcatccctgaacggcacggcgactctttacgcccggcttgagcgcggaaccagaacatacaacaccagcgcagaagatttaacccgccttaccaccattatcaaccagggatttgcggtatccggcgcaactgctcaggaagctgagaacgcaatcattcagctatcacagggtatagcttccggcgttctgcgcggcgaagagtttaactcagtgtcagagcaaggaagccgcctcatggtcgctctggctgattcgatgggtgtttctatcggtcagttaagggctatggccgctcaagggcaactgacaacagacgttgtggttaaagggcttctgtcacaaggggatgcaatcggcaaagaatttgccaacaccaccgtctcaatcgccaagggattgcaggttgccggtaacaacgtaacgaagttcattggcgaaaactcgacggttaaatcattcgcagcagggttccgagactctgttattacaataagcgaaaaccttgagacgctggggacagccttaattggcgctgctgcaataatgggcggtaggtttgctggcgcgttagcaatggcaacagccgctcaagcctcaagagttaaagcaaccattcagggaatagttgcgacaaggcaatcggcacaacaggaagccgcagcagcatcagtgacagccagaaaagcagcggcagataaagatgctgctctttccgctctaaatgtggcaactgctgagtataacgtagcaaaaggctctgctgctgaagcctttgcgcttgagaacgttatacgactaagagggatttacgttgcaacatccgcagaagcggcattggctaataatgcactagcggcatcacaagccaaagtggccgctacgggtataacttttgcaaacacaatgaaggtagtgaattcggttaccgcccctttgggtggacccattggcgtaatagccattgttgccgctggctggtatctgtattcacagcgacaggccgaggccagaaaagaggcaatagcttttgctgacaccgtacctgacgttattaagcgcctcaaggacatgaatcttgctcaagctcagggcgttagggctgatacggtcacctcaattgaggcgcaaaaggaagctattagcgatctgaaagataccatttcaggtctgcaatccgattacgagaaatatacaacgcttgcaaggcaatacggagttaccgaagatcaaaataatggtttcgtgattaaggcaaaggatgccgcaaacgagttggccaaaaagcgcagggatctggatggagcgacagccactcttaagcaaactgaagacgcattacacctaattaacattcaagttaatcagggcattgttgatcagatgagggctgccagagataacgctatcgctatcgctgaagcagaaaagcaagcgtcattcctcggtggaacccaggcattcctggctgaaaaactcggccaatcaacgcaggccctgaaagccttcaactcagaaagtctgaaaataaactggggcgggaaagaaggcgagaagttaattaagcaggctgagcgccgacttgccttgtcaaaattggagggggaagcaaaagccaggcagcaggcggcctatgatgctgaggatgcaggcgttacagatgagcgagcaatcaaaaggcttcaggataattatgctgcaacagagagaaacactcaggcaagaaaggatcaaaagaaggaagataatgctgcggcgtctgaggctaagaaacttgctaaccagcaggaatcggtaaaccaaaaacttgaaaatctgcgccagcaatcagaactcgctgctggctcaacgcaggagttaagccgggagcaggcgatgctaagggccgagcagtcactcggtaaatccgcatcagccgatcaggttcagcaggctagaaattacgcggctgctgtttgggatacggcggcagcaattaaggcgcgcaatgccgttcctgagcttaaagaaaatgcagactacaatgcacagaaatcgcaacttgaaaccctcaaggatgctaaagatgcgcaaggcaatctgatcatctctcagcagcaatacaatcaggctagcgagcagcttgagcaacagcaccaagttaatctggcaaaaattcgggctgggcaagtagtaactcctcagcaacaagctcagggagagattgatccagttcagcggcttgctaaccagcacgctcaggagttggctctcatccagcagttcgaaacgcagaaggggcagataacccagcgcggtcttgaactgatgaatgccgctaacactcagtacgaacaacagcgcatagcggcgcagtgggagatatggaggcaacaaaacgcaggatatgaggtagctgccgcggcgtttgattcatttgctggaaacgcctccaacgccctcactggcataatcactggcagcatgtctgtcagcgaagctatgcggtcgctaggctcgacggtacttaacagcgtcatcaactcctttgtccagatgggagttgagtggttgaagtctgtaattatggggcaggctggaatgaccgccgcttctggaatggctattgcgcaagggcaactaatagccgcatccatggctccggctgctgcaatgacctcccttgccacggctggcgctaacgctatccccgctcaggcaggaatagcttcaacagttggcatggcgcaggccctttcaatagccggcgctcgctacaacggcggcccggtatcagccggcggactgtatcaggtcggcgagaaaggtaagccagagatttaccaggccagcaccggcaagcagtacatgatccccggtgataacgggaaggtcatcagcaataaggatatgcagtcaggaggagggattagcgtgcaggtgaacgtcatcaaccagtctaccggtgccaccgtacagagtgccaacggctacatgcaggacggtagtgcggtggtggacttgctgatcaccgacatggaaagaggcggccccgtatcctctcagatgcagcagacatttggactaagccgcaaagcgcaaggtgcttactaa

SEQ ID NO: 210558 - DNA, 477 bp, Klebsiella pneumoniae
gtggcaacagttcaataccctccgttcctgccgcttccccagcgcgccgatcagaacatgacgcaggatacagcctggcagacgacgcagacggcagtcggtccattgataatcacgccgatcaccacagaccttaaggcgacatggacgctgcagtggatattcacgcttgcccaggccgagcggtttaagtcgtggctgcgctcgccgacatactgcgaccgcgggcgcaactggttccagatgccgatcgacctgggtgatacgcagggcgttcagcagcagacgctgcatttcgtcgatatgccggtgcagaccagcaaaaacggcaacgtcgtcacctggaccgcaacggtcatcagcaacggtatcgaggacattaccgaggactatgacgactggattgttgaggcccagcctggctatggatactggctggattacctgatcaccgaagtgatgccgagggctgactga

SEQ ID NO: 210559 - DNA, 471 bp, Klebsiella pneumoniae
atgccgacattgagagagtggaaggagcggcggccagcaagcgacatcaaacagacggtggagttttatcaccctgcgtttggttattaccgggtggtcaataacctgtttcgcccggcgacgtttggcggcaactcgttcgagcctgcgcggttcagcgtgaccgagccggcgcaggacggaacggcggtcatatccatgacgatcacttttgtcgccgcgacggagcatgtccggcagacactgaaaagctggcgcggggcggcgcgcatgacgccgataaaatgcctgtatcagcagtggaacgcgatcggtgacacggcgtcattgaaagactggacgctttacgtgaacgacatttcagccgatgccagcaacgtcaccgtgaccgctggcaagaccaatccgctgacgctggccaactccatcatttacaccacgaaagactatcccgggctaatcaccgtatga

SEQ ID NO: 210560 - DNA, 396 bp, Klebsiella pneumoniae
atgacacagagcgactttatcgggcttgttaacggcaagccctgggctaaccgcgcctgcagttttgagcagatggattgctggggcctggtggttctgtattaccggcatgtgctcggactggaactgcaccatatagccgggtacgaatctggcgcagagttcatcacctgctacgaacaggagcgcacccactggcggcgagtgccggtggcggcaaccggctgcatcgccgttttttaccgcggcgaagtgccggcgcatatcggtgtgatgatcagcccggttaagtgcctgcatgcccgcggggaatttggtttcgtgcgctgcgatagcccgctggcattactgaaggtttacagccgcgtggagtacatgattcatggttcgatatga

SEQ ID NO: 210561 - DNA, 2478 bp, Klebsiella pneumoniae
atggttcgatatgagttacagaggctgcctggcgcgccgctgcagcgggggacggtagatgctggcaccacactggtgagcctgctggattctctgcagctgcaccgcgatgttatcgtgaaactgaatggccgggcgctgccggacgattacgacatcagccggccactgctatctggcgacgtggtggctgtgttcgaccagccagagggtggggttggcaaactcatcaccacgatactgcgcccggtcactaaaattctctccggcgcgctgaaggtgttcggcctgtcaaataagcccagcgcgtcggtatcggtggcgacaggcgaatcacccaacaacgacttaaccggccagacgaaccgcgcgcgactctacaaggggcgcccgaacatttacggccagtgccgcgtcttccctgacctgattcaggaggcgctgttcgagttcgtcgacaataacaagcaactcacggagtggtttgaagtcggttacggccggtacaccatttcctcgatccgctactcggaatcgaatctcggaagcctggcgggagccagttctgcgatttataacccgggtgacgtgatcggcacgattgaggtggggtatcagttcgatgacgtcgataacgaaactgtccccgggttaaacgaatcccaggactttccggcccagaccgcgaccacgacggcgccgacatcggtggcgatcgagagtaatcagctcaaagccattgtgctgtcgaacgatgacaactttgcatacttcgccgcgctggcggtacctcatcccgtgtcattcgtcattaatgctacctggagcgaaggcgggacaagcgtcacacggaatgtcaccggcgccgggaatatcatctcctcagagagctttattggcgacgacacgctgtcgtacacgacgttctatatcggcgaactgtcgggagaaattacgtctctgccgggcaatgcagtcatcaacccgacgctgttcacgctgaatgaccagacccctctggttatcggaccgtcagtgtcgccgatcgtctccactcaggtctgggtgcatgtgctggttcagctcggcgcgacggccggcacaacgcaataccggatcaagttttggcaggtcgatgacgacaacaatcaggtgccgggtacatccgagcagcacgattatttcttcgataacgacttccaggtgacgacccggtatttccgcacaacacataagttcgttccggcagccggggcagggcgctatgcggtgaccatcgaacgtctcgacaacagcaatgacgccaacgtagtgactctgatggcgatccacgcggtgaacgtgcgcgaaaacgtcgtgtatccggaagacacgattgcccgcatcacgattaaaggctcgaatgacagcaacagcaaccgcgagcagaagtacaacatgctggcgcagcggcataccatcagctacgaccggacaaccggcggggtcgattacacactgcggccgagtcgttcgtttgctgacgctatcctgcatgagtgggtagttgtgggtaagcaggatgtggccagtattgacgtcgcggctctttatgccattgccgattcgctgccggatgctcagcttgggtatttcgattacaccttctcggatgagaaacagcctcttggtgagcgcatagcgacgatcgccaatgtggcccgagttgacggtaataacattggtgatgtgctgacattctggcgtgatgagaaagtgacaaatccggatgcggtttttgcgcgctcaaacatgttctgggacgagtacaaggtcgcctggcaaatgtctctacccggtggttatgacggcgtggcgctggactacgttgaccctctgacgaacaagaaggcgtatatctacctgcagatcgacagcagcggcatcaccgaggttgaggacgctaccgttaacgcgatgcagatcagcctggacggctgccgtaactccactcaggcgactgatcgggcctggcttgaggcgaggaaaatcctctactcacgcctcactatgacggtgaaggtgctggagtcgacgcaggtggtgcgcggtacggtggttcagtgtccggacatgtacgacaacgcgcagcagactggatacatcaccgggcgctccggggatgtgttctcgacgtcagagcgtatcgacttttctctcggcgatatgtgggtggtgatgactgacagtctcggcaattaccgcgggcgctggcgagcttatccggtaagtggcaagcccaaagcattccaggctgcagccgataccttcgatctgaacatttatgaccgcagcacggtgcaaaaccccagccggtatttcatcgctaccgactcggaactgaactccacaatctggcgcgtcgatagcgccaaacccaacggtgacgatactcaaaccctctcactcactgaatattcagactcgatttatccgtaa

SEQ ID NO: 210562 - DNA, 864 bp, Klebsiella pneumoniae; identical to SEQ ID NO: 139298

SEQ ID NO: 210563 - DNA, 1149 bp, Klebsiella pneumoniae
atgaccatctacacccggccagtgcaaatgctgctctgtggcctgcttttattgaccctggcgatagcggtgctgaatacgctcgtcccgctctggctcgcccatgaaaacatgccaacctggcaggtcggcatggtggggtcatcctattttaccggcaacctggcaggtacgttgctggccggctgggtgatcaagcgcctggggtttaaccgtagctattatctcgcatcgttaattttcgccgtcggctgcgtagggctggggatcaccgttggcttctggacatggctgagctggcgttttatcgccggcgtaggttgcgcgatgatctgggtggtggtggaaagcgcgctggtttgcagcggcacttcccgcagtcgcggtcgtctgctggcggcgtacatgatggtctattacgtcggtaccgtactgggccagctgatggtcagtaaattacccaccgatttaatgagcgtcctgccgtgggtgaccggcctggcgctggcggcgatcctgccgttgctgtttacccgcattatggggcaggcagaagagccgcatgaaacggtacgtatctggccgatgctgaagctacgccaggcgcgccacggggtcaatggctgtattatttcggggattgtcctcggctcgctgtatggcctgatgccgctgtggctgaaccatcagggcgtcagcgactccggcatcggcttctggatggcggtgatggtgagtgcggggatcctcggccagtggccggtagggcgcctggcagaccgctacggtcgcctgctggtgctgcgggtacaggtctttgtggtcattctgggatgtctggcgatgcttagtcaggcggcaatggccccggcgctgtttgtgcttggggcatctggtttcacgctgtatccggtggcgatggcctgggcctgtgaaaaagtggagcaccatcagctggtggcgatgaatcaggcgctgctgatgagctataccatcggcagcctgctgggcccgaccctgacggcgatgctgatgcagaacttctcagacaacctgctgtttatcatgatcgccagcgtgtcgtttatctatctgctgaccctgctgcgcaaagccgggcatcatccgacgccggtggcgcacgcctga

SEQ ID NO: 210564 - DNA, 741 bp, Klebsiella pneumoniae
atgtcagttattggtcgcattcactcctttgaatcctgtggtaccgttgatggcccgggcatccgctttattacctttttccagggctgcctgatgcgctgcctgtactgccataaccgtgacacctgggatacccacggcggcaaagaaatcaccgttgaagaattaatgaaagaggtggtgacctatcgtcactttatgaatgcttccggcggcggcgtcaccgcctcgggcggtgaggcgatcctgcaggcggagtttgttcgcgactggttccgcgcgtgtaagaaagaaggcatccacacctgcctggataccaacggcttcgtacgtcgctacgatccggttatcgacgagctgctggaggtaacagacctggtgatgctggatctcaagcagatgaacgatgagattcaccagaacctggtcggcgtctctaaccatcgtacgctggaattcgcccagtatctggcgaagaagaatatcaatgtctggatccgctacgtggtggttcccggctggtcagacgatgatgattccgcgcaccgcctgggcgaatttacccgcgatatgggcaatgtcgaaaaaatcgagctgctgccctaccatgagctgggtaaacacaaatgggaagcgatgggcgaagagtacaagctggacggcgtccatccgccgaagaaagagaccatggagcgggtaaaaggcatccttgagcagtatggtcacaaagtaatgtactaa

SEQ ID NO: 210565 - DNA, 2283 bp, Klebsiella pneumoniae
atgtccgagcttaatgaaaagttagccacagcctgggaaggttttgcgaaaggtgactggcagaatgaagtcaacgtccgtgactttattcagaaaaactacaccccatatgaaggcgacgaatccttcctggctggcgcgactgaagcgaccaccaagctgtgggacaccgtaatggaaggtgtaaaacaggaaaaccgcactcacgcgcctgttgattttgacactgccctggcttccaccatcacctctcacgacgcgggctatatcgagaaaggtctggaaaaaatcgttggtctgcagaccgaagcgccgctgaaacgtgcgatcatcccgttcggtggtatcaaaatggttgaaggttcctgcaaagcgtataatcgcgagctggacccgatgctgaaaaaaatcttcacagagtaccgtaaaactcacaaccagggcgttttcgacgtctataccccggacatcctgcgctgccgtaaatccggcgtgctgacgggtctgccggatgcttacggtcgtggtcgtatcatcggtgactaccgtcgcgttgcgctgtacggtatcgacttcctgatgaaagacaaattcgcccagttcaactctctgcaagcgaaactggaaagcggcgaagacctggaagcgaccatccgtctgcgtgaagaaatcgctgaacaacaccgcgcactgggccagatcaaagagatggcggctaaatatggctatgacatctccggtccggcgaccaccgctcaggaagcgattcagtggacctacttcggttacctggctgccgtgaaatctcagaacggcgcggcaatgtccttcggtcgtacctccagcttcctggatatctacatcgagcgtgacctgcaggcgggtaaaatcaccgagcaagacgcgcaggaaatggttgaccacctggtcatgaaactgcgtatggttcgcttcctgcgtaccccggaatatgatgaactgttctccggcgacccgatttgggcaacggaatccatcggcggtatgggcgttgacggccgtactctggtgaccaaaaacagcttccgcttcctgaacaccctgtataccatggggccgtctccggagccgaacattactatcctgtggtctgaaaaactgccgctgagcttcaagaaattcgccgctaaagtgtccatcgatacctcttctctgcagtatgagaacgatgacctgatgcgtccggacttcaacaacgacgactacgctatcgcatgctgcgtaagcccgatggttgttggtaagcaaatgcagttcttcggcgctcgcgctaacctcgcgaaaaccatgctgtacgctatcaacggcggcgtggatgaaaaactgaaaatgcaggttggtccgaaatctgaaccgatcaaaggcgacgtcctgaacttcgacgaagtaatggatcgcatggatcacttcatggactggctggctaaacagtacgtcaccgcgctgaacatcatccactacatgcacgacaagtacagctacgaagcctctctgatggcgctgcacgaccgtgacgttatccgcaccatggcgtgtggtatcgctggtctgtccgttgctgctgactccctgtctgctatcaaatatgcgaaagttaaaccgattcgtgacgaagacggtctggctatcgacttcgaaatcgaaggcgaatacccgcagtttggtaacaacgaccctcgcgtcgatgacatggccgttgacctggttgaacgtttcatgaagaaaattcagaaactgcacacctaccgcaacgctatcccgactcagtctgttctgaccatcacctctaacgtggtgtacggtaagaaaaccggtaataccccagacggtcgtcgcgctggcgcgccgttcggtccaggtgctaacccgatgcacggccgtgaccagaaaggtgcagtagcctctctgacctccgtcgctaaactgccgtttgcttacgcgaaagatggtatctcttataccttctctatcgtgccgaacgcgctgggtaaagacgacgaagttcgtaagaccaacctggcaggtctgatggatggttacttccatcacgaagcgtccatcgaaggtggtcagcacctgaacgtgaacgtcatgaaccgcgaaatgctgctcgacgcgatggaaaacccggaaaaatatccgcagctgaccatccgcgtatctggctacgccgtacgttttaactccctgaccaaagaacagcagcaggatgttattacccgtaccttcactcagaccatgtaa

SEQ ID NO: 210566 - DNA, 858 bp, Klebsiella pneumoniae
gtgaaagctgacaacccttttgatcttttgctccctgccgcgatggcgaaagtcgccgaagaagcaggtgtctataaagcaacgaagcatccgatgaagacgttttatctggcgatcaccgctggcgttttcatctccatcgctttcgtattctatatcaccgcgaccaccggcactgccgcgatgccttatgggattgccaaacttatcggtgggatctgtttttctctgggtctgattctgtgcgttatctgcggcgctgacctctttacctctacggtactgatcgtggtggccaaagccagcggtcgaattacctgggggcaactggcaaaaaactggctcaacgtctattttggtaacctggtgggcgcgctgctgtttgtgctgctgatgtggttatcaggcgaatatatgactgccaacggcggctgggggctaaacgttctgcagaccgccgaccacaaaatgcatcatacttttgtggaggccgtgagcctgggtatcctcgctaacctgatggtttgtctcgccgtatggatgagctattccggtcgtagcctgatggataaagcgatgatcatggtcctgccggtagcgatgttcgttgccagcggctttgagcacagcatcgccaacatgtttatgatcccgatgggtatcgtaatccgcaactttgcaagcccggaattctggaccgccatcggttcgactccggaaagtttctctcacttgaccgttatgaacttcatcactgataacctgattccggtaactatcgggaacattatcggcgggggtctgctggtcgggttgacatactgggtcatttacctgcgtggcaacgaccatcactaa

SEQ ID NO: 210567 - DNA, 1761 bp, Klebsiella pneumoniae
atgacccaaacgtttattcccggcaaagatgccgccctggaagattccatcgctcgcttccagcagaaattgctcgacctcggatttgatatcgaagaggcctcgtggctgaacccggtgccgcacgtgtggtccgttcacattcgcgataaagcgtgcgcgctgtgctttaccaatggtaaaggcgccaccaaaaaggcagccctggcctccgcgctgggcgaatatttcgaacgtctgtccactaactatttcttcgccgacttctggttaggcgacacaatcgctaacggcccgtttgttcactacccgaacgaaaagtggttcccgctgactgaggatgatgaagtcccggaaggtctgctggatgcccgcctgcgcgcgttctacgatcctgacgatcagttaacggccagtatgctggtggatctgcagtcgggtaacgatgagcgcggcgtgtgcggtctgccttttacccgccagtccgacggcgaaaccgtctatattccgatgaatattgtcggcaacctgtacgtctccaacggcatgtccgccggtaacacccgcaacgaagcgcgggtacagggtctgtcagaggtctttgaacgtcacattaaaaaccgcatcatcgctgaaagcatcagcctgccggagatcccggcggaagtcatggcgcgctatccgggcgtcgtggagtcgatcgccaaactggaagctgaaggtttcccgatctttgcctatgatggctcgctcggcggcaaatatccggttatctgcgtcgtgctgtttaacccggctaacggcacctgcttcgcctccttcggcgcccacccggactttggcgtggcgctggagcgaaccgtcaccgaactgctgcagggccgcagcctgaaagacctcgacgtcttcacgccgccaaccttcgatgacgaagaggtcgccgagcacgcgaacctcgaaacccactttatcgactccagcggcctgatctcctgggatatgttcaagcaggacgccgactatccattcgttgactggagcttctctggtactaccgaagaagagttcgccaccctgatggccatcttcaaggccgaagataaagaagtgtacatcgccgactacgagcacctgggcgtttacgcctgccgtatcatcgtcccggggatgtcggacatatacccggcggaagacctgtggctggcgaacaacagcatgggcgctcatctgcgggacaccattctgtccctgccgggcagcgagtgggataaagaagattacctggcgctgatcgagcagatggacgatgagggtctggatgatttcacccgcgttcgcgaactgctggggctcgccaccggaaaagacaacggctggtataccctgcgcgtcggcgagctgaaagcgatgctggccctggccggcggcgatctggaacaggcgctgatctggaccgagtggaccatggaatttaatgcttcggtcttcagcgcggagcgcgcgaactactatcgctgtctgcaaaccctgctgctgctgagccaggaagaagagcgtcagccactgcagtacctgaacgccttcatccgtatgtacggcgcagacgcggtcgaagccgccagcgcggcgctgagcggggaagcgccgttctatggtctccaggcggtcgatagcgatctgcaggccttcccggcccatcagtcgctgctgaaagcctatgaaaaactgcagcgggcgaaagcggcgttttgggcaaaataa

SEQ ID NO: 210568 - DNA, 693 bp, Klebsiella pneumoniae
atgaaagcctttgactggcagcggatggcgctcgataaagtaccggtggaattcctggcggaggtggcgttgcgcagcctctataccttcgttctggtctttattttcctcaagattaccggacggcgcggcgtgcggcagatgtcgctgttcgaggtgctgattattttgaccctcggctcggcggcgggtgacgtggcgttttatgacgatgtgccgctgctgccggtgctggtggtcttcgttacgctggcgctactgtatcgcggcattatgtggctgatggggcatagcgaaaagctggaggatctactggaggggaaacctatcgtagtggtggaagaggggcagttggcctgggagaagctgcatgcggaaaacatgaccgaattcgaattttttatggagctgcgggtcaacagcgtcgagcagcttggccaggtccggctggcaatcctcgaaaccaacgggcagatcagcgtgttttattatcccgatgaagaggtgagggccggattatcgatccttccagcgcattgtaccacacgctataccaccattccgcaagaggggatctatgcctgcgtgcgctgcagcatcgtaatggcgatgcaggcgggagaaaaacgaatatgtccgcgctgcgcaaatgcagaatggtcgaaggccagccgggcgaaacggcttacctga

SEQ ID NO: 210569 - DNA, 1089 bp, Klebsiella pneumoniae
atggctcaggtctataacttcagttcgggcccggcaatgctgccggcggaagtactcaaactggcgcagcaggaactgtgcgactggcacggtctggggacgtcggtcatggagatcagtcaccgtggtaaggagtttatccaggtggcagaagaggcagaacaggacttccgcgctctgctgaacatcccttccaactataaagttttattctgccacggcggcggccgcggccagttcgccgggatcccgctgaacatcctcggcgataaaaaggtcgctgactatgtggacgccggttactgggcggccagcgcggtcaaagaggcgaagaaatactgcacgccgaacgttatcgacgcgaaaatcaccgtcgacggcaagcgcgctgtgaagccgatgagcgagtggcagctgaccccgggagcggcctatctgcactactgcccgaacgaaaccattgatggtatcgcgattgatgagacgccgaacttcggcgacgacgtcatcgtgaccgccgatttctcctccaccattctttcccgcgaaattgacgtcaaccgcttcggcgtaatctacgccggcgcgcagaagaatatcggtccggctgggctgacgctggtcatcgtgcgtgaagatctgctgggcaaagccagcgtggcctgcccatcaattcttgactacaccgtgttaagcgagaatgactcgatgtttaacacaccgccgacgttcgcatggtatctggctggactggtgtttaagtggctgaaacagcagggcggggttgccgcgatggataaaatcaaccagcagaaagccgaactgctctacggcgtgatcgataacagcggcttctatcgtaacgatgtggcgcaggccaaccgttcgcgtatgaacgtaccgttccagctggcggacagcgccctggacaaactgttcctcgaagagtcgtttgctgccgggctgcacgcgctgaagggccaccgggtggtgggcggcatgcgtgcttccatctacaacgccatgccgctggacggcgtgaaggcgttaaccgactttatgctggacttcgaacgccgccacggttaa

SEQ ID NO: 210570 - DNA, 1284 bp, Klebsiella pneumoniae
atggaatccctgacgttacaacccatcgcacgcgtagagggcaccgtgaacctgccaggttcgaaaagcgtctccaaccgcgcgctgctgctggctgccctggcccgcggcacgacggtgctgaccaacctgctggacagcgacgatgtgcgccatatgctgaatgccctgagtgcgctgggggttcaatataccctgtctgccgaccgcacccgctgcgaagtgaccggcaacggcggcccgttgcgctctgccgcggcgctggagctgttccttggcaacgccggtaccgcgatgcgtccgctggcggcggctctgtgccttggcagcaacgatatcgtgctgaccggcgaaccgcggatgaaagagcgtccgatcggccatctggtggatgccctgcgtcagggcggcgctcagatcgactatctggagcaggaaaattatccaccgctgcgcctgcgcggcggttttcagggcggcaacgtcgaggttgacggcagcgtctccagccagttcctgaccgcgctgctgatgaccgcgccgctggcgccgcaggataccgtcatcgtcattaagggcgatctggtgtcgaaaccctatatcgacattacgctgcacctaatgaaaaccttcggcgttgaggtggacaatcagtcttatcagcgatttgtggtgcgcggcaagcagcagtatcagtcgccgggagattacctggtggaaggcgatgcttcctcggcctcgtatttcctcgccgctggcgccattaagggcggcacggtaaaagtcaccggtatcggccgcaacagcgtacagggcgacattcgtttcgccgacgtactggagaaaatgggcgccaccgtcacctggggcgacgatttcatcgcctgcacccacggcgagctcaaggcggtcgatatggatatgaaccatatcccggacgccgcgatgaccatcgccaccgccgcgctgttcgcgcaagggaccactaccctgcgcaatatctacaactggcgggtcaaggagacggaccgtctgttcgccatggcgaccgagctgcgtaaagtgggcgccgaggtggaagagggggaagattatatccgcatcaccccgccggcaaagttgaagtacgcagaaatcggcacctataacgaccaccggatggcgatgtgcttctcgctggtagcgctgtctgatacgccggtgaccatccttgatcccaaatgtacggccaaaacgttccctgactactttgagcagctggcgcggatcagtaccctcgcctga

SEQ ID NO: 210571 - DNA, 684 bp, Klebsiella pneumoniae
atgacggcgaatattccggtaatcaccattgatgggcctggcggtgcgggtaaaggtacgttgtgcaaggcaatggcggaagcgctgggctggcatctgttagattcaggcgcgatctaccgcgttctggcgctggcggcgctgcatcatcatgtcgacgtggagtccgaagaggcgctggtgcccctggctgcccatcttgacgtgcgttttatttctactgacggcaacctggaagtggtgctggaaggggaagatgtcagtagcgaaattcgcactcaggaggtcgcgaacgcggcctcgaaagtggcggcttttccgcgcgttcgcgaagcgctgctgcgccgccagcgcgccttccgcgaactgccggggcttatcgccgacggtcgcgatatgggaacggtagttttcccggacgcgccggtgaaaattttcctcgatgcctcggccgacgagcgggcgcatcgccgcatgcggcagttgcaggaaaagggctttgatgttaactttgaacgtcttttgtccgagataaaagagcgtgacgatcgcgaccgaaatcgcgccgtggcgccgcttgtcccggctgccgatgcattagttctcgattcaaccgaactaaacattgagcaagtgattgaaaaagcgctacaatatgcgcgcgaaaaattggccgttgcgtag

SEQ ID NO: 210572 - DNA, 1674 bp, Klebsiella pneumoniae
atgactgaatcttttgctcaactgtttgaagaatccttaaaagaaatcgaaacccgcccgggttccatcgttcgtggtgttgttgttgctatcgacaaagacgtagtactggttgacgccggtctgaaatctgagtccgccatcccggctgagcagttcaaaaacgcccagggcgagctggaaatccaggttggtgacgaagttgacgttgctctggatgcagtagaagacggcttcggtgaaactctgctgtcccgtgagaaagctaaacgtcacgaagcttggatcacgctggaaaaagcttacgaagacgctgaaactgttaccggtgttatcaacggcaaagttaaaggtggcttcactgttgagctgaacggtattcgtgcgttcctgccgggttccctggtagacgttcgtccggtgcgcgacacgctgcacctggaaggcaaagagcttgagttcaaagtcatcaagctggaccagaagcgtaacaacgttgttgtttctcgtcgtgccgttatcgaatccgaaaacagcgcagagcgcgatcagctgctggaaaacctgcaggaaggcatggaagtcaaaggtatcgttaagaacctcactgactacggtgcattcgttgatctgggcggcgttgacggcctgctgcacatcaccgatatggcctggaaacgcgttaagcatccgagcgaaatcgtaaacgttggcgacgaaatcactgttaaagtgctgaagttcgaccgcgagcgtacccgtgtatccctgggcctgaaacagctgggcgaagatccgtgggtagctatcgctaaacgttatccggaaggtaccaaactgactggtcgcgtgaccaacctgaccgactacggctgcttcgttgaaatcgaagagggcgttgaaggcctggttcacgtttccgaaatggattggaccaacaaaaacatccacccgtccaaagttgttaacgttggcgacgttgtggaagtaatggttctggatatcgacgaagagcgtcgtcgtatctccctgggtctgaagcagtgcaaatctaacccatggcagcagttcgcggaaacccacaacaagggcgaccgtgttgaaggtaaaatcaagtctatcactgacttcggtatcttcatcggcctggacggcggcatcgacggcctggttcacctgtctgacatctcctggaacgttgcaggcgaagaagcagttcgtgaatacaaaaaaggcgacgaaatcgcagcagttgttctgcaggttgacgcagagcgtgagcgtatctccctgggcgttaaacagctcgcggaagatccgttcaacaactacgttgctctgaacaagaaaggcgctatcgttgttggtaaagtgactgcagttgacgctaaaggcgcaaccgtagaactggctgacggcgtagaaggttacctgcgtgcttctgaagcatcccgtgaccgcgttgaagacgcaactctggttctgagcgttggcgacgaagttgaagcgaaattcaccggcgtggatcgtaagaaccgcgtagtgagcctgtctgtacgtgcgaaagacgaagcggaagaaaaagacgctatcgctaccgtgaacaagcaggaagacgcgaacttctccaacaacgctatggctgaagcgttcaaagcagcgaaaggcgagtaa

SEQ ID NO: 210573 - DNA, 288 bp, Klebsiella pneumoniae; identical to SEQ ID NO: 138074

SEQ ID NO: 210574 - DNA, 2265 bp, Klebsiella pneumoniae
atgcgtctaccatggcttgccggatgcgccatcattgcaatgctgccgcttctctggctacccgttttgccgggcccgtgcagtctggcgggcgcgggcgcactggcgctggcgctgattcgtctgcatggaagggccgtcgccggagtggcgatgacgcttctgctggtggtctggggagtattgagcgcgcatcaggcgctgtggccgacccggcaccttaccggcgccatccggcaagcggaagtgatccttagcgagacggatggccagaccttgcaccgtggacagatggtgagcctgcggggccgctatctgtttcccccggtaggcgtaacgctgtacggggaacttgcacctgcgccagcctgtgcgggtcaacactggctgatgacgctgcgcctgcgcccggtgcacgggcagctcaatgacgggggcttcgacagccagcgctatgcgctggcgcagcaccgaccgctgagcggagggatcgtcgccgcttccgcgctggatgcccgctgcagtctgcgcgcccgctatctgacgtcgctgacccggcgactgcagacttatccctggcgcgcggtgatgttgggattaggaatgggggagcggctgtctttgccgacggagataaaggtcctgatgcagaacacgggcacttcccatctgatggctatctcgggtctgcatatcgctctcgcggcttctcttatcatgctgttgctgcgcggcgtgcagtatattctcccgggccgctggatcggctggcggttgccgctgctggccgggctggccggcgccgtcggctatgcctggctgacgggtatgcagccgccggccctgcgcacttgcttagggcttgcggtctgttgtgctttacgtttgtcgggtcaacgctggacggcgtggcaggtgtggctctgctgtctgggagcgatactggttgccgacccgctggcggtgctgtcgcaaagcctgtggctatctgccttcgccgtggcggggctgatcttctggttccagtggctcccgttgcctgccggccgctggcgctggccgtggaagaccataattgctcttgttcatttgcaggctggcgtgacgctgctgctgctgccgctgcagttgttgctattccatggagtcagcctgacgtcgatggcggctaatttgctggcggtaccgttagtcaccctgttggcggtgccgcttattctgaccgcgatgctggtgcatctctcggggccggagatagtggagtcgctgctctggctggcggccgatcgcgtgctggcgctactgttttggggattacgacgtttaccggacggctggttgacgctggatactcgctggctgtggatcagtatcctgccgtggctgttggtgatgggctggcgttttcagagctggcggcattcaccggcgctgtgtctcagcgtgctgtttttactgacgcggccattcagccgacaaccgcctgcggacgaatggcgggtgacgatgctggatgtcgggcaggggctggcgatggtgatcgagcgtcacggtaaggcattgctttacgataccgggccggcttggccgcagggtgatagcggtcaacaggtgattatcccgtggttgcgctggcaccatctgcagctgcaagggattatgctgagccatgaacatctggatcatcgcggcggccttgattcagtgctgcaggcatggccgcaggcctgggtgcgcagcccgttaggctgggcgcatcatctgccgtgtcatcgcggtgagcgctggcaatggcagggactcaacttccaggccctgtggccgctgccgggcagcacggcaaagggtaacaatcattcgtgtgtggtgcggatcgatgatggtcgctccagcatcctgctcaccggcgatatagaacgtcaggcggagcaggcgatgatcagccgttactggcggcatctgacgtctacacttattcaggttccccaccacggcagcaatacctcctccagcgcgctgctggtccgccgggtggatggcgcggccgcgctggcctccgcttcgcgctacaatgcgtggcggatgccctcgtacaaggtggttcagcgctaccgccagcggggttatcgctggttcgccacgccgcagcaggggcagataacggtggttttttccgcagaagggtggcaaatccatagcttacgggatcaagttttaccgcgttggtatcatcagtggtttggcgcgcccgccgataacgggtag

SEQ ID NO: 210575 - DNA, 1749 bp, Klebsiella pneumoniae
atgcagaacgataaagatctctccacgtggcagaccttccgccgactttggccgattatcgcgccgtttaaagccgggctaatcgtagcggcggtggcgttggtgcttaacgcgggcagtgacaccttcatgttatcgcttcttaaaccgttattggatgatggttttggtaaaacggatcgctcagtgctgctatggatgccgctggtggttatcggcctgatggtgctgcgtgggatcaccagctacatctcgagctattgtatttcctgggtttccggcaaagtggtgatgaccatgcgtcgtcgcctgttcggccacatgatgggtatgccggtggccttctttgacaagcagtctaccggaacgctgctgtcacgcatcacctatgattctgagcaggtcgcctcctcttcttccagcgcgctgatcaccgtggtccgcgaaggagcatcgattatcggtctgttcgtgatgatgttctattacagctggcagctgtcgctgatcctgatcgtactggcgccgattgtgtcggtggcgatccgcgtggtctccaagcgttttcgcaatatcagtaagaatatgcagaacacgatggggcaggtcaccaccagcgccgagcagatgctgaaagggcacaaagaggtgctgatgtttggcggccaggaagtggaaaccaaacgttttgataaagtcagcaataaaatgcgtctgcaggggatgaagatggtttccgcctcgtctatctccgacccgatcattcagcttatcgcctccctggcgctggcctttgtcctgtatgccgccagcttcccgagcgtgatggacaccctgaccgccgggaccattaccgtggtcttctcctcgatgattgcgctgatgcgtccgctgaagtcgctgaccaacgtcaatgcccagttccagcgcgggatggcggcgtgccagacgctgtttgcgatcctcgattccgagcaggaaaaagacgaaggtacgcgggtcattgagcgggcgaaaggcaatctcaagttcgagaacgtcacctttacctacccgggtcgcgaagtggccgcgctgcgcaatatcaatctcgatatcccggaagggaaaacagtggcgctggtggggcgctcagggtcgggtaaatcgaccattgccagcctgatcacccgcttctacgatgtcgacgaggggcagatcctgctggatggccacgacctgcgcgagtacaagctgagctcgctgcgcgaccaggtggcgctggtttcacaaaacgtgcatctgttcaacgataccgtcgccaacaatatcgcctatgcccgtaccgaagagtacagccgcgagcagattgaagaggccgcgcgcatggcctacgccatggatttcattaacaagatggataatggtctggataccatcatcggcgagaatggcgtgatgctgtccggcggccagcgccagcgtattgctattgcccgcgcgctgctgcgtaacagcccgatcctgatcctcgatgaagccacctcggcgctggataccgagtccgagcgtgctattcaggcggcgctggatgagctgcagaaaaaccgtacctcgctggttatcgctcaccgtctgtcgaccattgagcaggctgatgaaatcgtggtggttgaagacgggcggatcgtggagcgcggaacgcaccatgacctgctggagcataagggcgtgtacgcccagctgcataagatgcaattcggcgaatga

SEQ ID NO: 210576 - DNA, 981 bp, Klebsiella pneumoniae
atgatcgcgcgcatctggtccggggaatcgccgctgtggcgcctgctgctgccgctctcctggctgtatggcctggtgagcggggtgattcgcctcagctatcagctggggtggcaaaaagcctggcgcgcgccggtgccggtggtggtggttggtaacctgaccgctggcggcaatggcaaaacgccggtggtgatctggctggtggagcagctgcagcagcgcggtattcgcgttggcgtcgtgtctcgcggctacggcggtaaagccgaccgctatccgctggtgttggacgacaggaccagtacggcgcaggcgggtgatgaaccggtgttgatccatcagcgtaccggtgccccggtcgctgtcgccccgctgcgcagcgacgcggtaaaagcattgctcagcgcgcacgatctgcagatgattgtgaccgacgatggtttacagcactataagctcgcgcgggacagagaaattgtcgttattgacggcgtgcgccgctttggcaacggctggtggctgcctgccgggccgatgcgcgagcgggcgtcgcgcttgcaaagcgttgatgcggttatcgttaacggcggcgtggcgcgtccgggtgagatcccgatgcggctgcgcccagggatggcggttaacctgcttaccggcgaacgtcgcgatgtctccaccttcacgaacgtggtggcgatggccggcatcggccatccgccgcgcttcttcgccaccctcgaaagctgcggcgtccagccggtcaaaaccgtggcgctggcggaccatcaggcgctgagccaggctgatgtcgccgccctggtgaccgccgatcagacgctgctgatgaccgagaaagatgccgtgaaatgtcgcgatttcgccgctgcaaactggtggtatttaccggtcgacgccataatggccgatgaacgcgcacagcggttgcttgcggacttagcgacgttggcgcaacgttaa

SEQ ID NO: 210577 - DNA, 1230 bp, Klebsiella pneumoniae
atgtcggtattgcaactatcgcttaacgaggcgcgccacctccatctcgcggcgcaggggttgttaaagaagccccgacgtcgcgctcgcccgaaagacattctttccaccatccagcagatgtcgctgctgcaaatcgataccatcaacgtggtggcccgcagcccctacctggtgctgttcagccgtcttggcagctatccgcagcactggctggatgagtcgctgcgcaacggcgagctaatggaatactgggcgcatgaagcctgctttctgccgcgcagcgatttcgccctggtgcgccatcgcatgttgaatcccgacaatatgggctggaaataccatcgcgcgtggatggaggagcatgccgggagtattgccgagctggtggcgcatatcgggcaaaacggcccggttcgctcggcggattttacccacccgcgcaaaggcgccagcggctggtgggagtggaaaccgcataagcgccaccttgaagggctgtttaccgccggcgaagtgatggtggtggagcggcgcaattttcaccgcgtgtatgatctaacccggcgggtgatgccggactgggacgacgagcgcgacgcgctctcccgcgaagacgcagaggccattatgttgcgcaatagcgcccgtagcctcggcatcttccgcgcccagtggctggccgattactatcgcttgcgccagccggcgctaccgggtctgctggcggcctggcaggaagaggggctggtggtgccggttaacgtggaagcactcggcgagatgtggctgcatcacgaggcgctggcgcagctggagaccgcgcccggcggtaagctgaccgccagccatagcgccgtgctctcgcccttcgacccggtggtctgggatcggaaacgcgctgagcagctgttcaacttcagctatcgcctggagtgttataccccggcgccgaagcgtcagtatggctacttcgtactgcctctgctgcaccagggaaaactggtcgggcggatggacagtaaaatacatcgcaaaagccgggagctggagatcttcgctctatggctggaggagggggtgaagatcacccgtggtctggagcaggggctgcgccgggcgattaacgacttcgcacactggcaatcggcagagcggatcctgtgccgacgcctgccggaagggctgtttgtcggccaggagcaggggtgggaaatcgacgccgattga

SEQ ID NO: 210578 - DNA, 183 bp, Klebsiella pneumoniae; identical to SEQ ID NO: 138069

SEQ ID NO: 210579 - DNA, 747 bp, Klebsiella pneumoniae
atgagtttcgtggtcattattcctgcgcgtttcgcctccacgcgcctgccgggaaaaccactgcaggacattaatggtaagccgatgattgtccatgtgctggagcgcgctcgcgaatccggcgcggatcgcattattgtcgccaccgatcacgaagatgtcgcccgggcggttgaagccgccggcggcgaggtctgtatgacccgcgccgaccatcagtccggcaccgaacggctggcggaagtggtggaaaagtgcgcgttcagcgatgacaccattatcgtcaatattcagggcgatgagccgatgatccccccggcgattgtccgccaggtggcggagaatctggctgccagcagcagcggaatggcgaccctggcggtaccgatccatgatgcggaagaggcgtttaacccgaatgcggtcaaagtggtgatggatgccaagggttacgcgctctatttctcccgcgcgactattccctgggatcgcgatcgctttgcccaatcccgcgagaccatcggtgactccctgctgcgtcacatcggcatctatggctatcgcgccggctttatccgccgctatgtcagctgggcgccgagcccgctggagcagattgaaatgctcgagcagctgcgagtgctgtggtatggcgagaaaatccatgtcgccgtggcggccgaagtgcccggcaccggcgtggataccccggaagatctggagcgcgtccgcgctgagctgcgttag

SEQ ID NO: 210580 - DNA, 894 bp, Klebsiella pneumoniae
atggaacagttgcgaaccgaactcagtcatcttcttggcgaaaagctaagccgggtggagtgtgtcagtgaacaagccgctacggcgctgtggttcctgtacgatgcgcagggaaacccgatgccgctgctggcgcgaagtttcaccacgcccggcgtggcgcggcagctggcatggaagatctcgaccctggcgcgtaatggtacggtgcgtatgccggtggtttatggcgtcatgacgcacgaagaacatcccggaccagatgtgctgctgcttgagcgcctgcgcggcgtaccggtggaggcgccgacgcgcaccccggcgcgctgggagcaactgcaggagcaaatcgtcgaggcgctgctggcgtggcatcggcaggacagtggcggctgcgtgggaatggtcgacaatacccaggaaaacctgtggccgaactggtaccgccagcgggtagagatattgtggagcaccctgaacctgtatcaggacaccggtctcaccatgcaggataagcgccttttgttccgctcccgcgagtgccttccggagctgttccgcgatttcaatgataatgctgtgctggtgcatggcaacttcactctgcgcagcatgctaaaagatccgcgcagcgatcagctgctggcgatggtggggccggggatgatgctgtgggcgccacgcgagtatgaactgttccgtcttgctgaaggcggccaggcggaacagctgctgtggcgctacctgcagcaggcgccagtttccgaggcctttgtctggcggcgctggctttatctgctgtgggatgaggtggatagtctggtcaacaccgggcgctttgatcgcgcccgttttgacctcgctgcaaaatcactcctgccctggctcgcctga

SEQ ID NO: 210581 - DNA, 780 bp, Klebsiella pneumoniae
atgcttttcacgctaaaaaagatcgtcggcggcctgctgttgccgctacccgccttactgttgctgatcggtatcgggatcgcgctgttatggttcagccgctttcagcgtaccgggaagctatgcgtgagcctcggctggctgctgctgacgctgctgagcctgcaacccgtggccgacagcctgctgaaaccgattgaagatacctaccccacctggcgcggcgagcagccggtgaactacgtggtggtgctgggcggcggctatacctggaatccggagtgggcgccaagctctaatcttatcaataacagcctgccgcgcctgacggagggcatccgcctgtggcaggcgaatcccggttcgaaaatgatctttaccggcgcggcggcgaaaacgaaccccgtcagcacggcggaagccggggcgagagtggcggagagccttggcgtacctcgcagcgatatcattgtgctcgatcggccgaaagatacagaagaggaagcgctggcggtgaagcacgccatcggcgacgcgcccttcctgctggtcacctcggcgtcacaccttccgcgggcgatgatattctttcgccatgccggcctggatccgcttcccgcgccggccaatcagctggcggtgacctcgccgctcaatccgtgggagcgggccattccttctccagtgtggctgatgcacagcgaccgggtcggctatgaaacccttggtcgcgtctggcaatggctgaaaggcagctcaggcgagccagggcaggagtga

SEQ ID NO: 210582 - DNA, 801 bp, Klebsiella pneumoniae
gtgcaggatcgcaatttcgatgacattgctgaaaagttttcgcgcaatatttacggcaccacaaaaggccagttgcgtcaggcgatcctttggcaggatctggaaccgctgttggcgcagctggggccgggaccgctgagggtgctggatgccggcggcggcgaaggacaaacggccatcaaagtcgcgcaactgggccatcacgtgacgctctgcgatctctccgctgagatggtggctcgcgcccgccaggcggccgccgataaaggtgtgatcgacaacatgcattttgtacaatgcgcggctcaggatattgcgcagcatttggaaagcccggtcgatctggtactgtttcatgcggtgctggagtgggtggcggagccccaggaaatactgcataccctgtggtcgacgctgcgtgctggcggtggactgtcattgatgttctacaatgctaacggcctgttgatgcacaatatggttgccggtaattttgattacgttcaactgggcatgccaaaaaagaaaaaacgcacgctgtcgccggattatccgcgtgaaccacagcaggtttatcactggctggaagagattggctggcagatcgtcagcaaaaccggcgtgcgggtgtttcatgattatctgcgtgaaaaacgccaacagcatgacagctatgcggcgctgctggcgctggagacgcgctactgtcgtcaggagccgtatctcagcctgggccgttatattcatgtcaccgcgcttaagagccaggctcatagccgcagatgcaaggataaagtatga

SEQ ID NO: 210583 - DNA, 1323 bp, Klebsiella pneumoniae
atgagtgaattttcccagacagtccccgaactggttgcctgggccagaaaaaatgatttttcaatctcgctaccggtcgacagactctctttcctgctggcgatcgccactctgaatggtgaacgactggaaggggaaatgagcgagggtgaactggtggatgcgttccgccacgtcagtgatgcgtttgagcagaccagcgaaaccatcagccagcgcgccaataacgcgatcaacgatttggtgcgccagcgtctgctgaaccgctttaccagcgaaattaccgaaggcaatgcgatctatcgcctgacgccgttggggattgggatcaccgattattatatccgtcagcgcgaattctcgacgctgcgtctctcgatgcagctgtcgatcgtcgccggcgagctgaagcgcgcggcggacgccgcggaagagggcggtgatgaattccactggcatcgcaacgtttttgcgccgctgaagtattccgtagcggaaattttcgacagcatcgacctgacgcagcgcattatggatgagcagcagcagctggtgaaagacgatatcgcgcagttgttgaataaagactggcgcgcggcgatttccagctgtgaactgctgctgtcggaaacctccggcaccctgcgcgaactgcaggatacgctggatgcggcaggggataagctgcaggcgaacctgctgcgcattcaggactcgaccatggcgcgcgacgatctccattttgtcgatcggctggtgttcgatctgcaaagcaagctcgaccgcatcgtcagctggggtcagcaggcgattgacctgtggatcggctacgaccgccatgtgcacaagtttatccgtaccgctatcgatatggataagaaccgcgtcttcgcccagcgtctgcgccagtcggtgcagacctattttgatgaaccgtgggcgctaacttacgccaacgccgaccgcctgttggatatgcgcgatgaagagatggccctgcgcgatgaagaggtcaccggcgagctgccggcggacctcgaatttgaagagtttaacgaaattcgcgagcagctggcggcgctgatcgaagcgcagctggcggtctataaagagaaaggaataccgctggatctcggcctggtggcgcgggagttcctggcgcagtatccgcgcgggcgtcacttcgacgtggcgcggatcgtcgtggatcaggcggtacagctgggcgtcgcccaggcagatttcaccggactgccggcaaaatggcagccgattaatgattacggagccaaggtacaggcgcatgtcattgacaaatattga

SEQ ID NO: 210584 - DNA, 705 bp, Klebsiella pneumoniae
atgtcattgacaaatattgaacaagtgatgccggttaagctggcgcaggcgttggccaatccgttatttccggcgctggacagcgccctgcgcgcgggccgtcatatcggtctcgacgagctggataatcacgcatttttgatggattttcaggattacctggaagagttttacgctcgctataacgtcgagctgatccgcgcgccggagggattcttctacctgcgcccgcggtccaccacgctgatttcgcgctcggtactgtccgagctggatatgatggtgggcaaaattctttgctatctctatctcagcccggagcgcctggcgaacgaagggatttttacccagcaggagctctatgacgagctgctgaccctggccgatgaatccaggctgctgaagctggtgaacaaccgttccaccggttcggatctggaccgccagaagctgcaggaaaaaatgcgggcctcgcttaaccgcttacgccgtctggggatggtgtggtttatgggccacgatagcagcaagtttcgcattaccgaatcggtattccgctttggcgccgatgtgcgcgccggcgacgacccgcgcgaagcgcagcgccgtctgatccgcgacggggaagcgatggccctggaaaatcacctgcagctcaatgatgagaatgaagaaaaccagccggatagcggggaggaagagtaa

SEQ ID NO: 210585 - DNA, 4449 bp, Klebsiella pneumoniae
atgattgaacgcggtaagtttcgctcgctaacgctggttaactggaacggcttctttgcccggacctttgatcttgatgaactggtgaccaccctctccggggggaacggcgcgggtaagtccacgaccatggcggccttcgtcacggcgctgatcccggatttaaccctgctgcacttccgtaacaccaccgaagcgggggccaccagcggctcacgcgataaaggcctgcacggtaagctgcgcgccggggtgtgttactcggtactcgatgtgatcaactcccgccaccagcgcgtggtggtcggcgtgcgcctgcagcaggtcgccgggcgcgatcgtaaagtcgatattaaacctttcgccattcagggactgccgacctctatcctgccgacccagctgttgaccgaaacgctgaacgatcgccaggcgcgcgtcgtgagcctcaacgagctgaaagataaactcgaggcgatggaaggggtccagtttaaacagttcaactcgatcaccgaatatcactcgctaatgttcgatctgggcgtggtggcgcgtcgcctgcgttccgcctccgatcgtagcaagtactaccgcctgattgaggcctcgctgtacggcgggatctccagcaccattacccgctcgctgcgcgactacctgctgccggaaaacagcggcgtgcgtaaagcgttccaggatatggaagcggcgctgcgggaaaaccgcatgacgctggaagccattcgcgttacccagtccgaccgcgatctgtttaaacacctgatcagcgaagccaccaactacgtggcggcggactatatgcgtcacgccaacgagaggcgcattcacctggataaggcgctggagtatcgccgcgatctcttcacctcgcgttcgcagctggcggctgagcagtataagcacgtcgacatggcgcgcgaactgcaggagcataacggcgcggagggcgatctggaagccgattaccaggccgccagcgatcacctgaacctggtgcagactgcgctgcgtcagcaggaaaaaatcgagcgctacgaagcggatctcgacgagctgcagatccgtctggaagagcagaatgaagtggtggcggaagccgtcgatcgtcaggaagagaacgaagcccgcgctgaggccgccgagctggaagtggatgagctgaaaagccaactcgccgactatcagcaggcgctcgatgtgcagcagacccgcgccattcagtataaccaggcgctgcaggcgctggagcgcgcgaaggcgctgtgccatctgccggatctgaccccggagagcgccgacgagtggctggaaaccttccaggcgaaagagcaggaagcgacggagaaaatgctgtcgctggaacagaaaatgagcgtggcgcaaaccgcgcacagccagtttgaacaggcttaccagttggtggcggcgattaacggcccgctggcgcgcaatgaagcctgggacgtagcgcgcgaattgctgcgcgacggcgtgaaccagcgccaccaggccgagcaggcgcaggggctgcgcagccgcctcaacgagcttgaacagcgcctgcgcgagcagcaggacgctgagcgtcagctggccgagttctgcaaacgccagggtaaacgctacgatatcgacgatctggaaacgctgcatcaggagctggaagcgcgcatcgcgtcgctggccgacagcgtctccaatgctcaggagcagcgcatggcgctgcgtcaggagctggagcaactgcagtcgcgtacccagacgctgatgcgtcgggcgccggtctggctggcggcgcagaacagccttaaccagctgtgcgagcaaagcggcgagcagtttgcgtccggccaggaggtcaccgaatacctgcagcagctgctggagcgtgaacgagaggctatcgttgaacgtgacgaggtcggcgcccgcaagcgcgccatcgacgaagaaatcgagcgtcttagccagccgggcggttcggaagatccgcgcctcaacgccctggcggaacggttcggcggcgttctgctgtccgagatctacgatgatgttagcctggacgatgcgccgtacttctccgcgctgtacggtccgtcgcgccatgcgatcgtggtaccggatctgtcgcgggtagccgagcagcttgagggactggaagattgcccggaagatctctatctgatcgaaggcgatccgcagtccttcgatgacagcgtattcagcgtcgacgagctggaaaaagcggtggtggtgaagattgccgatcgccagtggcgttattcgcgcttcccgtcgctgccgctgtttggccgcgcggcacgtgaaaaccgcattgaaaccctgcatgccgagcgtgaatcgctgtcagagcgttttgcgaccctgtcgttcgatgtgcagaaaacccagcgcctgcaccaggccttcagccgctttatcggcagccatctggcggtggctttcgaggacgatccggaagaagagatccgcaaactcaacagccgccgcggcgagctggagcgtgcgctgagcgcccatgaaagcgataaccaacagaaccgtgtgcagtacgagcaggcgaaagagggcgtgtcggcgctcaaccgcctgctgccgcgcctgaacctgctggcggatgatacgctggccgaccgcgtggacgagatccaggaacgtctggacgaagcgcaggaggccgcgcgctttattcagcagcacggtaaccagctggcgaagctggagcctattgtttcggtgctgcagagcgatccggagcagtttgagcagctgaaagaagattacgcctatgcgcagcaaacccagcgcgatgcgcgtcagcaggcttttgccctggcggaagttgtgcagcgcagggcccacttcagctactccgattcggcggaaatgctcagcggcaacagcgatctcaacgagaagctgcgccagcgtctggagcaggcggagtccgaacgcagccgcgcgcgcgacgcgttgcgtgcccatgcggcgcagcttagtcagtacaatcaggtgctggcctcgctgaagagctcgtatgacaccaagaaagagctgctcaacgatctgtataaagaattgcaggacattggcgtgcgcgccgacgccggcgcggaagagcgtgctcgcgcgcgtcgcgatgagctgcacatgcagctgagcaataaccgctcccgacgcaatcagctggagaaagcgttgaccttctgcgaagcggaaatggacaacctgacccgtaaactgcgcaagctggagcgcgattactgcgaaatgcgcgagcaggtggtgaccgccaaggcgggctggtgcgcggtgatgcgtctggtgaaagacaacggcgtcgaacgtcgtctgcatcgccgcgagctggcctatctctccgccgatgagctgcgctcaatgtcggataaggcgctgggggcgctgcgtctggcggtcgccgataacgaacatctgcgtgacgtgctgcgtatctcggaagatccgaagcgtccggagcgcaaaattcagttcttcgttgccgtataccagcatctgcgcgagcgtattcgtcaggatattattcgcaccgatgatccggtggaagcgatcgagcagatggagatcgagctcagccgcctgaccgaagagctgaccaaccgtgaacagaagctggcgatcagttcccgcagcgtggccaacattattcgcaaaaccattcagcgcgagcagaaccgtatccggatgctcaaccagggtctgcagagcgtctccttcggccaggtcaacagcgtgcgtctgaacgtcaatgtgcgtgagacccactcgatgctgctcgacgtgctctccgagcagcatgagcagcaccaggatctgtttaacagcaatcgtctgaccttctctgaggcgctggccaagctctatcagcgtctcaacccacagatcgacatggggcagcgcacgccgcaaaccatcggtgaagagctgctcgactaccgcaactatctggagatggaagtggaagttaaccgcggctccgacggctggctgcgcgcggagtccggcgcgctgtctaccggggaagctatcggtaccgggatgtcgattctggtgatggtggtgcagagttgggaagatgaatcccgtcgcctgcgcggcaaggatatctcgccttgccgtctgctgttcctcgatgaagcggcgcgtctcgacgcccgctccatcgccaccctgttcgagctgtgcgaacgtctggagatgcagctgattatcgcagcgccggagaacatcagtccggaaaaaggcactacctataaactggtgcgtaaggtgttcaataatcacgaacatgtgcacgtcgtggggctgcgcgggtttgccgcgccgctgccggaagcgctgccgggaacggccgacgcctcctga

SEQ ID NO: 210586 - DNA, 1791 bp, Klebsiella pneumoniae
atgttgcttaagaaacggtatggtcgtccattgtcagcgctcagtctgagcctggcaatggcatttgctccgctgttcaatgtccaggccgcagagcctgaagtcgtaccaggtgatagctccgctacgcctggagagctttccgtcgcgctgtcgcaaagcgacgggcaatcgccggcggtcgcgaagctggccggtgagcagccgctgtcgatggaagccgcggcgaacagtcgcgcccagatcgaagcgctattgccggctggctacaaacccgtctttatgaatccgctggtctcgctatacgccgccagggatatgaaaccgatgtgggaaaaccgcgaggcggtgcaggcgttccagcagcagctggcggagatcgccatcgccggttttcagccgcagtttaccacctgggtcagtctgctgaccgatcctgccgtcaccggcatggcgcgcgatgtggtgttgtctgatgccatgatgggctatctgcactttatcagcggcatccccacccaggggacccgctggttatatagctcgacaccgtacaagatggcgaccccgccgctgtcggtgattaaccagtggcagctggcgctggataatggctccctgccggcgtttatcgccggcctggcgccgcgtcatccgcagtatgaggccatgcaccagtcgctgctggcgctggtggctgattcacgtccatggccgcagatgaccggcagcggctcgctgcgcccgggagaatggagcaatgatatcggcgcgctgcgcgagatcctccagcgtactgggatgctggaaaattccgccaatatcgttctgcccggcgacgtggtgagtccttcggcgaagaaaaagagcaagcccgcggcgcgcggtgtgtacgatcgccagctggtggagggcgttaagcgctttcaggccatgcaggggctgggggcggatggggtcatcggccaatccacccgtgactggctcaatgtctcatcggcgcagcgcgctggcgtgctggcgctgaacattcagcgtctacgtctgctgccaggcaaactatcgactggtatcatggtgaatattcccgcgttttcgctggtctattaccaggacggcagtcaggtgctggcctcgcgggtgatcgtcggacgtccggaccgcaagacgccgatgatgagcagcgcgctgaacaacgtagtggtcaatccgccgtggaacgtaccgcccaccctggcgcgcaaagatattctgccgaaggtgcgtaataatcctggctatctggagcagcatggctacaccgtgatgcgcggctggaacagtaaagagaccatcgatccttaccgggttgactggtcaaccatcaccgagaacaatttaccgttccgttttcagcaggcgcctggggcacgtaattcactggggcgttacaagtttaatatgccgagttcggatgctatctatctgcacgatacgccgaatcataatctgtttcagaaggatgtccgtgcgctcagttccggctgcgtcagggtcaataaagcctcggagctggccaatatgctgctgcaggacgcgggctggaatgacacgcgcatttccgacgccctgaagcagggggatacgcgctatgtcaatattcggcaaaatataccggtgaatttatattacttaacggcgtttgtggacgctgatggacgtacacaatatcgaacagatatttacaattacgatatcaccgcgcgatccagcgcacaaattctgacgaaagcggaacaattaatcaggtaa

SEQ ID NO: 210587 - DNA, 216 bp, Klebsiella pneumoniae
atgtatatgcacttctggcgcacgaaaggcaccttaccgggcattattgccaacgtcaaggcagcctcaccccaggaaaatcgggcgctgcagaggtgcagcgcccttttttacccagtgctaggacaacaaaatccattgaactacttcatttacctgattaattgttccgctttcgtcagaatttgtgcgctggatcgcgcggtgatatcgtaa

SEQ ID NO: 210588 - DNA, 636 bp, Klebsiella pneumoniae
gtggcgagcgatagcgagctgatcctggcatcgcgcaaagcggaaaaagtatataacgattcattgactgtagacctgattatcatggacaaatttgacgctaatcgccgcagattgctggcgttgggtggcgctgcgctgggtgctgccgccattctccctgcgccggcatttgccaccctctcgaccccccgtccgcgtattttgacgctgaataacctgcataccggtgaatcgctcagggcggagtttttcgatggcagaggctatattcaggatgaattagcaagacttaaccattttttccgtgactatcgcgcgaataaaattaagtccatcgatccaaatctgttcgatcatctttatcggttgcagggactacttggcaccaacaaacctgtccagcttatctctggctatcgttccctcgataccaacgatgagcttcgcgcacgcagccgtggtgtagcgaaacacagctatcacaccaaggggcaggcgatggatttccatattgaaggtatttcgttaagcaatattcgcaaagcggcgttatctatgcgcgcaggtggtgtaggatattacccacgtagtaactttgtgcatattgataccggtcccgtaaggcactggtaa

SEQ ID NO: 210589 - DNA, 648 bp, Klebsiella pneumoniae
atgaactatcgtattattccggttaccgcgttcgcgcagaactgttctcttatctggtgcgggcaaacccggctggcggcgctggtcgatcctggcggcgatgctgaacgtatcaaagcggtggtggcggaggctggcgtcacgctgatgcagatcctgctgacgcatggccacctcgatcacgttggcgccgcggctgaactggcgcagcattatggcgtaccggttattggtccggaaaaagaggatgagttctggctggaaggattaccggcgcaaagccggatgttcggcctggaggattgccaaccgctgcgtccggatcgctggctcaatgaaggcgatgtggtcaatgtggggaatgtggcgctgcaggtgctgcactgcccgggccatacgccgggccatgtggtcttttttgatgacgcctcccgactgctgatctccggagacgtgattttcaaaggcggggtgggacgcagcgattttccgcgcggcgaccatgggcagctgattgcggctatcaaggaaaagctgttgccgctgggcgatgatgtgacctttattcccggccatggtccgctgtcgacgctgggtgaggaacgccgtaataacccgtttctgcaggatgagatgccggtctggtaa

SEQ ID NO: 210590 - DNA, 1191 bp, Klebsiella pneumoniae
atgtttgagaacattaccgccgccccagccgacccgattttaggtctggccgatctgtttcgtgccgatgaccgccctgaaaaaaataacctcggaattggtgtttacaaggatgaaaccggtaaaacgcccgttctgaccagcgtcaaaaaagcagagcagtatctgctggaaaatgaaacgactaaaaactatctgggcatcgatggtattcctgaatttggtcgctgcacccaggagctgctgttcggtaaaggcaatgcgattatcgctgataaacgcgcccgcaccgcgcagacaccgggcggtaccggtgcgctgcgtgtcgccgcagacttcctcgccaaaaacaccgacgtgaaacgtgtgtgggtaagtaatccgagctggccgaaccataaaagcgtattcacctctgccgggctggaagtgcgcgaatacgcatactacgacgcggctaaccacgcgctggactttgatggtctgctggccagcctgaacgaagcccaggcgggcgacgtggtactgttccacggctgctgccacaacccgaccggtatcgatccgacactcgatcagtggcagcagctggcgcagctgtcggtggaaaaaggctggctaccgctgttcgatttcgcctaccagggcttcgcccgcggtctggaagaagatgctgaagggctacgcgcttttgctgctctacataaagagctgctggtcgccagctcctactcgaaaaactttggcctgtacaacgagcgcgtcggcgcctgcactctggtcgccgcggatcaagagactgtagaccgcgccttcagtcagatgaagtcggtgatccgcgccaactactcgaacccgcctgcgcatggcgcctccgtggtcgccaccattctgagcaacgatgcgctacgggcaatctgggagcaggaactgaccgatatgcgccagcgcatccagcgtatgcgtctgctgttcgtcaataccctgcaggagaaaggcgcgagccgcgacttcagctttatcagccagcagaacggcatgttctcattcagcggcctgactaaagagcaggtgctgcgcctgcgtgaagagttcgccatctatgcggtagcttccggacgtatcaacgtggccgggatgacgcctgacaatatggcgccgctgtgcgaagccatcgtcgccgtactgtaa

SEQ ID NO: 210591 - DNA, 975 bp, Klebsiella pneumoniae
atggaaaaatggtcgggcgagcacgtctggaccaccaatggcgacaccagcagcgacgataccacctatgcccgtatcggcctgaaaggcgaaactcagatcaacgatcagctgatcggctacggccagtgggaatacaacatggacgcgtccaatgttgaaggttcccagaccacaaaaccccgtctagcgttcgcaggcctgaaagcgggcgaatacggttcattcgactatggccgtaactacggcgcgatctacgacgtcgaagcggcaaccgatatgctggttgaatggggcggtgacggctggaactataccgacaactacatgaccggtcgtaccaacggcgtcgcaacctaccgtaactccgacttcttcggtctggttgacggtctgagcttcgcgctgcagtaccagggtaaaaacgaccatgaccgtgcgattcgcaagcagaatggcgacggcttcagcaccgcagccacctacgcgttcgacaacggtatcgcactgtctgcaggctactccagctctaaccgtagcgtcgatcagaaagctgacggcaatggcgacaaagccgaagcctgggcgacctctgcaaaatatgacgctaacaacatctatgcggccgtcatgtactcccagacttacaacatgactccggaagaagataaccacttcgctggtaaaactcagaactttgaagcagttgtacagtatcagtttgacttcggcctgcgtccgtccatcggctacgtacagaccaaaggcaaggacctgcagtcgcgtgctggcttctccggcggcgatgcggatctggttaaatacatcgaagtgggtacctggtactactttaacaagaacatgaacgtctacgctgcgtataaattcaaccagctggacgacaacgattacaccaaagcggctggtgtcgccactgacgaccaggcggccgtgggtatcgtttaccagttctaa

SEQ ID NO: 210592 - DNA, 1401 bp, Klebsiella pneumoniae
atgagcgttgtgcctgtagccgacgtactccagggccgcgttgccgttgacagcgaagtcacggtccgcggatgggtgcgtacccgccgagattctaaagctggcttttctttcctcgccgtctatgacggttcctgctttgatcctgtacaggccgttattaataattctctgcccaattacaatcaggaagtgctgcgtctgaccaccggctgctcggtgattgtcaccggtaaagtcgtggcttctcagggtcagggtcaaagctttgagatccaggcgaccagcgtggaagtgaccggctgggtggaagacccggacacctacccgatggcggccaagcgccacagcatcgagtatctgcgtgaagtagcgcacctgcgtccgcgcaccaacctgattggcgcggtagcccgcgtgcgtcacaccctggcgcaggcgctgcaccgcttcttcaacgaacagggcttcttctgggtttccaccccgctgatcaccgcctccgataccgaaggcgccggcgaaatgttccgcgtgtcgacgctggatctggaaaacctgccgcgtaacgatcagggcaaagtcgatttcgacaaagacttcttcggtaaagagtcgttcctgaccgtttccggccagctgaacggcgagacctacgcctgtgcgctgtcgaagatttataccttcggcccgaccttccgcgccgagaactccaacaccagccgccacctggcggaattctggatgctggagccggaagtggccttcgccaacctgaacgacgttgccggcctggcggaagcgatgctcaagtacgtcttcaaagcggtactggaagagcgtgcggacgacatgcagttcttcgccgagcgcgtggataaagacgctatcgaccgtctgcagcgctttatcaccgctgattttgcccaggtggattacaccgacgccgtcaccattctggaaaactgcggcaaacagttcgagaacccggtgtactggggcgtggatctctcctctgagcacgaacgttacctggccgaagagcacttcaaagcgccggtggtggtgaaaaactacccgaaagacattaaagcgttctatatgcgccttaacgaagacggtaaaaccgtcgcggcaatggacgttctggcgccgggcatcggcgagattatcggcggttcccagcgtgaagagcgtctcgacgtgcttgacgcgcgtatggcagagatggggcttaacaaagaagactactggtggtatcgcgacctgcgtcgctacggcaccgtgccgcattccggcttcggtctgggcttcgaacgcctcatcgcttacgtcaccggcgtgcagaacgtccgcgatgttattccgttcccgcggacgccgcgcaacgcgacattctaa

SEQ ID NO: 210593 - DNA, 465 bp, Klebsiella pneumoniae
atgatgaaacttgacgcatgggataaaaaaattcttacgctcttgcagcgtaataatcgcttgtcgcaacgggagatcgccgatcggatcagcctgtctccttcggcagtcaatcggcgtatcgctgcactggaggatgcaggggtgattaaaggcagtgttagcttagtggacgccagtaaagtgggaagaccaatcaccattatggtgcaggtgaccattgagaatgaacgtctcgatctgcttgaggaggataaacagcgtttcgtaacctgtccgcaagtgcagcaggtctactatgtcactggcgacttcgattttctgctcgtgatcaacgtccgtgatatggcggaatacgaagcgctaacccgtgaactcttttttgcctcgggaaatatcaagtctttccggaccatcgtgtcgatgcaaaatgcgaagcaggaaatgacggtcattatcgagtaa

SEQ ID NO: 210594 - DNA, 1212 bp, Klebsiella pneumoniae
gtggacacaattaaatttcaacttaacgcccggcggcagccctatggccagggagcagacttgagtctgctgaatgaaagcgtggggaacgaagtgctggcattccatcaaaaatttcctgattaccgggtcacgccgctgcgtaagctggaatttttaagccagcggctggggctgggatcgatccatataaaagatgaagcgcagcgattcggtttgaatgcgtttaaaggattaggcggatcttatgcgatggggaaatatctcgccgctctgcttgagcgagatattaatacgttgagctttgccgagcttaattcaccagtgattaaggcgcgtatcaaggacatcgtatttgtgactgctaccgacggtaaccacggacgtggcgtggcgtgggcggctgagcagcttgggctgcgtgcggtggtgtatatgccaaaaggctcgtcgccggtacgcgcgcagaatattcgccggcatggcgccgaatgcacgattactgaactgaactacgacgacacagttcggctggcggccaaaaccgcgcgcgagcagggatgggttctactccaggataccgcctggcagggctacgagcagatccccacatggatcatgcaaggctatatgaccctcgctgttgaaatctggcagcagctggcagaaagcggagcgccgatgccgacgcatctgtttttacaagccggggtcgggtcgtttgccggtagcatcatgggatatttcatcgaaaagatgcagcagcaggctcccaccatcatcatcgttgagccgcacaaggcgaactgcctgtatcgctcggcaaccattaatgacggactgccgcacagcgtcggcggggatatgtcaactctgatggccgggcttgcctgtggtgaacctaacatcaccagctggccaatgctccgcgaccatgccacctgttttatttccgccgacgattgtctggcggccaacggcatgcgcctgttggccgctccgcgtccaggtactgacgaaccttttgtctccggggaatccggcgctattggcacaggagtgctttatgcgctgatgactcaaccggcgtatcgcgagcttgccgaatcgctgcgcctgaatgccgatgcacaggttctgttaatcagcacggaaggagatacatcacccgatgtctatgaagacatcgtctggtttggccgtaatggttga

SEQ ID NO: 210595 - DNA, 1311 bp, Klebsiella pneumoniae
atgaatactgaaaatataattatcaataaaggatattccgatcccgcaaagtggcatagcgaagataccgtttgggtccttggcctgttcggtaccgccattggcgccggggtgctgtttctgccgattaatgccggaattggcggcttctggccgctgctgattgtttttgtcctcgcttttcctattacttatctggctcaccgcggtctggcgagattcatttactcttccaatacgccggaaagcagtattaccgatgttattggcgagcattttggcgcgctggcgggaaaagtatttaccgtcatctatttcttcgccgtctataccattctgattatgtatgcggtggctatcaccaacaccgcgcagagctttatcacccaccagttggcgatggccgagcctccccggtcgctggtggccatcgttctgatcctcgggctgatgtttatcgtccgtttcggacagcgtttgataatgcgggtgatgagcaccctggtttatcccttcatcatctcgcttatttttatggcactttttctgattccgcactggaacggcgcaattttgcaaaccgtaagcttcagcgccacgggcgatgggcaggggatcatgttatccctgtggatgaccttcccggtactggtgatgtcgtttaaccactatcccatcatttcgccgatggtggtgcgccagaagcagcgttacggtctggcgctcgctgagggtaaatgtgcgcagatccagcgctacggtatcctgctcatgacggtggtggtgctgttttttgttctcagctgcgtgttaagcctgtcgccgcagcaactggcggaagccaaagcccagaatctgtcgattttgtcctatctggccaatcagtacgatacaccgattattgcctggctatcgccgattattgcctggctatcgccgattatcgcctttgtcgctattactaaatcatttcttggccactacatcggcgcctatgaatcgctgcgcgacctgattctggaggccgccgccgcacgcgggaaaaaacctggtattcgcctcgtcgacgcggtcatcctggtgtttatggtgcttacctgctggttcgccgcgtacaagaaccccagtatcctcggtattatcgaatgcatcagcggtcccaccggggcggcaattctgctgctgttgcctatgtacgccattcataaattaccggtgcttgccccctggcgcggtaaagcgagcaacgttttcgtcaccctgatcggtcttatcaccgtatctgccattttttacggcatgttccaataa

SEQ ID NO: 210596 - DNA, 1239 bp, Klebsiella pneumoniae
atgagtcattatctgcagattaacggccaacggcttatcgattccctgtatgcacttggcgaacatggtgcgctgccaggcggcggcgtatgccgcctggcagcgactgccgaagataaagccggcagggactttgttgtagcccgcatgaaggcgctgggcctgagcgtgtcaattgatgctatcggcaatgtcaccggcgtttatcacggcgaggagacgttgccgatggtgatgatggggtcacatatcgataccgtcgccacaggtgggttatacgatggcaactacggcgttatggccggccttgaggtgattgccaccctccaggatgccgggatccgcacccgacgaccgttggcggtaaccttctttactaacgaggagggggtgcgatttcagcccgatatgatgggcagcgtggtgtttgccggcgagtatccgttggcgcaggcgctcgcggcaaaagatctcgacggtatcacgctcgatgaagcgctgcgtaacattggttataaaggcgaacgtcagccgggagatatggcggtagatagctacgttgagctgcatatcgaacagggaccaattcttgataaagagcagattgatattggcgtggttaccggcgtacagggtatttcgtggcaggaatttaccctgagaggcgtatcgaatcatgcgggtacaaccccaatgtccatgagacgtgatgccgggctggcggctgcgaaaatcgctgtttttgcccgtgagctggcgctaagccttggtggcgatcaagtagctaccgttggacatttcagcgtgaagcctaatctaatcaacgtcattcccaaccatgtcgtcatgtcagtggatctccgcaataccgataatgcgatcttatgtctggcggagcagcaattagccgaatttgtcgcgaaaacgtcgcaggaagagggcgtggagataaccagccgctcactggtgcgctttaatccggtcatctttgccgatgagatcgtcaatgcggtggaagccgaggcggagcgtcaggggctcagttaccgacgtttgccaagcggcgccggacacgatgcacaatttatggcgtcggtatgtcccgccgggatgatttttgtcccctgcgtcgatggcattagccataacgtcaaagaacatagcgcagccaaagatctgattgctggcgccaatatgctgctgcaggtggttttacagcgcgcccagcgtatggactaa

SEQ ID NO: 210597 - DNA, 1167 bp, Klebsiella pneumoniae
atgaatcagcaacagctaaagcagcagcttatcgcctggcgtcactatttgcatgcccatccggaaagcgccttcgaggagcagaatacttcacggtttattgccgaaaagctcgaagctatgggcattgaggtgcaccgcgatattggcaaaaccggggtggtggggagattgaaatgcggcgacgggaagggcgttatcgctattcgtgccgatatcgatgccattcaattgaccgaacagggagactggtcttaccgctccatgaccgccgagcggatgcacggctgcggacatgatggtcatacctgcattgcgctgggcgcggcgcagttgctattgcagcggcagaattttaacggcacggtctgctttgtttttcagcctgctgaggaacctggctatggcgccagagcgatgatggacgatggcgttattgaacgctttggcatagaggaaatctacggtctgcataatatgccgggtatgaaagccgggactatcgccacgcgagtcggtggcattatggccagtgaagataactttattattcgtattaaagggcagggagcgcatgcggcgcggccgcatatggcgaaagatccgctggtcattgcggcggaaatcatcctggctttgcagacaattgtttcgcgaaatgttgatccgaacgtgccagcggtcatttcctgtactgaactgcacaccgatggcatccgcaatgcgattccgacgcacgtcgaaatcaaaggggatacgcgcagctttgcaccggaggtacagatgctgctcgaagaacgaatgcgtaccattagcgaagcgatttgcgcgatgcacggtgcgacgtgccagttcagctatacccatgaatttgcgccaacggtgaactggcagcaatgcgttgatgtagcggtcaccgctgcgattaacgtggtaggggctgagaaggtgaacggcaacgtcgcacagatgatgatttcggaagattttggcgcttttctgcaaaaaatccccggctgtttcatctttttaggcaacggcgatagttcagatgctcagggcaatacaccgttgcataatgcctgctacgactttaatgatgagatattgctaactggcgcggagtattttgccgaggtcgtcagagcccgtttgccgcaggagtga

SEQ ID NO: 210598 - DNA, 1239 bp, Klebsiella pneumoniae
atggaacgctccagtgagaggatgctactgcgcaccatgacacaattcacttctcctgtactgcactcgctgcttgatacggatgcctataagctgcacatgcagcaggctgtcttccaccgctacggcgatgtgcatgtggcggcggagtttcgctgccgcggagacgacctgctcggcatctatgccgacgcgatccgcgagcaggtggagtccatgcgcgacctgaggctgcgggatgatgaatatcgctggctgtccacccttcccttttttcgccaggattacctcaactggctgcgcgattttcgctatgacccgagccaggtcacggtcagcaatgacaatggtaagctgaacattcgccttaccggcccatggcgggaagccatcatgtgggaagtcccgctgctggcggtgataagcgagttggtccatcgctatcgttcaccagagatgggcgtcgatcaggcgctcaacacgctggaacataagctaggcgacttcgccaccatgaccgctgacctcgacatgagcgccttccgtctgatggacttcggcacccgccgtcgtttctcacgcgaggtgcaggaaggtattgtgcggcgtctgcagcaggaaccatggtttgtcggcaccagcaattacgatctggcgcgccgtctgaatttaaccccgatgggtacccaggcccatgagtggttccaggcccaccagcagatcagccccagccttgccagcagccagcgggcggcccttgccgcctggctggaagagtatcccgaccagctgggcatcgcgctgaccgactgcatcactatggatgcgttcctgcgcgatttcggtccggaattcgccacccgctatcaggggttgcgccacgattccggcgacccggtggaatggggagaaaaagctatcgcccattatcagaagctgggtatcgatccgctgagcaaagtgctggtcttctccgacaatctcgacctggcgaaagccgtcgatctgtatcgccacttcgcctcgcgggtgaagctcagctttgggatcggcacccgtttaacctgcgatctgccgcaggttaaaccgctcaatatcgtgattaagctggtggaatgtaacggcaagccggtggcgaaactctccgacagcccggggaaaactatctgccacgataaggccttcgtccgcgccctgcgcgaagcgttcgacctgccgccgattaaaaaggcaagctaa

SEQ ID NO: 210599 - DNA, 2616 bp, Klebsiella pneumoniae
atgacacaacagccccaagccaaataccgccacgactatcgtgcgccggagtatctgattagcgatatcgatttgacctttgacctggatgccgcaaaaaccgttgttacggccgagagcaaggtctcccgccacgcggctgcgtctgatgtgccattgcgcctggacggcgaagatctgaccctgatcgctctgcaggtgaacggccagccgtggagtgactataaagaagaaaacaatcagctggtgatcggcggcctgccggagcatttcaccctgaccatcgtcaatgagatcagcccggcggcgaacaccgcgctggaaggcctgtatcagtcaggcgaagcgctgtgcacccagtgcgaagcggaaggtttccgccatatcacctggtatctggaccgtccggatgtgctggcgcgctttaccaccaaaattatcgccgataaagcgaaatacccgttcctgctttccaacggcaaccgtatggcggaaggggagctggagaacggtcgtcactgggtacagtggcaggatccgttcccgaagccgtgctatctgtttgcgctggtggccggtgattttgacgtcctgcgcgattcattccgcacccgctctggccgcgaagtggcgctggagctgtacgtcgatcgcggcaacctcgatcgcgcgccctgggcgatgacctcgctgaaaaactctatgaagtgggatgaggagcgctttggcctcgagtacgacctcgatatctatatgattgtcgccgtcgacttctttaatatgggtgccatggagaacaaaggactcaacgtctttaactccaaatatgttctggctcgtaccgataccgccaccgataaagactacctcgatattgagcgcgtgattggtcatgaatatttccataactggaccggcaaccgcgtcacctgtcgtgactggttccagctcagcctgaaagaggggctgaccgtgttccgcgatcaggagttcagttccgacctcggctcacgggcggtgaaccgcatcaacaacgtgcgcaccatgcgcgggctgcagtttgccgaagacgccagcccgatggcgcacccgatccgtccggatatggttatcgagatgaacaacttctacaccctgacggtctatgaaaagggtgccgaagtgatccgcatgttgcacaccctgctgggtgaagaaaacttccagaaagggatgcagctgtactttgaacgccatgacggcagcgccgccacctgcgacgatttcgtgcaggcgatggaagatgcctctaacgtcgacctgtcgcacttccgcctctggtacagccagtccggtacgccaatcgtcaccgtgcatgacgactataatccggagaccgagcagtatacgttgaccatcagccagcgtacgccgccgaccgccgagcaggccgagaagcagccgctgcatatcccgtttgccattgagctgtacgataacgagggcaaggtgatccccctgcagaagggcggtcacccggtacacccggtgcttaatgtgacccaggccgagcagactttcgtcttcgataacgtttatttccagccggtgccggcgctgctgtgcgaattttcagcgcctgtgaaactggaatacaagtggagcgatcagcagctgaccttcctgatgcgtcacgcgcggaatgatttctcgcgctgggatgcggcgcagagcctgctggcgacttacatcaagctgaacgtcaaccgccatcagcaggggcagccgctgtcgctgccggtgcacgtagcggatgccttccgcgccatcctgctggatgagaagattgatccggcgctggccgctgagatcttaaccctgccgtcagccaacgaaatcgccgagatgttcgcgattatcgatccgatcgccatcgccgccgtgcgcgaagcgctcacccgcaccctggcgaacgaactggcggacgaattcctcgcggtttataacgccaataagctcgacagctatcgggtggagcacgccgatattggtaagcgcgctctgcgcaatacctgcctgcgctatctggcgtttgcggaaccgacgctgggcgataagctggtggcgacgcagtatcaccaggcagataacatgaccgacgcgctggccgccctgtcagcggcggttgccgctgagttgccgtgccgcgatgcgctgatgcaggagtacgatgacaaatggcatcaggacggtctggtgatggataagtggtttatcctgcagtccaccagcccggcagccaacgtggtggaaaccgtgcgcggtctgctgaaccaccgttcgttcagcatgagcaacccgaaccgtgtgcgctcgttaatcggcgctttcgccagcagcaacccggcggcgttccatgctgaagatggcagcggctatcagttcctggtggagatgctgaccgagcttaaccagcgtaacccgcaggtggcgtcgcgcctgattgagccgttgattcgtctgaagcgttatgatgagaagcgacaggcgctgatgcgcgccgcgctggagcagctgaaggggctggagaatctctctggcgacctgttcgagaaaatcagtaaggcgctggcgtaa

SEQ ID NO: 210600 - DNA, 774 bp, Klebsiella pneumoniae
atgaacactgcccgtctcaacccaggtatcccgctgctgctgaacggggtgacgaaacgctatggcgacaacaccattcttaacgagctggatctgcatattcccagcggccagtttgtggcggtggtgggccgcagcggcggcggcaaaagtaccctgctgcgcctgctggcaggtctggaaaaaccaaacgccggcgaactgctggctggcgcgacgcccctggcggcgatccaggacgacacccggatgatgtttcaggatgcgcgcctgctgccgtggaaaacagtgattgataacgtggggctggggctaaaaggcgcctggcgcgacgccgccctgcaggcgttggccagcgtcggacttgaaagccgcgcacaggagtggccggccgcgctgtcgggtgggcagaagcagcgcgttgcgctggcccgcgcgctgatccatcgcccgcgcctgctgctgctggacgaaccgctgggggcgctggatgccctcacccgtctggagatgcaggagctgatcgtctccctgtggcaggagcatggctttacggtcctgctggtcacgcacgacgtcagtgaagcggtggccatggccgatcgggtgctgttaattgaagagaagaagattggcctcgatttaagcgtggatatcccgcgaccgcggcgcaccggttcggcgaagctggccgagctggaggctgaagtactggatcgggtgatgaaacgcggcgacagcgagcgtgcgccgcgtttgtttagtcatggctga

SEQ ID NO: 210601 - DNA, 792 bp, Klebsiella pneumoniae
atggcaaaatcaacccatcccctgttgttacgcctcgccccctggctgctgccggtagggacggtcattgtctggcagctggcctcgtccgtcggctggctgtcgacgcgggtgctgccctcgccggagggggtattgaaagcgttctggaccctctcggccagcggtgagctgtggcagcatctggccatcagctcgtggcgggcgctggtcggcttcgccatcggcggctcgatcgggctaatactcggcctgatcagcggcctgtctcgctggggcgagcgtctgctggatacctcgatccagatgctgcgcaatgtcccgcatctggcgctgatcccgctggtgatcttgtggttcggcatcgatgagaccgccaagatcttccttgtctcgctgggcaccctgttcccgatctatatcaacacctggcacgggatccgcaatattgaccgtgggctggttgagatggcgcgcagctatggcttatccggcttcgccctgttccgtcacgtgatattacccggcgccctgccctcagttatagtcggcgtgcgttttgcccttggtctgatgtggctgacgcttattgtcgccgaaactatctcggcgaatgccggcatcggttatctggcgatgaacgcgcgtgaatttctgcaaaccgacgtggtggtagtggcgatcatcctttacgccatccttggcaaactggccgacgtctgcgcccagctgctggaacggctctggctgcgctggaatccggcgtatcatcttcaggaggctaacgcatga

SEQ ID NO: 210602 - DNA, 1146 bp, Klebsiella pneumoniae
atgagtctgaatatgttctggtttttaccgacccatggtgatggtcgttatctgggtaccgaagagggtgcccgtccggtcgattatggctatctgcagcaaatcgcgcagacggcggatcggctgggcttcaccggcgtgctgatcccgaccggacgctcttgtgaggatgcgtggctggtcgcggcctcaatgatcccggtgacgcagcggctgaagttccttgtcgccctcaggccaagcgtggtatcgccgacggtggccgcgcgtcaggcggcgaccctggaccggctgtcaaacggccgggcgctgttcaatctggtcaccggcagcgatcctgccgaactggcaggcgacggcgtcttcctcgaccacaccgagcgctatgaggcctcggctgaatttacccacatctggcgtaagctgatggagggagaaaccgtcacctttaacggcaagcatcagcgcgttcgcgacgccaaactgctgtttccgccactgcagcagccacgtccaccgctctatttcggcggctcgtctgaggtggcgcaggagctggccgctgagcaggtcgatctttatcttacctggggagaaccgccggcccaggtggcagagaaaatagctcaggtgcgagagaaagccgcccggcatggtcgccaggtgcgttttggcatccgtctgcacgtgatcgtcagggaaaccaacgaggaagcgtggcaggcggcggacagccttatctcccatcttgacgacgagacgatcgcccgcgcccaggcggctttcgccagaaccgactccgttggacagcaaaggatggcggccctgcacaacgggcgacgcgataagctggaaatcagccccaacctgtgggctggcgtgggtttagcgcgcggcggcgccgggaccgcgctggtgggcgatgccgccaccgttgccgaaaggatcaatgaatacgccgcgctgggtatcgatagctttatcttttccggctatccgcatctggaagaggcgtaccgggtcggagagctgctgttccccctgcttgacgtcgcggtgccgtccatcccgcagccgcaaaacctgcgtctgcagggggaagcggtcgccaacgagtttattccgcgtaaagtagcgcaaagctga

SEQ ID NO: 210603 - DNA, 963 bp, Klebsiella pneumoniae
atgcttaatcctctccgcgccctgactctgggcggactgctgctattctcttcgctgggtcacgccgccccggcggcacctgacgctctgcgcatcggctaccaaaaaggcagtgtcagcatggtgctggcgaagagccatcagctgctggagcagcgctatccgcaaacccatatctcgtggattgagttcccggccggtccgcagatgctggaggcgctgaacgtcggcagcattgatatcggcagtaccggcgatattccgcctatctttgcccaggcggcaggcgccgatttggtctatatcggcgcggagccgcccaagcccaaggcggaggtgatcctggtggcgcagggcagcccgattcataacgttgctgagttaaaagggaaaaaggtcgctttccagaaaggctccagctcccacaatctgctgctgcgcgccctgcagctcgcaggtctgaaatttagcgatattcagccggtttaccttgctcccgccgatgcgcgcgccgccttccagcagggcaatgtcgacgcatgggccatctgggatccgtactactccgccgcgctgctgcagggcggcgtccgggtactcactgacggaacagatctgaaacagacgggatccttctatcttgcttcccggccctacgctgaacgcaatggcgctttcattgaaggcgtactcgacacctttactcaggccgatgccctgacccacagccaacgcgcgcaaagtattacgctgctggcgaaaacgatgggcttaccggaggcggtgatcgacagctatctggaccatcgtccccccaccgcggttaccccggtgagcgccgaaaccgccgctcgccagcagcagacggcagacctgttctacgagaacaagctggtgccaaaaaaagttgatatccgggcccgcatctggcagcccaccgccacacaaggagcgaaatcatga

SEQ ID NO: 210604 - DNA, 576 bp, Klebsiella pneumoniae
atgcgcgtcattacgcttgcgggcagcccgcgttacccttcccgttccagcgccttgctggaatacgccagagagacgctcaccgccgccgatatcgaagtctgccactggcatctgcagaactttgccccggaagacctcctgtacgctcgttttgacaacccggcgctgcagacgctcaatgaacagctggccggggctgatggcctgatcatcgccacgccggtgtataaagcctcgttctccggcgcgctgaaaacgctgctcgacctgctgcctgagcgagcgctggagggcaaaattgtgctgccgctggccaccggcggcaccatcgctcacatgctggcggtggactacgcgctgaagccagtgctgaatgccctcaaggcccaggagatcctccatggcgtcttcgctgatgacagccaggtgaccgattaccagcataagccgcagtttaccgcgaatctgcagcggcgccttgatgacgccctggagaccttctggcaggcgctgcatcgccccagcagccgtgcgccgtcgttaacatctctgcgtggggtggagcatgcttaa

SEQ ID NO: 210605 - DNA, 1011 bp, Klebsiella pneumoniae; identical to SEQ ID NO: 136727

SEQ ID NO: 210606 - DNA, 543 bp, Klebsiella pneumoniae
atgcggattaaacctgacgataactggcgttggtattacgatgaagagcacgaccgcatgatgctcgatctggccaatggcatgttatttcgctcgcgcttcgcccggcgcatgctgactccggatgcctttgccccttctggattttgcgttgatgacgccgcgctctatttctcttttgaagaaaaatgtcgcgatctcgagctatcgaaagagcagcgggcggaattagtccttaacgcgctcaccgccatccgttttctcaaaccgcagatgccgaaaagctggcactttatcgcccatacccatcactggcagccgagcggcggcgacgccgcctgcgtttggctgagcgataccggcgagcaggtgaatttactggtggtggagccgggcgataacgccgcgctctgtctgttggctcagccgggtctcacccttgccggccgcgtcatgcagctgggcgatgtcataaaaatcatgaatgacagactgcagccggcgcagagcgcggtcagctacagtctggggcaggcggtttaa

SEQ ID NO: 210607 - DNA, 1110 bp, Klebsiella pneumoniae
atggtaacgctatcgcgactttttattcatcctgttaaatccatgcgcggcataggcctgacccacgcctttgctgatatcagcggcctggccttcgatcgcctgtttatggtcaccgaaaccgacgggacctttattaccgctcgccagtttccgcaaatggtgaaatttattccggcgccgctgcatgatggccttcacctgaccgcaccggacggcagcagcgccgtggtgcgttttagtgatttcgccacgcaggccgagccgaccgaagtctggggcaaccattttaccgccctcatcgcgcccgccgccgttaaccagtggctcagcggctttttcaagcgcgatgtccagctgcgctggctggggccgcagctaacccgccgggtaaagcgccatgatgcggtgccgctctccttcgccgacggctacccttacctgctggctaacgaggcctccctgcgcgatctgcaacagcgctgcccggccagcgtaagcatagaacagtttcgccctaaccttgtggtcaccggcgcggcggcctgggatgaagatagctggaaagtgatccgcatcggcgaggtggtgtttgatgtcgctaagccgtgcagccgctgcatttttaccaccgtcagcccggagcgcggtcagaagcatcccgccggggagccgctggaaaccttaaagcgttttcgtaccgcgctggacaatggcgatgtcgattttggccagaacctgattgcccgcaacagcggggtgatccgggtgggagatgaagtggaaatccttacccgcggcccggcgaaagcctacggggcaggtgaaagcgacgataccccggctcccgaggcgcagcagcaggctacggttgccatcgaatggcagggtcaacagtttaccggcaataaccagcaggtgctgctggagcaactggaacaacagggcattcgcgtaccctattcgtgtcgggcggggatctgcggcagctgccgcatccggctggaagagggagaagtgagtccgttaaagaaaaacgcggttgccggagatggcactattctcgcctgcagctgtgtaccgaaaacagcgctacgcctggcgccttaa

SEQ ID NO: 210608 - DNA, 2106 bp, Klebsiella pneumoniae
atgaattctctgtttgccagtacggctcgtgggctggaagagctgttaaaaactgaactggaagggcttggcgcgacggactgccaggtagtccagggcggggtccattttcagggggatacgcgcctgctgtatcaaagcctgatgtggagccggctggcttcgcgcatcatgctgccgctgggcgaatgtcgcgtatacagcgatctggatctgtacctcggcgtacaggccattccgtggacggagatgttcaaccctggcgccaccttcgcggtgcattttagcggcctcaatgacgagatccgtaacagccagtacggcgcgctgaaggttaaagacgccattgtcgacagcttcacccgtaagaatctgccgcgcccgaacgtcgatcgtgagtcgcccgatctgcggatcaacgtctggctgaacaaagagacggcgcacatctcgctggatctgagcggcgaaggcctgcacctgcgcggctatcgcgatggtaccggaatggcgccgatcaaagaaaacctcgcggcggcgatcgtcatgcgctctggctgggtaccaggtacgccgctgctcgatccgatgtgcggctccggtaccctgctgattgaagcggcgatgctggcgaccgaccgcgcgccgggcctgcaccgcggccactggggctttggcggctgggcgcagcacgatgacgccatctggaaagaggtgaaggcggaagcgcaaacccgcgctcgtcagggattggcagcgtatgagtcacgcttctacggctcagacgtcgacgcgcgcgtaatcgagcgcgcgcgccgcaacgcccgccgcgccggcattggcgagctgatcgattttgacgtgaaagacgtcgcccaactgaacaacccgctaccgaaaggcccgtacgggacggtgatcagtaacccgccgtacggcgaacgtctggaaagcgagccagcgctgatcgctctgcacagcctgcttggccggataatgaaaagtcagttcggcggctggaacctgtcggtattcagcgcttcgccggagctgctgagttgcctgcagctgcgtgccgacaagcagtttaaagccaagaacggcccgctggactgcgtgcagaagaattatcacctggcggagagcgaaggcggcaagccggcgatgctggcggaggattttgctaaccgtctgcgtaaaaacctgaagaagtttgaaaaatgggcccgccaggaaggaattgaatgctatcgcctgtacgatgctgatctaccggaatacaacgtggccattgaccgctatgccgactgggtggtggtccaggagtatgccccgccgaaaaccgtcgacgcgcataaggcgcgccagcgtctgttcgacatcatcgctgcgactatcgccgtactggacatggcgcctaacaagttggtgctgaaaacccgtgaacggcagaaggggaaaaaccagtatcagaagatggcggagaagggcgactttattgaggtgcaggagtataacgcgcgcctgtgggtcaacctcaccgactacctggataccggtctgttcctcgaccaccgtatcgcccgtcgcatgctcggccagatgagtaaaggtaaggacttcctgaacctgttctcctataccggcagcgccagcgtccacgcaggcctcggcggtgcgcgatccaccaccacggtggatatgtcacgcacctacctggagtgggcggaacgcaacctgcgtctcaatggcctgaccggccgcgcgcatcgcctgatgcaggcggacgtgctgggttggctgcgggagagcaccgagcagttcgatctgatctttatcgatccgccgaccttttccaactccaaacgaatggaagatgcgtttgacgtccagcgcgatcacattcgcctgatgaccgatctaaaacgtctgctgcgtaaaggcggcaccattatgttctcgaataacaaacgcggtttccgtatggatcatgacgggctggcggcgcttggcctgaaggcgcaagagatttcgcaaaaaacgctgtcgcaggattttgcccgcaaccgtcagatccacaactgctggctgattaccgcagcctga

SEQ ID NO: 210609 - DNA, 1908 bp, Klebsiella pneumoniae
atgtcactgattagtatgcacggcgcctggctttccttcagcgatgcgccgctgctggataatgccgagctgcatattgaagataacgaacgcgtctgcctcgtcggacgcaacggcgccggtaaatctaccctgatgaagatcctcaaccgcgaacaggggctggatgacggacgcatcatttatgaacaggacctgatcgtggcgcgtctgcagcaggatccgccgcggaacgttgctggtacggtgtacgattttgtcgccgaagggatcgccgagcaggcggcttatctgaaagcctaccatgacgtgtcgcatcaggtgatgaccgagccgagcgacaaaaatttaaatgaactggcgcgcctgcaggagcagctcgataacctgggactatggcagctggacagccgcattaacgaagtgattgagcagctgggccttgacgccaatgcgcagctggcgtcgctgtccggtggctggctacgtaaagcggcgctgggccgcgccctggtcagtgggccgcgcgtgctgctgttggatgagcccactaaccacctcgatatcgaaaccatcgactggctggaaggtttcctgaaaacctttaaaggcacgattatctttatttcgcatgaccgttcctttatccgcaatatggcgacgcgcattgtcgacctcgatcgtggcaagctggtgacctatccgggaaattacgatcagtatctcctcgataaagaagaagccctgcgggtcgaagaactgcagaatgcggaatttgaccgcaagctggcccaggaagaggtgtggatccgtcagggtatcaaagcgcgccggacccgtaacgaaggccgagtccgcgcgctgaaggcgatgcgccgcgagcgcggtgagcgccgggaagtgatgggcagcgcgaagatgcaggttgaggaggcttcccgttccggcaaaatcgtctttgagatggaaaacgtcaactatcaggttgacggcaaagtgctggtgaaggatttctccgcacagatccagcgcggcgacaagatcgccctgatcggccccaacggctgcgggaaaaccacgttgctgaagctgatgctcggccagctgcaggccgacagcgggcggatccatgttggcaccaagctggaggtcgcctacttcgaccagcaccgcgcggagttggatccggataaaacggtgatggacaacctggcggaaggcaaacaggaggtaatggttaacggtaaaccacgccatgtgctgggttatctacaggacttcctgttccatccaaaacgagcgatgaccccggtacgtgcgctttccggaggggaacgtaaccgcctgctgctggcccggctgttcctgaaacccagcaatctgctgatccttgatgaaccgactaacgacctcgatgttgaaacgctggagctgctggaagagctgatcgatggctatcaggggaccgtgatgctggtgagccacgatcgtcagtttgtcgacaataccgtgaccgagtgctggatcttcgaaggcggcggtcgtattggccagtacgtcggcggctatcacgacgcccgcggtcagcaggcccagtctttggcgcaaaagcagacggtcgttaaaaaaacgacggaagtcgctcagccaaaagcagaaactgtcaaacgcggcgggaacaaactaagctataacctgcagcgcgagctggaacaactgccgcagaagctggaggctctcgaggccgaactgcagacgctgcaggatcaggttgccgatcccgatttcttcgggcaaccgcacgatcgcacgcagcaggtgctggcgcagctggccgaagcggagcaggcgctggaagcggcctttgaacgctgggaatatctcgaaggattaaagaacggcgcctga

SEQ ID NO: 210610 - DNA, 1269 bp, Klebsiella pneumoniae
atgtgcgatcatcatcatgctgcgcgacatattctatgtccccaatgtgatttgctggtggctttgccgcagcttgagcatcgccagaaagccgcctgcccgcgctgcggtacaacgttaaccaccacgtgggacgcgcctcgccagcgtcccacggcgtatgcgctggtcgcgctgtttatgctgctgctggccaacctgttcccttttatctatatgaaagtgggcggcatcagtagcgaaatagagctgctggaaattcccaacgtactgtttaccgaggattacgccagtctcgggactttctttttactctttgttcaattagtgccggcgttttgcctggtcaccattttgctgctggttaatcgggtcagaatgcctgccggcctgaagacgttccttgcgcgaattctctttcaactgaaaacctggggcatggcggagatctttcttgccggcgtgctggtgagcttcgtcaagctgatggcctacggtgatatcggcatcggtctgagctttgttccctggtgtatgttttgcctgctgcagttacgtacttttcagtgcgtcgaccgccgctggctatgggatgatattgcccccatgccggccattacccagccgctgaaggtcggggtgaccggtatccgtcaggggctgcgctcctgtgcctgctgtacggcggtgttgccggtcgatcagaccgcctgcccgcgctgtaacagtaaaggaacggcgcggcgcaaaaatagcctgcagtggacgctggcgctgctggtgacgtcatttatcctttatctccctgccaacattatgccgatcatgatcaccgatctgctgggcgataaaatgccatcgaccattatggccggggtgattttactgtggagcgaaggttcttatccggtggcgctggtgatctttatcgccagtattatggtgccgacgctgaagatgatcgctatcgcctggttgtgctggaacgccaacggcaacggcgcgcgagattcggagcgcatgcatctgatctatgaggtggtggaatttgttggccgctggtcaatgattgacgtttttgtcatcgccgtgctctctgcgctggtccgcatgggagggttaatgaatatctatccagccatcggcgcggtcatgtttgcgctggtggtggtgatgaccatgttttcagccatgacatttgatccccgtttactgtgggatcgtgagccagattcaagccatgaggaaatacaacaacatggaaaataa

SEQ ID NO: 210611 - DNA, 1638 bp, Klebsiella pneumoniae
atggaaaataagagcggagaagcgaaagtgcagaaggtgaagaactggtcaccggtgtggatcttccctatcgtcactgcgctgatcggggcatggatcctgttttatcattacagccatcaggggcctgaggtcacgctgatcaccaccaatgcggaagggattgaagggggaaaaacccggatcaagagccgcagcgtagacgttggggtggtggagagcgcgacgttgaccgacgatctcacccacgtggaaatcaaagcccgcctcaattccgggatgcagaagctgctgcacaacgattccgtcttctgggtggtaaagccgcaggttggccgcgaggggatcagcggtcttgggacattgttgtccggggcctatattgagcttcagccgggaacgaaaggttcggtgccagcgcagtatccgctactggattctccgccgctggcctcgccggatgccaaggggatccgtattctgctggaaagcagcaaggcgggccagctgtcgccgggcgatccggtgttgttccgcggctatcgcgtggggtcagtggaaaccagcaccttcgatacgcagaaacgtcgtataacttaccagctgttcatcaatgcgccgaacgatcgcctggtgaccaccaacgttcgtttctggaaagacagcgggatcgctgtagatttgacctcggcggggatgcgcgtcgagatgggctcgctgtcgacgctgtttggcggcggggtgagcttcgatattcctgaaggactggacctcggcgagccggtggcgaataaaacggaataccatctgtttgacgatcagaagagcatccaggattcagtctttaccgagcatatcgattacgtcatgttcttcaaagactcggttcgcggcctgcagccgggcgcgccggtggagttccgcggtatccgtctgggcaccgtcggcaaagtgccgttctttattccggggctgaagcagcgtttgaacgatgactatcgtattccagtggaagtgcgggttgaaccgcaacggctgattaatcagcttggcggcgatccgaatattcgcgcccacattgacgatctgatcaaccgcggactgcgcggctcgctgaaaaccggtaacctggtgaccggcgcgctgtatatcgatctcgacttctatccgaaggcgcccccgcgcgggaaaatacaggagtttaacggctatccgattatcccgaccatcagcggtggactggcacagatccagcagcgtctgatggatgcgctggataagattaataacctgccgattaatccgctgctggagcaggcgaccagtaccctggcgcagagcgagaagacgatgcagcacgtgcagaccacgctggataatctgaataagatcacctccagccagtcaatgcagcagctgcccgccgatatgcagacgacgctgcgtgagctgaaccgtagcatgcagggcttccagcctggctctgcggcctacaataagatggtggccgatatgcagcgtctggatcaggtgctgcgtgagctgcagccggttctgaaaacgctaaatgataagagcaatgcgctggtatttgaggcgaaggataaaaaagatccacagccgaagggagcgaaataa

SEQ ID NO: 210612 - DNA, 564 bp, Klebsiella pneumoniae; identical to SEQ ID NO: 136965

SEQ ID NO: 210613 - DNA, 519 bp, Klebsiella pneumoniae; identical to SEQ ID NO: 136964

SEQ ID NO: 210614 - DNA, 1758 bp, Klebsiella pneumoniae
ttgaccattacgaaactgacccgaaccgaccttgcgcctgatctggaagcttaccaggcgctgtttgctcaagctgaactttcccatccggccccctccctctcgggcgatctgcagccgcgtttgttctatgggcttgagcagctgctgtacacgccggcagtctcctccttcatgctggtgaaagcccctgaagagccggaatatctgcaatggctggcggctgaaacccggactctgcacgagcctgccgcaccgctttacggcgtccgctatgaggtaaccgacgctcaggtgacgctcgcaccggcgcagggcgctgaggataatttcgccagcactgccccggtcgtgatggccgattgggtagaagcggaacagctgtttggctgcgtacgccagtttaacggtgcaatcaccctcgagcctgggctggtccatcaggccaacggcggcgtgcttgtgctttcgctacgtacactgctggcgcaaccgctgctgtgggtgcgtctgaaaaatatggtgactcgtcagcgctttgactggctttctatggatgaatcgcgtccgctgccggtcagcattccctctatgccgctgagtctgaaaatcatcctggtgggcgaacgcgaatcgctggccgatttccaggaaatggagccggagctggctgcgcaggcgatctatagcgagtatgaagacactttgcagtttgctgacgccgacacgctaaaggcctggtgccagtgggtatggcagaatgcgcagcagctggagctgccgggcccggcagccgatgcctggcctctgctgatcgatgagggaacgcgctataccggcgatcaggagaccctgccgctcagtccgctatggataacccgccagctgcgggaggctgccgccttctgcgaaggcgaagagattaccggcgaagcgatgcagaccatgctggcgcgccgggtatggcgtgaaggctacctggcggagcgtatgcaggatgaaatcctgcaggaacagatcctgattgaaaccgaaggcgaatgcgtcgggcagatcaacgccctctcggtgatcgaattccccggtcatccacgcgcgttcggtgaaccttcacgcatcagctgcgtcgtgcacattggcgatggcgaatttatcgacgtcgaacgtaaagccgagctgggcggtaacattcatgcgaaaggcatgatgatcatgcaggcttttctgatgtccgagctggagctggagcagcagcttcccttcactgcttcgctgacctttgagcagtcctacagtgaagtggatggcgacagcgcctccatggcggaactctgcgccttaatcagcgccctggccaacgtaccgataaatcagagcatcgcgatcaccggctccgtcgaccagtttggtcgcgtgcagccggtcggcggcctgaacgagaaaattgaaggcttcttcactatctgtcagcagcgcggtttaaccggcaaacagggagtgattatccctgccgccaacgttcgtcatctcagcctgagccacgagctacgtcaggccgttgccgacaaccagtttgctatctgggccattgacgatattaccgaagcgctgccgatgttgacccagctgatgtgggacggtgaaggacagacgctgcgacaaaccattcaggagcggatagcgcaggcgacccagcaagagactcgccatcgttttccgtggccgctacgctggttaggtgggacaagttctaactga

SEQ ID NO: 210615 - DNA, 453 bp, Klebsiella pneumoniae; identical to SEQ ID NO: 136962

SEQ ID NO: 210616 - DNA, 1071 bp, Klebsiella pneumoniae
atgaaaaagacagctatcgcgattgcagtggcactggctggcttcgctaccgtagcgcaggccgctccgaaagataacacctggtatgcaggtggtaaactgggttggtcccagtatcacgacaccggtttctacggtaacggtttccagaacaacaacggtccgacccgtaacgatcagcttggtgctggtgcgtttggtggttaccaggttaacccgtacctcggtttcgaaatgggttatgactggctgggccgtatggcatataaaggcagcgttgacaacggtgctttcaaagctcagggcgttcagctgaccgctaaactgggttacccgatcactgacgatctggacatctacacccgtctgggcggcatggtttggcgcgctgactccaaaggcaactacgcttctaccggcgtttcccgtagcgaacacgacactggcgtttccccagtatttgctggcggcgtagagtgggctgttactcgtgacatcgctacccgtctggaataccagtgggttaacaacatcggcgacgcgggcactgtgggtacccgtcctgataacggcatgctgagcctgggcgtttcctaccgcttcggtcaggaagatgctgcaccggttgttgctccggctccggctccggctccggaagtggctaccaagcacttcaccctgaagtctgacgttctgttcaacttcaacaaagctaccctgaaaccggaaggtcagcaggctctggatcagctgtacactcagctgagcaacatggatccgaaagacggttccgctgttgttctgggctacaccgaccgcatcggttccgaagcttacaaccagcagctgtctgagaaacgtgctcagtccgttgttgactacctggttgctaaaggcatcccggctggcaaaatctccgctcgcggcatgggtgaatccaacccggttactggcaacacctgtgacaacgtgaaagctcgcgctgccctgatcgattgcctggctccggatcgtcgtgtagagatcgaagttaaaggctacaaagaagttgtaactcagccggcggcttaa

SEQ ID NO: 210617 - DNA, 510 bp, Klebsiella pneumoniae; identical to SEQ ID NO: 136960

SEQ ID NO: 210618 - DNA, 597 bp, Klebsiella pneumoniae
atgagaaaactagtttgtccgcggctcccgcaatttcaggcctgcgtctcaccgctgggtcaactgcatactcgtccgctctttggcggctacagcctggctattgatgatacggtgtttgcgatggtggccgaggggaacatttatctgaaggcctgcgagcagagcgctgcttatcgggtggaacatcgtaatcctctgttaacgctgcgccgacacggccgcatagtgccgctgaagtattatcaaattgacgacactttatggcgcgatgagcagcagctttttcggctatcgctactgtcgtggcagagtgcgcagcgcgaaaagaactaccgacgggcgtcgggccgcctgaaggatttacccaatatcagctttcatatggaattgcagctgattcacgcgggcataccggacgttaggacgttgcgggaagttggtgcgcaggaggcatggctgaggctacgcgtaaataatgcttctttatcgctgagcgtattgctggcgctggagggggcgattgccggggtacatgccgccgcgctcccgacgccacggcgtcaggagcttctcgaatgggcggctacccggtag

SEQ ID NO: 210619 - DNA, 2136 bp, Klebsiella pneumoniae
atgattagccccctgctacgccgctacacctggaacagcgcctggctttataacgtacgaatttttatcgcgctctgcggcacaacgctgtttccctggtggatcggcgaagtcaaactgaccatccccctcaccctcggcgtcgtggctgcggctctgaccgaccttgacgaccgtctggctggccgtctgcgtaatcttgccattactctggtttgcttttttatcgcctccgcctccgtggagctgctgtttccgtggccgccgctgtttgcccttggtttaaccgtgtctaccatcggctttattttgcttggcggcctcggtcagcgctatgcgaccattgccttcggcgccctgcttatcgccatctacaccatgctcggcgtcacgctgtacgatcattggtatctgcagccgttgttcctgctggcgggggcagtgtggtacaacctgctgacgctgtccgggcacctgatctttccgattcgtccattgcaggacaacctggcgcgtagctatgagcagctggcccgctatcttgagctcaaatcccggctgtttgatcctgaccttgaggatgagagccaggcgccgctgtacgatctggcgctcgctaatggccagctggtagctacgcttaaccaaaccaaggtctcgctgctaacccgactgcgaggcgatcggggccagcgcggcacccgccgcaccctgcagtactactttgtggcccaggatattcatgaacgcgccagctcatcgcatattcagtatcaaaccctacgcgatcaatttcgctatagcgatgtgatgttccgtttccagcgaatgctttcgatgcaggcgcaggcctgccagaaactgtcgcgggcgattctgttacgcgaaccctatcagcatgatgcccattttgaacgggcgttcatgcatctcgatgcggcacttgagcgcgtgcgcgccggcggcgcatccgacgagcagctcaacgccctagggtatttactgaataacctgcgcgctatcgatgctcagctggccaccattgaatcggtgcaaaccaccgcgcctgccgggagtaataccgagacgctgctggccgacgacagacttggcggtctgagcgatatctggctgcgcctgcagcgcaatatgtcgccagagtcggcccttttccgccacgcagtacgtatgtcgttggtgctctgcgccggctatgcctttatccagtttaccgggctccagcatggctactggatcctgctaaccagcctgttcgtctgtcagccgaactataacgccacccgccatcgcctggcgctaaggattatcggcacgctggttggggtggcgatcggcctgccggtcctgctgctggttccctctgttgaagggcaactgctgttgatcgtcctgaccggcgtgctgttttttgccttccgtaacgtgcagtacgcccatgccacgatgtttattacgctgctggtgctgctgtgctttaacctgcttggcgagggctttgaagtcgcgctgccgcgtatcattgatacgctgatcggctgcgccatcgcctgggcagcggtcagcttcatctggccggactggaaattccgcaacctgccgcgggtgctggaccgggcaatgaacgcgaactgccgctatctggacgcgattctggagcagtatcatcagggccgcgacaaccggctggcctaccgtgtcgcgcgtcgtgacgcctacaaccgtgatgctgagctggcctccgtcgtctcgaacttatcgactgaaccacgcgcggatgccacccagcgagaaaccgcctttcgtctgctatgcctcaaccacacgttcaccagctatatctccgctcttggcgcgcatcgggaaaaactgtccacgccggaaatcctcgccctgctggatgatgcagtctgttatgtggatgatgccttgcatcatacccccgcggatgaacagcgggtgcaacaggctttgaacagcctgcaaagccggatccatcatctggaaccgcgcgcggacagtaaggaacccttggtcttacagcagattggcctgctgctggcgctgctgcctgaaatctgccgcctgcagcaacgggtccacgcccaaaccgaataa

SEQ ID NO: 210620 - DNA, 447 bp, Klebsiella pneumoniae
atgcgtaccattctgaatattttgaactttatccttggcggtttcgccaccactctaggctggctactcgccaccctggtcagcatcattctgatcgtcacgctgccgctgactcgttcctgctgggaaatcactcgcctttcgttatttccctacggtaacgaggcgattcatgttgacgagctcgagccggggcgcaaaaacggtctactgaacgccggcggtaccgttctgaacattctgtggttcatttttttcggctggtggctctgcctgatgcacattttcagcggtatagctcagtgcctgactatcataggcatcccggtggggatcgcgaatttcaaaatcgccgccatcgccctctggccggtgggtcgccgggtcgtttctgtggaaaccgcgcgtgctgcgcgtgaagccaatgcgcgtcgtcgctttcagtaa

SEQ ID NO: 210621 - DNA, 2055 bp, Klebsiella pneumoniae
atggaacttaaagcgacaacattgggcaaacgcatggctcagcacccttatgatcgggtgcagctactgaacgccggggtaaaagtttccggcgatcgtcatgagtatcttatacctttcaatcagttattgtcagtgcattgtaagcgcggtctggtctggggcgaactggagtttgtgctaccggacgcgaaagtcgtgcgtttgcacggtaccgagtggagcgaaacgcagcgcttttatcatcatttacatacgctctggcagcagtggagcacggagatgagcgatatcgccgccggcgtgctgaagcagcagctggcgacgatcgagcacactcgcgcagaaggcaagtggctaacccgtcagcaggtggcggatgttcaggataatatacgccatgcgttgactggtttgccgatgcccaccagtcggcttgatgcctttgataactgccgggagctgtggcgggagtgtcagcgctggttaggcgatattgaagcgacgcgtctggcccataaccaggcctttaccgaggcgatgctggagcaatatcgcgaattttttgatagcgttgagtcgtccccgctcaatgcgtcacaagcgcgtgcggtagtgaacggcgagcgctccctgctggtgctggcgggagcgggcagcggtaaaacctcggtactggtggcgcgagcgggctggctgctggcgcggggagaagccgcggcagatcaaattttgctgctggcattcggccgccaggcggcgcaggaaatggatgagcggatccgcgagcgtctggcatcagatgatattaccgcgcgtactttccattcgctggcgttgcatattattcagcagggcagcaaaaaagtgcccactatcagtaagctggaaagcgatactgcggcccgccacgcattgctgctgaaaagctggcaaaagcagtgccaggagaaaaaagcgcaggcgaaaggttggcgcctgtggctggaagaagagatgggctggcaactgccggagggggacttctggcaggacaaaaaggtgcagcggcggatggccagccggcttgaccgctgggtgagcctgatgcgcatgcacggcggctcccaggcggagatgattgccggggcgccggaagcggtacgcgacctgttcagtaaacgggtgaagctgatgtcgcctctgatgaaagactggaaagcggcgctcaaggccgagaatgcggtcgatttttccggcctgatccatcaggcggtcaatattctcgataaaggccgcttcgtcagcccatggaaacacattctggtggatgaatttcaagatatttcgccgcagcgagcctcgctgttggccgcgttacgccggcagaatagccaaaccacgctctttgccgtcggggatgactggcaggcgatctatcggttcagcggggcgcagctttctctgaccaccgcattcaaccactactttggcgaaggggattgctgtgcgctggataccacctatcgctttaacgggcgtatcggcgaaatagccaatggctttatccagcaaaatccgcatcagttaagcaaaccgctgaacagccttatggcaggtgataaaaaggccgtcacgctgttagccgacgacaagctggacgatcttctggataagctgagcggttacgttaagcccgagcagcgcatcctgctgcttgcccgttatcaccatctgaagcctgaggcgctcaacaaagcggcgacgcgctggccgcacctgcagcttgattttatgacgattcatgccagcaaaggtcagcaggctgactttgtcattgtgttgggactacaggatggggaggatgcgtttccggccccggcgcgcgagtcgattatggagcaggcgctcctgccgcagccggaagattttccggatgcggaggagcgtagactgttgtacgtggcgctcacccgcgctcgtcaccgggtatggctgttatttaacaaggcgcaaccttcgccgtttgtcgagatcctgcaggcgctggatgtgcccgtggccaggaagccgtaa

SEQ ID NO: 210622 - DNA, 474 bp, Klebsiella pneumoniae
atgtggaatgaaaatatggaactgacaacacgtaccctgcctgcgcaaaaacatatcgcgctggtggctcacgatcactgcaaagatatgctgatgaaatgggttgctcgccatcaggcgctgctggcgcaacatattttgtatgctaccggcactaccggtaatctcgtctcccgggctaccggcctggaggttaatgccatgctgagcggtccgatgggcggcgaccagcaggtgggtgccctcatttcagaaggcaaaatcgacgtgctgatcttcttctgggatccgctgaacgccgttccccacgacccggatgtcaaagcgttgctgcgcctggccaccgtctggaacattccggtcgccactaacgtctccaccgctgactttattatccagtcgccgcacttcggtcaaccgctcgatattctgatcccggattatccacgctatcttgccgagcgcctgaaataa

SEQ ID NO: 210623 - DNA, 414 bp, Klebsiella pneumoniae
atgaaagagaatgatattgctggcatcctgacctcgacacggacgattgcgctggtcggagccagcgacaagcctgaccgtccgagctaccgggtcatgaagtatctgctggatcaggggtatcacgttatcccggtttcgccgaaggtggcgggcaagacgctgctgggacaacaggggtatgcgacgctcgccgacgttccggaaaaggtcgacatggttgatgtcttccgtaattcagaagcggcgtggggtgtagcgcaggaggcgatagccatcggcgcgaaaacgctatggctgcagctgggggtgatcaatgagcaggctgcggtgctggccagggaagccggattgaacgtggtgatggatcgttgcccggccattgagctaccgcgactgggattagcaaaataa

SEQ ID NO: 210624 - DNA, 318 bp, Klebsiella pneumoniae
atgatagccagcaaattcggtatcggccaacaggtccgccatacgctcttgggctacctgggcgtcatcgtcgatgtcgatcccgagtattcgctcgcggagccggaagaggatgaaattgccgccaatgacgaactgcgcgcggcgccctggtaccatgtggtgatggaagatgatgatggccagccgattcacacctatctggcagaagcgcagctgagcagcgaaacccgcgacgaacacccggaacagccgtcccttgacgaactggccaaaacgattcgtcagcagctgcaggctccgcgccttcgcaactaa

SEQ ID NO: 210625 - DNA, 1203 bp, Klebsiella pneumoniae
atgacagattccctattcccccgcttagtgttagccaaaggacgcgagaaatccctgctgcgtcgccatccgtggatattctccggcggcgtcgcccgcatggaaggtaaagcccgcagcggtgaaaccatcgatatcgttgaccatcagggaaaatggctggcccgcggcgcttactcgccgtcgtcgcagatccgcgcccgcgtgtggaccttcgaccgcaatgaagccatcgatagcgccttctttgaacgccgtctgcagcaggcgcaaacctggcgtgcctggctggccgagcgcgatggcctcgacagctaccgcctgatcgccggcgagtccgatggcctgccgggcgtcactatcgaccgctttggcaactttttcgtgctgcagctgctcagcgcaggcgccgaataccagcgcgccgccatcatcagcgccctgcagaacctgttcccggactgcgccatttacgatcgcagcgatgtcgccgtgcgtaaaaaagagggactggagctggcccaggggccggtggtgggcgaactgcccccggcgctgctgccgatcaccgagcacggcatgaagctgttggtcgatatccagggcgggcacaagaccggctactacctcgaccagcgcgacagccgcctggccacccgccgctatgtcgcggataaacgggtgctgaactgcttctcctacaccggcggctttgcggtgtcggcgctgatgggcggctgccgccaggtcaccagcgtggatacctctcaggaggcgctcgacgttgcccgccagaacgtggagatcaacggactggatctgtccaaagcggagtttgtgcgcgacgacgtgttcaaactgctgcgtaaataccgcgatcagggagagaaattcgacgtgatcgtgatggatccgccgaagttcgtggaaaataaaagccagctgatgggcgcctgccgcggctataaagatatcaatatgctggcgatccagctgctgaaccccggcggcgtgctgctgacattctcctgctccgggctgatgaccaccgatttatttcagaaaatcatcgccgatgccgcaattgatgccgggcgtgatgtacaatttatagaacagttccgtcaggctgccgaccacccggtgatcgcaacctacccggaagggctgtatctgaaggggtttgcctgtcgcgtcatgtaa

SEQ ID NO: 210626 - DNA, 555 bp, Klebsiella pneumoniae
atgaaaacaggtatccgcatggctgtggcgatggtagcggctgtgagcagcggcgcgatggccgcgccgtttagcgtaagcagcaatgatatgcgtgacgggcagccgctggcccagcagcactggtttgccggtttcggctgtaccggaggcaatgtctctccgcagctggcatggaaaaacgccccggcgggcacgcgcagcttcgcggtcaccgtccaggatcccgatgcgcctaccggcagcggctggtggcactggacggtggtcaatatcgccagcagcgtcttttcgctgcccgctggcgcgggagataaaaacagcgctacactgccgggcggagcggtccagggccgcaacgattttggctatgccggcttcggcggcgcctgtccgccggcgggagataaaccgcaccgctatcgctttacggtatgggcgctggatgtccccacgctgccggtggatgccggggccagcggggcgctggtcggctatctgttacatagccatgctctcgccagcgcacagttgacggcgatggccgggcgttaa

SEQ ID NO: 210627 - DNA, 789 bp, Klebsiella pneumoniae
atggagagtatccactttcagcataacgccttaaccgcggcggagatcaccacccgacggctatgcagactgcatcgcgtgcggctgttctccccggcgctctgtcgggtgaaacgcggcagcaaagtgattgtgcaaggggagagccgggtgctggcgactccgcaacagctgattgttttgccagctgacgtggaactggaggtgattaaccagccggagaatggcctcttttgctccgatctgctatcgctgacgcccgagttgctgacgaggtttaagactcgttatctcagcgaaccaccgccagggcgcctgacctcgctctgcgcaccggtgacgacagagctggcgtttatgtggcaaagcgttctgcaggcggtgcgggagggattgtccgtcgcgctgcagcagcaccagaccatgggactgctgctggccctgtatgaggctggctatgcgggcccgctgctcgtcgagcggcagcaggatctgtcggcgcaggtgcggcagctgattatgctgtcgccggcgcaggcatggagcgtgtcgcgggtggcgaaaatgctctttctcggcgagtccacgctgcgccgtcggctgcagcaggaatcgcagagttttcgccagatcgtcgaggaggtgcggatggcccacgccctggggcagctgcagaccacctcgcggccaataggcgaaattgcgcagaacagcggatatcagtcgggatcgcgctttaccgcgcgcttccgtcagcattatggtttactgccgaagcatgtacgctga

SEQ ID NO: 210628 - DNA, 282 bp, Klebsiella pneumoniae; identical to SEQ ID NO: 135354

SEQ ID NO: 210629 - DNA, 330 bp, Klebsiella pneumoniae
atgtttatttttgaaggcaacgaaattgaaacggatagcgaaggctatctgaaagataccacccagtggagcgaggcgatggcggaagtcattgccgcgcaggaagggataacgctcgccgttgaacactgggaagtagtgcgctttgtgcgcgagttttaccttgaatttaacacctctccggcgatccgtatgctggtcaaggcgatggccaacaagtttggcgaagagaaaggcaacagccgctatctctatcgcctgttcccgaaaggacccgccaaacaggcgaccaaaatcgccggcttgccgaagccggtgaagtgcatctaa

SEQ ID NO: 210630 - DNA, 660 bp, Klebsiella pneumoniae
atggatcgcataattacatcatcgcgtgaccgttcctcgctgctcagcacgcacaaggttctgcgtaacacctacttcctgctcagcctgacgctggcgttttccgctatcaccgccaccgccagcacagtgctgatgctaccttcgccgggtctcattttgaccctcgtggggatgtacggtctgatgttcctgacctacaaaacggcgaataaacccaccgggattatttccgccttcgccttcaccgggttcctcggctatatccttgggccgatgctgaacgcgtatctttctgccggcatgggcgatttaatcggcctggcgctgggcggcacggcgctggtcttcttctgctgctcggcctatgtgctgacgacgcgtaaagacatgtcattccttggcgggatgctgatggccggcgtggtggtcgtcctgattggtatggtcgctaacctgttcctgcagctgccggcgctgcacctggcgattagcgcggtgttcatcctgatctcttcgggcgccatcctgttcgagaccagcaacattatccgcggcggtgaaaccaactatatccgcgcgacggtcagtctgtatgtctcgctgtacaacatctttgtcagcctgctgagcatcctgggcttcgccagccgggactaa

SEQ ID NO: 210631 - DNA, 1653 bp, Klebsiella pneumoniae
atgacattacacaaaaaaaatcacatcacccgaacactcctggctgtcagtatgctggctatgagcggcggggcgctggcggcgcaggtgccgccgggcacccagctggcggaaaagcaggagctggtcagaaataacggcagtgaaccggcgtcactcgatccgcataaagtcgagagcgatgttgaattcaatatcattagcgatctctttgaagggctggttaacgtgtcgccagcgggagcgatccagccgcgactggcggaacgctgggaaaacaaagacaacctgttatggacctttcatttacgccccggtctgacctggtccgacagcacggccattacagcgcaggatatcgtctggagctggcaacgactggtctcgccggcaacagcctccccctacgcgagctaccctggcaatatgcatatcgccaacgcccgcgagattgccctcgggcaaaagggacccgagacgttgggggtgaaagcgctgaacgacaccacgctacaggtcactctgacccagccgaatgccgccttcctggcgatgctggcgcacccttcgctggtaccgatcgacaaagtgctggtggagcggtatgccgataaatggacccgaccagagcatatcgtcaccagcggcccgtataagctgtcccaatgggtggtgaatgagcggctggtggctgaacgtaatgcaaagtactgggataatgcgcataccgttattaataaagtgacttacctgccaatctcttcggaggccgccgatgtcaaccgctacaaagcaggggagattgatattgtctatacggtgccgatcaatcagtttgcgcagttgcagaaaaccatgggcgaccagctggacgtttcgccgcagctggcgacctattactacgaattcaatactacccggccgccgtttaacgacgcccgtgtgcgtcgcgcgctgaatatggcgcttgataaagatatcattgccggaaaagtgcttggccagggccagcgcccggcctggctgatcggtcagccggatatcggcggcgtgacgctgcataacccggactacgccagctggccgcgtgagaaacggattgccgaggcgaaaaaactgctggcgcaggcggggtatgatgaaagccatccgctggtctttaccctgctctataacacctctgagtcgcaccagcgtatcgccattgccgccagctctatgtggaagaaaaacctcggcgtcgaggcgaagctacagaaccaggagtggaagacgatgctggataccatgcatacgcataacttcgacgccgtccgctacgcgtggattgccgactacgacgatgccgccaccttcctcaatactttccgtaccggggatagcgagaacaccagtcagtacagcaaccctgcttacgatgaggccctgcgcaatgcggcgaaagcctccgacgtggcgacccggggcaaatactatcagcaggcggaagatctgctggcgcaggatgttcccgccattccggtctatcactatgtacgtacccatctggtgaaaccttgggtagggggcttcacgccggataagctggggtattactacaccaaagacatgtacattaaaaaacacccatccgccagcggcgatgggcgttga

SEQ ID NO: 210632 - DNA, 576 bp, Klebsiella pneumoniae
atggcgcaggtcaacgcgcagatgagaccactctttagtaaactaccggatgggtttcatattggcctgaatatcagcgtgtcacatattaacgcgccgacgtttatcgatgactgcctgcactatcagcgcggctttgagggtaaagcggtgaagctgatgctggagatcacggagcaggagccgctgttgctcaacggggcggttgtggacaagctcaatacgttacactcccgcgggttttccatcgcgctggacgactttggcaccggctattccgggctttcctgtctccacgagctgattttcgactatatcaaaatcgatcagagttttgtcggccgggtaaccggggaggcgccggcaagcaagctgctggactgcgtgatagagatggcgcggacgctgtcactgcgcatcattgccgagggcgtcgaaaccgaggcccaacgggattatcttaatcgccagaatattcatctgctgcagggctactatttctggaagccaatgccctacgtcgcgctggtcatgctcctgctgagcaaaccgaaggcgcggattgtcgaagaataa

SEQ ID NO: 210633 - DNA, 288 bp, Klebsiella pneumoniae
atgatggtcaataagcggccggtgctgatctatcagacgcgcttagcgccgatcagggtgattgtcacgatcagcgacatccatctgcgcgatgcgctatatagcgataccgatgacaacgggctggcactctgggtgcagaaccaaatgattgccagatatggcgatgttaagccgctggctgcggacccacaccaggaggtatttacctcgcccgctggcaaaacagcacgacgccagcgcgctcgcccgcggaatttattccgttggccgaacgtaccggcttaa

SEQ ID NO: 210634 - DNA, 189 bp, Klebsiella pneumoniae
ttgccagttaatgacgaacacgccagcaagaaataccatcagcgccagggaaaaggcaatcactcgcagccggtggatgaagagacggcgttgtttcttggcgatcgcaccgtcagccaggccgcgtggcagcccggcgcgatggtgcgactgacggtcagcggcaaggcgcgggtatttagcggctaa

SEQ ID NO: 210635 - DNA, 966 bp, Klebsiella pneumoniae
atgtctgattatcaaatgtttgaggcggtcgttcgcgatgttgaacagatcacccctcttgtgaagcgttttacgctggtgtcgccgaccggcgccccgctgccggcattcagcggcggcagccatattatcgtccagatgcaggatggcgagcagcgctacagtaacgcctattcgctaatgagctcgccgctggataccaccagctggcagattgcggtgcgtcttgagtcgccttccaaaggcggctcgcgttttatgcaccagcgggtgcgcccgggcgataccctgacggtgtccacgcccaacaatctgttcgccatcgaaccacaggcgcgaaaacatctgctgatcgccggcggcatcggcattacgccattcttatcgcatattccggaactggaacagcggcaggccgactggcagctgcattactgttttcacgacgccgacagtaatgctttcgccgatgcgctcagcgcagcgccgtggcgcgatcgggtcaatgttcatgtatcagcgctcggcagccgtctcgacctaccgcgcctgttcgccgacctcgagccaggaacccacgtgtatacctgcggcccagcggcgcttaacgaggcggtgaaagccgccgccgaacgccatcaggtgcccgccagccagctgcactttgagcagtttatccttgaggataaaagcggagaggcatttaccctggtgctggcgcgttccggacgcgaatttaccgtgccgcaggatatgaccattttgcaggtgatcgagaataacaaagcggcgaaggtcgaatgcctgtgccgagaaggggtgtgcggcacctgcgaaacgatgattctggagggggaagccgaccaccgcgatcagtattacagcgaggaagagaaagccagccagcagagtatgctgatctgctgctcgcgcgccaaaggcggccggttagtgctggatttgtaa

SEQ ID NO: 210636 - DNA, 1449 bp, Klebsiella pneumoniae
atgtctgtgtttcactcagatctgtttcgccagcaggcgctgattgccggaagctggcgcgacgccgccgacggcacgacgcttgccgtcagcaatccttccaccggcgcgacgctcggccagatccccaatatggggcgtgcggaagcgcaacaggcagtggatgccgccgcggccgcgctgccgaactggcgcgcgttcaccgccgcccagcgcgccgcgctattgaaaaactggcaccgcctgatcctcgaaaacaagaccgcgctggcgcagatcatgaccgccgagcagggcaagccgctggcggaagcggaaggcgaaatcgcctatgccgcctcgtttatcgagtggtttgccgaacaagggaaacgcgccaacggcgagataatcccctcccccggcgccgataaacgcctgatggtgatccgccagggggtaggcgtctgcgcggcgatcaccccgtggaacttcccggcggcgatgatcacccggaaggccggcccggcgctggccgcgggttgtacgatggtgattaagccggctaacgaaacgccgtttaccgcgctggcgatggcggagctggcgaatcaggccgggatcccgcagggcgtcattaacgtcgttaccggccagtcgcgagaaattggcgcggtgttcaccggcgatgagcgggtgcgtaagctctcctttaccggttcgaccgaagttggccgcgtgctgatgcgccagtgcgcggaatccatcaaaaagctctccttagagctcggcggtaacgcgccgtttatcgtctttgacgacgccgatatcgataaagcggtcgagggcgcgctgatcgccaagttccgcaacgccggacaaacctgcgtctgcgtcaaccgcttctatattcatcgcgccatctacgaccaattctgcgataaattcgtcgctcgcgtcgccgccctgaaagtgggcgatggcagcgagtccgatgtacagattggcccgctgatcaacgccgacgccgggcgcaaagtgcagtccctgctcgacgacgccctgagccgcggcgccacgctgttaactggcggtaaagcgcatccgctgggcggtaatttcttcacccctacggtgatcggcgacgtacagccggggtcattgctgctgcaggaagagattttcggcccggtggccgctttggtgaaatttgacgatgagcagcaggtcatcgagcaggcgaataacaccatctacggcctcgcctcctatttttacagcaacgatgccgcccgtatctggcgcgtctccgagcagctggaatacggcatggtcggtatcaataccgggctgatttccaacgaagtcgcaccgtttggcggggtaaagcagtccggtcttggccgcgaagggtcggaacacggaatcgaagattacctggagatgaagtatctctgccaggggttgtaa

SEQ ID NO: 210637 - DNA, 1125 bp, Klebsiella pneumoniae
atgagcaatttgagccctgacttcaccctgccgattaacttttgcgctaatccgcaggatgcctggaccattccggcccgtttttataccgacagccaggcgtttgagcacgagaaagagcgcatcttcgccaatagctggatttgcgtcgcccacggcagcgaggtcgcccggccgaacgattacattacccgggagatcatcggcgaaaatatcgttatagtccgcggccgcgacaacattctgcgcgccttctataacgtctgcccacaccgcggccaccagctactgagcggcgagggcaaagccaaaaacgtgattacctgcccctatcacgcctgggccttcaagctggacggcaatctcgcccacgcccgcaactgcgaaaacgtggcgaatttcgatagcgaaaaggcaacgctagtgccggttcgcctggaagagtatgccggctttgtgtttatcaatatgaatccggaagcggagagtgtggaaacgcagctaccggggctgcaggacaaagtgctggaagcctgtccggacgtgcatgatctgaaactggcggcgcgctttaccaccctcaccccggcgaactggaaaaatatcgtcgataactatctggaatgttaccactgcggtccggcgcacccgggcttctcggattccgtccaggttgaccgctactggcacaccatgcacggcaaatggacgctgcagtatggcttcgccaaaccgtccgagcagtcgtttaaattcgaagagggtaccgacgccgcgtttcacggtttctggctgtggccgtgcaccatgttcaacgtcacgccgatcaagggcatgatgaccgttatctatgaattcccggtggatgaagagaccactctgcagaattacgacatctatttcaccaacgaagagctgactgacgatcagaaagcgctgattgagtggtatcgcgacgtgttccgcccggaagatttacgcctggtggaaagcgtgcagaaggggctgaagtcccgcggctatcgcggccaggggcgcattatggcggataacagcggcagcggtatctccgagcacgggatcgcgcatttccacaatctggtcgcccaggtgttccagccgtaa

SEQ ID NO: 210638 - DNA, 1608 bp, Klebsiella pneumoniae
atgttgagcaacgtaaagaaaaaagatgtgccgctgattgccatcagcctggcggccattgttttcatcgccgctacattaagtctcttcccccagcaaaccgcgcaggcggctgattcgatttttaacggcgtgacccgcctgctgggttccacggtacaggtactggtgctgctggcgctgggactggtgttgtatctggccaccagcaaatacggcaatatccgtctcggcgaaggtaaagtcgaatacagtaccctctcatggctgtttatgtttatctgcgccggtctcggctcctccacgctgtactggggcgttgccgaatgggcttattactaccagaccccgggccttaacattgccccgcaatcgccgaaagcgctggaatacagcatcccttactctttcttccactggggcgtaagcgcctgggcaacctataccctcgcctcgctgatcatggcctatcacttccacgtgcggaaaaataaaggcctcagcctctccgggatcgtttcggcgatcaccggcgttaatccgcaaggtttctggggccgtctggtcgatctgatgttcctgatcgctaccgtcggcgcgttaaccatttcgctggtagtcaccgccgccaccttcacccgcggcctgtcagcgctgaccggactgccggataacttcaccatgcaggcatttgtgatcctgctctccggcggtattttctgcatgagttcgtggattggcatcaacaacggcctgcagcgcctgagcaaaatggtcggctggggggcgtttctgctgccgttggtggtattactggttggcccgaccgaattcatcaccaataacatcattaacgccgtcggcctgacgacccaaaacttcctgcagatgagcctgtttaccgacccgctcggcgacggcgcctttacccgcaactggaccgtcttctactggctgtggtggatctcctacaccccaggcgtggcgatgttcgtcacccgcgtctcccgcgggcgcaaaatcaaagaggtgatctggggactgctcctcggtagcaccgccggctgctggtttttcttcggggtgatggaaagctacgccatgcaccagttcgttaacggcgtgattaacgtaccacaggtgatgcagactctcggcggcgaaaccgccgtccagcaggtcctgatgtcgctgccggcaggtaagctgttcctcgccgcctatctgttcgtgatgattgttttcctcgcctcgcacatggatgcggtggcctacaccatggcggcgaccagtacccgcaacctgcgcgaaggcgacgatccggatcgcggcatgcgcctgttctggtgcgtggtgatcaccctcatcccgctgtcgattctgtttaccggcgcttcgcttgagaccatgaaaactaccgtggtgctgaccgccctaccgttcctggccattttactgattaaaaccggcggcttcgtgcgctggttaaaacaggactacgcccacgttccggtccatcagatagaaacccatacccccgagcccattattaaagccgagacgctgccggttggcgcggtactcaaaggcgacggccagtcgctgtaa

SEQ ID NO: 210639 - DNA, 1086 bp, Klebsiella pneumoniae
atgaaaaaaacctgtcgtattgccgccatcccgggtgacggaattggcaaagaagttctgcctgaagggattcgcgtgctgcaagccgccgcacagcgttgggatctgtcgctgagcttcgagcagatggagtgggcaagctgcgaatattacgcccattatggcaagatgatgccggacgactggcgcgagcagctgcagggcttcgatgctatctacttcggcgccgtcggctggccggataccgttcccgaccacatttcgctgtgggggtcgctgctgaagttccgccgcgagttcgatcaatacgtcaacctgcgcccggtgcgcctgttccccggcgtcccctgcccgctggcgggtaaaaaggccggcgatattgatttttacgtggtgcgcgaaaataccgaaggcgaatattccgcccttggcggccgcgccaatgaaggcaccgagcatgaagtggtgattcaggagtcggtctttacccgccgcggcgtggaccggatcctgcgctacgccttcgaactggcgaaaagccgcccacgcaaaacgctgacctccgcaaccaaatccaacggtctggcgatcagcatgccctactgggatgagcgggtggaagagatggccaaaaactatcccgaaattcgctgggacaagcagcatatcgatatcctgtgtgcccgcttcgtgctgcagccggagcgttttgacgtggtggtcggctccaacctgttcggcgatattctctccgatctcggcccggcctgtaccggcactatcggcattgcgccgtcggccaatctcaatccggagcgcaatttcccgtcgctgttcgaaccggttcacgggtcggcgccggatatttacggtaaaaatatcgccaacccgatcgccaccgtttgggccggggcgatgatgctcgatttcctcggcaacggcgatgagcgctaccacaccgctcacgatggcattctggcggcgattgagcagacgatcgcctgcggaccgaaaactccggacatgaaaggcagtgcctcaacgcagcaggttagcgaggctatctgcaaggccattttggcgtaa

SEQ ID NO: 210640 - DNA, 942 bp, Klebsiella pneumoniae
atgaataatctgccgctgctaaatgatttacgcgtctttatgctggtcgctcgccgggccgggttcgccgccgccgccgaggagcttggcgtatcgccggcgttcgtcagcaagcgggtttcgctgctggagcaaaccctgaatgtgatgttgctgcaccggaccacccgtcgggtcaccattaccgaagagggggagcggatctatgaatgggcgcagcgcattttgcaggatgtcgatgagatgatggatgagctttccgacgtgcgccaggtgccgcagggaacgctgcgtattatcagtagcttcggctttggccgtcgggttgtcgccccggcgctgtcggcgctggctctccagtacccgcagctggagctgcgtttcgatgtccaggaccggctggtggatttagtcaatgaaggggtggatctcgatattcgcgtcggcgacgatatcgcaccgaatctgattgcccgccagctggcggccaatcaccgcgtactctgcgcctcgccgcagttccttgcccgccatgcgccgccgaaacagctgagcgatctggccgcgttaccctgcctggtgattaaagagcgcgatcatccgttcggcgtctggcaattgcatagcaaagagggccagcacgccatcaaggtaaccgggccgctctcctccaaccatggtgaaattgtgcatcagtggtgtctggacgggcaggggattgcgctccgttcgtggtgggacgtccgggagaatatcgccagcggacatctggtgcaggtgctgccggactactggcagccggccaacgtctgggcggtttacgtctcccggctggcgacgtcggccaaaatccgcaccaccgtggagtttctgcgccactactttcagctgcactatccgcagcatgagccgacggccagcgccgtcggcagaggcgattaa

SEQ ID NO: 210641 - DNA, 1281 bp, Klebsiella pneumoniae
atgactgaacataccactagctactatgccgccagcgccaacaagtatgaaccgttcccgacgctggagggatccatcaactgtgacgtctgcgtcgtcggcggcggctacaccggcctctcgtctgccctgcatctggccgaaatgggctacgacgtggtggtgctggaaggggcgcgcatcggcttcggcgccagcggccgcaacggcggtcagctggtcaactcctatagccgcgatatcgacgtcattgaaaagaactacggcccggatgcggcaaaaatgctcggcagcatgatgttcgaaggcggcgatatcatccgcgaacgcatccagcggtatcagatccagtgcgattaccgcccgggcggcctgttcgtggcgatgaaccataaacagctggaaaccctggaagagcagaaagccaactgggagcgctacggcaacacccagctggagctgctggacagagaggccattcgtcgcgaagtggacagcgaccgctacgtcggcgccctgctcgaccacagcggcggccatattcacccgctgaaccttgccatcggcgaagcggatgccattcgcctgaacggcggccgggtgtatgagcagtcgccggtcacccgcatccagcacaccagcccggcggtggtcagcaccgcgcgcggccaggtcaccgcgcgctacgtgatcgtcgccggcaacgcctatctcggcgataaactggagccggagctggcgaaacgcagcatgccgtgcggcacccaggtggtcactaccgctccgctgtcggaagaggtcgcccgctcgctgatcccgaaaaactactgtgtggaagactgtaactacctgctggactactaccgtctgaccggcgacaaccgtctgctgtacggcggcggcgtggtctacggcgcgcgcgatccggacgacgtggagcggctgattatgccgaaactgctgaaaaccttcccgcagctgcagggggtgaagattgactaccgctggacgggcaacttcctgctaaccctgtcgcggatgccgcagttcgggcctctcgataacaatatttactacatgcagggctacagcggccacggcgtgacctgtacccaccttgccggacgcttgatttcagagctgctgcgcggcgacgccgagcgtttcgacgccttcgccaaactgccgcactacccgttcccgggcggccgcagcctgcgcattccttttaccgccatgggcgccgcctactacagcctgcgcgaccgccttggggtttaa

SEQ ID NO: 210642 - DNA, 1488 bp, Klebsiella pneumoniae
atgaattttcagcacctggcttactggcaggaaaaagcgaaaaacctggccattgaaacgcgcttatttattaacggcgaatattgcgccgcggccgataataccacctttgagactatcgaccccgccgcgcagcagacattagcccaggtcgcccgcggtaaaaaagccgacgtcgaacgggcggtgaaagccgcgcgccaggcttttgataacggcgactggtcgcaggcctcccccgcacagcgtaaagcgatcctcactcgctttgctaatctgatggaggcccatcgtgaagagctggcgctgctggaaacgctggataccggcaagccgattcgccacagcctgcgcgacgatattcccggcgccgcccgcgccattcgctggtatgccgaagcgctggataaagtctatggcgaagtggcccccaccggcagcaacgagctggcgatgatcgttcgcgaaccaattggcgtgatcgccgcggtggtgccgtggaacttcccgctgctgctggcctgctggaaactcggcccggcgctggcggcaggcaatagcgtaatcctcaaaccctcggaaaaatcgccgcttaccgccctgcgtctggccgggctggcgaaagaggccggcctgccggacggcgtgttgaacgtggtcagcggctttggccacgaggccgggcaggcgctggccctgcatcctgatgttgaagtcatcaccttcaccggctccacccgcaccggcaagcagctgctgaaagacgccggcgacagcaatatgaagcgcgtgtggctggaagcgggcggcaagagcgccaacattgtcttcgccgattgcccggatctgcaacaagcggttcgcgccaccgccggcggcatcttctacaaccagggacaggtgtgcatcgccgggacccgtctgctgctcgaggagagcatcgctgacgagttcctggcgcggctgaaagctgaggcgcaacactggcagccgggcaacccgctcgatccggacaccaccatgggcatgctgattgacaatacccatgccgacaacgtgcatagctttattcgcggcggcgaaagccaaagcaccctgttcctcgacggacggaaaaacccgtggcctgccgccgttggcccgaccattttcgttgacgtcgacccggcatcaaccctcagccgggaagagatcttcggcccggtgctggtggtgacccgcttcaaaagcgaagaagaggcgctaaagctcgccaatgacagcgactacggcttgggcgccgcggtgtggacccgcgatctctcccgcgcccaccgcatgagccgccgcctgaaggccggctcggtcttcgtcaacaactataacgatggtgatatgaccgttccgttcggcggctacaagcagagcggcaacgggcgcgataaatcgctgcacgcgctggaaaaattcaccgaactgaaaaccatctggattgccctggagtcttga

SEQ ID NO: 210643 - DNA, 558 bp, Klebsiella pneumoniae
atgagcgatgacggactggcgccagggaaacgtctgtcagagatccgccaacagctgggtctctcacagcgtcgtgccgccgaactgtctgggttaacacatagtgccatcagcaccatagagcaggataaagtcagtcctgccatcagtacgctgcaaaagctgctgaaagtctatgggctgtcgctctcggaattcttttctgaacccgaaaagccggacgaaccccaggtggtcattaatcaggatgacctgattgagatgggaagtcagggcgtttccatgaagctggttcataacggaaatccgaaccgtacgctggcgatgatttttgaaacttaccagcctggaaccacgaccggggagaggattaagcatcagggtgaggagataggcaccatactggaaggtgagatcgtgctgaccattaacggtcagtcgtaccacctggtggctggacagagctatgccattaataccggcattccgcacagcttcagcaacacctcggcaggcatctgccgcatcatcagtgcccacacccccaccacattctga

SEQ ID NO: 210644 - DNA, 765 bp, Klebsiella pneumoniae
atggaaaatataatgtacaagccagttattggcgtcgtgatgtgtagaaacaggcttaagggtcaccagacccagaccttgcaagaaaagtacctgaatgcaattgttaacgccggcggactgccgattgccctgccgcatgcgctggcggagccggagctactgaacgtggtcgttgataaactggacgggatctacctgccaggcagccccagcaacgtgcagccgcacctttatggtgaaaacggcgatgagcctgacgccgaccccgggcgtgatcttctgagcatggcgctgattaacgccgcgctcgaaaggcgcatccccattttcgccatctgtcgtggactgcaggaactggttgtcgccaccggcgggactctgtatcgtcgtctgttcgagcagcctgagctccttgaacatcgcgaagatcctgaactgcccgtcgagcagcagtatgcgccgtcccatcaggttgaggttcaggaaggaggattgctgtcgcaattgataccgggctgcaacacgttttgggtaaactcgctacatgggcaaggggcaaaaaccctcagtccgcagctgcgagtggaggcgcgagcgccggatggactggtggaagcggtcagcgtgaacgatcatcctttcgcgctgggcgtacagtggcatccagaatggaacagtagcgaatacgccctgtcgcgtatgttgtttgatggttttatcaccgcctgtcagggccatcatgctgaaaagcggcggcgctga

SEQ ID NO: 210645 - DNA, 1422 bp, Klebsiella pneumoniae
atggaaaccaatatcgtagaagttgagaattttgttcagcaaacggaagagagacgggttagcgcgttcgcgaaagaagtgaagcgctacctcgaaacctaccctgatacccagtatgtcgatgtcctcctcactgacctgaacggctgcttccgcggcaagcgcatcccggttgccggcctgagcaaactggagaaaggctgttatttcccggcctcggtgtttgcgatggatattctcggcaatgtggtggaagaggccggtctgggccaggagatgggcgagccggatcgcagctgcatcccggtacccggcaccttaaccccttcggcggctgacccacaatcgatagcccaggtacagctaaccatggttgatgaagatggcgctccctttgacgttgagccgcggaacgtactcaaccgcctctggcagcagttgcgccagcgcgggctgttccccgtggtagcggtagagctggagttctatttactggaccgcaaacgcgatgccgaaggctacctgcagccgccgtgtgcgccgggcaccgacgatcgcaacacccaaagccaggtctattcggtcgataaccttaaccacttcgctgacgtgctcaacgacatcgacgagctggccaaactgcagctgatccccgccgatggcgcggtggcggaagcctcgccgggccagtttgaaatcaaccttcaccataccgataacgtgctggacgcctgcgatgatgcgctggcgttaaaacgtctcgtgcgtttgatggcggagaagcataagatgcacgccacttttatggcgaagccttatgaagagcatgccggcagtgggatgcatatccacatcagcatgctgaacaataaaggggaaaacgtgctggtggacggcgatggggaagactctgcgctgctcaaacgcgcgctggccgggatgatcgatctgatgccggcctcgatggcgctgctggcgccgaacgtgaactcgtatcgccgcttccagccggggatgtacgtcccgacgcaggcttcgtgggggcataacaaccgcaccgtcgcgctgcgtattccgtgcggcgagcggcagaaccaccgcgtggagtatcgcgtcgcgggggcggacgccaacccgtatctggtgatggcggcgatttttgccggcattctgcacgggctggataacccccagctgcctttacaggaagaggtggaaggtaacggtctggaacaagagggcctgccgttcccgatccgccagagcgatgcgctgtgggagtttatgcagaacgatcacttgcgtgagcgcctcggcgagcgtttctgccatgttttccatgcctgtaagcatgatgaattactgcagtttgagcgtcttatcacagaaaccgaaattgagtggatgttgaaaaacgcctga

SEQ ID NO: 210646 - DNA, 1392 bp, Klebsiella pneumoniae
atggctattaatcctccggcacataacgccgctcaggcgggcagaccgcgtctgcgtaaatccctcaaactctggcaagtggtgatgatggggctggcctatctgacgccaatgacggtgtttgataccttcggcatcgtctcgggcatcagcaatggccacgttccggcgtcttatctgctggcgctggctggcgtgctgttcaccgccatcagctacggcaaactggtgcgtcagtttccggaggccggttccgcctatacctacgcgcaaaaatccatcagtccgcacgtcggctttatggtcggttggtcgtcgctgctggattatctgtttctgccgatgatcaacgtcctgctggcgaagatctatctctcggccttgttccccgaagtgccgccgtgggtgtgggtagtgacctttgtctctattctgaccgccgcgaacctgaaaagcgttaacctggtggccaacttcaataccctgttcgtgctggtgcagatttcgatcatggtggtgtttgtcattctggtggtgcaggggctgcataaaggcgagggggtgggtaccgtctggtcgctgcagccgtttatcagccagaatgcgcatctgatcccgattattaccggcgcgaccattgtctgcttctcgtttctcggcttcgacgcggtgaccaccctgtcggaagagacccctgacgccgcgcgagtgatcccgaaggcaatttttctcaccgcgatgtacggcggcattatctttatcgtcgcgtcgttctttatgcagctgttcttcccggatattcatcgctttaaagaccccgatgccgcgctgccggagattgcgctgtacgtgggcggcaagctgttccagtcgattttcctgtgcaccacctttgttaacaccctggcgtccggcctggcctcccatgccagcgtctcccgtctgctgtacgtgatgggccgcgacaacgtcttcccggagcgcatttttggctatgtgcatccgaaatggcgtaccccggcgctgaacgtgattatggtgggcatcgttgcactgtcggcgctgttcttcgacctggtgaccgccaccgcgttgattaatttcggcgcgctggtggccttcaccttcgttaacctgtcggtgttcaaccacttctggcggcgcaaggggtacaacaaaacctggaaggatcgactgcattatctgctgctgccgatggtcggggcgttgacggtcggggtattgtggatcaatctcgaggccacctccctgacgctcggcctggtgtgggcggcgcttggtctgctgtacctgacttatctgacccgacgcttccgcaaaccgccgccgcagtttgatgccgctaaagcggagcaggcctgggagtcatag

SEQ ID NO: 210647 - DNA, 123 bp, Klebsiella pneumoniae; identical to SEQ ID NO: 136946

SEQ ID NO: 210648 - DNA, 222 bp, Klebsiella pneumoniae; identical to SEQ ID NO: 136945

SEQ ID NO: 210649 - DNA, 789 bp, Klebsiella pneumoniae
atgacccaaccatcgcacacagcttttatcaccggcgcgtcctcaggtatcggcgcgatctatgccgaacgactcgccgcccgcggctacaacctgatcctcgccgcccgtcgtgaagaccgtctgcaggcgctcgccgaccagctgcaggcgcgctacgccatccaggcaagcatcctcaaagccgatcttagcgaagagcacgggattgccgccgtagagcagcgtctgcagcaggatcccgccatcgacctgttcattaacaacgccggcaccgcgaaattggcgggttttctcgccagtacgccacgcgagcaccaggcgattcatacgctcaacaccaccgcgctgctgcgtctgagctatgccgcgctggccgctttcaccccacgacgccgggggacgctgatcaatattgcctctatcctcgcgctgcatacgctgccgggcagcgcagtctacagcgccagcaaagcctgggtgttgagcttcacccgcggcctgcaggaggagtttgccgacagcggcgtgcgtattcaggcggtattgccggcggcgaccgctaccgatctgtggccgacctccggcgtggcgctggacgctctgcccagcggcacggtaatgaccaccgaggatctggttgacgccgctctcagggggctggagatgggggaacaggtcaccttaccaccggttcatgacctgggactgtgggagacttttgagcagtccagactggcgctgtttaccagtgcgcgaaccggacagcctgcgccgcggtatcgataa

SEQ ID NO: 210650 - DNA, 450 bp, Klebsiella pneumoniae
gtgaaacgtacccgtctggaaaacagctgttgccctatcgcccgctccctcgacgttatcggcgactggtggtcgctgctgatcgtccgcgatgctctgcgcggggtgcgccgttttagcgaattccagaaaaacctcggtatcgccaaaaacatgctcgccgggcggctgaaaatgctggtggatgaaggcatcctgcgcctgcagccggcctccgacggcagcgcctggcaggagtatgtcctgaccgataagggccgtgccctgcagacggtgctggtcgccctctcccagtgggcagacgactatctgttcgatcctgacgaaccggcgacccggctcattgaccgccagcagcgccagcccctgcgtaagctggtcctgcaggcggcagatggccgtgagctggccccggcggacatcaccatcgctatcccgctgaacaactaa

SEQ ID NO: 210651 - DNA, 1248 bp, Klebsiella pneumoniae
atgaaaaaacgtctacttgccgccgccgttgccggcgcggtgatgttatccgctggcgctcaggcgcaggacacggccgccccggaggggtatcagctgcagcaggtgctgatcatgagtcgtcacaacctgcgtgcgccgttggccaataacggcagcgtgctggagcagtccaccgccaaggcctggccgcagtgggatgtgccgggcggccagctgaccaccaaaggcggtgtgctggaggtgtatatgggccactatatgcgcgaatggctggcgcagcagaagctggtgaccagcggcgagtgcccgccggaaaacgcggtttatgcctacgctaacagcctgcagcgcaccgtcgccaccgcgcagttctttatcaccggcgcgttcccgggctgcggcatcccggtgcatcaccagcctcagatgggcaccatggacccgaccttcaacccggttattaccgacgactccccggcgtttcgcgagaaagcgctgcaggcgatggaaaaagagcgccagggaatgcagttgaccgagagctacaagctgctggagacgatgatcgattaccgcaactcaccctcctgcaaagagaagaaggtctgttccctgagcgagggtaaagatacctttagcgccggttatcagcaggagccgggagtgtccggaccgttgaaggtgggcaactcgctggtagacgccttcaccctgcaatattatgaaggcttcccgaaagatcaggtggcgtggggggagatcgccagcgataagcagtggcaagtgctgtcgaagctgaaaaatggctatcaggatagtctgtttacctcggtggcggtggcgcaaaacgtcgccaaaccgctggttaaatatatcgataacgcgctggtgggcgagggagccagcaaggcgaaagtcacgctgctggtgggacacgactcgaatatcgcttcgctgctcaccgccctggactttaagccctatcaactgcccggccagtatgagcgcactcctatcggcggcaaactgctgtttcagcgctggcatgacagcgccggcaatcgcgatctgatgaagattgagtatgtctatcaaagtaccgagcaactgcgtaacgccgacgcgttaaccctgcaggccccgccgcagcggatcactctggcgcttaacggctgtccggttgatgaccagggattctgcccgctggagacctttaaaaaggtgatcaacgaggcggcgaaataa

SEQ ID NO: 210652 - DNA, 228 bp, Klebsiella pneumoniae
atgccaactcaagaagcaaaagcacatcgcgtcggcgaatgggcaagtttacgtaacacctcgccggaaattgccgaggcgattttcgaagtcgcccactacgatgaaaaactggcggagcaaatctgggaggaaggcagcgacgaagtgctggcgctggcctttgccaaaaccgataaagacagcctgttctggggcgaacagacgattgagcgtaaaaacgtctag

SEQ ID NO: 210653 - DNA, 597 bp, Klebsiella pneumoniae
atggctaaaattctggtgctttattattccatgtatggacacattgaaaccatggctcacgccgtcgccgatggggcgaaccgggtggacggcgttgaggtggttgtgaagcgcgtgccggaaaccatgcaggctgaagcattcgccaaagcaggcgggaaaacgcaaaacgcgcccgtcgccacgccgcaggagctggcagagtatgacgccatcatctttggtaccccgacgcgcttcggcaacatgtccggtcagatgcgtactttcctcgatcaaaccggcggtctgtgggcgtccggcgctctgtatggcaaaatcgccagcgtatttagctcaaccggtaccggcggcggccaggaacaaaccattacctcgacctggacgacgctggcccaccacggcatgatcatcgtcccgatcggctatggcgcccaggagctattcgatatttcccaggtacgcggcggtaccccttatggcgcaaccaccatcgccggcggcgacggctcgcggcagccgagcgaggaagagttagccatcgcccgctatcagggtgaacatgtcgccaaactggccgttaaactgcacggctaa

SEQ ID NO: 210654 - DNA, 939 bp, Klebsiella pneumoniae
atgtcttcgttaaaattctccgttagccgccaggaagcgctccttatcatgatcaccatgttctggggagggacgttccttgccgtacagtacgcggtgagccttagcgggccgctgttttttgtcggtttgcgttttgcgaccgccgcgctggcggtgggcctgctttcgctgcgcactctgcgcggtctgacgtggctggaagtgaaggccggggtagcgattggcgtggcgattgcgctggggtatggcctgcagacctggggactacagaccatctccagcagtaaatctgcctttatcaccgcgatgtatgtaccgctggtgccgctgctgcagtggctgtgtctgggacgtatgccgggggtgatgtcctgcgtggggattgtgctggcctttattggtttaattctgctggccgggccggaaaataatctgctggcgcttggcgtgggggagatgatcactctggcaagcgcggtggcgatcgcggcggagattatccttatcagcgcctgggccggaaaagtcgatgtccgccgggtgacggtggtgcagctggcgaccgcgtcgctggtggctttcgccgccatgaagccggcgggtgaatcggtgccgtcgttgacgccggccctgctcggcgtcgcgctggggctggggattttcagcgcgatcattcaggtgaccatgaactgggcgcagcgcagcgtctcgccgacgcgggccacccttatttataccggtgaaccggtatgggccggtatttttggccggctggccggtgagcgtctgccgctgctggccctgctcggctgcgttttgatcctcgcgggagtgctggtgagcgagctgaagtggaagcgcaagtcgccgccgcaggtttccacaaacgacgatgcgcagccgctcgctgacctggccgatcgccgcgagccataa

SEQ ID NO: 210655 - DNA, 1323 bp, Klebsiella pneumoniae
atggcactcttcgattttcctcgctggaagctgacctctcctgccgccgaatccggcgttgtcgcccccgatgaacgcttgtcggccgggcaaacgctggtgatgggcgtgcagcacgccgttgcgatgttcggcgcgacggtgctgatgccgttgttgatggggctcgacccgaacctgtctattctgatgtcgggcgtcggcaccctgctgttctttgtcgtcaccggcggacgggtgccgagctatctcggctccagcgccgcttttgtcggggtggtgatcgccattaccggctttaacggccaggggctgaaccctcatctgagcgtcgcccttggcgggatcatcgcctgcgggctggtctacaccctgattggtctggtggtgatgaagatcggcacccgctggatcgagcgcctgatgccgccggtggtgaccggcgcggtggtgatggctatcggcctgaacctggcgccgattgccgtgcgcagcgtctccgccagcgccttcgacagctggatggcggtgttgaccgtgctctgcatcggcatagtggcggtatttacccgcgggatgctgcagcgactgctgatcctggtcggcctgatcgtcgcctgcgcgctgtacgccctgctggctaacggcctgggccttggcaaaccgctggacttctcccccctcgcccaggcgacgtggttcgggctgccgcactttaccaccccatcctttaacggccaggcgatgatgttgattgcgccggtcgcggtgatcctggtggccgagaacctcgggcacctgaaggccgtcgccgggatgaccgggcgcaatatggacccgtacatggggcgcgccttcgtcggcgacgggctggcgaccatgctctccggttcggtgggcggcagcggggtcaccacctatgcggagaacatcggcgtcatggcggtgaccaaggtctactcaacgctggtgtttgtcgccgcggcgctgattgccatgctgttgggtttctcgccgaagttcggcgcattaatccacaccattcccgggccggtaatcggcggcgcctcgatcgtggtctttggcttaattgccgtcgccggggcgcggatctgggtgcaaaaccgggtggatctgagtcaaaacagcaatttgatcatggtgtcggtgaccctggtgctgggcgccggcgatttcgcgctgtcgctgggcggctttacgctgggcgggattggcacggccaccttcggggcgatcctgctgcacgcgctgcttcatcgcgggacgcgcgaggcgaaggaggccagggtaacgccggtgtaa

SEQ ID NO: 210656 - DNA, 495 bp, Klebsiella pneumoniae
atggagttaacggacaaagcgagtttccgtgacgccatggcccacgtcggcgccgcggttaacattattaccaccgatggcccggcgggccgggcgggattcaccgccagcgcggtctgcagcgttaccgacacgccgccgaccctgctggtctgcctgaaccgctcggcttcggtgtggccggtgttcagcgaacaccacacgctatgcgtcaataccctggcggccggacaggagaccctgtcgacgctgtttggcggtaaaacggcaatggacgagcgttttgccgccgccgactggcagaccggcgccacaggctgtccgcggctggaggcggctctggtcagctttgactgccgcatcgaccagcgcgtcagcgtcgggacgcacgacattctgttttgtcacgtcgtggccattacccgtcacccggagccccggggactgatgtggtttgaccgcggctatcacacgcttatgcgaccagcttgttaa

SEQ ID NO: 210657 - DNA, 591 bp, Klebsiella pneumoniae
atgaacgacgcaataaaccacacggcctgcgagacgctgtttacccaggcccggacccacaacggctggctggataagccagtgagcgatgcgcagctgcaggccgtctgggacctgatgaaaatggggccgacttccgccaactgttcgccagcgcgcatcgtgttcgtgcgcagcgcggaaggcaaagagaaacttcgcccgacgctctccagcggcaatctgcagaaaaccatgcaggcgccggtgaccgccatcgtggcgtgggatagcgccttctacgaccggctgccgaccctgtttccccacggtgacgcccgcagctggtttacctccagcccgcagctggcggaagagaccgcgtttcgcaacagctccctgcaggcggcgtatctgatttttgcctgccgggcgctgggcctcgacaccgggccaatgtccggttttgaccgggaaaaagtcgacgcggcattttttgccgacaacggctggaaaagcaacctgctggtgaacatcggctatggcgaccccggcaagctgtacggccgcctgccgcgcctgtcctttgatgaagcctgcctgctggcataa

SEQ ID NO: 210658 - DNA, 804 bp, Klebsiella pneumoniae
atgatgaggctcaatattgctcctgctccgtggcccggcgcgccggtggtggtcctcagcgccggtctgggcgggggcggcggctactggctggcgcagcgcgcggcgctggaggaacagtatcagctggtgagttatgaccataacgggaccggggagaacgccggtccgctgcccgccggctacagcctggcgacgatggccggggagctgttcagcgctctgcaggcggcggggatcgcccgcttcgcgctggtgggccacgccctgggggcgctgattggcctgcagctggcgctcgatcgccccgaggcggtgagcgccctggcgctggtcaacggctggctgtcgctgtcgccgcatacccgccgctgcttccaggtgcgcgagcgtctgctgcatgccggcggcgcgcaggcgtgggtcgaagcgcagccgctatttctctacccggcggaatggatggccgcgcgcctgccgcgcctcgaagcggaagatgcgcttgccatcagccattttcagggcaaagagaatctgctgaagcggctgcaggccctgaagcaggctgatttttcacgccgtgcgtcggccatcgcctgcccgacgctgattatcagcgccgctgacgacctgctggtccccgcctcctgctcccgcgtgctgcagacggcgatccccggcagccagctcgtggaaatgccgtggggcggccatgcctgtaacgtcaccgacgccgatacctttaataccattttacgcgacgggctgtccgctatgctgccggtcaccagggagacccgatga

SEQ ID NO: 210659 - DNA, 393 bp, Klebsiella pneumoniae
atgcctaaacaggtgattattccgccaggcaccaccgcgccgattgccccctttgttccggggacgctcgccgacggggtggtctacgtctcgggcaccctgccgtttgataagcaaaacaatgtggtgcacatcggcgacccaaaggcgcaaacccgccacgtgctggagaccatcaggagcgttatcgaaacggcgggcgggagtatggcggatgtgactttcaacagcatctttatcaccgactggacaaattacgccgcgattaacgaggtctatgccgagttcttccccggcgataaaccggcgcgcttctgcattcagtgcggactggtgaagcccgatgcgctggtggaaatcgccagcgtcgcccatatcggtaccccgacatga

SEQ ID NO: 210660 - DNA, 711 bp, Klebsiella pneumoniae
atgattacccttcccgctcgcccggaatccctgaccttcgcgccgcagcagagcgcgctgattgtggtcgatatgcagaacgcctacgccagccagggcggttatctggatctcgccggctttgacgtctccgctacccggccggttatcgacaatattaataccgccgtcgccgccgctcgcgccgcgggtatgttgattatctggttccagaatggctgggatgatcagtatgttgaagctggcggcccgggctcgccgaactatcacaaatccaacgcgctgaaaacgatgcgtcagcgtccggagctgcagggcaagctgctggcgaaaggcggctgggattatcagctggtggacgagctgacgccgcaggaaggcgatatcgtgttgccgaaaccgcgctacagcggcttctttaacaccccgctcgacagcattttgcgcagccgcggcatacgccacctggtgttcaccgggatcgccaccaacgtctgcgtcgaatcgacgctgcgcgatggcttctttctcgaatacttcggcatcgtgctggaggatgccacccatcaggccggcccggccttcgcccagcaggcggcgctgttcaatattgaaacctttttcggctggatcagcgacgtcgagagcttctgccacgcgctgtcccccgccgccccgctgcctttagccaaggagaaacgttatgcctaa

SEQ ID NO: 210661 - DNA, 1092 bp, Klebsiella pneumoniae
atgaaaattggtgttttcgttcccattggcaacaacggctggctgatctccacccatgccccgcagtatatgccgacctttgaactgaataaggccatcgtgcagaaggccgagcactaccatttcgacttcgcgctctccatgatcaaactgcgcggcttcggcgggaaaactgaattctgggatcacaacctggagtccttcaccctgatggccggcctggccgcggtgacctcgaagatccagatctacgccaccgccgccaccctgacgctgccgccggcgattgtcgcccggatggcctccactatcgactccatctccggcggccggtttggcgtcaatctggtgaccggctggcaaaaaccggaatatgaccagatgggcatgtggccgggagatgactatttcgccagccgctatgactatctcaccgaatacgtccaggtgctccgtgacctgtggggcaccgggcgcagcgatttcaaaggtgactacttcaccatgaacgactgccgggtcagcccgcgcccgtcgcagccgatgaaggtgatctgcgccgggcagagcgatgccgggatggccttctccgcccagcatgcggactacaacttttgctttggcaaaggagtcaacacgccaacggcctttgccccgaccgccgcacgcatgatgcaggcggcggaaaaaaccggccgcgacgtgggatcctatgtgctgttcatggtgatcgccgacgaaaccgacgaggcggcgcgcgccaaatgggaacattacaaagggggcgccgatgaagaagcgctggcgtggctcaccgagcagagtcagaaagatacccgctccggcagcgataccaacgtgcgccagatggccgaccccacctcggcggtcaacattaacatgggcaccctggtcggatcgtatgccagcgtcgcccgtatgcttgatgaagtagcgagcgtgcccggcaccgacggcgtgctgctgacttttgatgattttcttgccggcattgacgcctttggcgaacgcattcagccgctgatgcgctgccggaaccacattgcttctgttacccgtgaggtggcctga

SEQ ID NO: 210662 - DNA, 639 bp, Klebsiella pneumoniae
atggcacagggcgcggtgaagaaaagcggcaaacgttcacaagcggtcagcgccaaaaaggaggccatcctggccgccgcgctggaggcattttcgcaatttggtattcacggtacgcggctggagcaggtggctgaacgcgccggggtatcgaaaaccaatctgctctattactacccttcgaaagaggcgctgtatgtggcagtcctgcagcagatcctcgccatctggctggcgccgctgaaggcctttcgtgaggatatcagcccgctggtggcgatccgcgaatatattcgcctgaagctggaagtgtcccgcgatcacccccaggcctcgaagctcttctgcctcgagatgctgcagggggcgccgctgctgatgggcgaactgaccggggatctgaaagcgctggtcgatgagaaatcggcgatagtctccggctggatcgaccgcggcaagctggcgccggtcgatccacagcatttaatctttatgatctgggctaccacccagcattacgccgacttcgccacccaggtggaggcggtcaccggcgccacgctgcaggatgcggccttttttgaacaaacggtcgataatgtccagcggatgattatcgaaggcattcgcgtccgttaa

SEQ ID NO: 210663 - DNA, 396 bp, Klebsiella pneumoniae
atgaaacgcacgttatttgccgtgatggccctgctggccagcggcgcggcgctggcggacgagtgcagcagcgccaacacccaaaccgaaatgaatcagtgcgcggctgcgcagtatcaggcggccgataaaaaactgaacgacacatggcagcaggccctgcagcgggcggtgggtaaacaacaaacattactgaagcaggcgcagcaggcatggatcgccttacgcgacgccgactgcgcctttctcgcgtccggcgccgaaggcggcagcatgcagccaatgctggtcagccagtgcatgaccgataagagcgtggagcgggagtctttcctcgcctcgctgctacagtgcgaggatggcgatcaaagctgcccgctgccgcccgccaattaa

SEQ ID NO: 210664 - DNA, 3963 bp, Klebsiella pneumoniae
atgggcaccaccaccatgggtgttaagcttgacgacgcaacccgcgagcgcattaaatccgccgcgagccgtattgaccgcacgccgcactggctgattaagcaggccatctttaattatctggaaaaactggagaacgacgagacgctgcctgagctgccggccctgctctccggggccgccaacgaaagcgatgacgccagcgaaccaacggaagagccctatcagccgttcctcgaattcgccgagcagatcctgccgcagtcggtgagccgcgcggcgatcaccgccgcctggcgacgtccggaaaccgacgcggtaccgatgctgctggagcaggcccgtctgccgcagccgctgggcgaacaggcgcacaagctggcgtatcagctggcggaaaaactgcgcaaccagaaaaccgccagcggccgcgccggcatggtgcagagcctgctgcaggagttctccctctcttcacaggaaggggtggcgctgatgtgcctggcggaagccctgctgcgtattccggataaagccacccgcgatgcgctgatccgcgacaaaatcagcaacggcaactggcagtcgcacatcggccgcagcccgtcgctgttcgtcaacgccgccacctgggggctgctgttcaccggaaaactggtgtcgacccataacgagaccagcctctcccgctccctgaaccgcatcatcggcaagagcggcgaaccgctgatccgcaaaggcgtggatatggcgatgcgcctgatgggcgagcagttcgtcaccggggaaaccatcgccgaagcgctggccaacgcccgcaagctggaagaaaaagggttccgctactcctacgatatgctcggcgaagccgccctgaccgccgctgacgcccaggcctatatggtttcttatcagcaggcgatccatgccatcggcaaagcctccaacggccgcggcatttatgaaggtccgggtatctccattaagctctccgcgctgcacccgcgctacagccgcgcgcagtatgaccgggtgatggaagagctttacccgcggctgaaatcgctgaccctgctggcgcgccagtatgacatcggcatcaatattgacgccgaagaggcagaccgtctggagatctccctcgacctgctggaaaaactgtgcttcgagccggaactggccggctggaacgggattggcttcgtgattcaggcctaccagaagcgctgtccgtttgtcattgattacctgattgacctcgccacccgcagccgccgtcgcctgatgatccgtctggtgaaaggcgcctactgggatagcgaaattaaacgcgcgcagatggaaggtctcgaaggctatccggtatacacccgcaaggtttacaccgacgtctcctacctcgcctgcgcgaagaagctgctggcggtgccgaacctgatttacccgcagttcgccacccataacgctcatactctggcggctatctaccagctggcgggccagaactactacccgggccagtatgagttccagtgcctgcacggcatgggcgaaccgctgtacgagcaggtggtgggcaaggtcgccgacggcaaactgaaccggccgtgccgcatctacgccccggtgggcacccacgagacgctgctggcgtatctggtgcgtcgtctgctggagaacggcgccaatacctctttcgtcaaccgtatcgcggacaataccctgccgctggacgagctggtggccgacccggtcagcgcggtagaaaaactggcgcagcaggaaggccaggccggcctgccgcatccgaaaatcccgctgccgcgcgatctctacggcagcggccggagcaactccgccggtctcgatctggcgaacgagcaccgtctggcctccctctcctcttccctgctcaacagcgcgctgcataaatggcaggcattgccgatgctggagcagccggtggccgaaggcgagatgcagccggtggttaacccggcagagccgaaagatatcgtcggctacgtccgcgaagccagcgacgctgaagtgcagcaggcgctgaccagcgctatcaacaatgcgccgatctggttcgccactccgccgcaggagcgcgccgccattcttgagcgcgccgcggtgctgatggaaagccaaatgccgaccctgatggggatcctggtgcgcgaggcgggtaaaaccttcagcaacgccatcgctgaagtgcgcgaagccgttgacttcctgcactattacgccggccaggtgcgcgacgatttcgataatgaaactcaccgcccgctgggtccggtggtctgtatcagcccgtggaacttcccgctggcgatcttcaccggccagattgccgccgcgctggcggccggcaacagcgtgctggcgaaacctgccgagcagacgccgcttatcgccgcccagggcgtggcgattctgctggaagccggcgtgccgccgggcgttattcaactgctgccgggccgcggggagaccgtgggcgccgcgctaacctccgatgagcgcgtgcgcggcgtgatgttcaccggctccaccgaagtggccaccctgctgcagcgcaatatcgccagccgcctcgatccccagggccgcccgacgccgctgatcgccgaaaccggcgggatgaacgcgatgatcgtcgattcgtcggcgctcaccgagcaggtagtgatcgacgtgctggcttccgcgttcgacagcgccggccagcgctgctccgccctgcgcgtgctttgcctgcaggaagaggtcgccgatcacaccttaaccatgctgcgcggcgccatgagcgagtgccggatgggcaatccggggcgcctgaccaccgatatcggtccggttatcgatgcggaagcgaaagagaatatcgaacgccatattcaggcgatgcgcgccaaaggccgcaccgtctaccaggcggtgcgtgagaatagcgaagacgcccgcgaatggcgtcacgggaccttcgtgccgccgacgcttatcgagctcgacagcttcgacgagctgaaaaaagaggtcttcggcccggtactgcacgtggtgcgctataaccgtaacgagctggacaaactggtcgagcagattaacgcctctggctacggcctgaccctcggcgtgcatacccgtatcgacgaaaccatcgcccaggtcaccggcagcgccaaggtgggcaacctgtacgtcaaccgcaatatggttggcgcggtggtcggcgttcagccgttcggcggcgaagggttgtccggtaccggtccgaaagccggcggtccgctgtatctgtaccgtctgctctccagccgtccgcaggacgcggttggcgtgaccttcgcccgccaggatgcagagcgtccgctggacgcccagctgaaaacgctgctggaaaaaccgctgcaggcgctgcagcagtgggccgcgggccgtcctgagctgcaggcgctgtgccagcagtacagcgagcaggcgcaaagcggcactcaacgcctgctgccggggccaaccggcgagcgcaacaccctgacgctgatgccgcgcgagcgcgtgctgtgcgtagcggataacgaacaggatgcgctgatccagctggcggctgtgctggcggtgggttgtgaagtactgtggccggacagcgccctgcagcgcgatctggcgaagaaactgccgcgggaggtcagcgagcgcattcgctttgccaaagcggagcagttgcctggccaggccttcgacgcggttatctaccacggcgattccgaccagctgcgcgagctgtgcgagcaggtggcggcgcgcgatggggcgattgtctccgtgcagggcttcgcccgcggcgaaaccaatctgctgctggagcggctgtatatcgagcgttcgctgagcgttaacaccgcggcggcaggcggtaacgccagcctgatgaccatcggctaa

SEQ ID NO: 210665 - DNA, 1509 bp, Klebsiella pneumoniae
atggctattagcacaccgatgctggtgacatttattgtttatatttttggtatggtattgatagggtttattgcctggcgttcgaccaaaaacttcgatgattatattctcgggggaaggagtctggggccatttgtgaccgcgctttccgcaggggcgtcggatatgagcggctggctgctgatgggcctgccaggggcgattttcctctccgggatttccgaaagctggatcgccattggcttaacgctgggggcgtggattaactggaagctggtggccggtcgcctgcgcgtgcataccgaggtgaataataacgccctgacgctgcccgattattttaccggccgttttgaagataaaagccgggtgctgagaattatttcggcgctggttattctgctgttctttaccatctattgcgcttcaggaattgtcgcgggggcgcgtctgtttgaaagcaccttcggcatgagttatgaaaccgcactgtgggccggggcggcggcgacgattatctataccttcgtcggcggcttcctcgcggttagctggaccgataccgtgcaggccagcctgatgattttcgcgctgatcctcaccccggtgatcgtgattatttccgtcggcggctttggcgattcgctggaagtgattaagcagaagagcatcgaaaatatcgacatgctgaaagggctgaacttcgtggcgattatctcgctgatgggctgggggctgggttatttcggtcagccgcatattctggcgcgctttatggcggcggattcgcaccacagcatcgttcacgcacgtcgcattagtatgacctggatgatcctctgcctcggcggggcggtggccgtcggcttctttggcatcgcctacttcaataacaacccgagcctggcgggcgcggttaaccagaacgccgagcgcgtgtttatcgaactggcgcaaatcctgtttaacccgtggattgccgggatcctgctgtcggcgattctggcggcggtgatgtccaccctgagctgtcagctgctggtctgctcgagcgcaattaccgaagacctgtataaagccttcctgcgtaaaaacgccggtcagaaagagctggtgtgggtgggccgtatgatggtgctggtggttgccctggtggccattgccctggcggccaatccggaaaaccgcgtgctgggtctggtgagctacgcctgggctggcttcggcgccgcctttggcccggtggtcctgttctcggtaatgtggtcgcgcatgacccgtaacggcgcgctggccgggatggtgattggcgccctgaccgtgatcgtctggaagcagtttggctggctgggcctgtatgaaatcattccgggctttgtcttcggcagcatcgggattgtggtctttagcctgctggataaagcgccgtcggccagcatgcagcagcgctttgccgaagcggatgcccactaccatacgccgccgccggtacgcgccacggctgagtaa

SEQ ID NO: 210666 - DNA, 435 bp, Klebsiella pneumoniae
atgacgttcagacagggtgcaatggcgctggtgctggcagggttactcagcggctgcgtggcgggtggaagttcatcgaccagcgcgccgaagcccggcgtctgcccggcggataagtccatggtgcaaaccacgctttacttcggtctgagccgcccggcggggaaagacatcaccgctgaagagtggcaacagtttgtcgaccgtgacgtcacgccgcgctttcgcgacgggctgacggtgtttgatgcccacggccagtggcttggccagaatggtcaggtggtgcgggagcagagcaaggcgctgatggtgatccatgggcatgacgcgcagagcgaggcgggtattgaggctctgcgccagggctataaatcacgcttcgcacaggagtcggtgatgcgtgtcgaccagccggtctgcgtgcagttctga

SEQ ID NO: 210667 - DNA, 1218 bp, Klebsiella pneumoniae
atggcggccttattgacttgcgaaaagaacaacatgactgcattttttcatttcctgctggcgctggcggtgatcctcgccctggcctggcttgtcagctacgacagacaaaaaattcgtattcgttatattctccagttgattattatcgaaatagcgctcgctttctttttcctgcacgccgaaagcggcctgtggctggtaaaaaatatttccggcttttttgcttcgctgttaggctttgccgccgaagggaccaatttcgtctttggcggcatgagcgaaaaaggcttagcctttattttcctgggcgtcctgtgtccgattgtgtttatttccgcgctgattggtattctccagcactggcggatcctgccgatttttattcgcgtgattggcaccctgctgtcgaaagtaaacggcatgggtaagctggaatctttcaacgccgtcagctcgctgatcctcggccagtcggagaacttcattgcctacaagggcgtactgggcgacctctcctcacggcgactgttcactatggcggcgacggccatgtcgaccgtatcgctgtcgattgtcggcgcctatatgaccatgctggacgccaaatatgtcgtcgcagcgctgatcctcaatatgttcagcacctttatcgtgctgtcggtaattaacccgacgcggccgggcagcgagcaggaaataaaactcgagaagctgcatgaatcgcagagtttctttgaaatgctcggggaatatattctggccggctttaaagtggcgatgattattctggcgatgctgatcggttttatcgccctgatcagcgccattaacgcgctattcgccaccctgtttggtctcagcttccagcagatcctcggctacgtcttttatccgctggcgtggcttatcggcatcccgctgagcgatgcgctaaacgccggcagcatcatggccaccaaactggtcgctaacgaatttgtggcgatgattgagctgcaaaagattgccgccagcatgacccctcgcgggctcggcattctctcggtattcctggtttcgtttgccaactttgcctcgatcggcattatcgccggggcgatcaaaggcctgaatgaaccgcagggcaatatcgtctcccgcttcggcctgcggctggtgtatagcgccacgctggtgagcctgctttccgccagcttcgccgggctggtgctgtaa

SEQ ID NO: 210668 - DNA, 831 bp, Klebsiella pneumoniae
atgtttgtcccatttctcattatgttacgcgaaggcctggaggcggcgctgattgtcagcctgatcgccagctatctgaaacgcacccagcgcggcaactggattggcgtgatgtggattggcgtgatcctcgcggcggcgctatgtcttggcttaggcatctttatcaacgaaaccaccggtgaatttcctcagcgtgaacaggagctgttcgaagggatcgtcgcggtcattgcggtggtgatcctgacgtggatggtcttctggatgcgcaatgtctcacgcaacgtcaagcagcagctggagcaggccgtggacaaggcgctgcagcgcggtaatcaccacggctgggcgctggtgatgatggtctttttcgcggtcgcccgtgaggggctggagtcggtcttctttctgctggcggcattccagcaggatgtcggtatctggccgccgctgggggcgctgctgggtctggccaccgctatcgtgctgggcttcctgatctactggggcggtatccgccttaaccttggcgtgttcttcaaatggaccagcctgtttattctgctggtggctgctggcctggccgcgggggcgatccgcgccttccacgaggcgggcctgtggaacctgttccaggataccgccttcgatctgagcaacgtgctgtcgacgcatacgctgttcggcacgctgctggaagggatcttcggttatcaggagacgccgagcgtcagcgaagtggctgtctatctgctttatctgatcccggcgctggtgctgtttgccctgccgccgcggaataataccactgcctcgcgggctgcctga

SEQ ID NO: 210669 - DNA, 1128 bp, Klebsiella pneumoniae
atgatgattcattttcgccgtaatgcgctgcgggtgaccgtggccgcgctgctcagctctgcattcggtgcacaggctgcggatatcccgcaggtcaaagtcaccgtcaacgacaagcagtgcgagccgatgcaggtgaccgttaacgcgggtaaaacccagtttattattcagaaccacagccagaaagcgctggagtgggagattctgaaaggggtgatggtggtggaagagcgcgaaaacatcgcgccgggctttactcagaagctcaccgcgaacctgcagccgggcgaatatgacatgacctgtggcctgctcaccaacccgaaaggcaaactgatcgtcaccggcgccgccaccaaagacgcggcgaaagcggatgcggtgctgagcctcggcgacgcgatcaccgcctataaagcctatgtgacggcggaaaccgcgcagctggttagcggcaccaaagcctttaccgacgcggtgaaagccggcgatatcgaaaaagcgaaagcgctgtacgccccgacgcgtcagcattacgagcgcatcgagcccattgccgagctgttctctgaccttgacggcagcatcgacgcccgcgaagacgacttcgagaaaaaagcggaagatccgaaatttaccggtttccaccgtctggaaaaagcgctgtttggcgataacagcgtcaaagggatggaaaaatatgccgatcagctgaacagcgatgtgctggagctgcaaaagcgtatcagcgagctggcgttcccgccgtcaaaagtcgtgggcggcgcggcaggattaattgaggaagtcgcggccagcaagatcagcggtgaagaagatcgctacagccataccgatctgtgggacttccaggccaacattgacggcgcgcagaaaattgtcgacctgctgcgcccgcagctgcaaaaagagaacagcgcgctgctggcgaaagtggacgccaactttaagaaagtggacagcatcctcagcaaatatcgcaccaaagacggtttcgaaacctacgataagctgaccaccgccgaccgtaatgcgctgaaagggccgatcaccaccctggcggaagatctggctcagctgcgcgggatcctggggctggactaa

SEQ ID NO: 210670 - DNA, 1284 bp, Klebsiella pneumoniae
atggcacagcagaaaccccacgacgtgaacgagccgtcacgtcgtcgcttactgaaagggatcggcgcgcttggcggcgcgctggccatcaccggcggctgcccggtagcgcatgcggcaaaagcggaaagttccccggggacgctcacacccgacgcgcgccaggaaaagcagccattctatggccggcatcaggcgggcattctgacgccgcagcaggcttcgatgatgctggtggccttcgatgtgctggcggctgataaagccgacctcgagcggctgtttcgactgctgacccagcgtatcgcctttttaacccagggcggcccggcgccggacacgccgaatccgcggctgccgccgatggattccggcatcctggggccgtggattgcgccagataacctgaccatcaccgtctcggtcggccattcgctatttgatgagcgctttggcctggcggataaagcaccgaaaaagctgcagccgatgacccgcttccccaacgattcgctggatgccgcgctgtgccatggcgacctgctgctgcagatctgcgccaatactcaggatacggtgatccacgccctgcgtgatgtcatcaaacatacgccggatctgctgagcgtgcgctggaagcgggaagggtttatctccgacagcgcggcgcgcagcaaaggcaaagagacccccatcaacctgttggggtttaaggacggcaccgctaacccggcgagccacgacagcgcgttgatggataaggtagtgtgggtgacagccgatcaggacgagccggcctggaccgtgggcggcagctatcaggcggcgcgaattatccagtttcacgtggagttctgggatcggacgccgctcaaggagcagcagacgatctttggtcgcgacaagcacaccggtgcgccgctggggatgaaaaacgaacacgataccccggattacagtaaagatcctaacggcgaagtcattgcgctggatagccatattcgtctggccaatccccgcacgccggaaacccagtccagcctgatgatgcgccgcggctacagctattcgctgggggttactaacgccggacaactggatatggggctgttattcgtttgctatcagcacgatctggaaaagggttttctgacggtgcagaaacgacttaacggcgaggcgctggaggagtatgtcaaaccgatcggcgggggctacttctttgttttacccggcgtagtggatgataaacactatctgggagagtcgctgctgcaggcctga

SEQ ID NO: 210671 - DNA, 789 bp, Klebsiella pneumoniae
atgggaagacaaaaagcagtgatcaaagctcgtcgtgaagcaaaacgtgtgctgagacgggattcacgcagccataagcagcgtgaagaagaatcggtcacatcgcttgtgcaaatgagtggcgtagaagcaattggcatggcgcgggacagccgtgatacttccccaattgaggcgcgcaatgaggctcaggcgcattatttgaatgccatcgacaataagcagctgattttcgctaccggcgaagctggatgcggcaagacctggatcagtgcggcgaaggcagctgaagccctgatccataaggatgtggacagaattattgttacccgtcccgttctgcaggccgacgaagatctcggcttcttaccgggagatatcgccgagaagttcgctccctatttccgaccggtttacgatgtgctggtgaaaaggctgggggcttcctttatgcagtactgcctgcgtccggaaatcggcaaggtggaaatcgcgccgttcgcctatatgcgcggacgtacctttgaaaatgcggtggtgattctggacgaggcccagaacgtgaccgcagcgcaaatgaagatgtttttaacccgcctcggggagaacgtgacggtcatcgtcaatggcgatatcacccagtgcgacttgccctctggcgtgagatctggcctgagcgatgcgctggcgcgttttgaggaagacgagatgatcggcatcgtgcgtttcaccaccgatgactgcgtgcgctcggctctctgccagcggacgctgaaagcctattattaa

SEQ ID NO: 210672 - DNA, 645 bp, Klebsiella pneumoniae
atggtcttacatgggaaagttatcaagttattaattactattttgatggtggggttgtcatccgctgcttatagtaaagattatcaggcagggaaaaacttcactgttattcattctactgttaagcaaccgccgccactggttgagtttttttccttctactgcggaccttgttatgcgtttgcagagcgcatcaatgttgatacagctatcagaaagcgcctgcccgacgatatgaaactggaaaaataccatgtcagccagatggggcctttaggaccagcattaacagaagcatgggccgtagcacaatatgctggggtagatggcaaggtggaaaagttattgtttgagggtttacaggttaagcgtgatattaaaacggcagctgatattgttatggtgtttaatcaacttggcattacgtcagagaaatatgccgaaatgcaaagtaactttatggtaaaagctttaattgccagacaggataatctggtcgaaaaaatgaaagtgcatggtacgccttctttttatgtttcaggaaaatatcatattaacaatacatcactcgcgcaagatgactatgatacctatgcagaggatatggctaatctggttttatttttgcttaacaagcccctgtaa

SEQ ID NO: 210673 - DNA, 678 bp, Klebsiella pneumoniae
atgtctactcccgctaactttaacggtgctcgtccggtgattgatgttaacgataccgcaatgctgttgattgaccatcagagcggtctgttccagaccgtcggcgatatgccgatgccagagctgcgcgctcgcgccgccgcgctggccaagatggcgtcgcttgccgggatcccggtgatcacgaccgcctccgtgccgcaggggccgaacggtccgctgatcccggagattcatgaaaacgcgccgcatgcgaaatacatcgcccgtaaaggtgagattaacgcctgggataacccggaattcgtcgccgcggtgaaagcgaccggccgtaaaacgctgattatcgccgggaccatcaccagcgtctgcatggccttcccggctatcgccgctgtcgccgacggttataaagtgtttgccgtgattgacgcttccggcacctacagcaaaatggcgcaggagatcaccctggctcgcgtggtacaggccggcgtagtgccaatggataccgccgccgtcgcctctgagctgcagcgcacctggaatcgcccggacgccgcagaatgggcggaggtgtacaccaaagtcttcccggcctaccagctgctgatcgaaagctacagcaaagcgcaggacgtcgtgaagaataacgaacagctggattcccagcgctaa

SEQ ID NO: 210674 - DNA, 861 bp, Klebsiella pneumoniae
atgaaacagatcacaggagtctacaccgcgcctgcgcagcattgggtaggcgacggcttcccggttcgctcgatattttcctatcagacgcacggccagcagctgagccccttcttactgctcgactatgccgggccgtacaccttcccggcgggcagcgaaaaacgcggcgtcggtgagcatccgcatcgcggatttgaaaccgtcaccatcgtctacgccggtgaagtagagcatcgcgactccaccggacgcggcggggtgattggtccaggcgacgtgcagtggatgacggcgggcgccgggatcctgcacgaagagttccactcggaggccttcacccgcagcggcggcgagctgaagatgatccagctgtgggtcaacctgcccgcgaaagacaaaatggcgacccccggctaccagagcattaccgccgggacgatccccaccgtggcgctggcgaacggcgccggacaggttcgggttattgccggccagtatgacgacgtcagcggcccggcccataccttctcaccgcttaacgtgtgggatctgcagctgaatcaggggcacgacctcacgctgcgccaaccggagggctggagtaccgcgctggtggtgctggaaggggaagtgatcattaacggttccgaatctgctcgcgaaggccagctggccgtcctgagccaggcaggtgacgcagtgcatctggaggcgaccgccccggcaaaagttctgctgatggccggagaaccgctacaggagccgattgtgggctatggcccgtttgtcatgaataacaaaacgcagatcgcagaagctgtacgcgattttaacagcggccgctttggccaaatctaa

SEQ ID NO: 210675 - DNA, 906 bp, Klebsiella pneumoniae
atgcaggatctcaatgacttcgcctggtttgtccaggtggtagaccatggcggtttcgccgcggctgggcgagcgcttgaccagccgaaatccaaactcagccgtcgcattgcgcaactcgaggagcggttgggcgtgcgtttgattcagcgaaccacccgtcagttcgcggtcaccgaggtcgggcagaccttttatcagcattgcaaagcgatgctgattgaggccgaggcggcgcagcaggcggtcgagacgctgcgcgccgagccgcgcggtagcgtcaggatcacctgtccggtcaccttgctgcatgtccatatcggaccgatgctggcgcgatttatggcgcgctatcctggggtaacgctgcatcttgaggcgaccaaccgccgggtggatgtggtcggggagggcgttgatgtggcgatccgcgtccgtccccggcccatcgaggatagcgacctggtgatgcgcgtgctggcggaccgcgggcaccggctggtagccagcccggatctcatttcccggctcggacgtccgcaggcgccgtccgagctgagcgcctggccgggcctcagcctgggtgcgaacaagcatcagcataaatggcagctcaccgggcccgggggagcgagagcggaagtgtatttcacgccgcgaatggtgaccaccgatatgctggcgctgcgcgaggcggcgatggccggcgtaggcgtggtgcagcttcctttattaatggtgcgcgatcagctggcgtcaggtgaattagaggtggttctggacgagtggcagccgcggcgggaagcgatccatgcggtatttgcctcacggcgcgggctgctgccctccgtcagggcgctggtggactacctcagcgaagagtatcagcggatggaggaggattag

SEQ ID NO: 210676 - DNA, 939 bp, Klebsiella pneumoniae; identical to SEQ ID NO: 135931

SEQ ID NO: 210677 - DNA, 738 bp, Klebsiella pneumoniae
atgtatcccgttgacctgcacatgcataccgtcgccagcacccatgcctacagcaccctgcacgattatattgcggaagcaaagcgtaaagggatcaaactcttcgccatcaccgaccacggcccggacatggcggatgctccgcactactggcacttcgttaatatgcgcatctggccccgcctggtagacggggtggggatcctgcgcggtattgagtcgaatattaaaaatattgaaggcgagatcgactgttccggaccgatgttgacttctctcgatctgatcatcgccggatttcatgagccggtgtttccgccgcaggatcgtgacacccatacacaggcgatgatagccgcgatggccagcggtaaagtgcatatgattagccatccgggtaatccgaaattcccggtggatatcccggcgattgccgaagcggcggctcgctaccaggtggcgctggagattaataactcctcgttcgtatcatcgcgcgtgggcagtgaagacaactgccgggccatcgccgccgcagtgcgtgatgccgggggatgggtggcgctgggctcggactctcacaccgcctttacccttggggaatttaccgaatgccgcaagatccttgatgcggtcgatttcccggaggagaggatcctcaacgtttctccgtgtcgcctgcttaacttcctcgagtcgcggggcatgccggcgatcccggaatttgctgacctttaa

SEQ ID NO: 210678 - DNA, 552 bp, Klebsiella pneumoniae
atgaacgagttttcaatcctctgccgcgtgctgggttcactgtattaccgtcaaccgcaggacccgctgctggtgccgctgtttaccctgatccgcgagggcaaactggccgccagctggccgcttgagcaggacgagctgctggcgcgtctgcagaaaagctgtgaaatgcaatccctggcgacggactataatgcgctgttcgtcggtgaagcctgcagcgtcccgccgtaccgtagcgcgtgggtggagggttcctcggaagcggaagtttgggcttttctgagcgaacacggcatcccgacaggggaaggtccggcggatcatctcggctcgctgctgctggccgcctcctggctggaggatcatgccgcagaagaccagagcgagacgctggagctcctgtttgccgactatatcctgccgtggtgcgggacgatgctggggaaagtcgaagcccatgcgcacacgccgttctggcgcaccatggcgccgttgacccgcgacgccatcgccgcgatgtgggacgagcttcaggaagaagatgagtaa

SEQ ID NO: 210679 - DNA, 483 bp, Klebsiella pneumoniae
atgaacatactcttcgcaatcgcattaacgacaggcatcctctccgggatttgggggtgggtggcggtcgctctcggcctgctgagctgggccggattcctcggctgtacggcctatttcgcctgcccgcagggcggcttgaaagggctggccatctcgtcctgcacggtgatgagcggcgtggcctgggcgttagtgattatccacggtagcgcgctggcgccacaggtgcagatcctcagctatatgatgaccggtgtggtcgccttcctgatgtgcattcaggcgcgacggacgctactgtcgtttgtcccgggcacctttatcggcgcctgcgcgaccttcgcggcagacggcgactggcgtctggtgatcccttccctggcgctgggtctggtctttggctatgccatgaaaaatagtggcctgtggctggcggcccgtgcggataagcataaatcgttcgccaacgacaacgcctga

SEQ ID NO: 210680 - DNA, 528 bp, Klebsiella pneumoniae
atggctgttaaacctgaggtaattctcggcgatattacgacacttgatgtcgatgtgattgttaatgcggcaaatccctcgctgctgggtggtggcggagtagacggggccatccaccgggcggccggtcccgcgctgctggcggcttgcaagcaggtgctgcagcagcagggcgaatgccctcccgggcatgcggtaattactattgccggcaatctgccggccagcgcggtgatccacaccgtgggcccggtctggcacggcggcgaccgcatggaggcgcaaaccctggccgatgcttacaaaaacagtctgcagttggcctcggcaaacaactatcgctccattgcgtttccggcgataagcaccggcgtgtatggctatccgagagaggaagcggcggcgatcgccgtgcgcaccgtcaccgcgtttctcactcgctataatcctcttgagcgcgtcctgttcgtctgttttgacgaggaaacggcggctatctatcgccgcctgctggcgtcatacccctga

SEQ ID NO: 210681 - DNA, 594 bp, Klebsiella pneumoniae
gtgtcagaaggaaaagtccagcagaaacagcaggcgcgccgcgcggagatcgttgtcgccgcgcaaaaatgtttcgctgaaaaggggctgcacggcgcttccgtcgccgatatcgcccgggaagcgggcctgagcgtgggtcagctatatcgcatttttgccagcaaggaagcgatcatcgaagcgattgttagcgaaatcgtcaacgccagagtcggggagatgatcgatgagaaccacaatctggcgcgtaaagcggcggttttggccggcaggatcccgacgtcggcagccaccaaaagcgataattatctgctgatggagatcaatgccgaggcctcgcgtaacccacgcttgcgtgagatcctgatgcaggccgatcggcggttgaaagaggagggcggtcgcctgtcgcagcgcaaccatcccgggctcagcgatgcgcgacgcaatgccgcatcagagctcatcgccgttctgacagagggggcagcttaccgctgtgagctgagcgcctccaccccggtcgataaggcagatttagaagccctgtacaatatgattttcgaccggctttttgacgagcaggcataa

SEQ ID NO: 210682 - DNA, 1161 bp, Klebsiella pneumoniae
atgaataatactccggtacagcgtgaatatttcttcgacagcatccgcgcctggctgatgctgctggggatccctttccacatttcgctgatctattccagccacagctggcatgtcaacagcgctgagccctcgtggtggttgacgctgtttaatgacttcatccatgccttccggatgcaggtctttttcgtcatctccggctatttctcctacatgctgttcctgcgctacccgttgaaaaagtggtggaaagtgcgcgtcgaacgggtcggtattccgatgctgaccgctatcccactgctgacgctgccgcagtttattatgctgcagtacgtcaacggcaaggcggaaaactggcacaccctttccgggtacgacaaatttaacaccctggcgtgggagcttatttcccacctgtggtttttactggtgctggtggtgctgacctcgctgggcgtggtgctgtttaaatggctgacgcgccgcccggcagggggcgcctcagcctttggtgacactgtcactatgggccagctaacgatgattttccttgcgctgggggtgctttacgcgctgatccgccgatcgctgttcctgatttacccgccgctgcttagcaatggtctgtttaactttgtggtgatgcagacgctgttctatcttcccttctttgtgctgggggcgcagacctttattaatccgcgtctgaaggcgatgtttaccaccccgtcaccatggtgctgcgcagcggcgctgctgggatttatcgcctaccggctgaaccagcagtacggctccggcgacggctggatgtatgaaacggaatcggtgatcaccatggtgcttgggctgtggatggtcaatgtggtcttttcgctcggccatcgcctgctgaacttccagtcggcgcgcgtaacctatttcgtcaatgcttcgctgtttatttacctggtgcaccatccgctgacgctgctgtacggggcgtggatcaccccggtcattaagtccaataccttaggctttattggcggggtagtttttgtggtgggtattgccctgatcctgtatgaaattcacctgcgcattccgctgctgcgtttcctgttctccggtaaaccgatgaacaaaccggccaaaaccccagcctcggccagctaa

SEQ ID NO: 210683 - DNA, 1554 bp, Klebsiella pneumoniae
atgaaacataaaccacagatgatgaaaatgcgttggttaagcgcagccgtaatgttgtccctgtgtacttcatctgcatgggcatttagcattgatgacgttgcaaaagaggccaaaacgttagccgggaaaggctatgaagcgccgaagagtaacctgccctccgctttccgcgacatgaaatacgcggattaccagcaaattcagtttaatcacgataaagcttactggaataaccagaaaaccccattcaagcttgaattttaccatcagggtatgtacttcgacacgccggtcaccatcaatgaagtgacggccaccagcgtgcgcaaaattaaatatagcccggactattttaactttggtaacgttcagcacgataaagacacggtgaaagacctcggtttcgccggcttcaaagtactgtatccgatcaatagcaaagataagaacgatgagatcgtcagcatgctcggtgccagctacttccgcgtgctgggtcagggtcaggtttacggcctgtccgcgcgcggcctggctatcgataccgcgctgccgtccggcgaagagttcccgcgttttcgcgagttctggatcgagcgtcctaaagccaccgacaaacgtctgactatctatgcgctgctggactccccgcgggcaaccggcgcttatcgctttgtcatcatgccgggacgcgacaccgtggtagatgtccagtccaaagtttacctgcgtgacaaagtgggcaaactgggcgtggcgccgctgaccagcatgttcctgttcggttccaaccagccttctccggcgcttaactatcgtccggcgctacacgactccaatggtctgtcgatcctggccggtaacggcgagtggatctggcgtccgctgaacaacccgaaacaccttgccgttagcagctatgcgatggaaaacccgcaagggttcggcctgctgcagcgcggccgtcagttctcgcgcttcgaggatctcgacgatcgttatgacctgcgtccgagcgcctggatcaccccgaaaggggagtggggcaaagggaaaatcgaactggttgaaatcccgaccaacgatgaaaccaacgataacatcgtgacttactggacgccggatcagctgccggagccgggcaaggagatgaacttcaagtacaccatcaccttcagccgcgatgaagacaagctgcatgcgccggataacgcttacgttatgcagacccgccgctctaccggcgacgtgaagcagtcgaacctgatccgccagccggacggcaccattgctttcattgtcgacttcaccggcgccgatatgaaaaaactgccggcggataccccggtcgccgcccaggcgagtaccggcgataacgctgaaatcgttgaaaataccgtgcgttacaatccggtgaccaaaggctggcgaatgatcctgcgtttgaaggtgaaagatccgaagaaaacgacggaaatgcgcgccgcgctggttaacggtgatgacacgttgagcgaaacctggagctatcagctgcctgccaatgaataa

SEQ ID NO: 210684 - DNA, 2529 bp, Klebsiella pneumoniae
atgaataagataacaaagtacattgacgcattgccgctgtcggacgccgagaaatcggcgctgccggacaccagcctgcaggccgttcatcaggccctggatgacgaccatcagaccttcgcccgcgaagacgactccccgctggggtcggtcaaggcacggctggcgcatagctggccggattcgctgtctggcgatcagctggtgaaggacgatgaaggccgtactcagctgcatgcgatgcctaaagccaagcgctcctcaatgatcccggacccgtggcgtaccaacccggtcggccgcttctgggaccgtctgcgcggacgcgatgtcacgccgcgctatctctcccgtctgacgcaagaagagcgcgagagtgagcaaaaatggcgtaccgtcggcaccattcgtcgctatatcctgctgctgctgacgctgtcgcagaccgtggtagccacctggtatatgaaaaccattctgccttatcagggctgggcgctgatcaacccggccgacatggtggggcagaacctgtggatctcgttcatgcagctgctgccgtacgtgttgcagagcggtattctgatcctcttcgcggtgctgttctgctgggtttccgccggcttctggaccgcgttaatgggcttcctgcagctattgatcggccgcgataagtacagtatttccgcctcgacggtcggtgacgaaccgttgaacccggcgcaccgtacggcgctgataatgccgatctgtaacgaagacgttgaccgcgttttcgccggcctgcgggcgacctgggagtcggtgaaagcgaccggtaacgccgctcatttcgacgtctatatcctcagcgatagctataaccccgatatctgtgttgctgagcaaaaggcgtggatggagctgattgccgaagtgcagggcgaagggcagatcttctaccgccgccgtcgtcgtcgagtgaagcgtaagagcggcaacatcgatgacttctgccgccgctggggcagccagtatagctatatggttgtgctggacgctgactcggtgatgaccggtgagtgtctgagcagcctggtgcgcctgatggaagcgaacccgaatgccgggatcatccagtcttccccgcgcgcctcgggcatggatacgctgtatgcgcgttgccagcagtttgccacccgggtgtacggtccgctgtttacggcgggtctgcacttctggcagttgggggagtcccactactggggccacaacgccataatccgcgtgaagccgttcattgagcactgcgcgctggcgccgctgccgggcgagggcaactttgccgggtcgatcctgtcgcacgacttcgtcgaagccgcgctgatgcgccgtgccggctggggggtgtggattgcctacgatctgccgggctcctatgaggagctgccgccgaacctgctggacgagctgaaacgcgaccgtcgctggtgtcagggcaacctgatgaacttccgcctgttccttgtcagagggatgcacccggttcaccgggcggtgttccttaccggcgtgatgtcctacctgtcggcgccgctgtggtttatgttccttgccctgtcgacggcgttgcaggtggtgcatgccctgaccgaaccgcagtacttcctgcagccgcgtcagctgttcccggtgtggccgcagtggcggcctgagctggccatcgcgctgttcgcctcgaccatggtgctgctgttcctgccgaagctgctgagtattattctggtgtggtgtaaagggccgaaagagtacggcggatttatccgcgtcacgctttcactgctgctggaggtcctgttctcggtcctgctggcgccggtccgtatgctgttccacaccgtcttcgtggtcagcgccttcctcggctgggaggtggtatggaattcgccgcagcgtgatgatgactccacgccgtggggggaagcctttatgcgccacggctcgcagctgctgctggggctggtgtgggcggtcgggatggcatggctggatctgcgcttcctgttctggctagcgccgatcgtcgtctcgctgatcctctccccgttcgtatcggcgatttccagccgggcgacagtgggcctgcgcaccaagcgctggaagctgttcctgatcccggaagagtattcgccgccgcaggtgctcaaggataccgatgcgtacctgacgatgaaccgtcagcgttcgctggacgatggctttatgcacgcggtgtttaatccgtcgtttaacgccctcgccaccgcaatggccactgcgcgccaccgtcaggggcatatcctggagatcgcccgcgagcgccatgtcgagcaggcgctgaatgaaacgccggataagctgaaccgcgatcgtcgactggtgctgttgagcgacccggtaaccatgtcacgtctgcactatcgcgtatgggccgcgccggagaaatactcttcatgggtgaacgcctatcagcagttggcgcttaacccgctggcgctgaaaacgaaataa

SEQ ID NO: 210685 - DNA, 228 bp, Klebsiella pneumoniae
atgcgaatactaccgatcattgccatggcgctgctgctcagcggctgcggcagcattatcagccgtacggtgcccgggcaggggcatggcaatcaatattacccgggcgtacagtgggatgttcgcgattcggcatggcgctatctcaccattctcgacctgccgttctcgctggtatttgatacgcttctgctgcctctggacgccagccacggcccctataactga

SEQ ID NO: 210686 - DNA, 387 bp, Klebsiella pneumoniae; identical to SEQ ID NO: 135922

SEQ ID NO: 210687 - DNA, 1227 bp, Klebsiella pneumoniae
atgtcgtctgctgaaacccccattaactggaaacgaaacctgaccgtgacctggcttggctgctttttaaccggcgccgccttcagcctggtcatgccctttctgccactctacgtcgaacagctcggcgtcaccgggcatagcgccctgaacatgtggtccgggctggtctttagtattacctttcttttctccgccatcgcctcgccgttctggggggggcttgctgatcgcaaggggagaaaaatcatgctgctgcgttccgccctcgggatggccatcgtgatgatgctgatgggaatggcgcagaatatctggcagtttctgctgctgcgcgcactgctcggcctgctgggcggttttattcctaacgccaacgccctgatcgccacccagatcccgcgccataaaagcggctgggcgctggggacactgtctaccggcgcggtaagcggcgccctgctcggcccgctggcaggtggcttcctggccgaccactggggattgcgcaccgtcttctttatgaccgcggcggtactatttatctgtttcttgtttaccctgtttttaatccgcgaaaattttgtgccgatcgccaggaaagagatgctcagtgccagagaggtgttctcctcgctgcagaatcccaaactggtgctcagcctgtttgtgacctcgctgataatccaggtggccaccggttccattgcgccgatcctgacgctttatgtacgcgatctcgcgggcaacgtcagtaacatcgcctttatcagcggaatgatcgcctcggtgccgggtattgccgcgctgatgagcgccccgcggctgggcaaactgggggatcgcatcgggccggaaaaaatcctcatcgtggcgctgattatctcggtgctactcctgatcccgatgtcgttcgttcagaccccgctgcagttaggtatcctgcgattcctgctcggcgccgcggacggcgcgctgctgccggcggtgcaaaccctgctagtgtacaactccaccagccagatctccgggcgaatcttcagctataaccagtcgttccgcgatattggcaacgttaccggccccctgattggcgcgtcggtttccgctaactatggcttccgcgccgtatttctggtcaccgcaggggtggtattgtttaatgcgatctactccaccctcagcctgcgtcggccagccgcggatacttcgcattcagtaaattaa

SEQ ID NO: 210688 - DNA, 921 bp, Klebsiella pneumoniae
atgactcatttgcctaaattttctccggcgctgttgcatccgcgctattggctgctgtggctgggtatcggcctgctgtggctggttgtccaactgccctacccgctgatctaccgcctcgggaacgccatcggccggctggccatgcgctttatgaagcgccgggcgaaaatcgcctatcgcaaccttgagctctgcttccccgagaaaagcgagcaggaacgccaccgaatggtggtgatgaactttgaatcggtgggcatggggctgatggagacggggatggcctggttctggccggttcgtcgtatcgcccgctggaccgataccatcggctttgagcatatccgcgatgtgcaggcgcagcagcgcggcattctgctgatcggtattcatttcctcactctcgagatgggtgcgcggatgttcggtatgaacgagccggggattggcgtctatcgccccaacgacaacccggtgatcgactggctgcagacctggggccgcttgcgctccaataaggatatgattgaccgtaaggatctgaaaggcatgatccgggcactgaaaaaaggcgaagtggtgtggtacgcaccggatcacgattacggcccgaccgccagcgtctttgccccactgtttgcggtcgaccaagcggcgaccacctccggcacctggatgctggcgaaaatgtccaaagcctgcgtcgtgcccttcgtcccgcgccgcaaaccggacggtaaaggttatgaactgattatcctgccgccagagtgttccccgccgctggacgacgcggaaaccaccgccgcgtggatgaacaagatcgttgagcagtgcatcatgatggccccggaacagtatatgtggctccatcgtcgcttcaaaacccgccccgaaggcatgccctcccgctactga

SEQ ID NO: 210689 - DNA, 1065 bp, Klebsiella pneumoniae
atgccagtgttacacaaccgcatttcaaatgagacgttaaaggcgcaaatgctggctgaaaccgagccgcgcacgacgatctcgttctataaatatttcactattgtcgacccgcaggcgacccgcgatgcgctgtgggttgccttaacccagctgaaggtttttggccgcatctatctggcccgggaagggatcaacgcgcaaatcagcgtgccgcaaagcaacgttgaggctctgcgtgagtttctctatggcttcgatccggcgctggcggggctgcgtttcaatatcgccgtggaggacgatggtaagtctttctgggtgctgcgcctgaaagttcgcgatcgtatcgtcgccgacggcatcgacgatccctcgtttgacgcctccaacgtgggggagtatctcaaggcggcggaagtcaacgcgatgcttgacgatccggatgccgtgtttatcgatatgcgcaaccactatgaatatgaggtgggccatttcgaaaacgcgctggagatcccggcggataccttccgcgaccagctgccgaaagcagtggaaatgatgcaggaccataaagacaagaaaattgtcatgtattgcaccggcggcattcgctgtgaaaaagccagcgcctggatgaagcataacggcttcaataaggtctggcacatcgagggtggcatcatcgagtacgcccgtcgcgcccgcgagcaggggctgccggtgcgtttcattggtaaaaactttgtctttgatgagcggatgggcgagcggatctccaatgacgttatcgcgcactgtcatcagtgcggcgcgccgtgcgatacccatactaactgcctgaacgatggctgccatctgctgtttatccagtgcccgagctgcgccgagaagtttgccggctgctgtagcgaagcctgcatggaagagcataagctaccggaagaggagcagcgtaagctgcgcgccgggcgtgaaaacggcaacaaaatctttaataaatcccgtggccggctgaataccaaactcgggatcctcgacccggagccgtcagaaaaaccataa

SEQ ID NO: 210690 - DNA, 1119 bp, Klebsiella pneumoniae
atgcaatacgatcttatcattattggcagcggctccgtcggcgccgccgctggctattatgcgcgccgtgccggactcaatgttctgatgaccgatgcccatcaacctccccaccaggaaggcagccatcacggcagcagccgtcttatccgtcacgcctatggcgaaggtgagaaatatgttccgctggtgctgcgtgcccagcagctatgggatgaactggcagagatcagtggcgaagccgtgtttgaacgcaccggcgtcattaacctcggccccgccagctccgcttttctcgccaacgtcgccgccagcgcccgtgcgttccagcttgaggtggaagagctggatgcccaggccgtgatgcagcgctggccggagatacgcctccccgatgactatcgggcgattttcgaacccgcttccggcgtactgcgcagcgaactggccgtcgaaacctggatccgtctggcgcgggaagcaggctgcgcgcagctattcaactgtccggtctcggctattcatcaccatgctgacgggatcaccatcgataccctcgacggtgaatatcatggtaaaaaactgctggtcagcgccggcacctgggtcacccgcctgcttccggacctccctatccagccggtacgcaaggtgttcgcctggtaccaggccgatggccgttacagcagcaagaatcacttcccggccttcaccggcgagttgcccaacggcgatcaatattacggtttcccggcggaagataatgaactgaaaattggcaagcataacggcggccagccgatctccaccccgcaggagcgggtagcgtttggcgctgtcgccagcgatggttccgaatccttcccgtttttgcgtaacgtcctgcctggcatcggcggctgcctgcacggcgcctcctgtacctacgacaataccgtcgatgaggactttattatcgatacgttgccaggcaggccagacacgctgctgatcaccgggctgagcggccacggctttaagtttgcgccggtgctgggcgaaattgccagtcagtttgctcagggcgaagcatcgagcttcaatctggcccccttttctctggcgcgctttaacgcgtaa

SEQ ID NO: 210691 - DNA, 255 bp, Klebsiella pneumoniae; identical to SEQ ID NO: 135916

SEQ ID NO: 210692 - DNA, 252 bp, Klebsiella pneumoniae; identical to SEQ ID NO: 135915

SEQ ID NO: 210693 - DNA, 1047 bp, Klebsiella pneumoniae
atgacagcacaatcccaggtattgaaaatccgccgcccagacgactggcatatccatctgcgcgatgacgatatgctgaaaaccgtcgtgccttataccagtgagttttatggccgggcgatcgtgatgccgaatctggtgccgcctgtcaccaccgtcgcggcggctatcgcttaccgccagcgcattatggacgccgtgccggccgggcatgattttaccccgctgatgacctgctatctgacagactctctcgacccagcggagctggaacgcggctttaacgaaggggtgttcaccgccgccaagctctacccggccaatgccactactaactccagccacggcgtcaccagcaccgacgccattatgccagtgctggagcggatggaaaagctggggatgccgttgctcgttcacggcgaagtcactcacgccgagattgatattttcgatcgcgaagcgcgctttattgagacggtgatggagcccctgcgccagcgcctgcccggcctgaaagtggtttttgaacatatcaccaccaaagacgccgccgagtacgtgcgtgacggtaacgaactgctggctgctaccatcaccccgcagcatctgatgttcaaccgcaaccatatgctggtgggcggcattcgccctcacctgtactgtctgccggtacttaaacgcaatattcatcagcaggctctgcgggagctggtcgccagcggcttcagccgcgccttcctcggcaccgactccgcaccgcacgcccgccaccgtaaggaagccagctgtggctgcgccggctgctttaacgccccgaccgccctcggcagctacgccacggtgtttgaagaaatgaacgctctgcagcactttgaggctttctgctcgctgaacggcccgcgcttctacggtctgccggtcaatgagagctacgttgaactggtgcgtgaagagacgaccgttgtggacagcattgccctgcctaatgacgccctggtgcccttcctggcgggtgaaaccgttcgctggaccgtgaagaaataa

SEQ ID NO: 210694 - DNA, 561 bp, Klebsiella pneumoniae
atgaaaaagatattgatcgccgccgcgctaattgtcagcggcctgctgagtggctgtaatcagctgacccaatacacggtaagcgagcaggagattaaccaggccctgcagaagcgaaaccatttcgccaaagatattggtctgaaaggcgttgccgacgcccatatcgaactgcagaacctgaccagcgctatcgggcgcgaggagccgggcaaagtcaccctgagtgggatcgccaacgtcgatcttaactccctgttcggcacgcagaaagcgacgatcgatctgaagctcaaagcgctgccaacctttgaccgagagaaaggcgccatcttcctgcaggaaatggaagtggtcgatgccaaagtggcgccggagaagctgcagtcggttattcaggccctgctcccctacctgaatcagtctctgcgcagctacttcagccagcagccggcttatgtcctgcgtgaggacgccagcaccggcgaagcgctggcgaagaaatacgccaaaggtatagaggtgaagccaggcgagattgtcatcccctttaccaattaa

SEQ ID NO: 210695 - DNA, 1209 bp, Klebsiella pneumoniae; identical to SEQ ID NO: 135912

SEQ ID NO: 210696 - DNA, 624 bp, Klebsiella pneumoniae; identical to SEQ ID NO: 135911

SEQ ID NO: 210697 - DNA, 654 bp, Klebsiella pneumoniae
atgaaatatcagttaactgcgcatgaagcgcgcgtcattggctgcctgctggaaaagcaggtcaccacccccgagcagtatccgctgtcggtaaatgctgtggtgaccgcctgcaatcagaaaaccaaccgcgagccagtgatgtcgctgagcgaaagcgaggtccaggccctgctggatacgcttgtgaaacggcactatctgcgcacggtcagcggattcggtaatcgcgtcaccaagtatgaacagcgcttttgcaactctgaatttggcgatctgaagcttagcgccggcgaggtcgcggtggtcacgacgctgctgctgcgcggtgctcaggcgccgggcgaactacgcagccgggcgcagcggatgtatgagttcagcgatatggcggaagtggaaagcgtgctggaagggctggcgacgcgcgaagatggccccttcgtcgcccggctgccccgggagccgggaaaacgggaaagccgctatatgcatctgttttgcgacgatatggacacgctgatcaccacagtggaagctctcgcgccgctggacgatgacggcgatctgcgcgccagggttgaagcgctggagggcgaggtggcggagctgaaagcgcgcctcgattcgctgttacaccatctgggagactaa

SEQ ID NO: 210698 - DNA, 924 bp, Klebsiella pneumoniae
gtggggacaagattgcgcattggggtggtcggcttaggcagcattgcgcagaaagcgtggctgccggtgctgggggcggcggaaagctggacgctgcaggcggcctggtcgccgggtaaagagaaggcgctgcggatctgcgaaacctggcggatgccatacgctgattccctcgatgccctggcggcacagtgcgatgcggtctttgtccatacctcgacggcttcacattatgaagtagtgaatcacttactgaatgccggggttcatgtttgtgtggataaaccattggcggacaagctgagtgaggcggagacgctggtcgagctggcggcgcgacgtcgactgacgttgatggtcggttttaatcgccgcttcgcgccgctctatcgggagctgaaggggcggctgggcgaggcggcctcgctgcggatggataagcatcgtagcgatagcgtcggcaacgatctgcgctttacgctgcttgatgactatctgcatgtggtggataccgcgctatggctggccgacggtcaggcacgtctgcgcggcggcgcgctgaagatcaccccgcagggcgaaatgctctatgccgaacatcagttcagttcgccccggctgcaggtcaccaccagcatgcatcgtcgcgcaggcagccagcgcgagtgggtgcaggcggtcacggatggcgggttatatgccgtcagcgagatgcgcgaatggcaggaggagtgcggtcatggcgtggtccagcgcccggttgccggctggcaaaccacccttgagcagcgcggctttgtcggctgcgcgcgccattttatcgaatgcgtgcaaaatcagacagttcctgaaactgcaggcgaacaggcgctgctggctcagcggatcgttgagaaactgtggcgcgacgccattagcgaataa

SEQ ID NO: 210699 - DNA, 1536 bp, Klebsiella pneumoniae
atgaaccttttaaaatcactggcggcagtcagttcgatgaccatgttttcgcgcgtgctgggctttgcccgcgatgcgattgtggcgcgtatttttggcgccgggatggcgaccgatgccttttttgtcgccttcaaactgcctaacctgctgcggcgtatttttgccgaaggcgccttctcacaggcgtttgtgccgatccttgccgaatataaaagcaagcagggcgaagatgccacccgcgtgtttgtctcatacgtctccgggctgctgaccctggccctggctatcgttaccgttatcgggatgctggcggcgccgtgggtaatcaccattactgcgcccggctttgccgataccgccgataagtttgcgctaaccacccagctgctgcgtattacctttccctatattttgctgatctccctggcttcgctggtgggggcgatcctcaatacctggaaccgcttctcggtgccggcctttgcgccgacgttcctcaacgtcagtatgattggttttgcgctgtttgccgcgccgtatttccatccgccggtgctggcgctggcctgggcggtgacggtcggcggcgtgctgcagctggcttaccagctgccgcatctgaagaagattggcatgctggtcctgccgcgaattaatctgaaagatgccggcgcgatgcgggtggtgaagcagatggggccggcgatccttggcgtgtcggtaagccagatctcccttattatcaataccattttcgcctcattcctcgtgtcgggctcggtgtcgtggatgtattatgccgaccgcctgatggagtttccctccggcgtgctgggcgtggcgctcggcactatcctgctgccatcgctgtcaaaaagcttcgccagcggtaaccatgacgagtattgccggctgatggactggggactgcgtctctgttttctgctggcgctgccgagcgcggtggcgctggggatcctcgccaaaccgctgaccgtggctctgttccagtacggcaaattcagcgcctttgacgcggcgatgacccagcgcgcgctggtggcctattccgtggggctgatgggccttatcgtggtgaaagtgctggcgccgggcttttattcccgtcaggacatcaagaccccggtcaagattgctattatcaccctgattatgactcaggtaatgaacctggcgtttatcggcccgctgaagcatgcgggtctgtcgctgtccatcggcctggcggcctgcctgaacgccgcgctgctctactggcagctgcgtaaacagaaaattttcaccccgcagccgggctggttggccttcctgctgcgtctgattattgcagtgctggttatggccgcggcgctgctgggcgtcatgcatctcatgcctgagtggtcgctggggacgatgccgttccgtctgatgcgtttgctggcggtggttatcgccggggtggtagcctatttcgccacgctgctggtgctgggcttccgcgtgaaagagtttgtccgtcgcacggcgtaa

SEQ ID NO: 210700 - DNA, 1215 bp, Klebsiella pneumoniae
atgacaccgacttccctttccacccgcgacgcaggctggattatcttcattctcgcactcggcgccggctttagcgtcgcctctatttactacgcgcagccgctgctgccgttgatgggcgccaatctccacctgactgtagaaggtatgggtctggtccctaccctgacgcaggcgggttatgcgctcggcattctgttcctgctcccgctcggcgaccgccacgatcgccgccggctgatcctggtgaaaagcgcgctgctggcgctcctgctgctcctgtgcagcctcaccggccagctcagctcactgctggtggtcagtctgctgatcggtatggcggcgaccatggcgcaggatatcgtcccggcggcggcgatcctcgccccggcgggcaagcagggaaaaatggtgggcaccgtgatgaccgggctgctgctggggatcctgctctcccggacggtcagcggcgtggtgggcgccgtattcggctggcgggtgatgtatcaggcggcggcggtcagcgtcgcgctgattggcctggtaatgtggcgcgtcctgccgcgcttcgctgtgcactcgacgctgagctatccgcagctgatggcctcgatggcgcatctgtggcagcgttacccggcattacgccgcgccgcgctagctcagggcgcgctctccatcgcctttagcgccttctggtcgacgctggcggtgatgctctccgaacactatcacatgggcagcgcagtagcgggcggtttcggtatcgccggggccgccggggcgctggccgcgccgcttgccggcggtctggccgataaatttggcgccggtaaggtgacacagatgggtgcggcgctggtcaccctctcctttgccctgatgtttgtgctgccgctgctgccagtgcacgctcagttggcgctgattgccctgtcggcgattggctttgaccttggcctgcagtcaagcctggtggcgcatcagaacctggtatatggccttgagccacaggcccgcggccgcctcaacgccctgctattcaccgtggtgtttatcgggatgtcgctgggatcggtgctgggcagtaagctgtacgtgctggccggctggaacggagtggtcacgctggcagtgatcactggcgcgctagccctggcgatccgcctgctggagaatgcccgcatcctcgctgccgaacgcagcgcatcataa

SEQ ID NO: 210701 - DNA, 936 bp, Klebsiella pneumoniae
atgaaaagacaagagcgtatagaccgcattgagctgatgcgcacctatatccgcatcgtagaggccggatcgctctccgccgccgcagggcagatggacactacccaggcgaccgtcagccgccgcctgcagtcccttgaagggctgctgggggttaagctgatcctgcgcaccacccatgcgatgaagctcactgacgatggcgaacgctgttatcgtcacgcccgtcaggtggtggacgcctggctggcgctggaggatgacctgcgtattgccgacgatcggccggtgggcgttctgcgagtgcgggcgccccacgcgtttggccagcagcagctgctggcgccgctggtggcatttctacagcgccatccgcagctgtcggtggagtggatgctaaacgataataccgtcgacttcctcagcgataatatcgactgcgctattcgcgtgggggcggaggtggatccagcaacggtatccgtactgctggcggaagtgccgcgctgcgtagtggcttctcctgagctgctggcgaagtatccgccgttaacctcgctggaggcgttatcgggcctgccatggatcgccattaataccttttatcagcatgaggtacggctcaggcatcaggcaagcgggcagattgtctctacagcgattactccctgtctgagcactgacagtctttacgtcgcgcgcaacaccgcgctggcggggctgggggtggcgatggtgtccagctggacggtcgtggaggatattgccgccggacggctgattgagctgttcccgcagtggcgacccgcctcgctgccggttcatctggtttatccctgggcgcgctattacccgacacgcctgcgtaagttcctcgacctgatgcgggagatcatgccggatctcgccgggatgcagcgtccgcaaagcgcataa

SEQ ID NO: 210702 - DNA, 3234 bp, Klebsiella pneumoniae
atgaaaagaatgttaatcaacgcaactcagcaggaagagttgcgcgtcgcccttgttgatgggcagcgcctgtacgacctggatatcgaaagccccgggcacgaacagaaaaaagcgaacatctacaaaggcaaaatcacccgcattgaacccagccttgaagccgcgtttgttgattacggcgccgagcgtcatggtttcctccccctcaaagaaatcgcccgcgaatacttccccgccaactacaatgcgcatggtcgtcctaatatcaaagacgtactgcgggaaggtcaggaagttatcgtgcagattgataaagaagaacgcggcaacaaaggcgctgcgctcaccacctttatcagcctggcgggcagctatctggtactgatgccgaacaacccgcgcgccgggggaatttcccgccgtatcgagggcgacgaccgtaccgaactgaaagaagcgctggcgagcctggagcttccggacggcatgggcctgatcgttcgcaccgctggcgtcggcaaatccgccgaagccctgcagtgggacctgagcttccgcctgaagcactgggaagcgattcagaaagccgcggaaagccgtccggcgccgttcctgatccaccaggaaagcaacgtcattgtccgcgccttccgtgactacctgcgccaggacatcggcgaaatcctgatcgataacccgaaagtgcttgagctggcgcgccagcatatcgccgcgctgggtcgtccggatttcagcagcaaaatcaaactgtacaccggtgaaatcccgctgttcagccattatcagatcgaatcgcaaattgagtccgccttccagcgcgaagtgcgcctgccttccggcgggtctatcgttatcgatagcaccgaagcgctgaccgcgatcgatatcaactccgcccgcgccacccgcggcggcgatatcgaagagacagccttcaataccaacctcgaagcggctgacgaaattgcccgccagctgcgtctgcgcgacctcggcggcctgatcgttatcgacttcatcgatatgaccccggttcgccaccagcgcgccgtggagaatcgtctgcgcgaagccgtccgtcaggaccgggcgcgcattcagatcagccatatttcgcgcttcggcctgctggagatgtcccgtcagcgcctgagcccgtcgctgggcgagtccagtcaccacgtctgcccgcgctgctccggcaccggcaccgtgcgtgataacgaatcgctgtcgctctctattctgcgtctgatcgaagaagaagcgctgaaagagaataccaaagaagtccacgccattgttccggtaccgatcgcctcctatctgctgaacgaaaaacgtgccgcagtgagcgctatcgaatcccgtcagggcgatgtgcgcgttattatcgtgccaaacgacgaaatgcaaacgccgcactactccgtcctgcgcgtgcgcaaaggtgaagaaacctcaacgctgagctatctgctgccgaagctgcatgaagaagagatggcgctgccaggcgacgatgagccggcggagcggaaacgtccggaacagccggccctggccgcttttgtcatgccagatgcgccgccagccccgatgctcgaagagcctgccgccgcgcctgtcgccgcagcggcaccggtcgcggccgccgcaccggcgcagcctggcctgctctcacgcttcttcagcgcgctgaagaatatcttctctggcgccgaagaggccaaaccggctgaagttcagatcgagaagaaagcggaagaaaaaccggagcgtcagcaggagcgtcgtaaaccgcgcgccaacaaccgccgcgaccgcaacgaccgccgtgataaccgcgacaatcgtgacaaccgcgataaccgtgacaatcgcgacacccgtgcggacaatgccgagggccgtgaaccgcgcgaatcgcgtgaagagaatcgtcgcaaccgtcgcgagaagccgtcgcagaacgtggaagcccgtgatgttcgccaaacctcaggcgacgacgcggagaaagcgaaatcccgtgacgagcagcagccgcgccgcgaacgcacccgccgccgcaatgacgacaaacgtcaggcgcagcaggaagccaaagcgcagactcgcgaagagccggttgtgcaggagacggagcaggaagagcgtgtacaaactctgccgcgtcgtaaaccgcgccagctggcacagaaagtgcgcgttgagtccgctgtcgtcgagccagttgccgagatcgtgccagaagccgtagtggctgaagttatcgctccgcacagcgagccggtgaaagccgagctgccggcaggggtggagagcgttgcggaccaggacgaaaatggcgaatcccgtgaagcgaacggtatgccgcgtcgctcacgtcgctccccgcgtcacctgcgcgtcagcggtcagcgtcgtcgtcgctatcgtgacgaacgctatccgacccagtcgcctatgccgctgaccgtagcctgcgcatcgccggagatggcttccggtaaagtctggatccgctacccggtggttcgtccgcaggatcagcagccggaagaggttcaggttcaggacgccagcgtcgcgaaaactgtcgaggccgtagcggccccggttgccgtcgttgaaaccgttaccgctgcgccggtcaccgtcgagccggctaccatggaaccagtaaccgctgagccggtagtcgtcgagccggtagcggccgccgagccgctggtcgttgatgctgcggaagttgtcgcgccagcagccgtcgagccagcgcctcaggagccggtcaccgaagcaccggctgtcgaagcgcctcaggctatcgcgccagtgacgctcgaccccgagccggtggtggtagagcctgaagcgctggaaacgacgcctgtcgttgcagcgccagttgaaaccatcgccccggtcgcagaaaccgtggagcaagcgccagtgatcgaagcggcccctgccgaaccggtcaaagccgagcccccggtgagcaagccggtcgtagtggcgggtcatcgccatgccaccgcgccaatgacccgtgcgccagctccggactatgtcccggaagcaccgcgtcacagcacctgggtgcgcccgccgttcgcctttgaaggtaaaggcgccgccggtggtcatagcgcgacccataaagccaccgctgaaccgactcgcccacagcccgtcgagtaa

SEQ ID NO: 210703 - DNA, 996 bp, Klebsiella pneumoniae
atgagtggcgctaatgcgtccggctatttagaatcgcgcaccatgaaaactgagaccccaaccgtaaaaatggttgccattgctgctgatgaagcggggcaacgtatcgacaactttttgcgtacgcaattgaaaggcgtaccgaaaagcatgatttatcgcatcctgcgtaaaggcgaggtgcgggtaaacaaaaagcgcgtgaagccggagtataagctggaagcgggcgatgaagtccgtatcccgccggtgcgcgtggcggagcgtgaagaagaggcggtatcgccgcacctgcagaaagtggccgcgctctctgaggtgatcctctatgaagacgatcatattctggtgctcaataagccttctggtaccgcggtacacggcggcagcggcctaagcttcggcgtgattgaagggctgcgcgccctgcgcccggaggcgcgcttccttgagctggtgcatcgtctcgaccgggatacctccggcgtgctgctggtggcgaaaaagcgctcagcgctgcgttcgctgcacgagcaactgcgcgataaaggcatgcagaaagattatctggcgctggtgcgcggccagtggcagtcgcataccaaagtggtccaggccccgctgttgaagaatattctgcagagcggggagcgcatcgttcgcgtgagtcaggaaggcaagccgtcggagacgcgttttaaagtggaagagcgttacgaattcgccacgctggtgcgctgcagcccggtcaccggccgcacgcatcagatccgcgttcatacccagtatgccggccatcctatcgcttttgacgaccgctatggcgaccgcgagttcgacaagcagctgtccgctaccggcttaaaccgcctgttcctgcacgcggcggcgctgaagtttacccacccggggagcggggaggtgatgcgcgttgaggcgccgctggacaaccagctgaagcactgtttacaggtgctacggaagagcaaataa

SEQ ID NO: 210704 - DNA, 585 bp, Klebsiella pneumoniae
atgtctgatcttatcctcgcgtcaacctctccctggcggcgcatgctgctggaaaaactgggtttaccgtttgaatgtgccgcgcctgacgtcgacgaaacgccccggcctgatgaatccgcacgtcagcttgtcacccgactggcgcaggccaaagcgcaaagtctggccacacgcttccctaatcaccttattataggctccgatcaggtttgcgtactggacggtgaaatcaccggcaaaccgcacaccgaggaaaatgcccgcaggcagttaagaaaggccagcgggtcaatcattaccttttataccggactggcgctgtacaactctgccagcggccatctgcaaaccgaatgcgaaccctttgacgttcactttcgccatctcagtgataaagagatagaaggctatgtgcgcaaagagaacccgctgcagtgcgccgggagtttcaagagcgaaggattaggcattacgctgttcgaacggctggaaggccgcgacccgaacaccctggtcggtttacccttaatcgcgctctgtcagatgttgcgccgtgaaaactacaacccgctgttaggctga

SEQ ID NO: 210705 - DNA, 522 bp, Klebsiella pneumoniae
atgcaaaaggtaaaattacccctgactcttgatccggtacgcacggctcaaaaacgccttgattacgaaggcatctatgcccgcgatcaggttgaacgtgtaaccgattctgtagtcagcgtggacagcgatgtggaatgcagcatgtcgttcgctatcgataaccagcgtctcgccgttattactggcgatgcaaaggtaacggtaactctcgaatgccagcgttgcgggaaaccgttctcccatcacgtccacaccacgtattgttttagccccgtcagaaatgacgaacaggccgaagcactaccggaagcgtatgagccgattgaggttaacgaattcggtgaaatcgacctgcaggcaatggtcgaggatgaaattatcctctccctgcccgtagttccggtgcatgattctgaacactgtgaagtgtccgacgcggacatggtctttggcgaactgcctgaagaggcacaaaaaccaaacccatttgccgtattagccagcttaaagcgtaagtaa

SEQ ID NO: 210706 - DNA, 174 bp, Klebsiella pneumoniae
atggccgtacaacagaataaaccaacccgttccaaacgtggcatgcgtcgttcccatgacgcgctgaccgcagtcaccagcctgtctgtagacaaaacttctggtgagaaacacctgcgtcaccacatcactgccgacggtttctaccgcggtcgcaaggttatcgctaagtaa

SEQ ID NO: 210707 - DNA, 1161 bp, Klebsiella pneumoniae
atgaagcttagtgaggactccccgggcaactggggaatcaccgaaccgggcagcgacgataccttgacacgtctaaccctggcgttagatgtcatggggggcgatttcggcccatccgtgacggtgcctgcagcactgcaggcactgaactctaattcgcaactcacacttcttttagtcggcgatcccgacgccatcacgccattactcgccaaagctgatttcgaacaacgttcgcgtctgcagatcattcctgcgcagtcagttattgccagtgatgcgcgacccgcacaggctatccgcagcagtcgcggaagctcaatgcgcgtggcgctggagcttgtgaaagaagggcgggcgcaagcctgcgtcagcgctggcaacaccggcgcgctgatgggtctggcgaaactgctgctcaaaccgatcgaaggtattgagcggccggcgctggtgacggttttaccgcaccagcagaagggcaaaaccgtggtgctggatctcggcgccaacgtcgattgcgacagcacgatgctggtgcagttcgcggtaatgggcgcggtgctggcggaagaagtggtcggcattgccaacccccgcgtcgctttgttgaacatcggcgaagaagagatgaaaggcctcggcagcatccgcgatgctgccgcagtgctcaaaacgctgccttccctcaactacatcggctatcttgaagccaatgaactgttgaccggaaaaaccgatgtgctggtttgtgatggattcacgggcaacgtcacattaaaaaccatggaaggtgttgtcagaatgttcctttcactgctgaaatctcagggagagggcaaaaaacggtcgtggtggctgctgttactaaaacgttggttacaaaaaagcctggcgaggcgattcagtcacctcaaccccgaccagtataatggcgcctgtctgttaggattgcgcggttccgtgatcaagagtcatggtgctgccaatcaacgcgcctttagcgtcgcgatagagcaggcagtgcaggcggtgcagcggcagatccctcagcggatcgccgcgcgcctggaatctttatacccagctggtttcgagctgccggaaagcgacagtgacgtgaacgcccgacagcaaagcgggacgaatggccacgattga

SEQ ID NO: 210708 - DNA, 954 bp, Klebsiella pneumoniae
atgtatacgaagattattggtaccggcagctatctgcccgagcaagtgcgtacaaacgccgacctggaaaaaatggtagaaacctctgacgagtggattgtcacccgcacaggtatccgtgagcgtcgtattgccgcagcgcatgaaacagttgctacgatgggctttgaagccgcaaagcaggcgctggcgatggcgggcgtgtccgcggagcaaattggtctgattatcgttgcgaccacctccggcacgcacgcgtttccgagttctgcatgccagatccagtcaatgctgggcgttaagggttgcccggcgtttgatgtcgccgccgcctgcgccggtttcacctatgcgctaagcgtcgccgatcagtatgtgaagaacggcgcggtagattatgcgctggttgttggcgccgatgtgctggcgcgcacctgcgatccggcggatcgcggaacgattattattttcggcgacggcgccggcgcggttgtactgggcgcctccgaagagccgggcattatctcgacgcatctgcatgccgacggcagctatggcgaactgctgaccctgccgaacgccgatcgcgtcgatccggaaaacccgatctatctgacgatggccggcaacgaagtcttcaaagtggcggtcaccgagctggcgcacatcgttgatgagacgctggcagcgaataatcttgaacgttcagcgctggactggctggtgccgcatcaggctaacctgcgtattatcagcgcgacggcgaagaaactgggtatgtcgatggataacgtcgttgtgaccctcgaccgccatggcaacacctccgcggcgtcagtcccttgcgcgctggatgaggccgtccgcgatggccgtattcagcgcggtcagctgattttgctggaagcctttggtggcggtttcacctggggttccgcgctggttcgtttttag

SEQ ID NO: 210709 - DNA, 930 bp, Klebsiella pneumoniae
atgacgcaattcgcatttgtgttcccggggcagggctctcaggccgtaggcatgctggccgaaatggctgccgcctggccggtcattgaagagaccttcggtgaagcttccgcagcgttgggttacgatctgtgggcgctgacgcaacagggcccggcagaagaactgaataagacctggcagactcaaccggcgctgctcgccgcctccgtggcgctgtaccgcgtctggcaacagcagggcggcaaagcgccagcgctgctggcgggtcacagcctcggcgaatactccgcgctggtatgcgcgggcgttatcggtttcgctgatgccgttcgcctggttgagctgcgtggtaaattcatgcaggaagccgtaccggaaggtaccggcgccatgtccgcgattatcggtctggacgacgccgctatcgccaaagcctgtgaagagtctgccgaagggcaggtggtctctccggtgaactacaattctccgggccaggtggttatcgccgggcacaaagaggccgttgaacgcgctggcgccgcctgtaaagccgccggcgccaaacgcgcgctgccgctgccggtgagcgtgccgtcccactgcgcgctgatgaagccagccgcagaaaaactggcggtagagctgcagaaaatcaccttcaacgcgccgacgattccggtggtgaataacgtcgacgtgaagtgcgaaaccgcgccggacgccattcgcgacgcgctggtgcgccagctgtacagcccggtgcagtggaccaaaaccgttgagtttatggctgccgagggcgtatcgcatctgtatgaggttggcccgggtaaagtcctcaccggcctgaccaaacgtattgttgacaccctgaccgcttccgcgcttaacgagccggcggcgatgtctgcggcgcttgagcaataa

SEQ ID NO: 210710 - DNA, 735 bp, Klebsiella pneumoniae
atgagttttgaaggaaaaatcgcgctggttaccggtgcaagccgcggtattggccgtgctatcgctgaaacgctcgtcgcccgtggcgcgaaagttatcggtactgcgaccagcgaaagcggcgcgcaggcgatcagcgactatttaggcgccaatggtaaaggtctgatgttgaatgtgaccgacccggcatctattgaatctgttctggaaaatgtgcgcgcagagtttggcgaagtggatatcctggtgaataatgccgggatcactcgcgacaatctgttaatgcgcatgaaagatgacgagtggaacgatattatcgaaaccaacctgtcatcggttttccgtctgtcaaaagcggtaatgcgcgctatgatgaaaaagcgtcatggacgtattatcactatcggttctgtggttggtaccatgggaaatgcgggtcaggccaactacgccgcggcgaaagcgggtctgatcggcttcagtaaatcactggcgcgtgaagttgcgtcccgcggtattactgtaaacgttgttgctccgggctttattgaaacggacatgacgcgtgcgctgaccgatgagcagcgtgcgggtacgctggcggcagttcctgcggggcgccttggcaccccaaatgaaatcgccagcgcggttgcatttttagcctctgacgaagcaagttacatcactggtgaaacgctgcacgtcaacggcggaatgtacatggtctga

SEQ ID NO: 210711 - DNA, 237 bp, Klebsiella pneumoniae
atgagcactatcgaagaacgcgttaagaaaattatcggcgagcagctgggcgttaagcaggaagaagttaccaacaatgcttccttcgttgaagacctgggcgctgattctcttgacaccgttgagctggtaatggctctggaagaagagtttgatactgagattccggacgaagaagctgagaaaatcaccaccgttcaggctgccattgattacatcaacggccaccaggcgtaa

SEQ ID NO: 210712 - DNA, 1242 bp, Klebsiella pneumoniae
gtgtctaagcgtcgtgtagttgtgaccggactgggcatgttgtctcctgtcggcaataccgtagagtctacctggaaagctctccttgccggtcagagtggcatcagcctgatcgaccatttcgatactagcgcctatgcaacgaaatttgctggcttagtaaaggattttaactgtgatgacattatctcgcgcaaagaacagcgcaagatggatgccttcattcaatatggaattgtcgctggcgttcaggccatgcaggattctggccttgaagtgacggaagagaatgcaacccgtattggcgccgctatcggctccggtatcggcggtctcggcttgatcgaagaaaaccacagttcgctggttaacggcggaccgcgcaagatcagcccattcttcgttccttccacaattgttaacatggtggccggacatctgaccatcatgtttggtctgcgtgggccaagtatctctatcgcgaccgcgtgtacttcaggcgtgcacaacatcggccaggccgcgcgcatcatcgcctatggcgatgccgatgcgatggtggcaggcggcgcggaaaaagccagtaccccgcttggcgtgggcggcttcggcgcggcgcgtgcgctctccacgcgcaatgacaacccgcaggcggcgagccgtccgtgggataaagatcgtgacggcttcgtgctgggcgacggcgcgggtatggtggtgctggaagagtacgagcatgccaaaaaacgcggcgccaaaatctacgccgagatcgttggcttcggcatgagcagcgatgcttaccacatgacgtcaccgccggaagatggcgcgggcgccgcgctggcaatggtgaatgctattcgcgatgcgggcatcgaaccgggccagatcggctacgtcaacgcccacggcacctcgacgccggccggcgataaagcggaagcgcaggcggttaagtctgtcttcggtgatgcggcgagccgcgtactggtgagctctaccaaatccatgaccgggcatctgctgggtgcggcaggggcggtagagtcgatttactctatcctggcgctgcgcgatcaggcggttccgccgacgatcaacctcgacaacccggatgaaggctgcgacctcgacttcgttccacacgaagcgcgtcaggtttccggtatggagtacaccctgtgcaactccttcggctttggcggcactaacggttcgctgatcttcaaaaaagtgtga

SEQ ID NO: 210713 - DNA, 810 bp, Klebsiella pneumoniae
atgttcttgataaacggcgttgtacaggacacgttggcagcgaacgatcgcgccacccagtttggcgacggctgttttaccaccgcccgcatccagcaagggcaggttgcgctactggacgcccatctgcagcgtttacagacaacctgtgaaaaattacatatcccatttaacgactggctgacgctgagcgaagagatgcagcgtctggctcggccgcacgcgcagggcgtgctcaaggtgactctcacccgcggcgttgggggaaggggatacagtacggcaggctgcgtgtcgcccactcgcattctcagcttctctccattcccggcgcattatgcgcgctggcgggaggagggcattactctgacccagagtccggtgcccctggggcgcaactcctggcttgccggcctgaagcaccttaatcgccttgagcaggtgctgatccgctctcatcttgagcagacggacgccgatgaggcgctggtccttgacagtgacgggtggcttacggaatgctgtgccgcgaatttattctggcgtcagggacgtgatgtatttactccgcgactcgattatgccggggttaacggcattatgcggcagcgctgtatcgcgcagctggcaccatcgacgtttcgcgttgtcgaagtgacagcgcgtcccgagacgttgcgggaggccgatgaagtgctgatctgcaatgcgctgatgccgctggtgccggttcgccgctgggaggagaccacctggtcctcgcgtgagctttaccattttttagcccctttgtgtgagctgtctggttag

SEQ ID NO: 210714 - DNA, 1023 bp, Klebsiella pneumoniae
atgaagaaaatgttacgttttatcctgttgctggtcgtgctgttgggcatcgccgcggcggcaggcatgtggaaggtacgccagctggcggacagcaagctgctgattaaggaagagaccatctttaccctcgaagccggcaccggccggctggcgctgggccaggatctctatcgcgagaaggtgatcaatcgcccgcgcgttttccagtggctgctgcgggtggaacctgagctgtctcacttcaaggccgggacctatcgcttcacgccgcaaatgacggtgcgcgagatgttgcagctgctggccagcggcaaagaggcgcagtttccgctgcgctttgtcgaaggcatgcgcgtcagcgactacctgcgccagctgcgcgatgccccgtacgtgaagcacacgcttgaagacgatagctacgcgacggtggctaaggcattaggtcttgagcatgccgactgggtagagggctggttctggccggatacctggatgtacaccgccaacaccagcgatatcgccatcctcaagcgcgcgcatcagaaaatggtcgccgaagtggcgaaggtctgggaaggacggatggagaatctgccctatgccgatcagaaccagctgttgaccatggcctcgattattgaaaaagagaccgcggtggcggaagagcgcgaccgcgtcgcgtcggtatttatcaaccgcctgcgcatcggtatgcgcttgcagaccgatccgaccgtaatctacgggatgggcgcaggatatactggtaagttaacgcgtaaggatctcgagacgccgaccgcatacaatacttataccatcagcggtttgccgccgggccctatcgcggtgccgggcgaggcctcgctgaaggcggccgcccatccggcgaaaacgccatatctttatttcgtcgccgacgggaaggggggccatacgtttaccacaaacctggtcagtcataaccgtgcggtgcaggattatctgaaagtacttaaggaaaaaaatgcgcagtaa

SEQ ID NO: 210715 - DNA, 642 bp, Klebsiella pneumoniae
atgcgcagtaactatatcgtcatcgaggggctggagggcgccgggaagaccaccgcacgtcaactggtggtggagacgctgcagtcggcgggtattcacgatatggtgtttacccgcgagccggggggcacaatccttgccgaaaaactgcgtagcctggtgctggatatccagtccacgggcgatgaagtcattaacgataaagcggaagtgctgatgttttacgcggcgcgcgtccagttggtggagaccgtgattaagcccgcgctggcccgcggccagtgggtgatcggcgatcgtcacgatctgtcgacgcaggcctatcagggcggcggccggggaattgaccgcacgatgctggcgacgctgcgcgacgcggtactcggtgattttcgccccaatctgacgctgtatctcgacgtcacgccggaagtggggctgcagcgcgcccgggcccgcggcgagctggatcgcattgagcaggagtccatgaactttttcaaccgtacccgcgcgcgctatcttgagctggccgccgccgatccttctatccgcacggttgacgcaactcagccgctggatgccgtggcgcgcgacattcgcgccacgatcgcccagtggatggcggagcaagcggcatga

SEQ ID NO: 210716 - DNA, 1005 bp, Klebsiella pneumoniae
atgaaatggtatccgtggctgcgcccctcgttcgagcaactggtcggtagctatcaggccggacgaggccaccacgccttactgttacagtccctgaacgggatgggcggcgaggcgttgatttacgcgctgtgccgcttcctgatgtgccgccagcccgaaggacataaaagctgcggccactgccatagctgtcagctgatgcaggccggcacgcaccccgattactatgcgctcagccccgagaagggcaagagcgcgctgggtattgacgcggtgcgcgatgtcaatgaaaagctctatgaacatgcgcgccttggtggggcaaaagtggtctggattagcgatgctgccttgctgaccgatgccgccgccaacgcgttgctgaaaacgctggaggagcccccggagaatacctggttcttcctcgcctgcgaggagccggcgcgtctgctgaccactctgcgcagccgctgtcgcctgcatcatctggcgccgccgtctgagccttatgctctggcctggctggagcgtgaggtgagcctgccgcaggagtcattgttgaccgcgttacgcctgtgcgccagcgcgccggctgcggcgctcgaactgttacaggaaccgctgtggacggcgcggcagcagttgtgtcaggcgctggcggctaccctggcgagcggtgactggctggcgctgctgccgatactcaatcatgaacaggcggcagttcgcctgcactggctggcgtcgctgctggtcgatgcgcaaaaacgacagcaggggattaccctggtgagtaaccctgacgtctggccgctgctggagcagctggcgcacagcctgcccgccgcccggctgcaggcgattgcccatgacgtctgtacctgccgcgagcaattgctcaacgttgtcggtgtcaaccgcgaactgctgcttaccgagcgcctgctgcgctgggaacattacctgcaacccgggacgggtttacccgtctcccacctctga

SEQ ID NO: 210717 - DNA, 795 bp, Klebsiella pneumoniae
atgtttttagtcgactcccactgccatcttgatggtctggattatcaaactctacacaaaaacgtcgacgacgtgctggcaaaagcggccgcacgcgatgtgaaatattgcctcgccgtcgccacgacgctgcctggctaccgcagtatgcgcgaactggtggggacgcgtgacaacgtcgtcttctcctgtggcgtacacccattaaaccaggacgagccctgggaggtagagaccctgcgcgcgctggcagcggaagagggcgtcgtggcgatgggggagaccggtctggattatttttataccccggaaactaaagcccaacagcaaagctcgttccgcgaccacattcgtatcggccgtgagctcaataagccggtgatcgtccatacccgtgacgcgcgtgccgatactctggctattttgcgcgaagaaaaggtgacggattgcggtggcgtactacactgtttcactgaggacagggagacagcgggcaagctgctcgatatggggttctatatctcgttttccggtatcgtcacttttcgtaacgccgagcagctgcgtgatgcggcgcgctacgtgccgctggatcgcctgctggttgaaaccgattcgccgtacctggcgccggtcccccaccgcggcaaagagaaccagccggcgctggtccgtgacgttgccgagtatatggcggtactgaagggggtgtcgcttgagcatctggctcagcagaccaccgacaattttgccaccctgttccacatcgaccccgcccgtttgcaacctgcttga

SEQ ID NO: 210718 - DNA, 1434 bp, Klebsiella pneumoniae
atgtttaagaatgcatttgctaacctgcagaaggtcggtaaatcgctgatgctgccggtatccgtactgcctatcgcaggtatcctgctgggcgtcggttccgctaacttcagctggctgccagccgtggtctcccacgttatggcagaagcaggcggttcagttttcgccaatatgccgctgatcttcgctatcggtgtggccctcggcttcaccaataacgacggtgtatccgcactggctgcagtcgtggcttacggcatcatggtgaaaaccatggcggttgttgcgccgctggtgctgcatttacctgctgacgagattgcggcaaaacaccttgctgataccggcgtgcttggcggtattatctccggtgctatcgccgcctacatgttcaaccgcttctatcgcatcaagctgccagaatatctcggcttctttgcgggcaagcgttttgtgccgattatctctggtctggccgctatcttcaccggcgtgatcctctccttcatttggccgccgatcggctccgcgatccaaaccttctcccagtgggctgcttatcagaacccagtggtggcgtttggtatctacggtttcatcgaacgttgcctggtgccgtttggtctgcatcacatctggaacgttcctttccagatgcagatcggcgaatacaccaacgcggctggtcaggtgttccacggcgatatcccgcgctacatggcaggcgacccgacggcgggcaaactgtctggcggcttcctgttcaaaatgtatggtctgccggcagcggctatcgcgatttggcactctgctaaaccggaaaaccgcgccaaagtgggcggtatcatgatctccgccgcgctgacctcgttcctgaccggtatcaccgagccgatcgagttctcgttcatgttcgtggcgccgatcctgtacgttatccatgccattctggcgggcctggcgttcccgatctgtatcctgctgggtatgcgtgacggtacctcgttctctcacggcctgatcgactttatcgtgctgtccggtaacagcagcaaactgtggctgttcccgattgttggtatctgctatgcgatcgtgtactacgtcattttccgtgtgctgattaaagccctggatctgaaaacaccgggtcgtgaagacaccaccgaagagagcaaagctggcgccaccagcgagatggctccggctctggtcgccgctttcggcggtaaagagaacatcaccaacctcgacgcatgtattactcgtctgcgtgttagcgtggcggatgtagcgaaagttgaccaggctggcctgaaaaaactgggcgccgctggcgtggtagtggcaggttctggcgtacaggccatcttcggtaccaagtccgataacctgaaaactgaaatggatgagtacatccgtaacagttaa

SEQ ID NO: 210719 - DNA, 357 bp, Klebsiella pneumoniae; identical to SEQ ID NO: 139055

SEQ ID NO: 210720 - DNA, 375 bp, Klebsiella pneumoniae
atgctcaggacccttttgggcgcgtgtctggcggcggggctactcgccgggtgtagttcacacccggagatcccggtttctgaccagcaggcgctggtgatggagtcgagcgtgctggcggcggggatcagcgccagcgagcctgccgtcgtggcgacagagattcaggctaccgcctcctcaacgctatataacgagcgccagcagccggttaccgtgcactatcgttttttctggtatgacgcccgagggctggagatgcatccgctggacgcgccgcgcaccatcgtggtaccggcccgctcctcggtcacgttatatggcagcgccaatatcctgggggcgcataaggcccgcctttatctttatctgtaa

SEQ ID NO: 210721 - DNA, 648 bp, Klebsiella pneumoniae
atgatgaaaatgtgtcgctatgcgttaatcacagcactggcgatattcctcgcaggctgtgcggggttgcgggagcagcccgcgccggtagaagaggccaaaccgcagccgcagcagcctgcgcagccgcagcccacggtgccgaccgtaccggcggtgccctctgtcccggcgcagcctgggccgattgagcatcaggatcagcagtcgggtcagccggcgccgcgcgtgcgtcattatgactggaacggcgcggttcagccgctggtggggcagatgctgcaggcgagtggggtcaatgccggcagtattctgctggttgacagcgtgaacaaccgcaccaacggttcgctgaatgctggagaagccaccactgcgctacgtagtgcgctggccggtaacggcaaatttaccctggtatcggcgcagcagctggcggtcgccaagcagcagctgggcctgtcgccgcaggacagcctcggcagccgcagcaaagccatgggcatcgcccgcaacgtgggcgcgcagtatgtgctttactccaatgccaccggcaacgtcaacgcgcctgagctgaaaatgcagctcatgctggtgcaaaccggtgagataatctggtcaggtaaaggtgctgttcagcaacaataa

SEQ ID NO: 210722 - DNA, 828 bp, Klebsiella pneumoniae
gtgctgttcagcaacaataagctaacgcgcgacgagctcttgtcgcgcttctttccccattatcatcctgtcgcctcgctgagccagagtggcctcagcggcggcagtgtgattatcagcgacggcgaccggcggcacgtgctgcgtcagccgcacgatccgtctgccgccacttaccattttcgccgtcagtatcacgcactccgccgactgcctgccaggctggcgccaaccccgctgttttactcaccctgctggatggtggtggagtattgcacaggggaggtgaaaagcgagttaccggcctccccgcagctgtcaggcttattgtatgatttgcatcagcaaccgcggtttggctggcgggttagcctcacaccactgctggcccagtactggcagaggtgcgatccggcgcggcgcaagccgcggtggctgcgctggcatcagcggctgcgccgccagggcgagccccgtcccctgcggctggcgccgctgcacatggacgtccatgccggcaatattattcataatgagtccggcctgaggctgatcgactgggaatatgccggcgatggcgatatcgcgctggagctggccgcggtgtggatcacgcctggcgagcgccgtcggctggtagaagcgtatgcccggcgggcggccatcgacgcgcagctgctttggcggcaggttgcactctggcgcccgtgggtactgctgctgatggcgggctggtatgaaatgcgctggcggcagagcggggaccggcaatttatcacgctggcagatgaaatatggtgtcagttagacaacgaacgtaaaggataa

SEQ ID NO: 210723 - DNA, 1023 bp, Klebsiella pneumoniae
gtgggcccagtgatgttggatgtcgaagggtatgagctggatgcggaagagcgagagattctggcgcatccgctggtgggagggttgatcctctttacccgaaattatcacgatccggcgcagctgcgcgagctggtgcgccagatccgcgacgcctcccggaaccatctggtggtggcggtcgatcaggaaggggggcgggttcagcgtttccgcgaagggtttacccgtttaccggcggcccagtctttcgccgcgctgttggggatggaagaggggggcaaactggccgccgaagccggctggctgatggccagcgaaatgatcgccatggatatcgatattagttttgcgccagtgctggacgtcggccatatcagcgccgcaatcggcgaacgttcttatcatgaagatccgcagaaagcgctgacgatggcgcgtcacttcattgacgggatgcacgccgcgggcatgaaaaccaccggcaaacacttcccgggacacggggcggtgactgccgattcgcacaaagagacgccgttcgatccgcgggcggcatcggttatccgcgaccatgatatggcggtgttcaaaagccttatcgccgagcagcgtctggacgccattatgccggcgcatgtgatttacccggagctcgatccgcgtccggccagcggctcggcgtactggctgaaaacggtgctgcgcggcgaactgggctttgacggggtgattttctccgacgatctgtcgatggaaggggcggcgatcatgggcagctatgccgaacgcggtcaggcatcgctcgacgccggttgcgatatgatcctcgtctgcaataatcgtaaaggcgcggtcagtgtgctggataacctgtcgccgatcaaagcagagcgtgttacgaaattgtatcataaaggttccttttcccgtcaggagttaagggattcagcccgttggaaaacggtgagtgcccagctggagcagcttcatgcgcactggcaagaggcgaagtccgcgtaa

SEQ ID NO: 210724 - DNA, 543 bp, Klebsiella pneumoniae
atgattatctatttacacggttttgactcgaacagccccggtaaccatgagaaggtgatgcagctgcagtttatcgacccggacgtgcggttgattagctacagcacgcggcatcccaagcacgatatgcagcatttgctgaaagaggtcgataaaatgctgcagctcactgccgatgaccggccgctgatctgcggcgtcggccttggcggctactgggcggagcggattggttttctgtgcgatatccgccaggcggtgttcaatccaaacctgtttccgcatgagaacatggaaggcaaaatcgaccgaccggaagagtatgccgacatcgccaccaagtgcgtgaccaacttccgcgagaagaaccgcgatcgctgcctggtggtgctttcccgccaggacgaggcgttggacagccagcgttccgccgatctcctgcaccactattatgaaattatctgggatgaagagcagacccataagtttaaaaatatctcgccgcatctgcagcggctgaaagcgtttaaaaccctcggctaa

SEQ ID NO: 210725 - DNA, 1305 bp, Klebsiella pneumoniae
atgactacgccattgaaaaaaatcgtaattgtgggtggcggcgctggcggactggaactggcaactcagctggggagaaagttagggcgccataagaaagcgaaaatcaccctggtggaccgtaaccacagccatctgtggaagccgctgctgcacgaagtggccaccggttctctggatgaaggcgttgatgcgctgagctatctggcccatgcccgcaaccacggtttccagttccagctgggctcggtggttgatatcaaccgcgaagggaaaaccatcaccctcggcgagctgcgcaatgaaaaaggcgagctgctggtggctgagcgtaaactgccgtacgacacgctggtcatggcgttgggcagtacctcgaatgactttaatacccctggcgtaaaagagaactgcattttcctcgacaacccgcaccaggcgcgtcgcttccatcaggaaatgctcaacctgttccttaaatactctgctaacctcggcgctaacggtaaagtaaatatcgccatcgtcggcggcggcgccaccggcgtggagctctccgctgagttgcacaatgcggtgaaacagctgcacagctacggctacaaagggttgaccaacgaagcgctgaacgtcacgctggtcgaggcgggcgagcgcattctgcctgcgctgccgccgcgcatttccggggcagcgcataatgagctgactaagctgggcgtacgggttctgacgcagaccatggtcaccagcgcggatgcgggcggcctgcacactaaagatggcgaatatattgaggcggatctaatggtctgggcggcggggatcaaagcgccagatttcatgaaagagatcggcggcctcgaaaccaaccgtatcaatcagctggtggtcgagccgacgctgcagactacccgcgatgcggatattttcgccatcggcgactgcgcctcctgcgcccgtccggaaggcggctttgtgcctccgcgggcccaggcggcgcaccagatggctacctgcgcgctgaacaacatcctggcgcagatgaaaggcaaaccgctgaaggcatacacctataaagaccatggctcgctggtgtcgctgtcaaattactccaccgtcggcagcctgatgggtaacctgatgcgcggttcgatgatggtggaagggcgcattgcgcgcttcgtgtacatctccctgtaccgtatgcaccagattgctctgcatggttacttcaagaccggcctgatgatgctggtcgggcgcatcaaccgcatcattcgcccgcgcctgaagctgcactaa

SEQ ID NO: 210726 - DNA, 540 bp, Klebsiella pneumoniae
gtgaataaatctatgttggcgggtatagggataggcgtggctgccgcgctgggcgttgcagctgtcgctggtctcaacgtgttggatcgcggcccgcagtatgcgcaagtggtctccagtacaccgattaaagaaaccgtgaaaacgccgcgtcaggaatgccgcaatgtcacggtgactcatcgtcgtccggtacaggatgaaaaccgcatcgccggttcggtgctgggcgcggtggcgggcggggtgattggccaccagtttggcggcggtcacggacgcagcgtggcgacggttgtaggtgcgctgggcggcggctatgcaggcaaccagatccagggcgcgatgcaggacaacgatacctacaccaccacccagcagcgctgcaaaacggtgtatgataaatccgataaaatgctcggctacgatgtgacctataagataggcgatcagcaggggaaaatccgcatggatcacgatcccggcagccagatcccgctggacaacaacggccagctggtcctgaacaataaaatctaa

SEQ ID NO: 210727 - DNA, 2190 bp, Klebsiella pneumoniae
atgaaaaagcgcctctgggtgctccaccctctgctgctggccagcacgctgcctgcgctggcggctcagtctgatgaagacagcatcatcgttagcgcaaaccgcacccatcgcaccgtggccgaaatggcccaaaccacctgggtcattgagggccaggagattgagcagcaggtccagggcgggaaagagttcaaagacgtgctggcgcagctgatccccggcatcgacgtcagcagccaggggcggaccaactatgggatgaacatgcgcgggcgcgcgatcgtcgtgctgattgacggcgtccgactcaactcctcacgcaccgacagccgccagctcgacgccatcgatccattcaacatcgaacatatcgaagtgatctccggagcgacctcgctgtacggcgggggcagtaccggcgggcttatcaacatcgttaccaaaaaggggcagcaggatcgtcaggtcgatcttgaggtgggcagcaagagcggttttgcgaacagcaacgatcatgatgagcgcgtcgcggcggccgtcagcggcggaacagaccacgcatccggccgcttgtcggtagcctatcagcgtttcggcggctggtacgacggcaataacgatgcgctgatcctcgataatacccaaacggggctccagcactctgaccgcctcgacgtgatggggacggggacgattgagatcgatgataaccgccagctgcagctggtcacccagtattataaaagccagggcgatgatgactacggtctgtggctcgggaagaacatgtccgcggtcaccagcggcggcaaagcgtataccaccgacgggctcaattccgaccgtatccccggcaccgaacgccatctgatcagcctccagtactccgatgccgactttttcggccagaatctggtgagccaggtgtactatcgcgatgagtccctcaccttctatccgttcccgacgctcacgaaaggtcaggtcagtagcttctcctcgtcgcagcaggataccgatcagtatggggccaagctgaccctcaacagccaaccgctggcggggtgggatctcacctggggtctcgacgccgatcatgagacctttaatgccaaccaaatgttcttcgatctgccacaatcgatggcctccggcgggttgcacaacgaatcgatctacacaaccggccgctacccgggatacagtatttccaatgtcgcgccattcctgcagtccagctacgatctgaacgatatctttaccgtcagcggcggggtacgctaccagtggaccgaaaaccgggtcgacgactttgtcggctacgcccagcagcaggatatcgccaacggcaaagcgcgctccgccgacgccatcaaaggcggcaaaaccgattatgacaatttcctgtttaacgccgggatcgtggcccacctgaccgagcgtcaacaaacctggtttaacttctcgcagggtgtcgagctaccggaccctggtaaatactatggcatcggtaaatatggcgctgcggtgaatggtcatctgccgctgatctccagcgtcaacgtcgatgactcgccgctgcaggggatcaaagttaactcgtacgagctgggctggcgctacactggcgataacctgcgcacccagctggcggcgtactactcgacctcggataagaccattgtcgtcaaccgcaccgacatgaccatcgacgttcagtccgacaaacggcgtatttacggcgttgagggggcggtcgactactttattccggatagcgactggagcgtcggcggtaacttcaacgtgctgaaatcccaggtgcagaccgacggccgctggcaaaaatgggacgtcaccctcgcctcgccgtctaaagccaccgcctgggtgggctgggcgccggatccgtggagcctgcgcgtgcagagtcagcaggtatttgacctcagcgatgccgccggtaacaagctggaaggctataacaccgtcgattttatcggtagttacgcgctgccggtggggaaactgaccttcagtatcgaaaacctgcttaacgaagactatgtcactatctggggccagcgcgcgccgctgctctacagcccaacctacggcagttcatcgctgtatgagtacaaaggtcgtggccgcacctttggtctgaactatgccttaaccttctga

SEQ ID NO: 210728 - DNA, 636 bp, Klebsiella pneumoniae
atgacaactgacgttcaaagttgcgccaaaaaaagccgtggccgaccgaaggtgttcgacagggatgcggcgctggacaaagccatgacactcttctggcagcacggctatgaggcgacctcgctcgccgatctggtcgaggcgacaggagcaaaagcccccaccctgtatgcggaatttgtgaataaagaaggcctattccgcgcagtgttggatcgttacatttcgcgctttgccgcgaagcacgaagccgtgctgtttgccgagggaaaatccgtcgatcgcgcgttgcgtgactacttcacggcggtcgccacctgctttaccagcaaagagacgccggccggctgctttatcatcaatacctcccccgcgttggccgcctcctcgacggatatcgccaataccatcaaatcccgccatgcgatgcaggagcaggcgctaacccagtttctgcagcagcggcaggcgcagggcgaactgcccgcgggccgcgatgtcgcgcagctggcgcaatttcttaactgcgttctgcaggggatgtcgattagcgcccgggaaggcgcggatttcgacaagctgatgcaaatcaccgataccactctccgtctctggccgcaggtcctcgagtcctga

SEQ ID NO: 210729 - DNA, 258 bp, Klebsiella pneumoniae; identical to SEQ ID NO: 138536

SEQ ID NO: 210730 - DNA, 960 bp, Klebsiella pneumoniae
atgagaaaccgtttccccgtgacgctttggctgacgctagtcgcgttagtcgccgcgctggccctccccgcgcgcgctaacacctggccccttcccccgccgggcagccggctggtgggtcagaatcagtttcatgtggtacaggatgacggcggttcgctggaagcgattgccaagaagtacaatgtcggcttcctggccctgctgcaggccaatcccggggttgacccctatgttccgcgcgccggcagcgtgctgaccatccccctgcagacgctgctgcccgatgcgccgcgcgaagggctggtgataaacctcgccgaactgcgcctctactattacccgccgggcaaaaatgaagtgaccgtctacccaatcggcatcggccagctgggcggaaccaccatcacaccgacgatggtcacaaccgtgtccgacaaacgggccaatccgacctggacacctaccgccaacattcgcgcgcgctacaaggctatggggattgagctgccggcggtagtgcctgctggtcctgacaatccgatgggccatcacgccatccgcctcgccgcctatggcggagtctatctcctgcacggcaccaatgccgatttcggcatcggtatgcgcgtcagttccggctgcattcgtctgcgcgataacgatatcaaggcgctgtacaacactatctcgccgggcacgaaggtgaacattatcaacacgccgatcaaggcgtcggttgagccggatggccgccgtctggttgaggtccatcagccgctgtctgagcatatcgatgacgacccgcagaccctgcccattacgcttaatgcggccatgactgcgttcaaacaggcgccgcagaccgacgggacggtgatggagcgcgcgatgaattatcgctcgggcatgccgattgacgtcacccgtcatgctgagcctggaccgcagtcgctgtag

SEQ ID NO: 210731 - DNA, 3447 bp, Klebsiella pneumoniae
atgcctgaacaatatcgatactcattgccggtcaaagccggcgatcagcgccagcttggcgagttgaccggcgcagcctgcgccactttggtggcggagatggccgaacgccacaacggcccggtggtgctggtggcgcctgacatgcaaaacgcgctgcgtctgaacgacgagatcaggcagtttaccgacagcatggtgatggggctggcggactgggaaacgctcccttacgacagcttctcgccgcatcaggacatcatctcctcccgtcttgccaccctttaccagttacccaccatgcagcgcggcgtactgatcgtcccggtcagcaccctgatgcagcgcgtctgtccgcacagcttccttcacggccacgcgctggtgatgaaaaagggccagcgcctgtcgcgcgatgcgctgcgcgatcagctggagggggccggctaccgccatgtcgatcaggtgatggagcacggcgaatatactacccgcggcgcgttgctcgacctgttcccgatgggtagcgatcagccctaccgccttgatttctttgacgatgaaatcgacagcctgcgcctgttcgacgttgacagccagcgcacgctggaggaagtggcggccattaacctgctgccggcgcacgagttccccaccgaccagaccgctattgagctgttccgcagccagtggcgcgaccgctttgaggtgaagcgcgatgccgagcacatctatcagcaggtcagtaaagggacgctacctgccggtatcgaatactggcaaccgctgttcttcagcgagccgctgccgccgttattcagctatttcccggccagcacgctgatcgtcaacaccggcgatctcgaggccagcgcggaacgattccagaatgaagcccgcgcccgctttgaaaaccgcggcgtcgacccgatgcgcccgctcctgccgcctgagctgctgtggctgcgcagcgatgagctattcagcgaactgaaaaaatggccgcgcgtgcagctgaaaaccgaacgtctggcggacaaagcggcgaatactaatctgggctaccagacgctgccggacctcgccgtccaggcgcagaacaaagcgccgctggataatctgcgccgcttcctcgagtcctttaccggtccggtgatcttctcggtggaaagcgaaggccgccgtgaagcgctgagcgaaatgctggcgcggattaaagttgcgccaaaacatgtgctgcgtctggaggaagccaccggcaacggccgctatctgatgattggcgccgccgagcacgggtttatcgacagccagcgcggcctggcgctgatttgcgagagcgacctgctcggcgagcgggtggcgcgccgtcgtcaggattcgcgacgcaccattaaccctgacactctgattcgcaacctcgccgaactgcatatcggccagccggtcgttcacctggaacacggcgtgggccgctacgcgggcatgactaccctggaagccggcggcatcaccggcgaatatctgatgctgacctacgccaacgatgccaagctatacgttccggtatcgtccctgcatcttatcagccgctacgccggcggggcggaagaaaacgcccccctgcacaagctgggcggcgatgcctggacccgggcgcgacaaaaagcggctgagaaagtacgcgacgtggcggccgagctgctggatatctatgcccagcgcgcggcgaaggcgggttttgcctttaaacacgaccgcgaacagtatcagctgttctgcgacggcttcccatttgaaaccacgccggatcaggcgcaggcgatcaacgccgtcctcagcgatatgtgccagccgctggccatggaccgcctggtatgcggcgatgtgggcttcggcaagaccgaagtggccatgcgcgccgccttcctcgccgtggagaaccacaagcaggtggcggtgctggtgccgaccaccctgctggctcagcagcactatgacaatttccgcgatcgtttcgccaactggccggtacgcatcgaaatgctctcccgcttccgcagcgctaaagagcaggcgcagatcctcgagcaggccgcggaaggcaaaatcgatatcttgatcggcacccacaagctgctgcagagcgaggtgaagctgcgcgatctcgggctgctgatcgtcgacgaagagcaccggtttggcgtgcggcataaagagcgcatcaaagcgatgcgcgccgatgtcgatattctgaccctcaccgccacgccgatcccgcggacgctgaacatggcgatgagcgggatgcgcgatctgtcgatcatcgccacgccgccggcgcgccgcctggcggtgaagaccttcgttcgcgaatatgacgccctggtggtgcgcgaggcgatcctgcgcgaaacgctgcgcggcggccaggtctactatctgtttaatgacgttgagaacatccagaaagccgccgacaagctggcggagctggtgccggaggcgcggatcgccatcggtcacggtcagatgagggagcgcgaactggagcgggtgatgaatgacttccatcaccaacgcttcaatgtgctggtgtgcaccaccatcatcgaaaccgggatcgacattcccaccgccaacaccatcatcatcgaacgcgccgaccattttggcctcgcccagctgcaccaactgcgcggccgcgttggccgttcgcatcaccaggcctatgcctggctgctgacgccgcatccgaaagcgatgaccaccgatgcgcaaaagcgcctcgaggccattgcgtcgctggaggatctcggcgccggctttgcgctggcaacccacgatctggagattcgcggggccggggaactgcttggggaagatcagagcggtcagatggaaaccatcggtttctccctgtatatggagctgctggagaacgcagtcgatgcgctgaaagccgggcgtgaaccctcgctggaagatctcaccagtcagcagacggaggttgaactgcgcatgccttccctgctgcctgatgatttcatccctgacgtcaatacgcgcctgtcattctataagcgcattgccagcgccaaaaacgaacaggatctggaggagatcaaagtcgagctgatcgatcgttttggccgcctgcccgatgccgtccgcaacctgctggatatcgcccgtctgcgtcagcaggcgcaaaagttagggatccgcaagctggaaagcaacgaaaaaggcggcgtgatcgaatttaacgagaaaaacaacgtcaatccggtgtggctgatcggcctgctgcagaagcagccccagcacttccgcctggacggtcccacgcgcctgaagttcatgcaggacctggaggagcgtaaaacgcggatggactgggttcgccagtttatgcgccagctggaagagaacgccgtcgcctga

SEQ ID NO: 210732 - DNA, 1200 bp, Klebsiella pneumoniae
atgtaccaacctgccgcactctttatcggcctacgctatatgcgcgggcgcgcagccgaccgcttcggtcgtttcgtctcctggctctcaactatcggtattacgcttggcgtaatggcgctggtgacggtcctgtcggtgatgaacggctttgaacgcgagctgcaaaacaacatcctggggctgatgccacaggccattcttagcgccaaacagggttcggtgaaccctcagcaactgccggagcgcgaagcgaaacttaatggggtaacccgcgtagcgccgatcaccaccggcgacgtggtgctgcagagcgcgcgcagcgtggcggtcggggttatgctgggcattgatccggcgcagaacgatcctctgactccatacctggtgaacgtcaaacagagcgatctgcaggcgggcaaatataacgttattctcggcgagcagctggcgggccagctgggggttaatcgcggcgataaaattcgcgtgatggttccttccgcgagtcagtttacgccgatgggccgcgtgccgagccagcgtctgttcacggtcatcggcaccttcgccgccaacagcgaagtcgatggctatcagatgctgaccaacatcgacgacgcctcccgtctgatgcgctatccgctggggaatatcaccggctggcgcctgtggctggatcaaccgctgcaggtcgacaccctgagtcagcagacgctgccgccgggaactcagtggcaggactggcgcgagcgcaagggcgaactgttccaggcggtgcgcatggagaaaaatatgatgggcctgctgctgagcctgatcgtcgccgtcgcggccttcaacattattacctcgctggggatgatggtgatggagaagcagggcgaagtggcgatcctccagacccaggggctgacgccgcggcagattatggccgtctttatggtgcagggggccagcgccgggatcgtcggcgcgctgctgggagcggtgcttggcgccctgttggccagccagctgaataatttaatgccgatcatcggcgccttccttgacggcgcggcgctgccggtggcgattgagccgctgcaggtcattgttatcgccctggtggcgatggtgctggccctgttgtctacgttgtacccttcctggcgcgctgccgccacccaacccgctgaggctttacgttatgaataa

SEQ ID NO: 210733 - DNA, 702 bp, Klebsiella pneumoniae
atgaataagatcctgctgcaatgcgacaacctgtgcaaacgctatcaggaaggcaatgtgcaaaccgatgtcctgcacaatgtcagcttcagcattggtgaaggcgagatgatggctatcgtcggcacctccggctctggcaaaagtacgctgctgcatctgctcggcggcctggatacgcccacctctggcgacgtgattttctccggtcagccgatgagcaagctatccaccgccgcgcgcgccgacctgcgtaaccgcgagctgggctttatctatcagttccaccatctgctgccggactttagcgcactggaaaacgtggcgatgccgctgctgattggcaaaaagaagccggcggatattgaacgccaggcgaaagcgatgctgcaggcggtcgggcttgaacaccgcagccatcaccgtccgtcggagctctccggcggcgagcgccagcgggtggcgattgcccgcgcgctggtgaataaaccgcggctggtgctggcggacgagccaaccggtaacctcgacgctcgcaacgccgacagcatcttccagctgctgggcgaactgaacgtcgcgcagcgcaccgcgtttctggtggtgacccacgacctgcagctggcgaagcgcatgagccgccagctggagatgcgcgatggccgtctgaccgccgacctgaccctgatgggggccgagtaa

SEQ ID NO: 210734 - DNA, 1245 bp, Klebsiella pneumoniae
atggcgtctccgttatcgttactgattgcattgcgtttcagccgcggccggcggcgcggcggcatggtgtcgctgatctcggtgatctccaccatcggcattgcgctgggggtggcggtgctgatcgtcggcctcagcgcgatgaacggctttgagcgcgagctgaataaccgcgtgctggcggtggtaccgcatggcgagatcgaacccgtgaatcagccgtggaataactggcaggaagcgctggcgaaggtgcagaaggtgaaggggattgtcgcggcagcgccctatattaacttcaccggtctggtggagagcggcagcaatatgcgcgccatccaggtgaaaggcgtcgacccgcagcaggagagccagctcagcgcgctgcctacctttgtgcagaataacgcgtgggccggattcaaggctggcgaacagcaggtgattctgggtaaaggagtcgccgatgccctgcacgtgaagcagggggactgggtgtcgatcatgatccctaatgccgacgccgaccatcagctgctgcagccaaaacgcgtcaggctgcatgtgaccggaattttacagctgagcggccagctcgatcatagttttgccatgatcccgatgcaggatgcgcagcagtatctggagatgggcagcagcgtgaccggcatcgccatcaaggtcaccgacgttttccatgctaacaagctggtacgcgacgccggcgaggtgaccaatagctacgtctacatcaagagctggatcggcacctatggctatatgtatcgcgacatccagatgatccgcgccattatgtacctggcgatggtgctggtgatcggcgtggcctgctttaacatcgtctcgacgctggtgatggcggtcaaagacaaaagcggcgatattgcggtgctgcgcacgcttggcgcaaaagacggcttaattcgcgcgattttcgtgtggtatggtttattagccggatcggtaggcagcctgtttggggtggtgatcggcgtgatctgcgcgttgaacctgacgtcgatcatcaacggcatcgaatacctgattgggcataaattcctctccggcgacatctattttattgacttcctgccgtcagaattgcactggctggacgtcttttatgtgctggtgacagcactgttgctgagtttgctggccagctggtatcccgcccgccgcgccagccgcatcgacccggcgagggtgctgagtggccagtaa

SEQ ID NO: 210735 - DNA, 912 bp, Klebsiella pneumoniae
atgtattatggatttgacattggcggcagcaagatagcgctgggcgtatttaatcaggagcggcgactgcagtgggaaaaacgcgtcgccacgccgaaaagtagttatgaggattttctccaggcggtagaggcgctggtccgcgaggccgatgatcgcttcgaccagcagggttcggtcgggatcggtattccgggaatgccggaaacggcggacggcacgctgtatgccgctaacgtgccagccgccagcggccggccgctgcgcgctgacctcagcgcgcggctggggcgcgaggtgcgtctcgataatgacgccaactgtttcgcgctgtcggaagcgtgggacgatgagtttacgcaatacccgctggtgatgggattgatcctcggcaccggcgtgggcggcggcctggtgttgaacggtaaatcgattaccggacatagctatatcaccggcgagttcggtcatattcgcctgccggtggatgccctggaggtggttgggcgcgattttccgctgctgcgctgcggctgcggccagctgggctgtattgaaaattatctctccggtcgcggtttcgcctggctgtacgaacatttttatcagcaaccgctctcctcgccggagattgtggcgcagtggcagcagcacgatccgcgcgcgcaggcgcacgttgagcgctatctcgatctgctggcggtgtgtctggggaatatactgaccattgtcgacccggatttgctggtgctcggcggtggattatctaactttacggcccttagcgaagggctggcgcaacgattgccgcgccatcttctgccggtcgccagggttccgcgcattgagcgcgcgcgccacggcgatgccgggggaatgcgcggtgcggccttccttcacctgacccattaa

SEQ ID NO: 210736 - DNA, 831 bp, Klebsiella pneumoniae
atgcagtcgcgccgtttacatcgattgagccgttttcgtcgcaataaacgtcggttgcgtgaccgtctgcgtcagcggattttctttagggaggacaggatgaagcctgaagcgatggcaaaaccgagagtggtggtgttaaccggcgcgggcatctcggcagagtcggggatcaaaaccttccgcgcggccgatggcctgtgggaagagcatcgggtggaagatgtggcgacgccggaaggcttcgcccgcgatccggcgctggtgcaggcgttctacaacgcccgtcgtcgtcagctgcagagtccggaaatcgcgccgaacgcggcgcatctggcgctggcgcgtctggaggatctgctgggcgaccattttctgctggtcacccagaatattgataatctgcacgagcgcgccggcaaccgccgggtgatccatatgcacggcgagctgctaaaggtgcgctgttcgtggagcggccaggtgctggagtggaccggcgacgtcaccgccgaggacaagtgccactgctgccagttcccggcggcgctgcgcccgcacgtggtctggtttggcgaaatgccgctggggatggatgagatctacagcgcgctggccgacgcagatatttttatcgccatcggcacctccggccatgtctatccggcggctggctttgtgcacgaggcgcgactgcacggcgcccataccgttgaactgaacctggagcccagccaggtgggcagcgagtttgccgagaagcactacgggctggcaagcgaagtggtacccgcctttatcgataagctgctacaggaaaacgcgctgtaa

SEQ ID NO: 210737 - DNA, 345 bp, Klebsiella pneumoniae
atgcataatccgctggttatcgaagcgatcatgttgatcgcggccattatcgttggcgtctggagccagcgcgctttaccgctacacgccgatagccgaccgatcctcttcctgctatgtctgttcctcggcactggcagcgcgttgtgcctgctgctggatatcttagctctgctgttgaccggtcaggtcgcgacgggcggtgtgcgaatatacggtccgttgctgctgctggtggtgctgtggaaacctctcaactgggttgtcggcatcattgaagattttgtgcagcggcgagccgaaaaagggaagggcaaaggccagcacgacggcggtcaacgctga

SEQ ID NO: 210738 - DNA, 1629 bp, Klebsiella pneumoniae
atgccgtcaccgatgatttatcaggatctcaccactgccgcgctgctcggccatgcggcgcagtatcacagcgagaccgagattgtctcggtgagtactggcggtgagaaggagcgcagctgctggggggaggtggccagccgtgctcagcggctggcatcggcgctggcgtcgctggggctgccgccgggcgcccgctgcgccacgctggcatggaacaaccgccgccatctggagatctattttgccgtctcctccggcggctgggtgacgcacaccgtcaatccgcggctgtcggttgaccatctgcggtatatcctcaacgacgctgccgatgaagtgctgttttttgaccagacctttttgccgctggtagcgcagctgctgccgcagctgccgacggtgaaacacgtcgtgctgatggagtcccgcagcgaagcggcgctcagccagctgccctcattgctgttttatgacgatctgttgcagcaggggatggcagactatcgctggccgcagctcaatgaactgactccggcttcgctctgttacacctcgggaaccaccggccggccgaaaggggtattgaacacccatcgttcgctggtcctgcacgccctgagcggcaaccagccggacgccgccggcatatcggcgaaggacagcctgttgccggtggtgccgatgttccatgtcaacgcgtgggggacgccgtttatcgccgccatggtcggcgcgcggctggtgctgccggggccgcacctcgatggcgacagcctgctgcagctgctggccgccgagaaggtgacggtggggtttggcgtgccggtgatctgggccggcttgctggcggcgatgcgccggacagaggtccggctgcctgaatttaaacgtgcgctggtcggcggctccgcgctgccgccgtcgatggccgaggcctttcagcgtgattacggcattgcactgacccacgcctggggaatgaccgaaacatcgcccatcggcaccatcaacacaccgttgagcaaacatgacgcgctcccggcacaggagcagcaaaagcagtgcgccggtcaggggcggcccattttcggcatcgaactgcaggtggtggacgtggatggcgaaccgttgccccgggatggtcaaagccaggggtatctgcaggtcagagggcactgggtggtagagcaatactatggtcaggacgcgagcgccctgaccgcggcaggctggtttgataccggtgatatcggtacgctcgacgccaatggttatctggtgatcagcgatcgggcaaaggatattatcaagtccggtggcgagtggatctccaccgttgagctggagaatatcgccatcgcgcatccgggggtgcgcagcgcagcggccatcgccgcccgccatccgcgctgggacgagcggccggtgctgctgtgcgtccgtgcggaagggggcgaagtggaggagaccgatctgctgagctggtttgagaagcgggtgcctaaatggcagatcccggaccgggtgatatttgtcgatgcgctgccggtcagcgccacgggtaaggtgctcaaaaatcagctgcgccaggcctacggagagattttaatgagtgagggaaaatga

SEQ ID NO: 210739 - DNA, 1725 bp, Klebsiella pneumoniae
atgagccatgcgcgacccggtctgacgacctgttctcagtatgatgcggccctgcacgccttgtcggcggcgcgccagcgctgggcggaaacctcagtgaaccgtcgtctggcgctcctgcgccagatcaaggatgccctggccggcattgccccggcgtgggtggccgcggcagcggcggccaaagggttgccggcgggcgatccgctggcgggggaggagtggctggcgggcccctgcgcgcaaatggtcggctgcaacgggcttatcgccaccctggagcaactggaggagaagacctttctgcggcggatcccactgcggacgctggcggacggccgcctggcgctgcgggtggtgcccggcacgctctgggatcggctgcttctgtctggtgttcgcgctgagatatggatgcagccaggcgtcacccgggcccatctcgaccgctatgcggcgcgggcatacgacatcccgcctgccgcgcggcagggcaagctggcgctggtgcttggcgccggcaatgtggcctcgattgcgccactggatgtgctacacaagctgtttattgagaatcaggtctgcctgctgaagctcaatccggtgaatgattatctgcacgatctgctggcccaggccctggcgccggtgattgccatggatgcgctccgcatcgtcaccggcgacgcccgggcgggagcgtggctgactacccatcccgctgtcgatgagatccatatcactggctcccgcgagacccatgacgtcatcgtctggggcgagggtgagacggctcgccagcgtcgggccgccgggacgccgctgaacccgcgtcgggtgacctcggagctgggcggcgtcagccccaccattatcgtacccgggccgtggagcgaggcggacatcgcttttcaggcgcagcagctggcgacgcagaagatgaacaacggcgggtttaactgcgtggccagccaggtgctgatcctgcagcaaggctgggagcctgcgacggccttgctgaatcagctgtaccgactgatcgccgcgaatacccgcccggactactaccccggcgctgaaaaccggctgaccgactttcgcctgcgcgcccgtcagccgctggagatagcccgcggtgacgcgctaccgttgattgtggcgaataccgacgatcatcccgggttctgccagcaggaggtctttggcccggggctgtcggtcacccgtcttgaggccgatagtgcggaaagctttctgcgccaggcgatcggctatgcgaatcagcggctgcagggcacgctgggggccaatattgtgatccacccgcgcacccgcaaagcgattggacgtaagcgttttaatgcgctgattgccgagctgcgctacggcacggtggcgatcaactgctggagcggggtggccttcctgttagccccttgcccgtggggggcgtttcccggccacacgctcgacgatattcagagcgggcggggcaaggtgcataacagctttatgctggagaaaaccgagcgcacggtgattgaggcgccgtttcggccgtttccgcgtagtctttggcatggcgaactgacgctgatgcccctgccgccctggttcatcacccaccgggggcaggaagcggtggcgcagcggctggtggatttttaccatcggccgcgctggcgcaaattgccggcgctcctctggcgcgcgctgcggggctaa

SEQ ID NO: 210740 - DNA, 1047 bp, Klebsiella pneumoniae
atgaaaaaatggtcacgccacctgctcgcggcgagcgctctggcaatcggcatgggcgctgcgcacgcggacgatagcaaaacgctctatttctataactggaccgagtatgtgccgccgggcctgctggagcagttcaccaaagagaccggcatcaaggttatctattcgacctacgagtcgaacgaaaccatgtacgccaagctcaaaacctataaagacggcgcgtacgacctggtcgtcccgtcgacctactttgtcgacaagatgcgcaaagaaggcatgctgcagaagatcgataagagcaagctgactaacttcagcaacctcgatccgcagatgctgaataaaccgttcgatccgaataacgactactccatcccctatatctggggggcgacggccatcggcgtcaacagcgaggcgattgacccgaaaactatcaccagctgggccgacctgtggaagccggaatacaaaagcagcctgctgctgaccgacgacgcgcgcgaagtgttccagatggcgctgcgtaagctgggctattccggcaacaccaccgacccgaaagagattgaagccgcctataacgagctgaaaaagctgatgcccaacgtcgcagcgtttaactctgataacccggcgaacccgtatatggaaggcgaagtgaacctcgggatggtatggaacggctcggcttacgtcgcccgccaggcaggtactccgctggaagtgatctggccgaaagagggcggcatcttctggatggacagcctgtcgatcccggcgaacgccaaaaacgtcgacggcgcgctgaagctgattaacttcctgctgcgcccggatgtcgccaaacaggtcgctgaaaccatcggttatccgacgccgaaccttgcggcgcgcaagatgctcagcccggcagtggccaacgataaatcgctctatccggacgccgcaaccattgagaaaggcgaatggcagaatgacgtcggcagcgccagcgccatttatgaagagtattaccagaagctgaaagcgggccgttaa

SEQ ID NO: 210741 - DNA, 786 bp, Klebsiella pneumoniae
atgatcggtcgactgctgcgcggcggctttatgaccgccatctacgcgtatctctacatccctattattattctgatcgttaactcgtttaaccggtcgcgcttcggcatcaactggcaggggttcaccaccgactggtatagcctgctgatgaacaacgatagcctgctgcaggccgcccagcactcgctgaccatggcggtgctgtcggcgaccttcgccacccttatcggctcgctgaccgccgtggcgctgtaccgttaccgctttcgcggcaaaccgtttgtcagcggcatgctgtttgtggtgatgatgtcgccagatattgtgatggccatctctctgctggtgctgtttatgctgatcggcgtccagcttggtttctggtcgctgctgttttcgcatatcaccttctgcctgccgtttgtggtggtcaccgtttactcccgcctgaaaggctttgacgtgcggatgctggaggcggcgaaagatctgggcgccagcgagatgaccatcctgcgcaaaattatcctgccgctggccctgccggcggtagccgctgggtggttgctgagcttcaccctgtcgatggatgacgtggtagtctcctcgttcgtgaccggtccggggtatgaaatcctgccactgaagatctattcgatggtcaaggttggcgtttcgccagaggtgaacgccctggccacgattttgttggttctgtcgctggtgatggtcatcgccagtcagttaattgcacgtgataaaactcaggggacgttaaaatga

SEQ ID NO: 210742 - DNA, 858 bp, Klebsiella pneumoniae
atgaagaacaccagtaaattccagaatgtggtgatcgccactatcgtcggttggctggtgctgtttgtcttcctgcccaacctgatgatcatcgccaccagctttttgacccgcgacgatgccaacttcgtcaaactggtcttcacgctggataactattcgcggctactggatccgctctattatgacgttctgctgcattcgctaaacatggcgctactggcgaccctcgcctgcctggcgctgggctatccgtttgcgtggttcctcgcccggctgccgcagaaggtacggcccctgctgctgttcctgctgatcgtccctttttggaccaactcgttgatccgcatctacgggctgaagattttcctcagcactaaaggttacctgaacgagtttctgctgtggctgggggtgatcgacaccccgatacgcattatgttcaccccctcggcggtgatcatcggcctggtgtacatcctgctgccgtttatggtgatgccgctctactccagcattgagaaactggatcgcccgctgctggaagcggcgaaagatctcggcgccagcaagctgcagacctttattcgcattatcatcccgctgactatgccggggatcatcgccggctgtctgctggtgatgctgccggcgatggggttgttctacgtttccgacctgatgggcggcgccaagaacctgctgatcggcaacgtgatcaaaagccagttcctcaatatccgcgactggccgttcggcgcggcaaccagcattaccttaaccctggtgatgggcctgatgctgttgatttactggcgcgcggcgcgcctgctgaataaaaaggtggagctggaatga

SEQ ID NO: 210743 - DNA, 1137 bp, Klebsiella pneumoniae
atgggacagagtcaaaaattgaatatacaaccgcgttcgcgttcgccgctggtgcatctggcgggaattcgcaagagctttgatggtaaaacggtcatcgacaaccttaacctgaccatcaacaatggtgagtttctcactctgcttggcccctctggctgcggtaaaaccaccgttctgcgccttattgccggcctggaaaacgtcgacagcggacggatccatctcgaagatcacgatatcactcatgttccggcggaaaaccgccacgtcaataccgtattccaaagctacgccctgtttccgcatatgacggtgttcgagaacgtcgcctttggcctgcggatgcagaaaaccccggcggcggaaatcaccccacgggtgatggatgccttaaagatggtgcagctggaggcgtttgcccagcgcaaaccacaccagctctccggcggccagcagcagcgcgtggccatcgcccgcgcggtggtcaacaaaccgcgtctgctgctgctcgatgagtctctttcggcactggattacaagctgcgcaagcagatgcagaacgaattgaaagcgctgcagcgtaagctcgggatcaccttcgtcttcgtcacccacgatcaggaagaggctctgaccatgtccgatcgcatcgtggtgatgcgtgatggcaaaatcgaacaggacggcaccccgcgagagatctacgaagagccgaagaacctgtttgtcgccagctttatcggcgagatcaatatctttgacgccacggtaattgaacgtctcgacgaacagcgcgtgcgcgccagcgttgaaggacgggaatgcaacatcaccgtcaattttgccgtggaggccggccagcgtctgcatgtcctgctgcgcccggaagatctgcgcgtcgacgagatccaccataacagcgacgccgatggcctgatcggctatgtccgcgagcgcaactataaaggcatgactctggagtcggtggtggaactggagaacggcaaaatggtgatggtcagcgagttctttaacgaagacgacccggatttcgaccactctcttgaccagaaaatgtctatcaattgggtggaaagctgggaggtggtgctggccgatgaagaacaccagtaa

SEQ ID NO: 210744 - DNA, 1233 bp, Klebsiella pneumoniae
atggataaattgcttgagcgttttttgcagtacgtttctttggacacgcagtcaaagcctggcgttcgtcaggtccccagcacggaagggcagtggaagctgttacgcctgttgcaggcgcagctggaagaaatgggactggtcaaggtaacgctgagtgaaaaagggacggtaatgggaactttgcccgctaacgttgagggcgatatcccggccatcggttttatctcccacgtcgacacctccccggatttcagtggtaaaaacgttaatccgcagattgttgaaaactatcgcggcggcgatatcgcgctgggtatcggcgatgaggtgctctccccggtgatgttcccggttctgcatcagcttttgggacagacgctgatcaccaccgacgggaaaacgctgctcggggcggacgacaaagccggcattgccgaaattatgaccgcgctggcgaccctgcaggcgaaaaatattcctcatggcgatatccgcgtggccttcacccctgatgaagaggtgggtaaaggggcgaagcatttcgacgtcgaggcctttgacgcccgctgggcctataccgtcgacggcggcggggtcggcgaactggagtttgaaaacttcaacgccgcctcggtgacgataaaaattgtcggtaataacgtgcaccccggcaccgcgaaaggggtgatggtcaacgcgctgtcgctggccgcgcgcattcatgccgaagtaccggccgatgaagcgccggagaccactgaaggctatgaaggtttttatcacctcaccagcatgaaaggcagcgtcgatcgggccgagatgcattacatcatccgcgattttgaccgtaagcacttcgaggcgcgcaagcgcaagatgatggagatcgccaaaaaggtcggcaagggactgcacccggactgttatattgagctggtgatcgaggacagttattacaacatgcatgagcaggtgatcgcccatccgcacgtggtcgatattgcccgccaggcgatggtggactgcgatattgaaccgcagatgaagccgatccgcggcggcaccgacggcgcgcagctctcatttatgggactgccgtgcccaaacctgtttaccggtggctacaactatcacggcaaacatgagtttgtcaccctggaaggaatggagaaagcggtgcaggtgatcgtgcgtatcgccgagctgacggcggcacgcaaagggcattaa

SEQ ID NO: 210745 - DNA, 1122 bp, Klebsiella pneumoniae
atggattatcaattaacgcttaactggcccgactttatcgaacgctactggcaaaaacggccggtggtattgaagcgcggcttcgccaattttatcgaccccctaagcccggacgaactggcaggactggccatggagagcgaggtcgatagccgccttgtcagccatcaggatggaaaatggcaggtcagtcacggtcctttcgaaagctacgatcacctgagcgaaaacaactggtccctgctggtgcaggcggttaaccactggcatgaaccgtccgcagcgctgatgcatccgttccgtgccctgccggactggcgtatcgacgacctgatgatctccttctcggtgccgggaggcggcgtcggcccgcatctggatcagtatgatgtgtttatcattcagggcaccggccgtcggcgctggcgcgttggggaaaaggtgccgatgaaacagcactgcccgcatccggacctgctgcaggttgaccccttcgaggcgatcatcgatgaagagatggagccgggcgatattctctatattccgccgggattcccgcatgagggttattcgctggaaaactcgcttaactattcggtcggctatcgcgcgccgaatgcccgcgagctgtttagcggctttgccgactatgtcctccagcgcgaactgggcagccagcgctacgccgatccggacgtgccgtcccgcgaccatccggcggatattttaccgaccgaactcgaccgcctgcgcgagatgatgctgggtctgattaaccaaccggagcactttaagcagtggttcggcgagtttatcacccagtcgcgtcatgagctcgacgtcgcgccgccggagccgccgtatcagccagatgagatttacgatgccctgcagcagggcgataccctggaacgcctgggcggcctgcgggtgctgcgcattgacggcgaggtattcgttaacggcgagaagatcgactccccgcaccgtccggcgctggacgccttagccacccatctgacgctgcgcgccgaccattttggcgatgcgctggaagatccttctttcctcgccatgctggcagcgctggtcaacagcggctattggttctttggcgactga

SEQ ID NO: 210746 - DNA, 1467 bp, Klebsiella pneumoniae
atgaagggactgttgcggcatatcttcccgctgtcattacgggttcgcttcctgctggcgaccgccggggtggtgctggtgctctccctggcctacggcatggtggccctggtgggctatagcgttagcttcgataaaaccacctttcgcctgctgcgcggcgagagcaatctcttttatatgctggcgagatgggaaaacggcgctattgacgtcgacatcccggaaaacctgaatatggaaagcccgacggtgacccttatctacgatgagcagggcaaactgctgtgggcgcagcgtgatgttccatggctggcgaaacgcattcaaccggaatggctgaaacgcaatggcttccatgagattgaagccgatgtcgacagcagcagtatgctgttgcgcaataaccatgagattcaggaacagctggacgctatccgcgaacagggcgacgactctgagatgacccactcggtggcgatcaacctctacccggccaccagcaaaatgcctcagctcagcattgtggtggtcgacaccattccggtggagctcaagcgcagctatatggtgtggagctggtttgtctatgtgctggccgccaacctgctgctggtgatccccctgctgtgggtcgccgcctggtggagcctgcggcccattgagtcgctggccaaagaggtgcgcgaactggaggaacatcaccgcgaaaagctcaatcccaacaccactcgcgagctgacccggctggtcagcaacctcaaccgcctggttcgcagcgagcgcgaacgctatgacaaataccgcactaccctcaccgatctcactcacagtctgaaaacgccgctggcggtgatgcagagtacactgcgctcgctgcgcggcgagaagatcagcgtcgacgaggcggagccggtgatgctggagcagataagccgcatctcgcagcagattggttattacctgcatcgcgccagcatgcgcagcggcggcaccctcttgagccgggaattacacccgatcgcccccctgcttgacagcctgacttccgctctcaacaaggtctatcagcgcaaaggggtcaatatctcgctcgacatctcgccggagatcacttttgtcggcgagcagaacgattttatggaagtgatgggtaacgttcttgataacgcctgtaagtattgcctggagttcgtggaagtttccgtgcgccagaccaccgacagccatctgcacatcctggtggaagacgatgggccggggatcccgcagagccagcgccgggccgttttcgaccgcggccagcgggctgataccctgcgtcccggccagggggtagggctctccgttgcgcgtgaaattgtcgaacaatatgatggagagatcatcgccggggaaagcctgctcggcggcgcctgcatggaggtggtgtttggccgccagcagatggaagataaacagagttaa

SEQ ID NO: 210747 - DNA, 672 bp, Klebsiella pneumoniae; identical to SEQ ID NO: 136228

SEQ ID NO: 210748 - DNA, 807 bp, Klebsiella pneumoniae
atgtctcagcagcagagcgcggactgggtcaggctggcgcaatcgcccagccggacggaacgcatcgaagccttcttcggcggccacggctacgaaccgcaccggcatgatacctacgccatcggccagacgatcgccggcgtgcagagctttcactatcgcggcggactccagcacagcctgcccggcggaacgatggtgcttcatccggacgaaatacacgatggcgaggcgggcaccgaggcggggtttcactaccgtatggtttatatcgaaccggcgctgatccagaagatactcggcggcaggccactaccgtttattcccggcggcctgtcggcggatccgcgcctgcggtgcgccgcgctgccgttattaaaagcggtcacggacacctttgagccgctggaggaagaggacgccctgtacgacctggcgcagaccctggccgttgtcggcggccaacgttcccgtcgccaggcgtttgattatcaggcggcggagagggcccgggagtatatccatgcctgttttatgcaggatatgaccctcgacaccctgtcgcaggtcagcggccgggaccgctggagcctgagccgggatttcagaacgctgtacggcaccagcccgtggcgctacgtcatgatgcgccggctcgatttttgccgccagcggatgcgcgccggggaacgtctggtggatattgccgccgacgcgggctttgccgatcagagccacatgacgcgccagtttatcagccgctttggtctctctccgggccgctggctgcgggcgatccgcggctag

SEQ ID NO: 210749 - DNA, 363 bp, Klebsiella pneumoniae
atgtatcaactcgttaatcttgctcagaaattttccctgttcagcgaacaatggcagcccaaagtggtggctgaaatgaacgactatcagttcaaggtcgtgcgcatcgccggcgactttatctggcacagccacctggaaaccgatgagacattgatggtggtggagggggtattgcgcgtggacttccgcgacgggcatgtgctggtgaaggccggggagatgatcgtcgtgccgcgcggggtggaacataagacctcggcggagacggaagcgaagctgatgctgattgagccgcgcggggtgttgaataccggccacgagggcggcgagcggacggcggtgaacgacgtttggatctga

SEQ ID NO: 210750 - DNA, 1371 bp, Klebsiella pneumoniae
atggaattatcctcactgaccgccgtttcccctgtagacggccgctacggcgataaagtcagcgcgctgcgcggtatcttcagcgaattcggtttgctgaaattccgcgttcaggtggaagtacgttggctgcaaaaactggccgcccacgcagcgatcaaggaagttcctgcttttgctgccgacgcaaacggtttccttgataaaatcgtcgccgatttcagcgttgaagacgcggagcgcatcaaaaccatcgagcgcaccactaaccacgacgtgaaagcggtagagtatttcctgaaagaaaaagtcgctgacatcgccgagctgcacgcggtatcagagtttattcacttcgcctgtacgtctgaagacattaataacctctcccacgcgctgatgctgaaaaccgcccgcgacgaagtggttctgccttactggcgcaagctgattgacgcggtaaaagatctggcgacccagtaccgcgatgtgccgctgctctcccgtacccacggccagccggcaacgccgtccaccatgggtaaagagatggcgaacgtcgcctaccgtatggagcggcagtatcgtcagctgaaccaggtggaaatcctcggtaaaatcaacggcgcggtgggtaactacaacgcccacatcgccgcctacccggaagtcgactggcatcagttcagcgaagagttcgttacctcgctgggtattcagtggaacccgtacaccacgcagatcgagccgcatgactatatcgctgagctgtttgactgcatcgcgcgcttcaacaccattctgatcgacttcgatcgcgacgtgtggggctacatcgcgctcaaccacttcaaacagaagaccatcgccggggaaatcggctcctccaccatgccgcacaaggtgaacccgattgacttcgaaaactccgaaggcaatctcggcctggccaatgcggtcatgcagcacctggccagcaaactgccggtttcccgctggcagcgcgacctgaccgactccaccgttctgcgtaacctcggcgtgggcatcggctatgcgctgatcgcctatcagtccaccctcaaagggatcagcaagctggagctgaaccaggatcgcctgctggacgaactggatcacaactgggaagtactggctgagccgatccagaccgtgatgcgtcgttacggtatcgaaaaaccgtacgagaagctgaaagagctgacccgcggcaaacgcgtggacgcggaagggatgaagcagtttattgacagcctcgccctgccggaagaggaaaaagtgcgtctcaaagcgatgaccccggccaactatatcggtcgggcaaccaccatggttgacgagctgaagtaa

SEQ ID NO: 210751 - DNA, 642 bp, Klebsiella pneumoniae
gtggcgaagaattactatgacatcaccctggcgctggctggcgtttgccaggcggcgcgactggttcagcaactggcgcatcagggacattgcgacagcgatgccctgcatgtgtcgctgaacagcatcatcgacctcgatcctgagtcgacgctggcggtgttcggtggcagtgaagccaatcttcgcctcggtcttgaaacgctgctaggggtgctcaataccagcagccgtcagggcctcaatgctgaactgacgcgctataccctgagcctgatggtgctggagcgcaagctcgccgccagtaaaggggcgatggacacgctcggcaaccgcatcgccggcctgcaccgtcagctggaacactttgacctgcagtccgaaacgctgctcagcgccatggcgggcatctatgtcgatgtgataagcccgctggggccgcgtattcaggtgaccggctcccctgccgtgctgcaaagcccgcaggtgcaggcgaaagttcgctcagcgctgctggcgggtattcgcgccgcggtgctctggcatcaggtgggcggcggacgtctgcagcttatgttttcccgtaatcgtctggttaaccaggcaaagcaaattcttgctcatttaaccccggagttgtga

SEQ ID NO: 210752 - DNA, 1167 bp, Klebsiella pneumoniae
atgaacggtgagcgcgtgctagaatacgccgcctcgaagttcaatgtagcgagtatttccatgtcagaaagccagaaaaaagtgatcgtcggcatgtccggcggcgtcgactcctcggtctccgcgtacctgctgctgcagcaagggtataaggtggaaggcctgttcatgaagaactgggaggaagacgacggcgaggaatactgcaccgccgccgccgaccttgccgatgcgcaagcggtctgcgataagctgggcattgaactgcacaccgttaactttgccgccgaatattgggataacgtctttgagctcttcctggaagagtacaaagccggccgcacgccgaacccggatattctgtgcaataaagagatcaaatttaaagccttcctcgagtttgctgccgaagacctcggcgccgactacatcgccaccgggcactatgtgcgccgcgccgatgtcgacggtaaaagccagctgctgcgcggcctcgacggcaacaaagatcagagctacttcctctacacccttagccacgagcagattgcccagagcctgttcccggtgggtgagctggaaaaaccgcaggtgcgtaagatcgccgaagagctggatctgatcaccgcgaagaaaaaagattccaccggcatctgctttatcggcgagcgtaaattccgcgatttccttggccgctatctgccggcgcagccgggcaaaatcctcaccgtcgacggcgaggagatcggtactcatcaggggctgatgtaccacaccctgggccagcgtaaagggctgggtatcggcggcaccaaagagggtagcgaagatccatggtacgtggtcgataaagacgttgagaataatattcttatcgtcgcccagggccatgaccacccgcgcctgatgtccgtcggtctgattgcccaacagctgcactgggtaaaccgtgaaccgctgcagggcaccctgcgctgcacggtgaaaacccgctatcgccagaccgatatcccctgcaccgttaccgcgctggatgaagaccgtatcgaagtccgcttcgatgagccggtcgcggcggtgaccccgggccagtccgcagtgttctatttaggggaagtgtgcctcggcggcggaattattgaacaacgactgcctctgcagtcctga

SEQ ID NO: 210753 - DNA, 459 bp, Klebsiella pneumoniae
atgtttaaacctcatgtcaccgttgcctgcgtggttcacgcccaggataaatttctcatcgtcgaagaaaccattaacggcaaagcgctgtggaaccagccggcgggccatctcgaggccaatgaaacgctgctgcaggccgccgaacgtgaactgtgggaagagaccggcattcgcgccacgccgcagcacttcatccgcatgcatcagtggctggctcccgataacacgccgtttctgcgcttcctgttcgccatcgaacttagcgatctgtgcgccactgaaccacacgacagcgatatcgatcgctgcctgtggctcagtgctgaggaaattcttaacgcgccgaacctgcgctcgccgctggttgccgaaagcattcgctgctacctgcaggacccgcggcagccgctgtcgctgattggcgcatttaactggccgttcacagggggtgaatga

SEQ ID NO: 210754 - DNA, 651 bp, Klebsiella pneumoniae
atgcggcaattgataaagcctgaaaataccatgcagaaaacttcatttagaaaacatcgcgttgagcgattcagcacacaacaagtcaccagacaacgtaaagaacgccagccaaaaactgtgatcttgttcaataaaccctatgatgtgttgccgcaatttaccgatgaagccgggcgcagcacgctaaaagattttattccggtggcgggcgtctacgccgcaggtcggctcgatcgcgacagcgaaggcctgctggtgctgaccaacgacggcgcgctgcaggcgaagctgacccagccgggtaagcgcaccggcaagatctactatgttcaggtggaaggcgaacccacgcccgaggcgctgaccgccttgcgcgacggcgtcacccttaacgacggccccaccctgcctgccggcgtagaacttgtcgaggaacccgtctggctgtggccgcgcaacccgccgattcgtgagcgcaaatcgattcccacccgctggttgaaaatcacgctctacgagggacgcaaccgccaggtgcgccggatgaccgcccacgtcggcttccccaccctgcggctgatccgctacgccatgggcggctataccctcgacggactggccaacggcgactggcgcaaagccgaataa

SEQ ID NO: 210755 - DNA, 1251 bp, Klebsiella pneumoniae
atggaaagcaaagtagtagttccggcggaaggtcaaaaaatcaccctgcaaaacggcaaactgaacgtccctcacaatccgattatcccgttcattgaaggtgacggtatcggcgttgacgttaccccagcgatgctgaaagtggttgatgccgccgttgagaaagcctataagggcgagcgtaaaatttcctggatggaagtttacaccggtgagaaatcaacccacgtctatggccaggacgtctggctgccagctgaaaccctcgatctgattcgtgactaccgcgttgctatcaaaggtcctctgaccaccccagtcggcggcggcattcgttctctgaacgtggcgctgcgccaggagctggatctttacgtctgcctgcgtccggtacgttactaccagggcaccccgagcccggttaaacacccggaactgaccgacatggttatcttccgtgaaaactcagaagatatctatgcgggtatcgagtggaaagccgactctgcggaagcagacaaagtgatcaaattcctgcgcgatgagatgggcgtgaagaaaattcgcttcccggaacattgcggcatcggcatcaagccgtgctctgaagaaggcaccaaacgcctggtgcgcgccgcgattgaatacgcgatcaccaacgatcgtgattccgtcactctggtgcacaaaggcaacatcatgaagttcaccgaaggcgcgttcaaagactggggctaccagctggctcgcgaagagttcggcggcgagctgatcgacggcggtccgtgggtgaaaatcaagaacccgaacaccggcaaagagatcgtggtgaaagacgtgatcgccgatgcgttcctgcagcagatcctgctgcgtccggcggaatacgacgttatcgcctgtatgaacctgaacggcgactatatctctgacgccctggcggcgcaggttggcggtatcggtatcgccccgggcgccaacatcggtgacgagtgcgcgctgttcgaagcgactcacggtactgcgccgaagtatgccggccaggacaaagtgaacccgggctccatcatcctgtccgcagagatgatgctgcgccacatgcagtggttcgaagccgcagacctgatcgtcaaaggcatggaaggcgctatcgccgccaagaccgtgacctatgacttcgaacgtctgatggaaggcgctaaactgctgaaatgtagcgagtttggcgacgcgattatcgcgaatatgtaa

SEQ ID NO: 210756 - DNA, 714 bp, Klebsiella pneumoniae
atgaatctcctgaaaccgcagcaagacagtgagccagaggaggcgctggaaaccgctatggcgatggtggcctcagccctctctgactcgtcaagggtcagtattctctgcgcgctgatggacgggcgcgcatggacggcaaccgaactcagtacggtcgccgaggtgtccgcctccaccaccagcggccatcttgcccggctgctcagcaacggactggtggtgtgtctcgcgcaggggcgccaccgctattaccgcctggcgggctcgcatattgccgggctgctggaaaacctgatgggcgtctctatgcaagcgcataagacgcttctccccagcacgccggttaatcttcgctacgcccggacctgctacgatcatctggcgggcgagctggcggtcaatatttatgaatttatgctgagggaaaaatggctggcggcagatggcctggccctgacgtcagccggtaaaacccagcttgaacgccttggcgcagtgtttaacgcccgcccacggcgtaagccttgctgcccctgtctcgactggagcgaaagacgttttcatctgggcggcgacgccggctcggcgctaatgacgctgttcctgcaaaaaggatggataacgcgcgcgccgggatatcgggaagtacaagtgacggatagcggcagagcggcgctgtcccggctgtttaatctgaaagtgcgcggatag

SEQ ID NO: 210757 - DNA, 393 bp, Klebsiella pneumoniae
atgtatgacattcacgtgattctcagcaactcgccgggctcgcttggcgcaatgggtatggcgctgggtaacaacggcgtggggctcgaaggcggcggcgtattcaccacgcctgatgccggacatgcgcattttctggtggaagacggtgagacagcccgcagggtgctgaccgaggccggctttacggtcagcaatgtatgccgtcctctgatacgaaagttacctcaggaacgtcctggggaactgggagacatcgcagacaccctggcccataatggtattaatattctggtacagtacagcgaccaccgtaaccggctcattctccttaccgatgatgacgcccgggcagcggaagtgaccaaaaaatgggccatactttctgaatga

SEQ ID NO: 210758 - DNA, 324 bp, Klebsiella pneumoniae
atgattgcggtactttttgaggccgacgccttaccacaagcacaggaaagatatcttcagctggcggccgggctgacgcctttgctttcagacacgccggggtttattgccattgagcgctttcagagcctgagtacgcccggcaaaatcctctcgctatcctggtgggaagatgaagcctcggtggccaactggcagcaaaatgagcggcatctggctgcccagcgcgaaggcaaagcatcgattttttcatattacagaatacgcgtagcccgcgtgttccgggattacgcatcggatcggggagcacagtcagatgtatga

SEQ ID NO: 210759 - DNA, 228 bp, Klebsiella pneumoniae
atgctcgagttacgtccgaattgcgaatgctgtgataaagatctgccgccagactcacccgaggcgtttatctgttcgttcgagtgcaccttttgccgggactgcatgacgacgcgactgaacggacattgcccgaactgcggcggcgaactggtgcggcgccctgtgcgtcccgaagaggcgctgcggcgccaccccgcctccaccctgcgccgccatgcacagtag

SEQ ID NO: 210760 - DNA, 1194 bp, Klebsiella pneumoniae
atgaaagcactcacttatcacggcccgcatcatgtcagcgtcgacaccatgcctgacccggctcttgaggcagcggacgatattattctgcgcgtcaccgcgacagcgatttgcggttccgatctgcatctgtaccgcggaaagatccccggcacgcaccatggtgatattttcggccatgaatttatgggggaagtggtggaagccggttccgaggtcaccgcggtccgcaaaggcgaccgggtggttatcccgtttgtcatcgcctgcggagactgcttcttttgtcgcttgcagcagtatgccgcctgcgaaagcaccaatagcggccagggcgcgacgctcaatcgaaaaggcatttcgccaccggcggcgctgtttggctatagcgatttgtacggcgggatcccgggcggccaggcggaatatgtacgggtccccaaagccaataccggaccgtttaaagtgccagacaccttacccgatgaaaaggtgctgtttctgtcagatattctgcccaccgcctggcaggcggttaaaaacgccgaggtcaaacccggcagtagcgtggctatttttggcgccggcccggtaggcctgctctgcgcctcctgcgccaggctcaatggcgcagaacagatatttatcatcgatcataacgattaccgactcgatttcgcgcaacaacgctatggcgcgatcccgataaactttgaccaccatgacgatcctgcgcagtggattatcgataacacgccgggccatcgcggcgtcgacgcggtgatcgacgccgtgggcttcgaggcgaaaggtagccttacggaaaccgtcctcagcaccctgaaaatcgaggggagcagcggaaaagccctgcgccagtgcatcgccgccgtgcgccgcggcggcatcgtcagcgtacccggggtttacgccggtttcatccacggctttatgtttggcgatgcctttgataaaggactgaccttcaggatgggacaaacccacgtccacgcctggttgccggatctgctggcgcttattgagcaagggctgcttaccccggaggagattgtcactcaccatatgccgctggaggaggccgcgcgcggctatcagatctttgagaaacgtgaagaggcgtgccgcaaagtgatcctcgtaccgggaatgcagcccgggaaagcgaccctctga

SEQ ID NO: 210761 - DNA, 186 bp, Klebsiella pneumoniae; identical to SEQ ID NO: 136243

SEQ ID NO: 210762 - DNA, 495 bp, Klebsiella pneumoniae
atgaatatgaaaagcattgaagatgtatttattcacctgctctcagatacctacagcgcagagaaacaattaacccgcgggctggctaaactagccagagcggcgtccagtgaaaaactcagcgcggcgttcaatgctcatcttgaagaaacccagggccagatcgaacgtatcgaccagattattgaacaggaatccaacctgaaaatcaaacgcatgaaatgcgtggccatggaaggattaatcgaagaagctaatgaagtcgttgagagcacggaaaaaaatgaggtacgtgatgctgcattaattgccgctgcgcaaaaggtcgagcattacgaaattgccagttacggtactctggtcaccctggcagagcagttgggctataaaaaagcagccaaactgcttgccgaaaccctggaagaagaaaaacaaaccgatgtgaaattaaccgatctggcggtaggtaatattaatatgaaagcggaaaaataa

SEQ ID NO: 210763 - DNA, 507 bp, Klebsiella pneumoniae
atgaatcacgttgaacattaccatgactggctacgagatgcgcatgccatggaaaaacaggcagagtccatgctggaatcaatggctggccgtatcgataattatccggatctccgtgccagaatcgaacagcatgttaacgagaccaaacggcaaattaccgtgctggaagagatcctcgaccgcaatgagatttcgcgctcggtgattaaagattcgatgagtaaaatggcggctctcggccagtccatcggcgggatgtttccttccgatgaaatcgtcaaaggctcgatcagcgggtacgttttcgagcagtttgaaatcgcctgctatacctctctgctggcggccgctgaaaaagcgggcgataccgcctccatcccagccattgaagccatcctggcggaagagcgggaaatggccgactggctgattaaacatattcctcagaccacggagcagtttctcctgcgttcagatgctgacggcgtagaagcgaaaaaataa

SEQ ID NO: 210764 - DNA, 888 bp, Klebsiella pneumoniae
atgtttcgtcatgtgaaacaactgcagtataccgtacgcgttgctgaaccgaatccggggctcgcgaatttactgctcgaacagtttggcggccctcagggcgagctggccgccgcgtgtcgttatttcacccagggattaagcgatgacgatcccggccgcaaagatatgctgatggatatcgcgacagaggagttgagccatctggagatcattggcactttggtcggcatgctgaataaaggcgccaaaggagccctggcggagggcaccgagagcgaggcggaactctatcgttcgctcaccgccaacggcaatgacagccatattacatccctgctgtacggcggcggtaccccgctgaccaactcggcgggcgtgccgtggacggcggcctacattgatactatcggcgaacccaccgccgacctgcggtcgaatgtcgcggcggaggcgagggcgaagatcgtctatgaacgcctgatcaacgtgaccgacgatcctggcgtgaaagacgcgctggccttcctgatgacccgcgaagcggcgcatcagctctcttttgagaaggccctgcagtcgattcgcaacaactatccaccgggcaaactgccgcccattagcgagtacgctaacacctactacaatatgtctgaaggtggagaagtacgcggcagctggaacagtgacaaacacttcgattatgtcaaggatccacagccggccgtagatggcggagatggcagtgcttctgtcggcctgacgccagagcaggaagcgctgtgcaaagcgatgctgaagcgaacgcagtctgacccgcagggcgatcctttgaccggcgccgaactcggcgccgggaagcaaaacacttcatcatcagctaagtga

SEQ ID NO: 210765 - DNA, 1407 bp, Klebsiella pneumoniae
atgtttgaattcgacgcgtttcatctggcccgattgcaattcgcctttaccgtatccttccatatcctctttccggccatcaccatcggccttgccagctaccttgtggtgcttgaggggatgtggctgcgaacccgggataatgtctggcgttcactctacaatttctggctgaaaatctttgccgtcaattttggcatgggcgtagtctccggattagtcatgtcctatcagttcggcaccaactggagcggattttcccagttcgctggcagtattaccggcccgctgctgctgtacgaagtgctgaccgccttcttccttgaagcgggattcctcggggtgatgctgtttggctggaataaagtgccgccagcgctgcattttattaccacctgcatggtggcgcttggcacgttggtttctaccttctggatccttgcctccaatagctggatgcagacgccgcagggttttatcatcgaaaatggccatctcatcccgcaggactggctggcgattatctttaacccctcttttccgtatcgcttgttccatatggcgatagccgcgtttctcagcagcgccatgttcgtcggggcctctgccgcgtggcatcttctgcgcggcaacgactcgccggccatccgcaaaatgctgtcgatggcgatgtggatggcgctgctggtggcgccgatccaggcggtggtgggggatatgcatggtcttaacacccttgagcatcagccggcgaagatcgcggccatcgaagggcactgggaaaatcgccccggcgaggccacgccgctgctgctgtttggcctgccggacatggagcaggagcggacccgctatggtctggagatccccgctctcggtagcctgatccttacccacagcctgcataagcaggtgccggccctgaaagacttcccgaaagaggaccgaccctattcgcccgccgtcttctggtcgtttcgcatcatggtcgggatgggcgtgttgatgatcgccttagggatctgcagcgcctggctgcgctatcggcggcggctgtaccactcgcgtcccttccagtggtttgcgctctgtatggggcccgccggtcttattgccctggtcgccgggtgggtgaccaccgagatgggccgccagccgtgggtgatatacgggttgttgcgcacgcgggatgcggtgtcgttgcacagcaccctgcagatggccatcagcctgctggtatttatcgtggtttactgcgccgtgtttggcgtggggtattactacattttccggcttatcaaaaaagggccgcagccggtgacggagctgacctcgcaaaccgcaggcaccccggcgcgtccgctctcagcggctgagccggtgcgtgatgaggagaacgcatcatga

SEQ ID NO: 210766 - DNA, 1011 bp, Klebsiella pneumoniae
atgagcatcgatatctcggtgatttggtttgtcatcattgtcttcgccacgctgatgtatatcgtgatggatggtttcgatttaggtattgggatgctgttcagcgtggtgcatgatggcgaagagcgcgatgtgatggtcaacagcgtcgcccccgtctgggatggtaacgaaacctggctggtgctcggcggggcagggctgttcggcgcctttccgctggcctatgcggtgatcaccgatgcgctggttatcccgctgacggcgatgctcatcggcctgatttttcgcggcgtggcctttgaatttcgttttaaagcggttccctcgcatcgcatcttctgggactatgcctttgccggcggctcgctgttggcgaccttcagccaggggattgtcgtcggcgcgtttatcaacggctttgcggtggctgaccgccgcttcgccggttcgacgctggactggcttacccctttcaatctgttctgcggtctggggctggtggtggcctatctgctgctgggcaccacgtggttgattatgaaaagcgaaggcgcgctgcagcagcggatgcgcgagctgacccgcaaggtactgctggcgctgatggcggtgatcgcggtggtcagcgtctggacgccgttgggctggcgctacgtggcggaacgctggtttacgctgcccaatttcttctggttcgtgccggtgccgattctggtgttggctctgagcctgtggatctggcgcctgagcgcgcgccccgccagccatgcccgcccatttatcctgacgctgggcctgattttcctcggcttcagcgggctggggatcagcgtctggccgaacattatcccaccgcatatctctctgtgggatgccgctgcgccgccgtccagccaggtatttatgctgccgggcgcgctgctcattatcccggtgatcctgatgtataccgcctggagctactacgtctttcgcggcaaagtctccggcagcgagggctatcactga

SEQ ID NO: 210767 - DNA, 198 bp, Klebsiella pneumoniae
atgcctagcgaaaaagcccgcagccttgaccatttctatgaattactggcgacaggacaacacccgaagattgagctcgattttgatgtcgccgcggacgatttttttaaaatcgccaccgagtttggcgatattggcgcgaggatcacccgggttaacgaacgatttattattaagatcaagccaccgaaggcataa

SEQ ID NO: 210768 - DNA, 633 bp, Klebsiella pneumoniae
gtggccgggagaattgattacgatattgaaaaataccagtttaccgaagccggtgagacgccacggctccgggagcagtggcgcgaagtatacctggagtgtcgtcagctgcgggccggggcagaggagcgcctgcgcattgcgttactgaacgtcgactatgtcaccagcttcgagctgccttttcgcctgctgctggtgcgcgcgccgcagctaatcgccgatgttcgcgagacgttgcagcttagccgtaaagccgccgttttcaacggcaaacgttacggctgcgtctatagtttgaaacaggatttacaggctgtcccggaagcctttcattaccgcctggcaaaccgcattcgtcgcgtcgatgcaacggggctgacggcggccccgtaccagcagattgcccgggagataaagccggcccgggagcggctccgccaggcgctgaacgccggcctgccggtcaccgctctcgacgccctgttctggttcggcagtcagcgagtggcggcggacatcgcgcagttgcgccggtccggtatggcgattgtcacgacggaggtggaggtcagcgacaatttgttcaataccacccgacgagtgcccgtttaccgcctggccagcgagtga

SEQ ID NO: 210769 - DNA, 687 bp, Klebsiella pneumoniae
atggttgaagaaaacgcgaaaaatacctcctatcgcttcgtactggagcccgctattagcgatgatggcagctgccactcgtgggaattgctcactaaagatattatagcacccgcacgaaataacgcctcagcgcccgcgttttctttctccacgcttaccgaaagcgataagcttgcactatttacccgacaaatcgagttgctttccgtatttgatttttccctggtcgataataagccgatctcgctcaatatcgatgatttattaagccattttattctgacggaccgctatctctgcgattttctgcgctcgtgtaagcatattgctttggagataaatgagaattttcatgagtttatcgccggccgcgagctgacggcgctaagcacgctggcggcgctttgtccggtctggctggatgattttggtcgcgggcgaacctccttcccgctgctggagagattccgcttcgattgcgtcaaagtggataaggattacttctgggataaagaaaacgaccccgctttgcccggtctgttgcagtctattcataccctgaccggccatgtgatcgttgagggtatcgaaaccgaaaagcaaaaacggttaatcacttctgccggggacatcataggtcagggccgctactggaaggaagaatatatttttctttgcggttga

SEQ ID NO: 210770 - DNA, 1509 bp, Klebsiella pneumoniae
atgaccgcaccgattcaggatctgcgcgacgccatcgcgctgctgcaacagcatgacaatcagtatctcgaaaccgatcatccggttgaccctaacgccgagctggccggtgtttatcgccatatcggcgcgggcggcaccgtgaagcgccccactcgcatcgggccggcgatgatgtttaacaatattaagggttatccacactcgcgcattctggtgggtatgcacgccagccgccagcgggccgcgctgctgctgggctgcgaagcctcgcagctggcccttgaagtgggtaaggcggtgaaaaaaccggtcgcgccggtggtcgtcccggccagcagcgccccctgccaggaacagatctttctggccgacgatccggattttgatttgcgcaccctgcttccggcgcccaccaacacccctatcgacgccggccccttcttctgcctgggcctggcgctggccagcgatcccgacgacgcctcgctgaccgacgtcaccatccaccgcttgtgcgttcagggccgggatgagctgtcgatgtttcttgccgccggccgccatatcgaagtgtttcgccagaaggccgaggccgccggcaaaccactgccgataaccatcaatatgggtctcgatccggccatctatattggcgcctgcttcgaagcccctaccacgccgttcggctataacgagctgggcgtcgccggcgcgctgcgtcaacgtccggtggagctggttcagggcgtcagcgtcccggagaaagccatcgcccgcgccgagatcgttatcgaaggtgagctgttgcctggcgtgcgcgtcagagaggatcagcacaccaatagcggccacgcgatgccggaatttcctggctactgcggcggcgctaatccgtcgctgccggtaatcaaagtcaaagcagtgaccatgcgaaacaatgcgattctgcagaccctggtgggaccgggggaagagcataccaccctcgccggcctgccaacggaagccagtatctggaatgccgtcgaggccgccattccgggctttttacaaaatgtctacgcccacaccgcgggtggcggtaagttcctcgggatcctgcaggtgaaaaaacgtcaacccgccgatgaaggccggcaggggcaggccgcgctgctggcgctggcgacctattccgagctaaaaaatattattctggttgatgaagatgtcgacatctttgacagcgacgatatcctgtgggcgatgaccacccgcatgcagggggacgtcagcattacgacaatccccggcattcgcggtcaccagctggatccgtcccagacgccggaatacagcccgtcgatccgtggaaatggcatcagctgcaagaccatttttgactgcacggtcccctgggcgctgaaatcgcactttgagcgcgcgccgtttgccgacgtcgatccgcgcccgtttgcaccggagtatttcgcccggctggaaaaaaaccagggtagcgcaaaataa

SEQ ID NO: 210771 - DNA, 891 bp, Klebsiella pneumoniae; identical to SEQ ID NO: 135654

SEQ ID NO: 210772 - DNA, 1785 bp, Klebsiella pneumoniae
gtgagaatcgccaccatcactaactgggcttacgggatcaccgttggcctgacgctggcttccgggagcgctatgctcatggcctccagcgccgaccgcgtcgaacgccaggcggtacagcagcgccaggtctttgataccctctccgacgaggtggaaaacgacgcctgggcgctgtctgacctcgcccggctgtacgtgataaagccttcaccggagacgcttacgcaatatcagcagctgcagcagaccgacaagagcatagagcagcggctgggcggcctgaaagataacggcgccagccgcgaggagctggcgctgctccaggatggcctgcggatcgccgatgagctacaggatgaacagcaggcggccctggcgcatgtcgctcgcggcgatgcgccagcggccatcgcggtgctgtacggcaccgcgtacgagactgaactggagcgcatgcagacgcagatcgatcgcttccgccagatgcttgagcatcgcgccgccgtcgctatcgaccaggccaccgagcgctcgcggatctggcgtacgctgtcggaaatcatggtcggcctgaccgccctgatgtttttgttcgtcctcggcttcattctcaaacgccgggtgctctacccggtggttcgcctgagcgacgtggtccagcgtctcgcctcccaggattatgcggtggagacgccgcactttacccaggtggatgagattggtgacatggctcaggcgatccgcatttttcgcgagaacggcctggcccgtcagcggctggagcagcagcgcgacgccgactgggcgatccgcgagctgctggcgcgtatgactcagcggctgcagggctgtgaaaccattgaggatgtgattaaggtggcggagcggtttgcgccgaatatcgccccgacgatccccggtaaactgtatgttctggataccgacccctggcagatgcgctgcgtagcgcagtggctgtcgcccgccggtgagacgacgcccttttctcccgacgactgctgggcgatacggcggggactcagccatccgccggtgcagggcgagcccgatatcacctgctatcatttgccggagacgcacgccggccagtcgctctgcgtaccgctcatcgcccagggcgaagccattggcctgctgactttccagaacgtcaccgccagtgacgctccttcccgggcctatctcgagctgatggcggaagcgttgggcctggcgctggccaatcagcgtttgcgcagcgccctgctggaaaaagcgctgttcgattccctgaccggcctgcgtaaccgccatcatcttgacgaagcgctgcattcgcagatggcgctggcggtccatacccatactccgctgagctgtctgatgatcgacatcgatcattttaaaaccatcaatgatcgctatggccatgaggctggggatctggtgattaagagcgttgcgaccattgtgcagcgcgcggtgcgcgatatcggcatggctttccgctacgggggcgaggagtttttagtgctgctccccgggattgacgaagccggggcgcaccagtgcgccagcgagatctacacccaggtgcgcaatatgacgctgcgcgatggtctgaccgagataggccaggtggatgtgtcgattggcatcgccagctacccgcagcacacccaaagcgatagtctgctgcgcgcggcggatgccgcgctgtaccgggcgaaagagctgggccgctcaaggattgtcagctttggccgcctgaagaccagctaa

SEQ ID NO: 210773 - DNA, 1209 bp, Klebsiella pneumoniae
atgcgtattgccctgaagtcggccctgatgctgaccaccagagtcatccagatcattaaccctgaagtgcaccggcatatgcaacgaacggccttaatcgccctgacgctggcgcaaaggctggaactgcctgacgaacggcagcagaccattttttgcgccgcgctgctgcacgatatcggcgtgctgggggataaacgcaccattcattcgctggatgctatcgataatatccacgacccgcatcagcgccagggtgtggcgatgctggagggattagcgaccttccagcccatcgttccctttattcgcgatcaccattttagcccgaaccaccggggctcccgcgaacagcacattgtctatttcgctgatgcctttgaacggctgctgccggccgatagccacgttgccgcctggcccacgcgggcggtggtggaacagttcgtcgctttgcatcgggagatcgatccgccgctctgcgatatcctgtgcgaggtcgctgaaaatgcgaacttctggcagcaccttcaccccggccatattcagcggctgctggagattattggccccatcaacacgcgctatctggatattcacggtctgaaggatgtctgcctgctgattgccaaaatcgtcgacacctacagcagctttaccgccacccatagcatcatggtgggggaaatcgcccgccagcttgcccgctggatgcagctgccggagcccacctgccagcaaatacagatagccggctatctacacgatattggcaaggtctatatcccactctccattctcgaaaaagagggcgagctggatgatgaggagctgagtcaggtgcgggagcacagctacatgaccggcgaacttctcagcgactatagcgagctcggcgacatcattaactgggcctcgaatcatcatgaaaaaatggacggcagcggctaccctctgcatctcgaaaaggagcacctgaccctcgccgaccggattatctccatcgccgatattttcaccgcgctgaccgaagatcgcccttatcgtaaagggatggcctggcaggaagccttacagattatggaagcggatgttataaatggcgctctggatagcgatgtcttcctcgttttgcgccaccatgcggaaacgctacacgccatcattcttcagacccttgcccctctgcatagcgagcgccgcctctga

SEQ ID NO: 210774 - DNA, 1044 bp, Klebsiella pneumoniae
atgaattttagagcattacttgccattgcgttattgacgatgagcagcctggcgtttagcgagacgcgtcttccgcatattgttattttagccaccggcggaacgattgctggttcggcggccagcaatacccaaacaaccggctataaagccggggcgattggggtgcagacgctgattaacgccgtgccggaaatgagtaaaatcgctcacgtcgagggcgagcaggtggccaatattggcagtgagaatatgaccagcgatattattctccagctctcgaagcgggtaaatgcgctattggcccgggacgatgtcgatggcgtggtgatcacccatggtacggacacgctggatgaaaccccgtatttcctcaatctgacggtgaaaagcaacaagccggtggtctttaccgcggcgatgcgcccggcgacggcgatcagcgccgacgggccgatgaacctgctggaagcggtcacggtcgctgccgatcctgatgcccggggacgcggggtaatggtggtgcttaacgaccgcatcggcgcggcgcgctttgtcaccaaaactaatgccacttcgctggataccttccgggcgcccgaggagggctatcttggtgtcgtggtgggcggaaaaccccagttcgagacgcgggtggataaaattcacacgctgcgctcggtgttcgatgtgcgtcagctgaaggttctgccgaaggtggtgattatttatggttaccaggacgatccggagtatatgtacgatgcggcgatcgcccatcatgccgacggtattatctacgccggaaccggggcggggtcggtgtcggtacgtagcgccgccggtatcaaaaaagcgcagcaggcgggcatcgtggtggtgcgagcctcccgtaccggcagcggcgtcgtaccgccggatgacagccagcccgggctggtggccgactccctcaacccggcaaaagcgcgtatactgctgatgaccgcgctgacgcagactaaagatccgcagctgattcagcaatatttccatacctactga

SEQ ID NO: 210775 - DNA, 915 bp, Klebsiella pneumoniae
atggcctgcgtatttaataaacaacttttacacccgcgtaactggctgacctggttcgggctcggcatcctctggttaatcgtgcaactgccttatccgctgctgcattttatcggcaccagcgctggtcgcctttcccgtcgctttcttaaacgccgcgaacatatcgcccggcgtaatatcgaactctgcttcccggacatgtcgccagcggcgcgcgagacgctgatcgatcaaaactttatgtcgctgggaatggggcttatcgaaaccggcatggcctggttctggagcgacgagcgggtcaaaaaatggtttgatgtcgaggggttcgccaaccttaatcacgcgcttagcggtgggaaaggggtaatggtcgtcggcgtgcactttatgtcgctggagctgggcggccgcgcgatggggctgtgtcggccaatgatggccacctaccggccgcacaacagcccgctgatggagtgggtgcaaacccgcggtcgcctgcgttcgaacaaagcgatgatcgatcgcaacaacctgaccggtctggtgcatgccttaaaatccggtgaagcggtgtggttcgcgcccgatcaggattacggtcccaagggcagcgtctttgcaccttttttctccgtcccgcaggcggcgaccaccaacggcacctatgtcctgtcccgcttatcgggcgcgaaaatgttgagcatcagcatggtacgtaagctggatcgccggggctatagcctgcatatcagcgaggtgatgaatgactatccgggtgaggataagcagatcgccgccggctatatcaacaaggttattgagcgcgagatcctgcgcgctcccgagcagtatctgtgggtacaccgtcgttttaaaacccgcccgctgggcgaaccttccgtctattaa

SEQ ID NO: 210776 - DNA, 639 bp, Klebsiella pneumoniae
gtgttcgctgagtttggtgttctgaattatttaacctatctggtcggggcggtgtttatcatcctcgttcctggccctaatacgtttttcgtgctgaaaacgggcattgcccacggggtgaagaaaggctatctggcggcggcgggcgtctttattggcgacgcagtgctgatgtttctggcattcgccggggtggcgacgctgattaaaaccacgccggtgttgtttaacgtcgtgcgctacctcggggcaatttacctgctgtggctcgggggcaaaatgctctatgcggtgctgacccagcgcgacggccagtccgacgccagcgcggagccggcgagcgcgatcctcaagcgctctctgaccctgagcctgaccaatccgaaagcgattctgttctatgtgtcgtttttcgtgcagtttatcgatgtcaacgccaaaacccccggcgtggcgttctttatcctggcgctgaccctcgaggtgattagcttctgctatatgagctttttgatcctctccggctcgtttgtcacccgctacgtcaaaacccgcaagaagctggctaaacttggcaacagcctgattggtctggttttcgtcgggttcgccgcgcgcctggctaccctgcagtcctga

SEQ ID NO: 210777 - DNA, 264 bp, Klebsiella pneumoniae; identical to SEQ ID NO: 135647

SEQ ID NO: 210778 - DNA, 1014 bp, Klebsiella pneumoniae
atgtcagattttattcttgcccgggtgtcgcaaaccctcgctgcggaacaatccctggaaaccctggtgcgccagctgctggagatgctggaggcggtgacgcgaatggagtccacctacctcacccgcattgataccaacgcccagcggcagcagatcatgttcgcccacaacagcagcgaaatgcagatcccggaaggattttccgtcccctgggatgaatccctgtgcaaacgcgcccttgaggatcagtgtacgtttagcaatgacgttgccaaccgctggcactcctgcatcgccgcccaggagctgggaatcgctacttttttaagcattcccgtccgcctggccgacggctctctgttcggcaccctctgcgccaccagccggcaacaacagccttataacctcgaaggcgaacaggtcatgggcctgtttgcgaagctcatttcccactacgtggaaaaagacaccctggtgcaacagctgcaggcggcaaacgtcgcgctggagctgcactcgtctaccgatgagctcacccagcttcccaatcgccgcgcgctgtttaagcagctggcgttacgctttgcctccgcccgcgcccagcagcagcaggtctcgcttatttttatcgatctcgatggtttcaaagccattaacgatcggttcggccatccgtgcggcgacagctttctggtgcaggtcggcaaacgactcaccgctgtcgcgcgccgggaagatatcgttggccgccttggcggcgatgagtttttgatcgtcggtagcgcccagcagcctgccgcacagcaggcgtatgtcacgtctctgcgtcaggctctgtgcggcgtctacttcctcggcgaacagcgtatcgactatgagggcgctagcttcggggtggtcacctgcgatccgcagagtatcgatgttgaagcggccttacgcactgccgatgaggcgatgtaccaggataagaagtcccgccgccaggagaatttcattcatattgactaa

SEQ ID NO: 210779 - DNA, 240 bp, Klebsiella pneumoniae
atgaaaaagctactggctattttgcccctggcgctggccggctgtacccagccgcagcccactgcgccgacgaaaaccatcggcatgcccaaccccgcggcggtatactgtcagcaatccggcggcacccgggtgccggtgcaaacgccgcagggcgtcagcactcagtgcaaactacccagcggcgaaaccctcgacgagtgggcgctgtggcgccgggatcatccggctaaatcgtaa

SEQ ID NO: 210780 - DNA, 357 bp, Klebsiella pneumoniae
atgattcagtgtaaacgggtgtatgacccgcaggaaagcagcgacggctatcgggtgctggtcgaccgtctctggccgcgggggattaaaaaagaggcgctggcctgtgatgagtggtgtaaggagttaacgccttccgctgagctgcgcaaagcctttcacggcgaggcgatcgatttcgcccacttcagccagcgctatcgtcaggagctcgacgcccatcgcgaaacgggcctgcggctggcggcgctggcgcaacgccagccgctgacgctgctgtacgctgcgaagaacaccgagcagaatcatgcccgggtgttggccgcctggctggcggccctgccggttacgatttag

SEQ ID NO: 210781 - DNA, 510 bp, Klebsiella pneumoniae
atgaaaaataagcttttggtcagcgcctgcctgatgggattccaggtgcggtataacggtagcgagaaggcacagctggcggcgacgctgtcccgctggcagcaggcggggcggctggtgatccactgcccggagctggcggccggtctgcctacgccccgactgccggcggagatcctcggcggtaccggcggcgatgtgcttgccggacgggcgcggatcgtggaaagcgacggccgcgacgtcaccgaacattatcagctggccgcctggctggcgctcagcgccgcccgggaagcgggctgtcaggcagcgttactcaccgacggcagccctacctgcggcagccagtttgtctatgacggttcctttcgcggacggcgcaaagcgggcgccggcgtggccgccgacctactccgcgcccacggcatcacggtattttccgacgggcaaatcccgcagttgctcgcctggatggcacagaaggagcaggatgatgattcagtgtaa

SEQ ID NO: 210782 - DNA, 693 bp, Klebsiella pneumoniae
atgaaaactcctttacgcctcgcccttgtcggcgattatcaccccgatattgttgcccatcaggccattcccctggcgatagacgatgccgccgccgtgctggagcagccggtgaaatatgactggctcgccaccccgtcgatcgcctccggcgaggcgctggcggagtacgatgccatctgggtcgttcccggcagcccgtatcgtcacccggaaggcgcgtttaccgcgatccgctatgcccgggaaaacagcattcctttcctcggcacctgcggcggctttcagcacgcggtgattgaatacgcccgcaacgtgctcggctggcaggacgccggacatgcggaaaccgacagcgaagggcggatggtgattgctcccctcagctgctcgctggtggagacctctgccgtcgtcgagctgcgggcgaatacgctgattgcccgcgcctatggccgggagagcattgaagagggctaccactgccggtacggcgtgagcagcgcgtttgcggcggagctggagcagggcgatctgcgcgtcaccggctgggatgaagagggtgagatccgcgccgtcgagctggtgacgcacccgttttttgtcgccaccttgttccagcatgagcgtcacgcgctggacgggcgtcccgcgccgctggtgcaggcgtttctccgcgccgcggcacaataa

SEQ ID NO: 210783 - DNA, 1185 bp, Klebsiella pneumoniae
atgtcttctgtgatctcctctaccggccgccgccccgcgctgctgattgccggtatcctgctcatcgccaccaccctgcgcgtggtctttaccggcgcggcgccgctgctggacgcgattcgtagcgactatggcctgaccaccgcgcagaccgggctgctcactaccctgccgctgctggcctttggccttgtctcgccgctggcggcaggggttgcccgccggttcggcatggaacgcagcctgctgctggcgatgctgctgatctgcgccggcattgccctgcgctccctgccctccgctgcgctgctgtttatcggcacggcggtgatcggctgcggcattgcgctgggtaacgtgctgctgcccgggctgattaaacgggatttctcgcagcatgtcgcgcggatgaccggcgcctattccctgacgatgggcggcgcggcggcgcttggttcggcgctggtggtccccgtggcgatggccggattcggctggcgcggggcgctgctgctgctgatggtcttcccgctactggcgctcctcagctggctgccgcagtcccggtgccgggcggagacgccattgaccggctcaggcgctatgcataaccgggggatctggcggtcggcgctggcctggcaggtgacgctgttcctcggcatcaactcgctggtctattacgtgattatcggctggctgccgtcgattctgcagagtatgggctatagcgaagcgcaggccggctcgctgcatggcctgctgcagctggcgaccgccgcgcccggcctggcgataccgctgatcctgcatcggctgcgcgaccagcgcgggatcgcggtgctggtcgccctgatgtgcgccatcagcgccgccgggctgtggctgttgcctgagctggcgatcggctggacgctgctgttcggctttggctccggagccactatgatcctcggcctgacgtttatcggcctgcgcgccagctcggcgcatcaggccgcggcgctgtcagggatggcgcagagcgtcggctatctgctggccgcctgcgggccgccgctgatgggcaggatccatgatgccaatggcgactggcatattccgctgctggcggtggcgctgatttcgctggtgatggcggtctgcggcgcgctcgccggacgtgaccgggaaattcacccctga

SEQ ID NO: 210784 - DNA, 792 bp, Klebsiella pneumoniae
atgattggactggggctggatggctatgaaccggacagtggccacgaatcggccattgcctttcgtatccgggtggtggaggcggagcagtatattccggcgcattcccaccgtaaggggcagctgatccttgccctgcacggcgccttgacctgcgaggtggagaacgcaatgtggatggtgccgccgcagtatgcggtgtgggttccggggcagctgtcccacagtaaccgcgctacccccggcgcccaggtatgcttcctgttcatcgagccgggcgccgcgccgatgccggatcgctgctgtacgctaaagatttccccgctggtgcgagagctgatccttactctggcggagcgcggcggagagtccctggccgcccccgccacggcccggctggtgcaggttctgtttgatgagctgccccgccagccgcaggagcacctgcagctgccggtatcaaaccacccgaaaattcgtcaaatggtgacgatgatggctgaggatccggcgcgctggcagaccctgagccagtgggcggcggtgtttgcgatgagcgagcggaatctggcccgcctggtcgtgcgcgaaacggggctgagctttcgccgctggcgccatcagctgcagctgatcctcgcgctgcagctgctgatccgcgggcagacggtgcagcagacggctcaggcgctgggctacgattccaccaccgccttcatcaccatgtttaaaaaagggctcgggcagacaccgggccgctatcacggtagcctggctacgacttcccaataa

SEQ ID NO: 210785 - DNA, 447 bp, Klebsiella pneumoniae; identical to SEQ ID NO: 135639

SEQ ID NO: 210786 - DNA, 501 bp, Klebsiella pneumoniae
atgcttgaagcagtagaaggtaatatccaccaacggctgtgcgcgctgctcgacgagcaccgggcccgctaccgggtgatggcgcacgaggcggtcggtcagtgcgaagccgtctcggcaatccgcggcaccgcgcttggccagggcgcgaaagcgttagtctgtaaagtgaaaggaaacggcgtcaaccagcatgtgctggcgatcctcgccgccgatcggcaggccgacctcgccagcctggcccggcatatcggcggcagcaaagcctcgctggccagcccggcggaggtggaggccctcaccgcctgcgtgttcggcgccattccccccttcagtttccatccggcgctgcggctggtggcggacccgctgctgtttgaacgctttccacaaatcgcctttaacgccgggcgcctggaccggtcgatcattctcgacaccgaagactatttacatatcgcccgaccagagatcgcgacctttcgccgtcttagctaa

SEQ ID NO: 210787 - DNA, 1140 bp, Klebsiella pneumoniae
atgatgcacgatgcaaccatgcagggttccccacgcaagaaatttaataaaataagggagctcaacagacggcggaattactttactaagaaagtacgtaatgccctgcgggtgggggtggcgaaagcgctctgggatcgccgacgccgtcagccggtagatttgtcgtctgcgaaaaccgtcctgttgatgcgcaatgagggggcggtcggcgatgtagtggtggattccgcgctggtgaaatgcctgcatcagtcaggctatatcgttgattttttgctgacgacctctaacagccaggtgatgcgttataacccgcggatccgccatatttatgaagctgacccggtcacgtccgccgattttttgcgtaaatttaatcataacgttcctcgcgacgttattaatgaactggctaataataagtacgatattattattgacccttcgctgttcgatattcccgtgcatcgcctgcggcttttccgacaaataaaagccaaatcagtgctcgggtttaataaatggccatcgattaagcactactcccactcttttgattttgactgccagcgctggcacgtgacgaaaacgttcgagctgatcgccgattatctccaactggacacccgcgggctggacgcttacgacctggcggtgcccgggccgattatgcaggaggtggcgcagtatctggcgtcgctaagcggaaaagcggtggtgattaatatttttgccggccatgccgaccgcagtctctcgcagacgcagctggcggaactgctcgacaaactgctggcccgccatccggggagcgcggctattctgctcgatcaccggcgcgagatccgcatcccgctgccgccggaggtggtgattaacccatttaacacgttacaccatgcgatggcgctgatcgcccaggcggagctgattatctccccggacacctcggtggtgcacatggcggcggcgtggaacaaaccgctgatcgcggtctataaggacgttctgcttaataaccggctgtgggccccgggctatgacaacgccaggcagatcattgttaaatgcgggaaggtccatcagcatcgcgggctagtggatagaattatagcggcgctaccggagacgctgtga

SEQ ID NO: 210788 - DNA, 243 bp, Klebsiella pneumoniae; identical to SEQ ID NO: 135636

SEQ ID NO: 210789 - DNA, 885 bp, Klebsiella pneumoniae
atggcccccggggttgctatctcacttaagagacttgcctggcggcacagaaagaaattgtgcattactttcatgctggttattgctgaaaacgttgcattcctgctctaccccgttctggcgggtatggcgataaatgccatcctgggcggacagacgtcacatgcggccctttatggcctgatggttctgttcatgtggtgcatgggagccgccagacgtagtgtcgatacgcgaacgtttgcacgtatctacgcaagtcttgctgtgactgtagtattatcccagcgaaaatattcacttaatcactcgactattgctgcgagagtcactctgtcgcgtgaatttgtagatttcttcgagttgcaccttcccgtattgatcacctcgatcatttcccttttcggcgcagcaattatgctgttatggattgaattctggacaggtatagcctgtttgatcatcgtggcaatactgatgtgttttgtctcaagctatgccagcaaaaatgagacattctacagacggctgaataatcgccttgagaaagaggtcgattatgttaataaggcgtcttttggtgctcttaagcgacattatgacacacttgctcgtctgcgcgtggtgttatccgacagagaggcatggggatatttatcaataggccttctggtttctgctctcttttccatgaccattatcaggatgagcatggaatccggaattaatgccggacatatttattccgtcatgacctatatgtggatgtttgcaacaagccttgatgacgcaccacaacttcttgagaaattttcccagctcagggatatcggtaaacgggtttcgactgacgatgagacctctttatcaggaaaaccatgctga

SEQ ID NO: 210790 - DNA, 3117 bp, Klebsiella pneumoniae
atgccgcactttttcattgagcgccccatcttcgcatgggttattgccctgtttattgttctgacgggactgttgtccatacctcgtttaccggttgcgcaataccctgaagttgcgccacccggtattatcatttcagtgagttaccctggagccagcccggaagtgatgaacacatccgtcgtgtctctgatcgagcgtgaaatttcgagtgttgacaatttactctattttgaatcttccagtgacacgacagggatggcgtcaattacggtaactttcaaacccggtaccgacatcaaactcgcccagatggatctgcaaaaccaaattaaaattgtggaatctcgcctgccgcagtcggtaagacagaatgggataaatgttgaggcagctaattccggttttttaatgatggtggggttaaaatcgccaagcggagcctatcaggaagctgacttaagcgattattttgcaaggaatgttactgatgaactccgtcgcgtacctggtgtaggtaaagtccagctttttggcggagaaaaggcactccgcatatggctggacccgatgaaattacacagctatgggctctctgttacggatgtattaagcgccatcagtcaacaaaacgtgattgtttcaccgggcagaaccggagatgaacccgcgacgagcagtcaagaggtgacctatccaataacggtaaaagggcagctctcttcggttgaagaatttcgcaatatcacgattaaatcacaggtctcagccgcccgggtgacactggcagacgttgcccgcgtggaatccgggttgcaaagttacgcatttggcatccgtgaaaatggcgtgcctgcaacggctgccgccattcagttgtctcctggcgcaaatgcgattagtactgcgtcgggtatccgcgcgcggttaacagaactgtccggtgtgcttcccgagggaatgacattcaccgtgcctttcgatacggctccatttgtaaagctatcgatattgaaggtagttgagacatttgttgaagccatggttctggtctttttcgtgatgctgcttttccttcacaagatacgctgtacgcttattcctgcgattgtggcacccgtggcgctgctcggcacatttaccgtaatgctattaagcggttattccatcaatattttaaccatgtttggaatgatactggccatcgggattattgttgacgatgctattgttgtggtggagaacgtcgaacgactgatggaagacaaaaaaatgtctccacaggatgcaacgcgagaagcgatgcgtgaaattacgccggcaatcattggtattacgctggtgctcactgcggtgtttataccaatggcctttgccagcggttctgtgggtattatttatcgacagttcagcatttcgatggcgatatccattttactgtcggcattcctggcgctgacgttaacgcctgcgctttgtgcaaccctgctcaaaccacatggtattcatcagggtaaaagcagcgtattttcagcgtggtttaacgctcactttcatcgcctgacttcgttttacgccactggtctgggatttgtactgaagcgtactggccgtatgatgatgatctacgctgcattatgtttggcattgtttgccgggctgtccaccttaccatcatcatttttacccgatgaagatcagggttattttatgtcctcaatccagcttccttctgatgccacgatgcagcggacgcttaaggtcgtcgatacatttgaagaggagatcgcccatcggcaggcggtagaaagtaacattatgattctgggatttggtttttcagggtcaggccaaaattcggccatggcattcaccaccctcaaggactggagacaacgcaaaggaaccacggcacaggaagaagctgaccatattcggtcccaaatggcaaacgtgccggacgccgtaacaatgagtctgctgcctccggctatttctgatatgggaacctcatccgggttcacttattatttacaggacagaggggggaaaggctatcaggcactcaaaaaggcggccgatgagcttattgtacaggcaaatcataatcctcaccttgccgatgtctatattgatggacttggtgagggaacaagcctttccctgcatgtcgacagggaaaaagcggaagccatgggggtttcgtttgatgaaataaatcaaaccatttccgttgcagcaggttccaattatgttaatgactataccaataatggtcgggttcagcaggttatcgtccaggcggatgcgccataccggatgcagcctgaacaacttttggctttgtctgttaaaaaccgtctggggcagatgcttccattatccacttttgtgacgctttcgtggaatgttgcaccgcagcaactgatacgctatcagggatatcctgccatacgcataaccgggagttccgcacagggaaaatcgtcaggtaccgcaatggcggcaatggacaatttggctaagcacttaccaccggggttcgccggtgagtgggcgggaagttcgttacaggaaaaagagtctgcatcacagcttccgggtcttattgtgctctcggtactggtggtattcatggtgctggctgctctttatgaaagctggtccattcccttcgcggtcatgctcgttgttcctctggggctgctcggcgctgtgctggccgtatccgttacaaatatgacgaatgacgtctttttcaaagtgggtctgataaccctgattggactttccgccaagaatgcgattctgattatcgagttcgcgagacaattgatgaaagaaggaaagagccttattgacgcgacattgacggctgcaaagctacgcttacggccaattctgatgacttctctggctttcacattaggtgttgttccgctgatgcttgccagtggagccagcgacagcacgcagcatgcgattggtaccggtgtattcggcgggatgattagcggaacgctactggccattttctttgttccggtatttttcgtgacgatcacacgatttacaggcatgcgaaaatacagactggggaatagccggaacggctaa

SEQ ID NO: 210791 - DNA, 537 bp, Klebsiella pneumoniae
atgaccatcattaccactcaaagattaatcattcgccattttaaggaagaggatgcggcagctcttttcgattacctctcttcaccacgtactccttgctttaaggatgaaaagttacattcactcgctgaggcagaggtcgacgtggctaaacgagcctctgacccaacacagtttgccgtttgtctaaatgaaaccgatacgttaatcggacatctttttgcggacaatagcaacgagccagacagcaatacctggtcagtaggctggcattttaatcaacgttttgaacatcagggatatgcaagcgagtcagttgctgcactgtttgattatttatttaaagtaaaaggcgccagacgtttgtatgcctgggtggaagattataattactcctctcaaaaactatgcgagcgactacttatgcgacgtgaaggatgttttaaagaatttgtctcctttgaaaacgaggagggtaaggcaaggtatgacgacacatacatctatgcgttactgcataaagaatggacgaagtag

SEQ ID NO: 210792 - DNA, 642 bp, Klebsiella pneumoniae
atgatatcgataataaaggacctatttagtaaccaagtgggttccgcagtcattcttactatcattggagcgattacaaaaaagtatattcagtttcatcgcagagactttttttcacgctcatcctccgagcagataaaagcagtcgaatggcttagaacctcttctgtacccatctccgatccgttagcaaaggcggaacagcagttccgcctacagtcgttcggactgcatagagattggcatttatcttataaaatcatatgcttgagttccgattatgcacagtcattaattccgtccttgaaggcagtcttgcgttatcagggcatgtacacaattactaacgggaatatataccctcataaattccataagtggataataccttttgtgttaatatcgttgctattatatatcggtgctgagatatacagaggttcttcacagagtgatggtatagagattttgaaatctctatacgtcgttattgtggcttttatagtatggtgttgggtcgctgcttgtgctctgagagtatcaagcatcagtaaaaagctcaatgcctatatcccacccgcaaacgattttaaatccaagacatacgatttcagttcaatactcaataatagatatccctag

SEQ ID NO: 210793 - DNA, 771 bp, Klebsiella pneumoniae
atgaaaaaagtcgcacttgttaccggcgccggccaggggattggtaaagctatcgcccttcgtctggtgaaggatggatttgccgtggccattgccgattataacgacgccaccgccaaagcggtcgcctccgaaatcaaccaggccggcggccgcgccatggcggtgaaagtggatgtctccgaccgcgaccaggtatttgccgccgtcgaacaggcgcgcaaaacgctgggcggcttcgacgtcatcgtcaacaacgccggcgtggcgccgtccacgccgatcgagtccattaccccggagattgtcgacaaagtctacaatatcaacgtcaaaggggtgatctggggcatccaggcggcggtcgaggcctttaagaaagagggtcacggcgggaaaatcatcaacgcctgttcccaggccggccacgtcggcaacccggagctggcggtatatagctcgagtaaattcgccgtacgcggcttaacccagaccgccgctcgcgacctcgcgccgctgggcatcacggtcaacggctactgcccggggattgtcaaaacgccgatgtgggccgaaattgaccgccaggtgtccgaagccgccggtaaaccgctgggctacggtaccgccgagttcgccaaacgcatcaccctcggccgcctgtccgagccggaagatgtcgccgcctgcgtctcctatcttgccagcccggattctgattatatgaccggtcagtcattgctgatcgacggcgggatggtgtttaactaa

SEQ ID NO: 210794 - DNA, 1680 bp, Klebsiella pneumoniae
atggacaaacagtatccggtacgccagtgggcgcacggcgccgatctcgtcgtcagtcagctggaagctcagggggtacgccaggtgttcggcatccccggcgccaaaatcgacaaggtcttcgattcactgctggattcctcgattcgcattattccggtacgccacgaagccaacgccgcatttatggccgccgccgtcggacgtattaccggcaaagcgggcgtggcgctggtcacctccggtccgggttgttctaacctgatcaccggcatggccaccgcgaacagcgaaggcgacccggtggtggccctgggcggcgcggtaaaacgcgccgataaagccaaacaggtccatcagagtatggatacggtggcgatgttcagcccggtaaccaaatacgccgtcgaggtgacggcgccggatgcgctggcggaagtggtctccaacgccttccgcgccgccgagcagggccggccgggcagcgcgttcgttagcctgccgcaggatgtggtcgatggcccggtcagcggcaaagtgctgccggccagcggggccccgcagatgggcgccgcgccggatgatgccatcgaccaggtggcgaaacttatcgcccaggcgaagaacccgatcttcctgctcggcctgatggccagccagccggaaaacagcgccgcgctgcgccgtttgctggagaccagccatattccagtcaccagcacctatcaggccgccggagcggtgaatcaggataacttctctcgcttcgccggccgggttgggctgtttaataaccaggccggggaccgtctgctgcagctcgccgacctggtgatctgcatcggctacagcccggtggaatacgaaccggcgatgtggaacagcggcaacgcgacgctggtgcacatcgacgtgctgcccgcctatgaagagcgcaactacaccccggatgtcgagctggtgggcgatatcgccggcactctcaacaagctggcgcaaaatatcgatcatcggctggtgctctccccgcaggcggcggagatcctccgcgaccgccagcaccagcgcgagctgctggaccgccgcggcgcgcagctcaaccagtttgccctgcatcccctgcgtatcgttcgcgccatgcaggacatcgtcaacagcgacgtcacgttgaccgtggacatgggcagcttccatatctggattgcccgctacctgtacagcttccgcgcccgccaggtgatgatctccaacggccagcagaccatgggcgtcgccctgccctgggccatcggcgcctggctggtcaatcctgagcgcaaagtggtctccgtctctggcgacggcggcttcctgcagtcgagcatggagctggagaccgccgtccgcctgaaagccaacgtgctgcatcttatctgggtcgataacggctacaacatggtcgctatccaggaagagaaaaaatatcagcgcctgtccggcgtcgagttcgggccgatggattttaaagcctatgccgaatccttcggcgcgaaagggtttgccgtggaaagcgccgaggcgctggagccgaccctgcgcgcggcgatggacgtcgacggcccggcggtagtggccatcccggtagattatcgcgataacccgctgctgatgggccagctgcatctgagtcagattctgtaa

SEQ ID NO: 210795 - DNA, 780 bp, Klebsiella pneumoniae
atgaatcattctgctgaatgcacctgcgaagagagtctatgcgaaaccctgcgggcgttttccgcgcagcatcccgagagcgtgctctatcagacatcgctcatgagcgccctgctgagcggggtttacgaaggcagcaccaccatcgcggacctgctgaaacacggcgatttcggcctcggcacctttaatgagctggacggggagctgatcgccttcagcagtcaggtctatcagctgcgcgccgacggcagcgcgcgcaaagcccagccggagcagaaaacgccgttcgcggtgatgacctggttccagccgcagtaccggaaaacctttgaccatccggtgagccgccagcagctgcacgaggtgatcgaccagcaaatcccctctgacaacctgttctgcgccctgcgcatcgacggccatttccgccatgcccatacccgcaccgtgccgcgccagacgccgccgtaccgggcgatgaccgacgtactcgacgatcagccggtgttccgctttaaccagcgcgaaggggtgctggtcggcttccggaccccgcagcatatgcaggggatcaacgtcgccgggtatcacgagcactttattaccgatgaccgcaaaggcggtggtcacctgctggattaccagctcgaccacggggtgctgaccttcggcgaaattcacaagctgatgatcgacctgcccgccgacagcgcgttcctgcaggctaatctgcatcccgataatctcgatgccgccatccgttccgtagaaagttaa

SEQ ID NO: 210796 - DNA, 873 bp, Klebsiella pneumoniae
atggaacttcgttatcttcgctattttgtcgccgtcgccaggacgcggcacttcacccaggccgccaaggagctgggtatttcacagcctccgttaagtcagcaaattcagcggcttgagcgcgaagtgggaaccccgctgttccggcgtttaacccgcggggtggagctgacggaagcgggagagtctttctatgaggatgcccgccagatcctcgccatgagcgatgcggcgctggagaaggccaagggcattgcgcgcgggatgaacggcagcctgtcgctaggcattaccagttctgatgctttccatccgcaaatcttcacgctgctgcaccgttttcagctcgaccaccccggggtgaccctgcaccagatggaagacaatatggccaatctgatgaccgccctgagcgaggccgagctggatatcgccttcgtccgcctgccgtgcgagagcagtaaagcctttaatctgcggattatcgatgaggagccgatggttatcgcgctgccgcgcgataacccgctggcgacgcagccgaccctggccctggagcagctgcgcgacgtggcgccgatcctcttcccgcgggaggtggcccccgggctgtatgagctggtgtataacagttgcctgcgcgccgggatcgatatggcgcgcgcctggcagtcgtcgcaaatttcatcgtcgctgagcatggtcaatgcaggcttcggcttcgcgctggttccgcagtcgatgacctgcatccagcagccgaacgtcagctatcacccgcttagcggggcgccgctgaagaccgatatcgccatcgcctggcggcgcttcgagcgctcgcgtacggtgaaacgctttctggcgatgttctga

SEQ ID NO: 210797 - DNA, 771 bp, Klebsiella pneumoniae
atgaacttacacggtaaaacggcgctggtcaccggctccaccagcggcatcggtttagggatcgccaaagtgctggcgcaggcaggcgcccagctggtgctcaatggcttcggcgacagcagccacgcccgggccgaagtcgccgcgctgggcaagatccccggctatcacgacgccgacctacgcgacgtcgggcagatcgaagcgatgatgcgctatgccgaaagcaccttcggcggcgtcgatatcgtgatcaataacgccggcatccagcacgtggccccggtggagcagttcccggtggacaaatggaacgatattctcgccatcaatctctccagcgtcttccacaccacccgcctggcgctgccgggtatgcgccagcgcaactgggggcgcatcatcaacattgcctcagtgcatggcctggtggcgtcgaaagagaaatcggcctacgtcgccgccaagcacgcggtggtcgggctgaccaaaaccgtggccctggaaaccgcgcgcagcggcatcacctgcaacgccatctgccctggctgggtgctaaccccgctggtgcagcagcagatcgacaaacgcatcgccgagggggtcgacccggagcaggccagcgcccagctgctggcggaaaaacagccctccggggagtttgtcaccccgcagcagctgggcgaaatggcgctgtttctgtgcagcgacgccgccgcccaggtgcgcggcgccgcatggaacatggatggcggctgggtggcgcagtaa

SEQ ID NO: 210798 - DNA, 1392 bp, Klebsiella pneumoniae
atgagtgtgataatagccctggccgcgctggcgttactgatgctggcagcctaccgtggatacagcgtgatcctctttgcgccgatcgccgccctcggcgcggtgctgctcaccgacccgggcgcggtcggcccggcctttaccggcctgtttatggaaaaaatggtcggctttgtgaagctctatttcccggtgtttctgctgggcgcggtattcggcaagctgattgagctgtcgggattctctcgttcgattgtcgccgccgccatccgcatccttgggcgccgccacgcgatcccggtgatcgtgctggtttgcgccctgctgacctacggcggggtgtcgctgtttgtggtggcctttgccgtctaccctttcgccgccgaactatttcgccagagcgggatccccaaacggctgatccccgccaccgtcgccctcggggcattctcgtttaccatggacgccctgcccggcacgccgcagatccagaatattattcccaccagtttcttcggcaccaacgcctgggcggccccctggctggggcttatcggctcgctgttcattatcatcttcggtttgctgtggctggagcgtcagcgccgcaaagcgcaggccagcggcgaaggctatgggaccgacctgcaaaatgagccggagaccccggatgacatcgatctgccgcatccgctaatcgctattgccccgttgctgctggtgggggtgctgaatttgctgttcacccactggatcccgcagtggtacggcgccagccatgagctcaacctgccgggcctggcgaagcctgtcgtcaccgaagtggggaaaatcaccgccatctgggcggtgcaggcggcgctgctctccggcattgtgctggtgctggtttgcggctatcgcaatatccgcggccggctggcggagggaagtcggacggcggtgggcggggctattctcgcggcgatgaacaccgcctctgagtatggcttcggcgcggttatcgccgccctgccgggtttcctggtgctgtcaaaagcactcgcggccattcccaatccgctgttaaacgaggcgatcagcgtcacggtgctggccgggatcaccggctcggcctccggggggatgagcatcgccctggcggcgatgtccgagacctttgtcgccgccgcccacgccgccaatattccgctcgaggtcctgcaccgcgtcgccgccatggccagcggcggcatggacaccctgccgcacaacggggcggtgatcaccctgctggcgatcaccggcctgagccatcgccaggcctacggcggcattttcgccatcacggtgatcaaaagcctcgcggtactgtttgtcattgccacgttctatatgaccggcattgtctga

SEQ ID NO: 210799 - DNA, 924 bp, Klebsiella pneumoniae
atgtttacaccacgcctggcggtactcggcgcgggactgatgggcgtcggtatcgcctgccatttcgcccgccacggtcacaccgtccgcctgtatgacaccgatccgcagcgtctcgccgaggttccggcagtggccagcgccatcctgtgcgagctggaggccagcggtcaacaggatcccgccgaccgcgacgcggtgctggcccgtctgacccccaccccgacgctgaatgccctggccgatgccacgctgctgattgaagcgatccccgagcggctggcgctgaagcacgccctgtacgccgagctggaaacgctgatcgccgacgaggcgattatcgccagcaacaccagcggcctgccgccggatcggctggcgcagggcatgcgcctcccggaacggctactgatcgctcatttctggcatccgccgcacctgatcccgctggtggaagtggtgcccgggagcgccacgctgcctcatctggcgcgccaggtgagcgacttttgcgccgcctgcgcgctggaggcggtggtgctcaaccgcgccgcgccgggctttgtcggcaaccggctgcagttcgccctgctgcgcgaagcgctgcatatcgtccacagcggcatcgcttccccggaggtggtggaccaggtgatgcgcgcctcgctgggccgccgctatgcgatggtcggcccgctggaggctgcggacatgaccggcctggcgacggtccaggatatctgccagcacctgctgccggagctggccagcggcacggagatgatgtcgctggtggcggagaaagtggcgcgaggcgacaccggcgcccgcagcgggcaaggcttttaccgctgggacgaggcccggcaccagcgcatccagtcgcgccgggaacaccagctgcgcttcgccctgaaaccctag

SEQ ID NO: 210800 - DNA, 1182 bp, Klebsiella pneumoniae
atgaccgatattgccattgttgctgccgtacgcaccccggtaggcagctttcgcggcgccttcgcccctctttccgccgtcgacctcggcgcagcggtggtgcgcggcctgcttgaacgctgccagctgcccgccgcagcggtcgacgaactaattttcggccaggtgcttaccgccggctgcgggcaaaacccggcgcgccagaccgcgctgcgggccggcctgccggtcgacactccggcggtcaccgtcaatctggtgtgcggctccggactgaaagcggttcagcaggcggtgcaggcgatccgctgcggcgacgccgggatcgttatcgccggcggccaggagagcatgagcaatgctccctatctgatgcatggcgcccgcgacggcctgcgtttcggccacgccagcctgcaggacagcatgatccaggacggcctgtgggacgcctttaacgactaccacatgggcattaccgccgagaacctcgccgacgccttcgacatcagccgcgagcgccaggacgccttcgccgccagctcccagcgcaaagcggcggccgctatcgccgccgggcgctttcgtgaggagatcgttccggtcagcgtcccgcagggcaaaaagccgccgcgagtcgtgactgacgatgagcaaccgcgcccggagaccagcgagcagcagctggcccagctgcgcccggcgtttcgcccggctgacggcagcgtcaccgccgggaatgcctcgtcgctgaacgacggcgccgcggcggtcctgctgatgcgcgtcgataaagcgcgcgagcttgggctgccggtgctggcgcgcattgtcagctcagcggtcgccggggtcgacccatcggtgatgggcattggcccggtgagcgcctgccgccaggcgctgcagcgcgccggctggacgctggacgaggtggaccttatcgaagccaacgaggcttttgccgtccaggcgctggccgtcggtcagctgcttgagtgggatagcgagaaggtcaacgtcaacggcggcgccatcgccctgggccatcccatcggcgcctccggctgccggatcctcgtcagcctggtgcatgagatgcagcgccggggcgccagcaaagggctggcaaccctgtgcgtcggcggcggccagggcatcgccatgaccctacaacgttaa

SEQ ID NO: 210801 - DNA, 657 bp, Klebsiella pneumoniae
atgctgacccgtgaacaaatggcgatgcgcgtcgcccaggagctgcgcgacggcgactacgtcaacctcgggatcggtatcccgacgctggtggccaactacattcccgccggcattgaagtgatgctccagtcggagaacggcctgctggggatgggcgaatttcccgatgaggaaaccatcgacgccgacatgattaacgccggtaaacaaaccgtcaccgcgcaaaccggggcggcgatcttcgattccgcccagtcgttcgccatgatccgcggcggccacgtcgacctgaccgttcttggcgcctttgaggtcgacgtcgcgggcaacatcgcctcatggatgatccctggaaaaatggtcaaggggatgggcggcgccatggacctggtggccggcgcgcagaacatcatcgtggtgatgacccacgcctcaaaaaacggcgaatccaaactgctgccgcagtgcaccctgccgctcaccggcgtgggctgtattcgccgggtactcaccgatctggccctgctggagattgtcgacggcgcgtttgtcctgcgcgaagtggccccgggggtcagccccgacgaggtgatacgtaaaacggcgggacggctgatcgtcgccgacgacgtgcgcgaaatgcgcttcagttaa

SEQ ID NO: 210802 - DNA, 708 bp, Klebsiella pneumoniae
atggcaggactggataaacgcgtcgccagttacgaagcggcgctggaagggttaacggacggcatgacgctgctcgccggcggcttcggcctgtgcggcattcccgagaacttgatcgccgaggtgcagcgtcgccaggtgcaggggctgacggtggtctccaacaactgcggggtcgacggtttcggtctcggcatgctgctggagtcgcgccaggtcagcaaggtggtggcctcttacgtcggggaaaacgcgctgtttgaacagctggtgctcagcggcgagctggcggtagaactcaccccgcagggaacgctggcggaaaaaatccgcgccggcggcgctgacatccccggcttttacaccgccaccgggtatggcaccccggtcgccgaaggcaaagaggtgcgccagttcgacggccgacactacatccttgaagaggcgatccgcggcgatttcgcgctggtcaaaggctggaaagccgactggtacggcaacgtggtctatcgccacaccgcgcagaatttcaacccgctgatggccaccgccgggcgcattacggtggtggaggtggaagagattgtgccgccgggcgaactgcccccctccgccatccatactccggggatctatgtcgaccggctgatcgtcgggcaattcgaaaaacgtattgaacagcgcaccctgcgcgccggagggcactga

SEQ ID NO: 210803 - DNA, 891 bp, Klebsiella pneumoniae
atgagaatgagtgtcaaacagttacgcgcgtttttagcggtagctcacactctgaatttcgcccacgccagcgaaaggctgaatctgtcgcagccagctctcagcctgaccatcaaagggttggaggaggcgctgggcggcgcgctgctgcagcgcagcacccgcaaagtgaccctcacccaggagggggaactctttctgccgatggcccgtcagctgctggccgactgggataacgtcgaggaggccatgcgtcagagctttaccctgcagcggggtaaaatctcggtcgccgcgatgccgtcgtttgccgccaacgttctgccggaggcgctgaaagcctttcgcgaccgctatgccggggtgaacgttacggtgcatgacgtgattaatgagcaggtgatcgagatggtgcgcgaggggcgggtggagatgggcatcgctttcgagccatcgcccaaccacaacctgctgtttaccccgctggcggtggaccgcttcgtggcgatcgttccccaacaatccccgctggcgaagaaaaagcagctcagctggcaggagctgttgaccctcgactttattaccctgcagcgcccctcggcggtacgcctgatgctggaggaggcgctggcgcgcagcggacgtcagctggacgtggcgctggagagtcatcagctggtgacggtggggaggatggtggccagcggcctggggggcagcgcggtgccggcgctgtgtaaaacgcagatggcatcgttgggcgccgtctgcatcccgctcagcgatccgccgattgagaagtgcgtcggcgcgatccatgccggacatctgccgctgtcgaaggcggcgcaggcgctgctggatacgctgaaagggtttttacccacctga

SEQ ID NO: 210804 - DNA, 141 bp, Klebsiella pneumoniae; identical to SEQ ID NO: 135245

SEQ ID NO: 210805 - DNA, 909 bp, Klebsiella pneumoniae
atggaacatactgttgcaggcgccatcaaagaatggcgtaaacataataaagtgatcggtcaggtcaaaataagctataaaaaaattttacgaaaatgcagagagctctcgctcgcaggaggtaaatacagagaatatcaaggactttgtgcgaaatatcagtgcgcgcggttgaccgcggtgaccaaaggactggtgccttttgaggataaaccgtttaaagcgtatctcaataaacggctgtcaaaacgacgcaaactggatattgcccatggttcactgaatttcatcgagaaaacgtttcaccctgatgtcctgccgcagctctacaatgtcgcggattttggccgcgagatgttttctattcccttgaaaaatggcgataagcttgacgttaagctgctggcctcgccgtttcaggaggaaggggagctgatgctgcagctgtttcttggcgaccggcgcgtctatagcgtctgtttttcctgcaccgacgatggccgcgcttatatcggcggcatccagggcgggaaagatatcaccaatgacgaagtgaagatgctgactaaagagctgcatggcgcgcggccgaaaaatatcatcatgagcgtgctgtatggtttgctgcgatatttcaacatctccacggtctacgccatcgattctgattaccacgtgaaaagcgatctggtgaaagccagttattcatcgctgtggctggaaatgggcggtgagaaacaggctcgcggctggtataaactgccggcgcaagagatcaaaaagagtattgaagaggtgaaaagtaagcaccggagccagtttattaagcgcgaaggtcttaaagagctgattcagattaatatggcgaatgccctgcagcaaattaccttgcctgcgcgggtgaattaa

SEQ ID NO: 210806 - DNA, 279 bp, Klebsiella pneumoniae
ttggtaaagaacccgctcatctgggtcagcggatgcgcccagcccagcattagcgccagggcggccatcggcaccagccacagcagtatcccggcgctggtgctgttcgccctgatggaatggggccaccagcacgtgctgcatagcgcgccgcctattgcattggtggacagcgccagcggcgagaccgtccatccggggttcgtcactgccagcggcagcgtggcgagccccagcgcgctacagatcgtcaaagccggtacccatgccgaaacctga

SEQ ID NO: 210807 - DNA, 1419 bp, Klebsiella pneumoniae
atgactgatgaacagcgtcaacacgcggtcgcggcgatccagcaggcactcccggcgctggagtggaccttacagccggcgaagatcaaacggctctcccgcgattttcactggttcagtccgttactcaccgagcaactggcggggaaacaggcggacgcggtggtccgcccgcgcgatgaagaggagctgcgccagctggtctgcgcctgcgcgcagcaccagctgccgctgaccctgcgcggcagcgccaccggcaactacggacagctggtccccctcgaaggcgggctgctggtggatatgaccgggctcaaccagatcgtcgccctcggcaacggcacagtgagggcccaggccggcattcgcctggcggacatcgaaaccgccgcccgcccgacgggctgggagctgcgctgtatgccatcgacctatcgactggcgagcctgggcggtctctacggcggcgggttcggcggtatcggctccatcaactatgggccgctggcggcgcccggcaatgtgctcagcgtcaaagtgatgaccgtcgagccggtcccccgcgtgctgaccgtcccggctcccgaagcgctgctcctgcatcacgcctacggcaccaacggcattatcctggaggttgagctggcgctggcgcctgcgcaccagtggattgaacgtctggacgtgtttgacgatttcgccgatgcgctgaactatgccaacgcctgcgtccgctcgccggggctggtgaagcgccaggtggcgctgctggccacgccgatcgctgactattttagccacctcaacgatcgttaccgcgccgggcagcatgcggttatcagcctgatcgccgaggagagcgaaggactctgcgccagcctgttacagcgccatcgcgggagcaacgctatccggcaggccagcgaggaggcccggacgcgcaacggctcgttaatggaatactgctggaaccacaccaccctgcatgcgctcaaggtggacaatacgctgacttatctgcagacggcgtttgatccgctgcgctatccgcagcaaattttacagatggagcagcacttcgccggggaggtgatgtcccatattgaattcctgcgcgatatcgagggcaatctcaccgccagcggtctgcagctggtgcgctataccacgcctgaacgtcttaacgacatcatgcagatatttcgcgacaacgacgtcaagattaacaacccccacgtgctgcaggttgaggacggcaaacagggcgtgattcgtcccgacgtcgtggcggtgaaacagtctctcgacccggcgggattgcttaaccccggcaagctgcgcggctgggcgctgcgcgaccagctggaactcgacagcaacccgctgacgcgggccacccgcgaaagccccacgacctga

SEQ ID NO: 210808 - DNA, 816 bp, Klebsiella pneumoniae
atgaaaaatacaaccgcaacgccgtggatccagcatccgcgttttctcaaaattctctatccgaccctcgtcgcggtggcgatggtgctcctgtggcagggcgcggtgagctatttccgtatcccggcctttctggtgccgtcgccgctggtgatgctggaaagcctgtggacgcatctcacgccgctgctgctggcgctgctgttcaccctcaagatcaccctgatctcgtttctgctgtcgattgtcatcggcgccgcggtggcgtttatcctggtgcagaaccgctttgtggaaaccgccctgtttccctacatcgtgtttttgcaggtgacgccgatcgtcgccatcgccccgctgatcatcatctgggtgaaggatgccacgctctcgctggtggtgtgcgccaccctgatggcggtgtttcccatcatctccaataccactcagggactgcgcagcgtctcccccggcctgctgagctattttcgcctcaatcacgccagccgctggcaaacgctggtgcggctgcgtatcccctcggcgctgccctatttcttcggcgcgctgcgtatttccagtgggctgtcgctgattggcgcggtggtggcggagtttgtcgccgggaccggcgggaccaataccgggctggcctatcagatcctacaggccggctaccagctggatatcccgttgatgtttgccgcgctgctgctgatctctctcgccggtatcgcgctgtttggcgtgatgtcctgggtctcgcgccgggcgctcagcgcctggcatgaaagcgaagccgtgcaatctcattaa

SEQ ID NO: 210809 - DNA, 831 bp, Klebsiella pneumoniae
atgaataccgccccgaaactgaccgtgatgagcgatacccgctttatacccgccgctgccaccccggccatcgaggtgctgtcggcggagaaaatctacagcaacggcacccgggcgctgctgcccgtcaacctgaccatcaatcagggggagtttattaccctgctcggcccgtccggctgcggtaaaagcaccctgctgaagatggtcgccggcctggtggagcccagcgacggcaagctgatgctgtggcggcgcgacagtcgggaaaaggcccagcatccgctgtcgttcgtcttccaggaagccaccctgatgccgtggagcagcgtgcgcaataacgtcaggctgccgctggatctggccggcgtgccgcgggcggagggcaatacccgggtgagtgaagtccttgagctggtgggcctcggcaagttcgccgacgtcctgccgcgcgaactctccggcggcatgcaaatgcgcgtctccatcgcccgcggcctggtcacccgaccaaagctgctgctgatggatgagcccttcggcgcgctggatgaaattacgcgtaacaaactcgacagcgacctgctgcgtctctggcaggagcaaaacctgacggtagtgttcgtcacccactcgatccacgaagcggtgtttctctcccagcgggtgatcatgatggcggctcgtcccggacgggtggtcgaagatatccccatccgcgagccgttcccgcgcagcgaggcgttccgcgtcagcccgaccttttccctgtatgcccgtcagctgcaggacagtctgttgcaggccagccagtccggtatggagtcataa

SEQ ID NO: 210810 - DNA, 984 bp, Klebsiella pneumoniae
atgaataccagattgacgcccgtttttaccctgctgaccgtggccgccctcgcgacctcagcctcctgcttcgcggcggagaagtttacctttctcaccaactggtatgcccaggccgaacacggcgggttttaccaggcccaggccaccgggctgtatcaacacgccggtctcgatgtcgaaattaaaatgggcggcccgcagatcaacgtcatgcagctgatggcggccggtcaggcggactgcacccttggcgacaacggccaggcgctggagacctggcaggccggggtgcacgcggtgaccgtcgccaccgtgttccagcactcgccgacggtgtttatcacccatgacaaggtggagaacccggcggaacttaaagacaaaaccttcctgctcgccaccgaggcctatacctccttctggccgtgggcgaaaagcgagctgggtctggctggcagcaaagtgcgcccctatacctttaacgttcagccgttcctcgccgataaaaacctggtgcagcagggctacgtgacctccgagccgttctccgtcgccaaaggcgggcagccgttctatgtctatccgctcagcgactggggctacccgccctacggcaactcgattatctgtatggccgacaccatccgcaaacgtccggcggcggtggcggccttcgtcaaagcctccatggaaggctggaaaagctacctgcaggatcccgcccccggcaacagcctgatcggtaaagcaaatccgcaaatgggcgccgagcagatcgcctttggcattgcccagatgaagcagtaccagctggtgaccggcggcgatgctaagaccggcggcatcggcatcatcaccgagccgcggctgaagaaaacctgggacatgctggtgaaaaacaaactgatcgacgccagcaaggtgccgtttgagcagacttacaccctggagatggtcaaagacgccggagtgatgccatga

SEQ ID NO: 210811 - DNA, 882 bp, Klebsiella pneumoniae
atgattaacggttacattcctgccgcgcgctttcttccttttctgagctggacggacgtggccgcactgccggataaaagcaatacggttatcgtcctccccaccggggcgatcgaacagcacggcccgcatctgccctgctcggtggacagcgtgatatcttccggcgtggcgggccatgccctcgccaggctgccggcgacgatcccggcctacgccattccgccgatcgtctacggtaagtccgaggagcatctgcattttcccggcaccctgacccttagcggcgatacgctgctgcataccctgctggagatcgccgaatctctctatcgggccggttttcgcaagctgctgatgatcaacggccacggcggccagccgcagatcctgcagatcgcctgccgggaaatgcgcctgcgccacggggatttcatcgccatcccccacgacgtgttcaacgtgcccaactgcgaaaaacagtttctcagcccgcatgaacagcggatggcgatgcacgccgggcatagcgaaacggcgctgatgctggcgctggcgccggagtgcgtccatatggaacgggccgtcgctaatttccccccggaattcccctgcccaaccctgtcgaaaggccgtccggcggcggcgtgggcgtcgtatgactttggccccagcggggtgattggcgacccgaccccggcgacgcgggagcaaggcgaagggcttctcgactccctcgccgccagctgggcgcaggcgatcatcgagatccaccgcatggcctgggtcgaacgtcgcgaaccgacctggggcaaacagcactggcacggctttgtgcagtccctaccaccttctttcgctgctgaatccagggagccctga

SEQ ID NO: 210812 - DNA, 480 bp, Klebsiella pneumoniae; identical to SEQ ID NO: 135237

SEQ ID NO: 210813 - DNA, 1284 bp, Klebsiella pneumoniae
atgacgctcccctcctcttgcgcgccgctcaccggtatcagccgcgcccgactcccggcctgggcgctgcccgacggctggccgacgcaggccaacggtgaaccgctgctggcggacctggcctttcgcgacagccggatcgccgcactgaccccaaccgaccagccgactcccggcctgtgggacctggcgggagccctgacgctccccggcctggtggaaccccatgcccatctggacaagacattcactattgaacgctgccgtccagcgcaggccgggctgctgccggcgatccacgccatgcatgaggatcgccgacactggtccagggcggatattcaacgccgagcgtccaccgcgctggcccgggcggcagcgaatggcgtgacccatttgcgcagccatgtcgactggtttaccgccgacgcgccggacgcctggcaggagatcgcccgcctcgataccgtcggcctcaccctggagcgggtggcgctggtcccgctgcccctgtttcgcgagccggcgcaagcggaggccatcgcccggacggtcgccaacagcggagagcgctgcctgctgggcggcttcatccactcctccaactgggacgccaccgccatggaaaatctgctgtacagcgcggcccgctgggatctggatctggatttgcatattgatgaggagctcagcgaagtgtctcaggggctgacctggctggcggatcatctctcccgccacccttttcccgggcatatctgctgcagccacggctgcgcactggccgccggcagcgacgaacaggcggcgccgatcctgcgccagctggcggcgcacggcgtcacccttatcgctctgccgatgaccaacctgctgctgcaggatgcgacgttcggccgcacgccgcgccagcgggggatcaccctgctgcacgaggcgcaggccgccggcgtggccaccctgctcggctgcgacaacgtgcaggatgccttctgcccggcggggagctatgacccgctggacaccctggcctgcggtctgttcagcgctcagctcagcgacctgttcgaccggcagtcgcggctgatctgcgatcgcgcggcgctaaccggttcgccggcagacgcggcgccttttgccgtcggggcggcggccagcgtagtgattttcccgggtagcgaccgttttacctggcctttaaacagcgccgcccgtctggtggttaaccacggcaggttaacccaccggcgcgtgtggcaggaggagatggcacatgagtcttga

SEQ ID NO: 210814 - DNA, 969 bp, Klebsiella pneumoniae
atgcacagccacgatcttatttcggtctcggtcggggaaatacgccccaatggacagggaaatctatcattaatattgcaggcggcggccggggaaatattaccggcctactccgccggggcgcatatcgatattattattcccggcgtcggtccgcggcagtattccctgtgcggcacgcctgaccgcagtaatacttatgaaatttgcgtcaggctgactgatgcttccaccggcggctcacgctatttgcaccagcagctcaaagccggcgatcggctcgccatttcgccgccgcgcaaccattttcccctgccgcaggccgggcgctacctgctgtttgccggcggtatcggcatcacgcctttgctggcgatggctgaagcgattgccgccagaaagggggcgctggagctgcattattatgtcgccagttcgcgccagaccgccttctccccgcgcctgaaccagctgactgcgaacggcacggtggccattcactgcagcgaggaaggcgcgtcgcttcgccagcgggtccccgaatgcttaactgtgccccaccctgataccgcagtaatagcctgcggcccggagggttttattcagagactgcggtcggtcatggaggaatatcgctggtcgccgtcgcagttcgtattcgagcgttttactcccgcggcggaaaataatactgcggcgaaaaatgcgttttatattgagctggcctccagcgggcagcgcctgcaggtggccgcggatcaaaccattgctcaggtattacagcacgccggggtggaggtaatgctctcctgcgaacagggaatgtgcggctcctgtattaccggggtcctcgacgggatccccgagcaccgggacagcgtgctgacggcggaagagaaagctggcaacgaccagatcacgctctgctgttcgcgggcgaaatcgccgggtctggttttggatctgtga

SEQ ID NO: 210815 - DNA, 900 bp, Klebsiella pneumoniae
atgtttgccttctcccgatttctgctctatttcaccgaagtggcccgtcagggatcgtttcgtaaagcgtcagaggcgctgcatgtgtcggcgtcttccatcgaccgtcagattttgcgcgtggaacaggagctggcgatgccgctcttcgagcgccatcccaccgggctgaggctgaccgccgccggggagctgctcctgcacgcggccaataactggaaaaaggactttacccgggtctgcgagcagctggacgatctgcgcgggttgcggcgggggcatgtgcgcatcgccaccatcgatgccattaaccggcatttcttttcgacgatgctcaaagaggtgcataaacattatcccaacatctcttttacattgaccaccatcaacaatatccacatccagcaggcgctgatctccggcgaggcggatttcggcatcatgctcaatccccagacctctcgtgaactgcaggtccgggcgtttgccgagatgaatatggggattgtggtgcccaccggccatccgctggccagccgcagcgcggtgcgctttagtcagtgcctcgactacccctttatcctgccgtccgccccattgatgatcagcgagccggtggaggcgctggtgaacatcagcggcaacgaggtaaaggaggtggcggtatcgaataacattcacatgatccgcaccctgatcaaagagcagatgggcatcggcatcctgtgtcggctggatattctcgatgagatcgagtccggccagctggcgtttgtgccgctaaccgatccgcagcttaagcctttcaccctggcgctgtgcgtctcgcccgcccgccagctttcccttgccgcctcgatgatgctgaaccagctggagatgctcttcagccaactgtga

SEQ ID NO: 210816 - DNA, 990 bp, Klebsiella pneumoniae
atgaaaacaggcgcatgccttccccggggcatacgctggctgggcctgatggccctcggcggtgtctcgctggccgttcaggccgaggagaaaatcgttctgctgacctcctggtacgcccaggcggaacagggggggtattatcaggcccaggccaccgggctgtacaaaaaatacggtctcgacgtcgagatccgctccggcggaccgcaggtcaacggcatgcagttgctgttgtcgaagcgggccgatgtgatcatcggttacgacctgcagctgctggaaggcattcagcgcggcttccaggcaaaagccattgccgcgccctttcagtacgatccccaggggctgctgacccatgccgatgtcacctccctgcaggggctgaaagacaaaaccctgctggtctccagctccggtcaggcgacgtggtggccgtggctgaaggcgcaataccagctgagcgacgcgcaggttcgcccctataccttcaatattcaaccctttgtcgtcgatgacgctgtcgcccagcaggcctatgtcagctccgaggtgttccaggtgcagaaggccggagtgaaggcgaacttcttcctcttttccgagcacggctatcccccctacggcggcatccttatcgcccgcccggataccatcgccgagcgtaaagcggcgatggcgaagtttgtccgcgcctcaatggagggctgggtgagctatctcaaggatccggcgccgggcaatgcgttgattaagcaggacaacccgaaaatgaccgacgatctgctcgcctggggcgtgacccagatccgtgagcatcacctgatcgacggcggggatgccgccagccagggctgggggacgatgaccgacgcgcgctggcagaagacccgcgactttatggtcagcgccggtctgctggcggcggctaccgactggaaacaggcctacaccaccgaatttgttcaggccatgcaggttaaaccctga

SEQ ID NO: 210817 - DNA, 1419 bp, Klebsiella pneumoniae
atgtcattaattattcaaaatgcccatgccatcctcagcggtctgcccggagaggcggcgcggctggccgggccggatattcgcatccgcgacggcaagattgccgccatcggcagcctgacgccgctgccggaagagcgacagatcgatgcctgcgactgcgtgatctatccggcgtgggtgaacacgcaccaccatctttttcagtcgctgctgaagggcgagccgcaggggctgaaccagagcctgacggcctggctgagcgccacgccgtaccgctttcgcgcggctttcgatgaacatacctttcgtctggcggtgcgcattggtctggtggagcttctgcgctcgggctgcgccagcgtggcggatcacaactacctgtactggccggatatgcctttcgatacctcggagattgtcttcagcgaaggggaagcgctggggatgcgcatcgtcctgtgccggggtggggcgacccagggccgggcggtggaacaggatctgccggtggcgctgcgtccggaaaccttcgacggctatatggtggatgtcgaacggctggtcagccgctatcacgacccccggcccgagtctctgcgccgggtggtgatggcgcccactaccgtcctgcactccgcgccgggcgcccagctgcgggagatggcgaagctggcccgccagctggggatccggttgcacagccatttatcggaaaccgtcgattatctcgacgccgcgcggcagaaattcgccatgacgccggtgcagttctgcgcggaacacgactggctgggaaatgacgtgtggtttgcccatctggtgaagctgctgccggaggagattgccctgctgggccgtaccggaaccggcatcgcccactgcccgcaaagcaacggccggctgggcagcggcatcgccgatctgctggcgttagagcaggccggggtcccggtctcgctgggggtggacggcgccgcctcgaatgaagcggcggatatgcaaagcgaagcccatgccgcatggctgctgcagcgcgcgcgcaaggggatgctggcgcagccgcgctacgccgggggcacctttgagggtggggccgatgcggccacggtggaggatgtagtgcgctggggcagcgccggcggggcgcagatcctcggcttagcgcagagcggcaccctgcaggtcggcatgcaggcggaccttgccatttaccggctggacgatccgcgctacttcggcctgcacgatatggccattgggccggtggcctgcggtgggcgcgccgcgctgaaggcgctactgctcaatggccgccccatcgtggaagacgacgccattcccggtctcgaccttgacgcgatgcgtcacgacgcgctggcggccgtccgtaccctccaacagcgcgccgctgtgtaa

SEQ ID NO: 210818 - DNA, 990 bp, Klebsiella pneumoniae
atgaacgcaaccacccagaatcaacgctacgccttacaggaactggaaaaagaggcgctgatgggcgccgagggcgaagagaccttcgcccgcgaagtgcgctgtatcgacctgtcgaactttgccgcaagaaaaaatgacattgccgaacaactgtgggaggcggcggtggagattggcttcttccaggtcagccatcacggtattccgctggcggatatccgccaggcgttcagcatgaccgaggcgtttttcgacctgcccgacgaggtgaagcgccagtatccgctggccggcaacgccggctgggaaagcaaagcgcaggttcggccgtcgactcgcaccccggatcaaaaagagtcgtatcagataacccggcctctgatggccgggcgctggcccagcgatcgggagctgccaggcttccggcagacgatgctcgggtttgaatcgcagtgctggcagctggggatgaagatcctctcctgctttgctttgaagcttggttttccggaatcgtttttcaccaccgcgcacgatccgcagcgagacacctaccagagcaccttgcgtatgctgcattactatgcaactgagcagtcgcagcaggggatgtggcgggccggcgcgcacaccgattttgactgtctgacgctgctgttccagcgccccggccagggcggcctgcaggtttgtcccggtaaagaccgtgaaagccagcagtggaccagcattgagccgcgcgaggaggtgatcacctgtaatatcggcgatatgctgatgcgctggagcgacgaccagctgccgtctaacttccatcgggtgagaaatccgctgccccatgaatatcaggggccgcgctacagcctggcgtttttctgccaggccaataaagatgtcgagatcctcgggccgcagaggaagtacccgcccatcagcgccgaggattatctgcagcagcggatccaggccaattttgccaaagggtaa

SEQ ID NO: 210819 - DNA, 918 bp, Klebsiella pneumoniae
atggacagcctcacctcgctgacgtcctttgtccgcaccgccgaaacgctaagctttgttcaggccgccaggctgctgggcatatctgcctcggcggtgggtaagaatgtcgcccggcttgagcataaactgggggtccggctgttcaaccgcagcaccagaaacgtcagcctgacggcggagggggccgcatttctgacccgctgtcagagtatcctggagcagatccaggaggccgagtcagagctgaccagcagtctctcacagcccaccggcaaactgaggatttcactgcccgtcattggctaccgcctgttgctccccgccctcaccgcctttagccgtctttatccgcaggttgaactggatctcgactttagcgaccggctggtcaatctgatcgatgagggagttgatgtcgctatccgcagcggtgaattagcggactcccgcttgatcgccagaaagctgggaggttttcgttttgtgctctgcgccagtccgacctatctggcggaatacggcgttcccggctcaccagcggaattggcggcacacaagtgcatttttttccgcttccccgcgacggggctgatccagccctgggaactgcgcggtatgcgactgacgggagatttcagggccgctgccgtgatgacggtcaataacattgaggccgccattcgcttaagcgcggcggggatgggcatcgcttatgtgcctgattttgtcgtgcgcgaggcaatggatgagggacaactgcaggaggtgttgcccggctgttgcgtcaaggatgggcatttctcggtcctgtggcccgccagccgctacctgtcaccaagaatacgctgttttatcgattttatagctgcggcagagatacctttgtcgcccgcatcggcaagccctaccacctga

SEQ ID NO: 210820 - DNA, 1533 bp, Klebsiella pneumoniae
atgttactccccgccagaacaccttcccgatacgccagcgccctggccgcgttttctgtctttatggcggccttgctgctgccgttaagttttaccggcggcgtcatgaccacccccgcgatacagcagtcgctgggcggctctcccgctgcgctgtcgtggctgaccaatggctttatgctgactttcggcagctttttgctggccgcaggggtgacggcggatgccatcgacagaaaacgtatttttatcgccggcgccgcgctgttttgcctgagcagcctgctgttttgtctgacgcacaatctcttcctgtcaggcgtgttgagggcgctgcagggcctggccgcggcgatgattttagccagcggcagcgcggcgctggcccagctgtatgatggcgcccagcggacgcgggcattcagcatcctcggcacggtgttcggcgccggcctggcgttcggtccgctgctgatcggcttcatgaccgacgcggtgggttggcgcggcgtatacgccctgtttgcgctgctctcggcaggggttctgcttataggcctggtatctctgcctgcgacagaaaaaagcgagccgcggacacccgacaacctgggcctaaccctgtttacgctggccctgatgctgtttactgcatcgcttatggtcattccggcccgcggttttttatccctgaccacgctggccttgctcatcgcgtcgggggggctgttcgtggcgtttgtcgtacgctgccggagggtgaacaacccggtgctggaactctccctgctgcgtcatccgcgttttgtcggcgtactgttgttgcctgtcgccacctgctgttgctacgtggtcctgctgattattgttccactgcattttatgggcggagaggggatgagtgagtcgcagagcgcactgtatctgatggcgctgaccacgccgatgctggttttcccatccgttgcggccctgctcacccgctggttttcaccggggcaggtgtccacggcgggactgatgatggcctccgtcgggttgttgttgctgggcgatgcttttcacagtaaccacctcccgcaacttgtgctggcgctgatcctctgtggggcgggggcggcgcttccctggggactgatggatggcctggcgatatccgctgtgccggtcgccaaagccggtatggcggcaggcctgttcaacaccgtacgcgttgccggcgaggggatcgccctggcggtcgtctccgcggtattaacggcaagcaataccctgaccctgcagagtcgcgttcacgggtatgcccccgaggtgattcaccgcgccgcaggctggctgggggccggcaatatgccgcaggcggctgcgcttttgcctgatttttccctccgggtgctgcgcgagagctatgactctgcttatacgctactgtttagcgggctggcggtcgtcaccctgctgtgcgccctgatgatctggctgacgttatgccggaaggggggcgctatccaaacccgcaacagtggatcctga

SEQ ID NO: 210821 - DNA, 285 bp, Klebsiella pneumoniae
atggcgagtgatacagaccggatttatatcgagatcctggaaacggtgctgatgagcaccctggatcctgatttgtggaaatctgcgctgcagaaactggcgtttctcaccggcagcgccttgatggagctctttaacgtcaagcccgccgaaaacgcagtggcggagctgctggtgcggggcatgacgccttatatctgggcgtatctatcgccacgatcggaacccaccttagcgccctgtaccagaaaacccatactcgacatcaggcagagctcctgctga

SEQ ID NO: 210822 - DNA, 489 bp, Klebsiella pneumoniae
atggacaaagacacagtagtaacgctgttgaaatacaagcgctggattgaccttgccaccttacaggcgatccgcgcgattgacggaacgggacatggcgaaaagcgtcacctgaccatcaggctgatgaaccatatccatgtcgttgatatgattttccgggcgaacctgcgcggcaggccgcacggctacaccgcgctgaatacccctgagacgccaaccgttgatgagctggaaacggccatgaccgcctgtacggacgaatacattcagtacgtcagcgccatgacccccgccgatttccacgaacgtatcgccttcaaatttgtcgacggcggcgacggcaatatgaccgcgatggagatgctgaaccatatgctctttcacggcgcctatcaccgcggcgcggtgggctggatgattggcgaatgcggcggcgtgccgccgaaagaggtgctgaccgttttcctgcgcgaccatcattcctga

SEQ ID NO: 210823 - DNA, 528 bp, Klebsiella pneumoniae
atgcttaagcgtcgcactctcaaaacagcactggcggcggttatttctcttgccgtcatggccgcgccagcgtatgccaacccgggtaatggcaatggcaacggcggtggtaatcacgggaacagtggtaaccatggcaatagcggcaatcatggtaacaacggtaacagtggcgaccatggcaataaagggcaaaataaaggccagtccactgaagatcacggcaaacggaaaaactacggcaagcccgaccacgtcgacagcgatattagcttctcacgggcgcgctcccttgccgtaaactacggtctggtcggctatcaggcgctgccgccgggtatcgccaaaaatgtcgctcgcggcaaaccgctccctccggggatcgccaaaaagaccctgccggcttccatgattaacgacctgccctattatccgggctatgaatggcgggcggtcggcgatgatctggtgctggtggccctgagcaccgcgatcgtcaccgccgtgattaacggtgtgtttgactaa

SEQ ID NO: 210824 - DNA, 972 bp, Klebsiella pneumoniae
atgagcgaacgctatgtcattgaagtggatggactgaaaaaatattttccgctacgcgacggcctgtttggtcagcagaccggcgagcttcgcgcggtggacggcgtcagctttaatatccgtccgggcaccatttttggcctggtgggcgagtccggcagcggtaaaaccaccgtcggccggaccctgcttggcctgtacgagaagagcgccggcagcgtgaaatttcacggtcaggagctggccgacctgaccgcgcctgccctgcgcgctatccggcccaggatgcagctggtgtttcaggacccctatagctcgctgaacccgcggctgcgtattggcgacgcgattggcgaagccatgctgcagcacaaactgtgcgcccgcaatgagctatatgaccgggtgatcgacgtgatgaagatctgcggcctggcgccggaacactatgcccgcttcccgcatcagttttccggcggccagcgtcagcggatcggtattgcccgggcgctgatcctcaacccggattttatcgtcgccgatgaacccatctcggcccttgatgtgtcgattcaggcgcagatcatcaatttgttttccgacctgcgcgacaaccgcggggtcacgtttctgtttatctcccacgacctcggggtggtggagcatttatgtgacgatgtggcggtgatgtatctcgggcaactggtggaaagcgccagccgcgatgcgctgttcaaccgccccctccatccctacacccgcgccctgctggctgcggtgccgaccctcgacccgcacagtgaaccgcaggcgctggtgcaaggcgagatcccggatccggccaatccccccgccggctgccgcttttcatcccgctgcccgctggccagcgaacgttgccgcagagagcctccggcgctgcgcgaggtggccccgggccatcgggtcgcctgtcattgggtcgcatcctga

SEQ ID NO: 210825 - DNA, 981 bp, Klebsiella pneumoniae
atgaccacgccgttagtctcctttaatcatctctccgtctctttcgccggcgaacgctctcgcgtgcgcgcggtgcaggaggtctctttcaccattcaggccgggcaaaccgttggcgtggtgggtgaatccggctgcggcaaaagcgtcaccgccatggcgctgatgggcctcctgccgccgcagacggcgcgcatcgacggcggcgagatccgcttcgcggaccgcgatctgctgcggctgaaagccagacagatggccgatctgcgcggccaccagctggcaatgatttttcaggaaccgatgtcggccctcaacccggtgttgaccatcggggagcagctgtgcgaaccgccgatccgccacctcggcgccacgccgaaagccgcctggcatcaggccatccagctgttaagcgaggtcggcctggcgcgcggggacagcctgatgacccgctatcctcaccagctttccggcggcatgctgcagcgggtgatgatcgccatggcgctgagctgtcggcccaaactgctgatcgccgacgaacccaccaccgcgctcgacgtgaccgtgcaggcgcagatcctacgcctgctgcgggatcgggcccgggccagccagatggcgatgatgctgattacccacgacctgggggtgatcgcgcagatggccgagcaggtggtggtgatgtatgccggacgaattgtggaacaaggcgccaccgcggaagtgctacggcatcctcagcatccctacacgcgggggctgatcgcctcccgaccggtgcccggtgagcggcgtcggcggctgtactcaattcccggccaggtgccggatctggccgccctgccggcgggctgcgcctttgccgggcgctgcgagcgggcgacggcgcgctgccgggaggcgattccgccgctgctcggcgaccgccaacgtgccgcctgcttttatagcgaatttgcggaggtgacagcatga

SEQ ID NO: 210826 - DNA, 948 bp, Klebsiella pneumoniae
atgatcctgtcttacttagcttcccgtcgccgccagcggcaggcggctatcccggcgctggcgcacattaccccctctccctggcgccaggggtggcgacagctgcgccgtaaccggctggccatgttctgcctgctcctgctggcggtgatggcggtgtggtgcgtgctggggcccgtctggtcgccgtggagtgatgatgccaccgacgccctgagcatcaaccagccgcccggggcggaacactggctggggaccgatttcctcggtcgcgatgtctacacccgcctgctgctggccgggcgcatctcgctggttatcggcctgctgaccatggtgatgtcggtgtgcctcggctacctgctcggcgccctctcgggttacgtcggcgggttaaccgacaaactgatcatgcgcgtggccgacctggtgatgactatccctgggttaccgctattgatcgtcgccggggcgatgctttccgagctcgatttttcgccggactcgcgcatttatatggtggtggtgatgctcagcctgctggagtggccccgactggcgcggctggtgcgcgggcaatgtctctccctgcgcgaacgcgattttatgctggccacccaggtgctgggcctgtcggcgcgtcgccggctgtttggccacctgctgccgaataccattccgattctggtggtgatggcgaccatggccgtcgccaacgccattctcagtgaatccgcgctgagctatctcggcctcggcgtggtgccgccgacgccgtcgtggggcaatatgatggatgccgctaacagcctgatcgatttccagcgccgcccctggctgtggatgccgccgggcatcgccatctttatcaccgtgatcgccatcaacgtgctgggcgatggcctgcgcgatgccatggatcccaatatgaaaccgaggctgaaatga

SEQ ID NO: 210827 - DNA, 960 bp, Klebsiella pneumoniae
atgagaaatttcatcctgaggcgcttgctgcaaacgctgccgatgctgctgctggcctccttcattatttttttgctgtttgccaaaacccccggcgactttatcgatggcaatatcaccctgacctctgcccgcgccgcggagctgaaggcgatctacggcctcgaccagccgctattgacccgctacctccactggctgggacagttgctgcgcggtgatttaggcttttcgctgcagtatcagatcccggtcagccagttgctcaaccagtacatctggaactcttttctgctggccagcgtcgcgctggtcttttactggggcatcggcctggcggtgggcgtggtttctgccctgcgccctggctcctggtttgatcatctggtgagcgtcgcggtgtttgccgccatgtcgttccccacctttttcctctgcctgctgctgattaaatggttcgccgtcgatctccactggctgccggtaggcgggatgaccaataccggcagcgacgagagcggctggcagtatgtgctgcaggtggctgcccatctggcgctgccggtgctggcgctggtgatgctgcaggcgggcagcctgacgcgctatgtgcgcgccagtatgctcgacgtggtgaaaatggattttatccgtaccgcccgcgccaaggggttgcaggagcgcacggtgatcctcaaacatgccctgcgcaacgccctgctgccgattatcaccctgctgggcttcgagctgccggggctgttctccggggcgatcattaccgagaaggtattcaactggccgggggcgggccacattcatatcgactcgctggccgcccgcgactatccggtactgatggggtttaccctgtttctggcggtgctgacgatcgtcgggaatctgctcgccgacgtgctgtacgcctgggccgatccgcgtattcgggtgaggtcatga

SEQ ID NO: 210828 - DNA, 1704 bp, Klebsiella pneumoniae
ttgtccagattacaacaaggattaaaaaccagacaaacccgcttcgccctggcgctaaaagtggccctgctcggcggcgtggtagcactttcttctgctgtctttgctgagggtctcctgaaagaaggtatcaccccggccactgacgccagccagatcccggccagcgccaaactgcgcacagacacggtggtggccgggatctccgagccgcaagggatctttaacccctactttttcgtcaacggctgggatgagaacgtgactaacgtcattttttcacgcctgatcgactgggacagccagggcaagctggtcccgggactggcggagagctggacggtcagcccggataacaaagtctataccatcaaattgcgccctggcctcacctttagcgacggctcaccgctgacggcggaagatgtcgcctttaccctgacggtcctgctcgaccccagctatgatggcgataccgacatcaccctggccaatatcgccggcggggcggactacaaagccggcaaggctgacagcgtcagcggcctgaaggtcatcgacccgctcaccctgcaggtgaccaccacgcagccaggcgccaccacgctggccaaaattggcgggcctgtactgtcgaaagcctggtacggcaaagggtatcagcgggggaatctcgactatctacgctcactgcacggcaagccgctgggcaacggcccttacgtgtacgacaaatatattcccggtcaggaaatacgcttccatgccaatagccatttttaccgtgggacgccgccaacgccgcgctttatctatcgcgtgaccaatccgtccaccaacttccagctgttccagaccggggagaccgactacgacgcctttacctcgcgccccgacgatattgagcaactgaagatgctcggcttcgccaatattaatctttacggctccagcgactacagccaggtggaattcaacgtgcatcgcccggcgctacaggataagcgggtgcgccaggcgctgatttacggcctggataggcagaagctgatcgacgtggtctatcagggatacggcaaagtcgccatcgaaccgatcgcgccgatctcctgggcctttaacgctgaaggcgtcaacccttacccttacgatccggcacaggccaaaaagctgctggatgaggccggctggaaaccaggcgccgacggtatccgcgccaaagacggccagcgcctggagctgaccctgctggtgagcaagaaggtgctcaacgatgcgctgatccccatcgccaaggagaactggcggcagattggcgtgctgctgaagccgcaggtggtggatttcaacgccctgatggcgcagcgcaaagccggaaattacgatttggcctcgttcagcaccagcaccctcaacgacccgcacgacggggtatgggatttctacagcagcgaagctaaagagtccggctaccataacgcggaagtcgataagctgattaacgccggcaacgcggtgctcgacatcgaacagcgcaagccgatctaccaccagctgtataaagtgctggccgaggatccgccggtgatcctgctcggctatcgcgagatcctttccgccagcagcgcccgcgtcagcggctttaagccggatatctacaacggcctgaccggcagcctgccggatgtaaaaatcgtcaaataa

SEQ ID NO: 210829 - DNA, 684 bp, Klebsiella pneumoniae
atggcacattaccggattatcgacaccgcatcctggccccgccgggaccatttcactttttaccgccaattcgccaaccccagctttaatctctgcgtgccgatagcggcgcagcgcctgtacgaatgtgcgaaggagcgtcgggtctcgttttttcagctcgcgctctatgccctgctgcgcgcggccaacggggtaccgcagctacgccagcgcgtgcggaacgatgaggtgattgaatatgacagtctggcagtaatgacgccggtgatgaccgtcggagagggattccgtcaggtgtggtgcgacaacgcccccgagttcaccgccttcagcgccgcggccacgccgaagattgtcgcggcaagagagacatccccggcgccgctcatcgtcgatggcgagcattttatctgcgccagctgtctgccatggctccacttcacctcgatgacccatgcggaatatgccgtcggcgcggcggtccccgcgctcacctggggaaaattgcagaatggcgttatcccggtggccgggcggtttaaccatgccttcgtcgatggtctccacgccagccgcttttatgcccttgtcgaagagggatttaatgaccccgagcggctctggttgccgctaaccgaaaccgcaccctccctgctgcccccagcggcgaaggagcgttaa

SEQ ID NO: 210830 - DNA, 384 bp, Klebsiella pneumoniae
atgaaaattgcccatatcgccctgtggacccaacagctcgacgtccaggcccgcttctgggtggacttctttgccgccagcatcaatgaaaaataccttagccagaccaaccccggctttgcctcctattttgttactatcgacgacgaggtggtgatcgagctgatgaccaagcctggcctgcagcaggccagcgcggataacaaccataccggctgggcgcatctggccctctcggtgggcggggcggaacaggtcgatgccatcgcccaacgcgccggggccgccggaatactgatttcgccgccgcgcaccaccggcgacggctattatgaggcggtgatcgccgatcccgatggcaacctgatcgaaatcgtcgcatag

SEQ ID NO: 210831 - DNA, 771 bp, Klebsiella pneumoniae
atgctcgattatgctgctttccctcaacagcgacaagcgctgatttgccagatcctgcaggaaaacggcagagtggtgtgcgcggagctggcggcgcgtcttcaggtgtcggagcataccatccgccgcgatctgcatgagctcagccgcgagggattctgtaaaaaggtgtatggcggggcggtgctgagtctgccggaagcgggggattacagtgagcggaaagataaaaaccgcgcgataaagctcaggattgcgcaacagtgtgcccggctggtgaagcccggcggcactattttcattgataccgggactaccaatctggcgatggccgaggcgctgcccaccgagctggcgctgacggtggtaacgaactcgccggagatcgccgcggtactggtgaaaaaaccgctgtatgacgtggtgatccttggcggccaggtacagcgcgcgagcggcggttgcgtcggcgccgcggcggtggctcaggtgcagggcatgttattcgaccaggggtttatcggcggctgcgcgatggcgccagagtcgggcctgaccggctttgactatgccgactgcgagttcaagaaagcggtcattaaacagtgcagcgagattattgttggtctgacttcggataaaattccggcagcagcgcggtttgtggtggccgccagcagcgatatcgatgtgctggtggtggaagagaatatcagtcgcgaatatcgcgttgcctttcagcagcacgatattcgcatctataccgtgtaa

SEQ ID NO: 210832 - DNA, 630 bp, Klebsiella pneumoniae
atgttcctatccagcctgatggccattgccgcggtgctgatcatgggcgtgatcagtcccggcccaagctttatctttgtcgcgcgcaatgccgtcgctcgctcgcgtctgcacggtatggttaccgccctcggtaccggcgccggtgcggccattttctccattatggcgatgctgggcctgcagaaggtgctcaccgcggtgccggagctgtttattggtttgaaggtggcgggcgggctctatctgctgtggctgggctataaaatttttcgcgggtcggcgcagccgatggacttttccgccagcgggatggccggcaaccgctctttgctgaagaccttccgcgacgggctatatactcagctcagcaatcccaaaactgcgctggtgttcgcctcaatttttaccgccctgctgccggcgcagatccccaccgccttctattacatcgtgccgctgatgagctttctgatcgacgtcagctggtattcgctggtggcgctggtgctgtctgccgaccgcccgcggcgcgtctacctgcggctgaagcggcggatcgacatcgccaccgcgacggtgctgggggcgctgggcctgcggcttatcgccacctccctcacccgctag

SEQ ID NO: 210833 - DNA, 636 bp, Klebsiella pneumoniae
atgcaacatatcattgagggcttcctcaacttccagaaagagatcttcccccagcgtaaagaactcttccgcagcctggcctccagccagaatcccaaagcgcttttcatctcctgttctgacagccgtctggtgccggaactggttacccagcaggagccgggacagctctttgtcattcgtaatgccgggaatatcgtgccgtctttcgggccggagccgggcggcgtttccgcgaccatcgaatatgccgtggttgcgctgggcgtgacggatatcgtgatctgcggccattccaactgcggcgcgatgaaagcgatcgccacctgtcagtgccttgagccgatgccggcggtgtctcactggctacgctatgccgatgccgcgaaagcggtggtggaaaagaaaacctgggctagcgaaaccgataaggtcaacggcatggtgcaggaaaacgttatcgcccaactgaataacatcaagacccatccttcggtggcggttggtctgcgcgaccataccctgcgcctgcatggctggttctacgacatcgaaaccggcgatattcaggcgctggataaaaacacgaaatcctttgtttcgctgtcggaaaatccggacgtctttttcgaataa

SEQ ID NO: 210834 - DNA, 210 bp, Klebsiella pneumoniae
atgaaattcatcaaaactttcgttgctgttgctgcgctatctctgttctctgctgccagctttgctcagagcgtcagcgccactgcctccacgctggaccgcgcggaagctaaaattgccgcccaggccgcagaacagggtgcatcctataaaattaccagcgcccagtttaacaaccgtgttcatatgacggctgaactgagcaaataa

SEQ ID NO: 210835 - DNA, 717 bp, Klebsiella pneumoniae
ttgaatattttaattcacagcaataatatttattttaatatcggtatcgcccagtgttttcgggatattcagaaaacagcgcccgaattaaaggttattcactccctgcccctcagccatcttccagaactgtccgggctggatgtgattattttgtcactggaaaactatcatgattacctggctgccgctgaaatcgctcagcactttcagggcctggtcatcggctttacgtcagccggcaacgtaaggcgcagacgcccctttttcgcggataccctactgtgggtcagccagcgcgaagcggtacgtgaagtgagccgccttctgcgctgcctggccgagcgccgctggccactcgtgccgcgtcaccaacgtcagagcgtttctttccgtcaacgagccccgctcaaccgcctggagatgcggatgattgatgccaccatgaagggtcagtcggttcatcaaatggccgctacgctggggattaatcgcaagcgggtctataacggcctggaaaggattaaagtgaatttccgcctggtcagtcatagccattttcatcatttcatgaccgacaggctctcttttagtcgcctgtctgccgacctccgatgcctgaccacagcagctaatgcaaccctgccgccgcgcgcagcctcgaggctggcggaaaatcattcatattatttgaaagagtttcgcaaattgttttga

SEQ ID NO: 210836 - DNA, 435 bp, Klebsiella pneumoniae
atgactaaaggctataaactacttggctataagttagcggataatattttctactgcctgcatcatcgggaaattatcacgctgcgcgggacacggacgcaagtccagctacgcagtaccatggcctgtttactggagtacctgctgacgcacggcagagaacgtctggtcagcgatgaagagttaatgattaacgtttgggaaaaaaataatctccgcccttccgcgcagcgcctatggcaggttattcagagcttaaagtctcgcttacaccaggctggcgtggagagcgcgttaatcatccgcgttaagtgcgcggggtattatattaataacgtttacgtagccgaaatttattcatacaaaccgccggggatgatgaattatataaacacttcgcctgctgatatgaataagcttctggtacgcagctaa

SEQ ID NO: 210837 - DNA, 150 bp, Klebsiella pneumoniae
atggtcattgcaactcgtaagcctctgtgcaacaaacgctggtcggccagcccggcctcccaggatcttcagttgactcagctacgtcacccgtgggtcgccaccaaagccagctgcaaaagtaaaaaaggctggaagagccgcggttaa

SEQ ID NO: 210838 - DNA, 837 bp, Klebsiella pneumoniae
atgtcacctgctcccttttatacgttgaccgctggcgacctgacggtgactgccgtgagtgatggtctgatgtcagcgccgctgtccttactctcgggtatctcacgggaggaggcggaacatctgcagcggcattcaggattagcctcaccagagaccattgcgattggcgcctatctgatccgcggtcgcgggaatacggtgctggtggataccggcaccggcggagccaatggcgttggcggcgaacttatcgccaatctggcgcggctcggcgttggtcccgaggagatcgacgccatccttctcacccacgcccatccggaccatatcggcggcctgctgtccgccgctggtacgccagcgtatcccaacgccacggtgttcctgcctacgcgggaaagcgcttactggctggcaacatccacgttcgacaacgccagcgatcgcggccggcgcaacgtgctgcttgttcgccgtgtactggcgaactgcgcggcgcaaatcagcggggttgatgatgaggaggtgatcgccgggatccgcccgtgccctctgcccggccatacgcccgggcataccgggtatcgtctcgaagcgggcgatacctcgctgctgatctggggggatatcgtccatttcccgtccattcagtctgcgcggccagaagcctcggtcgccttcgacgtcgatcctgaacaggcccggcgtaccagggagatcctgctgcgccaggccgccagcgaacggtggttgattgccggtatgcatcttggcctgccgggattcgccagagtggagaacaccgcctcaggctattgtctgcgttcggtgtga

SEQ ID NO: 210839 - DNA, 516 bp, Klebsiella pneumoniae
atgctctatgtcgtcgaatgcgcctacaccgatccccaaagcgaagcggcgtggaataccttttacaatcaggaaaaactaccggcgctggtctctgtgcccggtttctacgcctcccagcgcttccgcgctctcagcgagggctgcccctgctacctggcgctgcacgatatccacgatgctaccgtcatcgacagcgacgcctaccgccgcaacggcggcggccattttgcccgctggcaatcggcgatcgccgactggcatcgccacctctttctaacgaataatacgctgcgggaggttgccccggatgaagtgctgctgctgggcgataccgcggaggacttgcccgtcgctgcgccgatactcctgcagccaggcggcctggcgaccgaacaaacccggtatgccgccatcctcccacgagacaacctgcatcacctggccacgactgccgccgtctatatctatcagcccatcaccgcccggttacgcaacccggcgcagcgcgcgtga

SEQ ID NO: 210840 - DNA, 885 bp, Klebsiella pneumoniae
atgcgtcgtaaaatccccagcagcgctgcgctactggcttttgaggccgcggctcgtcacggcaactttgcccgcgcggcggcggagctcgcgttaacggaaggggccatcagccggcagattgcccgtctggaagcgctcctcgacagtaaactcttcgacaggacggggagccgggtgcggctcaatccggcaggcgcccgctacgctcgtcaggtccgcgagatcctcgctcgcctggaacgggacacccatgacgtcagcgggatgcccgtcgatggccgcagcctggagatcgccgtgctccccaccttcgccagccgctggttaattccccggctcgggcgctttgcggcgcagcatccgcatatcgtggtcaatattgccgcccgcagcgatcccttcattctgccgggaagcggatttgatgccgccatccattttgaacacccggcgtggaccggaatggaggtgacgtttttatttgcggagtatttgctgccggtctgccatgctgcgctgctgacggatgacgatcttccggggctgcttaaccggctaacgcgcattcaccggcggcaaaacccggacgcctggctgcactatgcccgcgagtgcggtctggcgctggataaccccgcccaggggccgcgctacgatctgcatgagatggcgatcgccgcggtactaagtcagcagggagtggccctggtgccgaagatgtatgtggaaagcgagctgagcgccggaacgctggttgccccgtggccgggctccccgacgctggctaagcgcttctgcttgatcaaacccggcggcggggagggggagccagcgctgcagatgtttgagcgctggctgcagacggagattgcggcaggttaa

SEQ ID NO: 210841 - DNA, 579 bp, Klebsiella pneumoniae
atgaaatcgattggtattttctgcggttcttcagctggcgaacatccgctgtacctcgaaaccgcccgtctggttggacgtacgctggcgcagcaggggttggcgcttgtctatggcggcggcaaagttggtctgatgggggcggtcgccgattcggcgctggaggccggtggcgtggtgatcggcgtgatgccgcgcggcctggtggagcgggaaattgcccaccgcggcttgacggagctgcatgtggtcgaggatatgcacgagcggaaaaccaaaatggcggcgctggcggatggctttattgccctgccgggcggggcggggacgctcgaggagattttcgaacaatggacctgggcgcagctggggatccatgagaaaccgtgcgcgttcctgaatattaagggttattacgatccgcttcaggcgatggtcgataacatggtacgggaagggtttatgcacccgcgctacgcggagatgctgccgttcgctacctcggcagacgagattatcgccggttttcgcgactatacgccgccggcccgtaaatgggttcagcagacagctatttaa

SEQ ID NO: 210842 - DNA, 351 bp, Klebsiella pneumoniae
atgaaaaaagtattagctctggtcgttgccgctgctatgggtctgtcatcagttgctttcgctgccgatgcggcaagcaccaccccgagtgcagcagccagccatactaccgttcaccataagaaacatcacaaagcggccgcgaaaccggcagccgagcagaaagcgcaggcggcgaagaaacaccacaaagccgctgcaaaaccggctgctgagcaaaaagcccaggcggcgaagaaacaccataaagccgctgctaaaccggcagtagcgcagaaagcgcaggcggcgaagaaacaccataaaacgacgcaccatgcagctaaaccggcggttaaaccggcggcataa

SEQ ID NO: 210843 - DNA, 1374 bp, Klebsiella pneumoniae
gtgcagaagtatttcgttgaagcgcgtcagttattagctctggctatacccgtcatccttgcgcaggtggcgcagacggcgatgggttttgtcgataccgtgatggcgggtggctacagcgccacggatatggccgccgtggccatcgggacctccatctggctgccggcgatcctcttcggccacggccttctgctggcgctgaccccggtggtggcgcagcttaacggatccgggcggcgagagcgtatcgcgccgcaggtgcgtcagggcttctggctggccggctttgtctcggtgctgatcatggtcgtgctgtggaacgccggatacatcatcagctccatgcataacatcgatccgctgttggcagagaaggcggttggctacctgcgcgcgctgctgtggggcgctccgggctatctgttcttccaggtcgcccgtaaccagtgtgaagggctggcaaaaaccaagcccgggatggtcatgggctttattggattactggtcaacattccggtgaactatatttttatctatggtcatttcggcatgcccgagctgggcggcgtcggctgcggtgtggcgacggcctccgtttactgggtgatgttcgccagcatgctgtggtgggtgcgccgggcgcgtacgatgcgcgatatccgctgcgtcgagcgcttcagcggccctgattttgccgtcctgttacggctggtgcagctggggctgcccattgctctggcgctgttctttgaagtcactctgtttgccgtcgtcgcgctgctggtctccccgctcgggatcattgacgtcgctggtcatcagatcgcgcttaatttcagctcgctgatgttcgttctgccgctgtcgctggcggcggcggtcaccattcgcgtcggcttccgccttggccagggctcaacgatcgatgcccaggtttcggcccgcaccggcgtgggcgtgggggtctgcctggcggtatttaccgctatctttaccgtcctgatgcgtaagcagattgcgttgctgtataacgataatcccgaggtggtgacgctggcctcgcacctgatgctgctggcggctatctatcagatctccgactctattcaggtgatcggcagcggcattctgcgcggctataaagatacgcggtctatctttttcattacctttaccgcgtactgggtgctgggtttgccaagcggctatctgctggcgctgaccgatatgattgtgccccgcatgggacctgccggtttctggtgcggatttatcatcggtctgacctccgccgccatcatgatgatgctgcggatgcgttttctgcagcgccagccttccagcatcatcttacagcgcgctgcgcgctaa

SEQ ID NO: 210844 - DNA, 636 bp, Klebsiella pneumoniae
atgtttactggtattgttcagggaaccgcgaaagtggtctccattgatgataaacccaattttcgcactcacgtggttgagttaccggcacatatgctggaggggctggaaaccggcgcctcggtagccaacaacggctgctgcctgacggtgaccgaaatcaacggcgcgcgcatcagcttcgatctgatgaaagagacgctgcggattaccaatcttggcgatattcaggtcggcgatgaagtgaacgtcgagcgagcggcgaaatttagtgatgaaatcggcgggcatttaatgtccggccacattatgaccaccgcggaaatcgtgaagattctgacttccgaaaataaccgtcagatctggtttaaagtgcaggatccaacgctgatgaaatacatcctctataaaggattcatcggtattgacggcattagtctgacggtgggtgaggtgacggcgacccgtttctgcgtgcatcttattccggagacgctgcagcggaccaccctgggagcgaaaaaactgggcgatcgcgtcaatattgagattgatccgcagacccaggcggttgtcgatacggtcgaacgcgtgctggccgcgaaagagatggcggctaaggtcaatgaagcctga

SEQ ID NO: 210845 - DNA, 1149 bp, Klebsiella pneumoniae
atgagttcatcgtgtatagaagaagtaagtgtaccaaatgatgactggtaccggattgcagctgaattattaggccgtgcgggaattgaaatcaatggctccgcgccgtccgacctgcgggttaaaaatcctctcttttttaaacgggttttgcaggaaggttcgctgggtttaggcgaaagctatatggacggctggtgggaatgcgagcgtctggatatattcttccacaaggtgttacgcgccgggttggaaaagcagctcccacaccatttcaaagacacactccgcatcgcaggcgctcgtctgtttaatctacaaagtaaaaaacgtgcctggattgtcggtaaagagcactacgacctcggcaacgatctcttcagccggatgcttgatccctatatgcaatattcctgcggttactggaaagaggcgcagagcctcgaggccgcccagcaggctaagctggatctcatctgccgcaaactggagctggagccaggcatgcgggtactggatattggctgtggatggggcggtctcgccgaatatatggcgcgaaattatcaggtcagcgtcgtgggtgtaaccatctccgccgaacagcaaaaaatggcccaggcgcgttgcgccgatctcgatgtagagattcgtctccaggattatcgcgatctgcacgacagctttgaccgcatcgtctccgttggcatgtttgagcacgtggggccgaaaaattacgctacctactttgaggttgccgaccgtaatttgaaacccaacggccgctttttactgcacaccattggctccaaggtcaccgaccataacgttgacccgtggatcgataaatatatcttcccgaacggctgcctgccttccgtgcgtcacattgccgaagccagcgagaagcactttgtgatggaagactggcacaacttcggcgccgattatgacacgaccctgatggcctggtatgagcgtttcctcgccagctggccggaaattgccgataactattctgagcgtttcaaacgcatgtttacctattatctgaacgcctgcgccggcgccttccgcgcccgcgacattcagctctggcaggtggtgttctcgcgcggtattgaacatggactgcgcgtcgcccgttaa

SEQ ID NO: 210846 - DNA, 1236 bp, Klebsiella pneumoniae
atgcactccctacactctgcggcatcgtacctgtacaccaactatgagaacgttatgtcacaacccgggaaaggatttttagtctggctggccggcctgagcgtgctgggctttctggccaccgatatgtacctgccggcgtttgccgccatgcagcaggatctcaacacctccgccgcctccattagcgccagcctgagcctgttcctcgccggcttcgcgctgggccagctgttctggggaccgctgtcggaccgctatggacgtaaaccggtgctgctgagcggcctggcgattttcgcggccggctgtctggggatgctgtgggtgcacaacgccaccctgatgctggcgctgcgctttctgcaggcgattggcgtctgtgccgcggccgttacctggcaggcgatggtcgccgattactatcctgcccagcgcacgaaccgcatcttcgccaccattatgccgctggtaggactgtcgccggcgctggccccgctgctgggcagctggctgctggtgcacttcgagtggcaagccatcttcgccaccctgttcgccatcactctgctgctgatgctgcctgccctgcgcctgaaggcagccgcgaagtcagtagtagtgacgcagcaaaagatcacctttctcgcgctgctgcgctcccgggaatacagcggcaacgtcctgatctacgccgcctgttccgccagcttcttcgcctggcttaccggttcaccttttatcctgcatgaaatgggctatggcccaaccgctatcggcctgagctatattccgcagaccatcgcctttctggtgggaggctatggctgtcgcgcgctgctgcagaaatggtccggtcaacagatgctgccgtggctgctggtgatttttgccgtcagcgtagccgccacctggctggtgggcctgcaaacccatgcctcgctggtggcgttaatgatcccgttctgcatgatggcggtggtcaacggcgggatctaccccatcgtggttgctcaggcgctgaagccttttccgcaggcgaccggccgcgcggcggcgctgcaaaataccctgcagcttggcctgtgcttcctgaccagtctgctggtatccgcgctgatcgccacgccgctgctgaccaccaccagcgtaatgctggtttcgattggcttagccggaataggctatcgcctgcagcagacgccggagctgacaccccactcttcccacgcgtaa

SEQ ID NO: 210847 - DNA, 1005 bp, Klebsiella pneumoniae
atgtggtctgaatactctctggaagtggttgatgccgtcgcccgtaacggcagcttcagcgcggccgcgcaggagcttcaccgggtgccttccgcggtcagctataccgtgcgtcagctcgaagagtggctcgccgttcccttatttgagcgtcgccatcgtgatgtggagttgacccccgccggggtctggtttttacaggaagggcgctctgttatcaaaaaaatgcagatcacccgccagcagtgtcagcaaattgcgaacggctggcgcggacagttgtcgatcgcagtggatgatattgtgaaaccggcgcggatgcgtcagatgatcgtcgacttctatcgccattttcccgacgtcgaactgatcgtctttcaggaagtattcaatggtgtatgggatgcgctggccgacggccgcgttgagctggcgattggcgcaacgcgatctattccggtcggcggtcgctatgcgttccgcgatatggggatgctgagctgggactgcgtggtggcgagcgatcatccgctggcaaagatggagggacccctgagcgacgacgtcctgcgtaactggccgtcgctggtgcgggaggatacctcgcgctcgttgcctaaacggacaacatggttgctggataaccagaagagggtagtcgtccctgactgggaatcatcagcaacctgtttgtcggcaggactctgcgtcggcatggtgccgagccatttcgcccgtccatggatagatcgcggcgagtggactgcgctggcgctggaaaatccgttcccggatgccgcctgctgcctgacgtggcagcagaacgatgcctcaccggcgctgaactggatgcttgactatctgggggacagcgacacgctgaatcgggagtggctgcgggcgccggagagatccgcgcccgccagatgccttaacgacgataatcgacaaacgggccatccgctaccgagcggcgctcaaccagacgagggtgcacttcgatag

SEQ ID NO: 210848 - DNA, 1026 bp, Klebsiella pneumoniae
atggcaactattaaagatgtagcgaaacgcgcaaacgtttccactacaactgtgtcacatgtaattaacaaaacccgtttcgttgccgaagagacgcgtaatgcggtatgggcggcgatcaaagagctgcactactcgccgagcgccgtggcgcgcagcctgaaagtcaatcacaccaaatcgattggcctgctggcgaccagtagcgaagccgcctatttcgctgaaattattgagtccgttgaaaagagctgcttccagaagggctatactctgatcctcggtaacgcgtggaacgatctggaaaaacagcgcgcctatctgtcgatgatggcgcaaaagcgcgtagacggtctgctggtgatgtgttccgagtatccggattcggtattgagcatgctggaagagtaccgccatatcccgatggtggtgatggactggggcgaggcgaaagccgacttcaccgatgcggtgatcgataacgccttccagggcggctatatcgccggacgctacctgattgaacgcggccatcgcgaaatcggcgtgatcccgggtccgctggagcgcaacaccggcgcggggcgactggccggcttcatgcaggcgatgaaagaggcgcatatcagcgtgccggaaaactggattgtgcagggcgacttcgagccggagtccggctaccgcgcaatgcagcagatcctaaaccagcagcaccgcccgacggcggtcttctgcggcggcgatatcatggcgatgggcgctatctgcgcggcggatgaaatgggactgcgggtgccgcaggacatttcgctgatcggttatgataatgtgcgcaacgcccgctatttcagcccggcgttaaccaccattcatcagccgaaagattccctgggcgaggccgcatttaacatgctgttggatcgtatcgtcaacaagcgtgaagagtcgcagtctatcgaagtgcaccctcgtctggttgagcgccgctcggtagcggatggcccgtttgtcgattatcgtcgttaa

SEQ ID NO: 210849 - DNA, 1167 bp, Klebsiella pneumoniae
atgaaaatcaactttcctttacttgcgctggcgatcggcgcctttggcatcggtaccaccgagttctccccgatgggattgctgccggtgattgcgaaaggtgtggacgtctcgataccggtagcgggaatgctgatcagtgcgtatgccatcggcgtcatggtcggcgcaccgctgatgacgctgctgttgtcgcatcgcgcacggcgcaatgcgctgatttttctgatggggatcttcaccgtcggcaacctgttgtcatccatcgcgccggattacaccacgctgctgctgtcgcgcattattaccagcctcaaccacggcgcttttttcggcctgggatcggtggtggcggccagcgtcgtgccaaagcataagcaggccagcgcggtagccactatgtttatgggcctgaccatcgccaacattggcggcgtgccggcggccacctggcttggcgaaaccatcggttggcggatgtccttccttgctactgcgggattaggcctgctggcgatggttagcctgtggttctccctgccgaagggcagcgcgggggaacgtcctgatgtcaaaaaagagctttctgtcctgctgcgcccgcaggtgctctccgcgttgctgaccaccgtgctgggcgccggggcgatgtttacgctgtatacctacatttcgccagtgctcaatacgctgacccacgcttcatcgctgtttataaccgcgatgctggtgctgattggcgtcggtttttcgctaggcaactatctgggcggcaaatttgctgaccggtcggtctccggcacgctgaagggctttctgctgctgctgatggcgatcatgctggcgatcccgctgctggcgcaatcccaggccggggcggccatcagcatgattgtctggggcgcagcaacctttgcggtggttccgccgctgcagatgcgggttatgcgcgtagcgcatgaggcgccggggctctcttcttcggtgaatatcggcgcgttcaacctcggcaacgcgctgggcgccgccgccggtggggcggtgatctctggcggactgggatatgcgtttgtgccggtgatgggcgcgattatcgctggtctggcgctgctgctggtctggtttagcgggcgagcgcagccggaagaggctttcgccagccagtaa

SEQ ID NO: 210850 - DNA, 582 bp, Klebsiella pneumoniae
atgtcgtttgaattacctgcattaccatatgcaaaagacgccctggcgccgcacatttccgcagaaaccctggaatatcactacggtaaacaccaccaggcgtatgtcactaacctcaacaacctgatcaaaggcactgcgttcgaaggcaaatccctcgaagagatcgtccgcacttctgaaggcggcgtattcaacaacgcagcgcaggtctggaaccacaccttctactggaactgcctcgcgcctaacgccggcggcgaaccggaaggcgaactggcggccgcaatcgccaaatctttcggcagcttcgcggattttaaagccaaatttaccgatgccgcggcgaaaaacttcggcgctggctggacctggctggtcaaaaatgccgacggcagcctggctatcgtctccaccagcaacgccggcaccccgctgaccaccgacgcgaagccgctgctgaccgttgacgtttgggaacacgcctactacatcgactaccgcaacgcccgtccaagctacctggaccacttctgggcgctggtaaactggaagtttgttgcggctaacctcgcggcataa

SEQ ID NO: 210851 - DNA, 486 bp, Klebsiella pneumoniae
atggcaaaaacagatgaggtggtgagcgcgaaaatgatcccggtggtgcaggggattgttgactggatcgaagcacatattttcgacaccctgtcggtgagcgcgattgcgaaaaagtccggctactcacactggtacttccagcgacaattcgccatggtaacgggctgcacgctggcgagctacgtcagccgacgaaagatgacgattgcgacaatgtatttaacgcagacgcaggcgtcgatacagagtatttctcagtgcctgggatacgagggacaagccgctttctgccggacctttcaccgtcactttggcatgtcgccgacccgctatcgtcgtgatacgccgggcaaagagagcaatctgcaatatcccttgcgggtggggatggagatggagcaggagaggcggtctgccgctgcagcggcagaccgggatcagcgaatggttttcggcgtcatgacgcgacgagcgccgacataa

SEQ ID NO: 210852 - DNA, 873 bp, Klebsiella pneumoniae; identical to SEQ ID NO: 135707

SEQ ID NO: 210853 - DNA, 348 bp, Klebsiella pneumoniae
atgagctcgactttagaaaagatccaacgccaaatcgctgaaaacccgatcctgttgtacatgaaagggtcgccgaagctgccaagctgcggtttctctgcccaggccgttcaggcgctgtccgcctgtggcgaacgttttgcttacgttgatattctgcagaacccggatatccgcgccgagctgcctaaatacgccaactggccgactttcccgcagctgtgggtagacggtgaactggtgggcggctgcgatatcgtcatcgaaatgtaccagcgcggtgaactgcagcagctgatcaaagagacggcggcaaagtaccataccgacgagccaaaagcggagtaa

SEQ ID NO: 210854 - DNA, 648 bp, Klebsiella pneumoniae; identical to SEQ ID NO: 135705

SEQ ID NO: 210855 - DNA, 408 bp, Klebsiella pneumoniae; identical to SEQ ID NO: 135704

SEQ ID NO: 210856 - DNA, 1098 bp, Klebsiella pneumoniae
atgtcggaagcaaaattattcagcccactgaaagtcggtgcggtcaccgtccctaatcgcgtatttatggcgccgttgacgcgtctgcgcagcattgagccgggcgatatccctactccgctgatgggcgaatactaccgccagcgcgccagttccgggctgatcatcaccgaagcgacgcagatctccgcgcaggccaaaggctacgccggcgcgcctgggctgcacagcccggagcagattgccgcctggcagaaaatcaccgccggcgttcatgccgaaaatggtcatatcgccgtccagctgtggcacaccgggcgtatttcccatagcagcctgcagcctggcggcgccgccccggtagcgccttccgcgctgagcgcgggcacccgtacctcactgcgtgacgaaaacggccacgccatccgcgtcgacacctcaatgccccgcgccctggaaaccgcagagatcccagggatcgtcaacgatttccgtcaggcggtcggcaatgcccgtgacgccggcttcgatctggttgagctgcactcagcccacggctatctgctgcaccaattcctctcgccatcggcgaaccagcgtaccgatcagtacggcggcagcgtggagaaccgtgcccgtctggtgctggaagtggttgacgccgtgagtcaagagtggagcgccgagcgcattggcatccgcgtgtcgccgattggcagcttccagaatgtggataatggcccgaacgaagaagaagacgcgctgtatctgattagcgagctggcgaaacgcggtatcgcctatctgcacatgtccgagccggactgggcgggcggcaaaccttacagtgaagctttccgtcagaaagtccgcgaccgcttcccgggggtgatcattggcgctggcgcttacacagtagaaaaagccaacgatcttatcaataaagggctgattgatgccgtggcctttggccgcgattacatcgccaacccggatctggtggctcgcctgcagaaaaaagcgccgcttaacccgcaacgcccggaatccttctacggcggcggcgcggaaggctacaccgattacccgactctgtaa

SEQ ID NO: 210857 - DNA, 600 bp, Klebsiella pneumoniae
atgaacagacacagcgattgcgatacccgagaacatatcctggccaccggcgagcagctttgcatgcatcgcggttttaccggaatgggcttaagcgaacttctgaagacggcggaggtgcccaagggctctttctatcactactttcgctctaaggaagccttcggcgtcgcgctgcttgaacatcactacaccggatatctgcagcgcctggtcgaccacttcgatcatggcgacggtaactatcgcgatcgcttgctggcctactatcagcacacgctgaatcagttctgccagcaggggattattagcgggtgtcttactgtcaagctatccgcggaggtttgcgatctgtcggaagatatgcgcgccgccatggatcgcggagccagccagattatcgccctgctgggcgacgcgctggagaaaggacgtcaggaaggcagtatcgcatttgacggcgaggccatgaccctgtcgcaggtgctgtattccctgtggctcggggccaacctgcaggccaaaattacgcgtagcgcaacgccgctggaaagcgcccttgcccacgccaaacagattattgcagcgcctgcggtataa

SEQ ID NO: 210858 - DNA, 240 bp, Klebsiella pneumoniae; identical to SEQ ID NO: 135701

SEQ ID NO: 210859 - DNA, 897 bp, Klebsiella pneumoniae
atggttcagcgtattgctatggctccccaggggccggaattttcacgttttgtgatgggctactggcgtctgatggactggaaaatgtcgcctggcgagctggtcagctttattgagcagcatctcgatttaggcgtaaccaccgtcgatcacgccgatatctatggcgattatcagtgtgaggctgcctttggcgaagcgctgaagcgagcgccgcatctgcgtagccggatggaaatcgtcagcaaatgcggtatcgccacccgggcgcgcgctgagaacaccattggccactacattaccgaccgcgatcacatcgtgctcagcgccgagcaatcgctgcgtaatctggcgacggaccatctcgacttgctgctgatccaccggccggacccactgatggacgccgacgaggtagccgaagcttttctcgcgctgcatcatagcggtaaagtgcgccattttggcgtctcgaactttacccccgcccagttcaccttgctgcagtcacgtctgccgtttaccctggccaccaaccaggtcgaaatttcaccggtgcatcagccgctgctgctcgacggtactctcgatcagctgcagcaactgcgtattcgtccgatggcgtggtcttgtcttggcggtggtcgcctgtttaacgaagagggcttccaggcgctgcgcgatgagctggcgcaggtggcgcacgagcttaacgccgacagcatcgaacaggtagtttatgcctgggtgctgcgtctgccgtcgcagccgctgccgattattggctcgggcaaaatcgagcgcgtgcgctcggcgattgtggctgaaaaactcagcatgacccgtcagcagtggttccgcatccgtaaagccgcgctcgggtacgacgtaccgtaa

SEQ ID NO: 210860 - DNA, 522 bp, Klebsiella pneumoniae
atgcaacgatgtattctcgcgatcttatccctcgcattttgcgctggcgcacaggccgttagtgaagatgtgcaacttaatctcgtgaccaaccagggcgtcggtcagaccatcggcagcgtcaaaatcaccgaaaccgaccgcggactcgagttcgcccccactctgcgggcgctaccgccgggcaagcacgggtttcatattcatgccgaaggcagctgccagccggcgatgaaagaaggtaaagccgtggccgccggggcggcgggcggacattacgatccgcagcataccggcaaacacgaagggccgttgggggccgggcatcttggcgacctgcccctgctggtggtcaacgatgcgggcgtagccgaccagccgattattgctccgcgcctgaaaacgctggcggaggtgaaagggaaagcgctgatggtccacgtaggcggggataacatggccgacagtccgcagccgctgggcggcggcggcgaacggtttgcctgcggggtgattaagtag

SEQ ID NO: 210861 - DNA, 2025 bp, Klebsiella pneumoniae
atgaacctgcagaccctgtcgtggcgcgcactcccctgggttaaagccacccggccgcagtggcggtacgcattgcgcaacggcatcgcgatgtgtcttgcgctgagtatcgcctatgcgctggatcttgatgagccctactgggcgatgacgtccgcggcggtggtcagctttcccaccgtcggcggcgtgatcagtaaaagttttggccgcatcgcaggcagcctgctcggcgcctgcgccgccctgctgcttgccggtcatacactcaacgatccctggctgtttctgttcagtatctccggctggctggcgctctgcacctgggcctgcgccctgttcaccaacaacgtcgcctacgcctttcagctggcgggctatacctgcgccattatcgcctttccggtgattaacatcagcgacagctacgagctgtgggtcatcgcccagtcgcgcgtctgcgaagtcatcgtcgggatcctctgcggcgggctaatgatgatgatcctgccaagcacctccgacggcagcaacctgctgacggccctgaaaaccatgcacgcccggctgctggagcacgccagcctgctgtgggtgccggagacgacggatgccattcgcaccgcccatgagagcgtgattggccagatcctgaccatgaacctgctgcgtatccaggccttctggagccactaccgtttccgtcggcagaatcctctgctgaactacctcctgcatcagcagctcagaatgaccagcgtcatctccagtctgcgacggatgctgctgaactggcctgacgcgccggcgaacactcgccaggtactggagtcgctgctcgccgagctcgccacccctcatgccgacagctatcacgttgcgcggatcctggcgccgctggcgccgcggcaggatgccgattaccggcacatcgctttctgggcgcgattgcgctatttctgtcgcatttacctggagagcagccgctggatccgccgcgttgaaaatgcctcggcgatcgccgagttcaatgtgcccgccgccccgccgttagcccgccataccgatcaggcggaggcgttgctcaacggtgtccgtaccttttgcgcgctggtggcgattggcgcatgggggatcagtacccagtggaccagctgcgcggcggccctgaccctggcctccatctgctgcgtgctctactccgtatccgcctcgccgtttcgctcgctgacattgctgatgcagactctggtcctgctgtcgctattcagtttcgtggtgaagttcggcctgatggtgcaggtaaccgacctgtggcagtttctgctgttcctgttcccgctcctgaccaccatgcagttactcaaactgcagtggcccaaatacgccggcctgtggggacagcttatcgtctttatgggctcgtttatcgccgtcaccaacccgccggtgtacgattatgcggcctttttcaatgataatttgagcaagattgtcggggtaggctttgcctggctggcctttgcggtactgagtccgggctcggacgcccgcaaagggcgacgccatatcagagcgttacggcgtcactttgtcgatcagctcagccgtcatcctcagcacagtgagcatgaatttgaatcgctggtctatcaccacgtcagtcagctcagccagagtaaggatgccctggcgcgccgctggctgttgcgttggggcgtcgtgctgctcaattgctcgcacgtcgtctggcagcttcgcgaatgggaaacccgctccgatcctctcgcccaggtgcgcgacctgtgcatcaacctgttacgcgatgtgatgagcgagcgcggcgtgcagcagcgcccgctggcctccaccctgcaggagctgcagcggatctgcgacgccctgaaccaccatcatcagccggcggcgcgggaactggccgccgcgatttggcgactgtactgcgccttgtcgcagctggaacaggccccggtggccggcacaattggcgaaggaactacttaa

SEQ ID NO: 210862 - DNA, 897 bp, Klebsiella pneumoniae
atgaaaagattaaaatatctgtcaacgctgctggtcgcggccgtcgccctgattgccgcatggttgttatggaatttctacactcagtcaccctggacccgcgacggcaaagtgcgcgccgagcaggttgggatcacccctcaggtctccggcagtattctgcagttgaacgtaaccgataaccaacgggtcaaagccggggaagtattgtttaccatcgacgacaccccctatcgcatcgcggtgctgaacgcccaggcgcagctggcgaaagcccaggcggaggtggcgaaagcgcaggcggagcaaagcaaggccgccagcgaggctcgccgtcgccgaagcctgtcgcaaaatgccatctcggctgaagaccttgagaacgtcaataccgccctgaataccgccaccaccaccctggctgccgccagagcgggggtcggcgtaaccgaagcggcgctgaaacatgcgcagtggcagctcagccagacggttgtcaaagcgccggtggatggctgggtgaccaacctttccacccgcgtcggtgattacgctaccaccggccatccggtctttgccctggtggacagccattcgttttacgtactgggctacttcgaagagaccaaactgcgccacattcgcatcggcgatccggcacaaattattctctatagcaatcagcagacgctaaagggccatgtcgccagcatcggccgcgcgattgtcgaccagagcgtggaacagggaaccgggctggtggccaacatcaaaccaaatatcccctgggttcgtctcgcccaacgcgttccggtgcgaattgcctttgatacgctgccggccgatgtcaccctggtctccggcaccacctgcactgtctcaattggcgggcagtaa

SEQ ID NO: 210863 - DNA, 237 bp, Klebsiella pneumoniae
gtgaaactgagtcttaacacatccggattgccgctgcaggacctggtgttcggcgcatccgtctatttccctccgctgttcaaagccgtcttgttgggtttctttatctggttgtttttacatcgccagctgcgtgactggatgtatgcgggcgacatctggcacccgctactaatggatctctccctgttcgcgctcgcggtctgtctggccctggtattgctcattgcctggtga

SEQ ID NO: 210864 - DNA, 435 bp, Klebsiella pneumoniae
ttggaatcgccacttggttctgatctggcacgtttagttcgcgtttggcgcgcgctaatcgaccatcgcctgaaacctctggagttaacgcagacccactgggtcacgctgcataacatccaccagctgccgcctgagcagtcgcagatccagctggcgaaagctatcggtattgaacagccgtcgctggtgcgcacgctcgatcagctggaggagaaagggctcatttctcgccagacctgcgcaagcgatcggcgggccaaacgcatcaagctgacggaaaaagccgaaccgctgatcaacgagatggaagaggtgataggtaagacccgtgatgaaatcctctcaggggtctcgaagcaggaagtggaaaccttgctccacttaatccgtaaacttgaacaaaatatcctcgatctccaggctaaagattaa

SEQ ID NO: 210865 - DNA, 1362 bp, Klebsiella pneumoniae
atgcccgaacatgtgcatcatatcgttaaacgtctaatcctttatatttgcatttgtttactggccgggattggcatttccgggatgactgcgttttttcataccagcttcagtagtacttcctcaatattatttccgctgctgaccagtttcctgatggtttttcatattaccattgcctgttttatgggcatgaaatactggagcagcaagcggcgtctctaccttactccagtctctttcgggtttgcctgctcagcgctgctgatgcttggcacgctcagcagctatccggactggcttacctgcaatccggccccggtcgttaatcaaaatgacgccgttatctattatttcttccgcaatataatgatggctgtgttattcatgtcatctattattttgtactattttcgccagcgcatcatgcattcgtggaaagcacacgttcttacatttacagcatgtatactttttacgttgactattattgttttatcatggctatactccagccattcgccgtggctgagcgtcaattttatcgacgatctgagccatacctttaccccgttgtggcaaagtattatcggctggctgctgatggcagtttggttcatcacgctgattttattaattagcttgagtaaactgcgtaatattttttggttcagcggcgcttttttttgcagcgcttatttgttcacgcttttccagctgctctccaccgcaggggagctggatcagacctggtaccaggcgcgttttttcgaaacgctatgcaccttgttcctgattctggtgctactggttgacgtctttatcctctatcgcgagtctaaccacaaatatgtccattcgtatcagaattcgatccgcgacccgttgacccgcctctacaaccgcagctttttctacgacactcttaaccaacagctggcgaaggtgaatgcccagcatccgctgtcggtgctcatcagcgacctcgaccatttcaaacgcatcaacgatagctacggccatgtcgccggcgacaaagtgatccagttcgccgcctcggtgctggaaagccattcgcgggtagatgacgccgccgcacgcatcggcggtgaggaatttgctctgctgctggtcaacaccggtgaaaaagaagcgcaagcgatcgccgagcgtatccgcctggcggtcagtgccggggagagccatttaccggagcgaatgaccatcagcatgggggtgtataccacctacgacaatagcgtgacagcggaagcgtgcgttcagcgcgcggacgaagccatgtatgaagcaaagaataacggacgtaaccaggtgatcgtctggcatcagcagggagggtga

SEQ ID NO: 210866 - DNA, 468 bp, Klebsiella pneumoniae
atgattttacgtgttttggctgtatcgatgattggttttacgctcgcaggctgcgtgagcagcagcggcctgtccggcgacgtttattccgcatctgaagccaaacaggtgcagagcgtgacttacggtaccatcgtgcatacgcgcgccgtacagatccagagcggcgacgatagcaatgccatcggggccattggcggtgcggtactgggcgggttccttggaaacaccatcggcggcggtaccggacgttctctggctacggcggcaggtgcggtcgcgggcggcgtagccggtcagggcgttcagggcgcgatgaataaaacgcagggcgttgaactggaaatccgtaaggacgatggcaataccattatggtagtgcagaaacagggcagcactccgttctccgttggtcagcgcgtggccattgccggcagcggcagccaggtcaccgtctctccgcgataa

SEQ ID NO: 210867 - DNA, 1125 bp, Klebsiella pneumoniae
atgagatcgggtcgctttattggcgttatgtctggtaccagcctggatggtatcgatgtcgttttggccaccattactgaaaacatggtggcgcagcaggctagtctcacctggcccattccacacgcgataaaagaagagattcaggcgatttgccaggggcagtcgctgaccctttcgcagctaggtcgtctggacacccgtctgggacggctgtttgccgatgccgtactggcgctgatgcgccaggaaagtctcaaacccaccgacgtcatcgccatcggctgccatggacagaccgtatggcatgaaccgcagggagaggctccgcataccctgcaaattggtgacaacaaccagatcgccgcccacaccgggataaccgtagtgggggattttcgtcgccgggatatggcgctaggcgggcagggagcgccgctggtgccggcttttcatcatgcgctgctggcccaccccgttgagcgacgtatggtgctcaatatcggcgggatcgctaatgtgtcgctgctggcgccagggcagccggtgcgcggctatgataccgggccgggaaatatgttgctggacgcctggatctggcgccagaagggcaaaccgtacgacaaggacgcccaatgggctagcgaaggtaaagtgctgctgccgctgctgcaggacatgctgagcgatccgtggtttgccttgccggcgccgaaaagcaccggtcgggaatatttcaattacggctggctggagcagcatatggcccgctatccggggctacgcggggaggatgttcaggctacgcttgcggaattgaccgccgtcaccatcagtgagcaggtattgttaagcggcggctgcgagcgtttgttagtgtgcggcggcggcgcgcgtaaccccttgttaatggcgcgcctggcggcgctgctgccgggaaccgaggtctccaccaccgatgaggcggggatcagcggcgatgatatggaagcgctggcctttgcctggctggcctggcgaacgctggctggtctgccgggcaatctgccctccgtgaccggcgccagcgaagcctcggtgctgggcgccatttttccggctaacccgccgcagaatcggagttaa

SEQ ID NO: 210868 - DNA, 360 bp, Klebsiella pneumoniae; identical to SEQ ID NO: 135691

SEQ ID NO: 210869 - DNA, 663 bp, Klebsiella pneumoniae
atggccatgtctgataacgacgaactccagcaaattgcgcatttgcgccgtgaatacacccgtggcggtttgcgtcgccacgatcttcctgctgaacccctgccgctgtttgaacgctggctgcgtcaggcctgcgatgcgaaacttgccgacccgacggccatggtggttgccaccgtcgatgagcgcggccagccctaccagcgcattgtgctgctgaagcactacgacgaaaaagggttggtgttttataccaacctcggcagccgcaaagcgcatcaaattgaaaacaacccgcaggtcagcctgcttttcccgtggcatatgctggagcgccaggtgatggtaatcggcaaagcggagcgtctgtcgacgctggaagtggtcaaatatttccacagccgtccgcgcgacagccagattggcgcctgggtctcgaagcagtcgagccggatctcagcccgcggcatcctcgaaagcaaattcctcgagctgaagcagaagttccagcagggtgaagtgccgttgccgagcttctggggcggattccgcgtcagcattgagcagatggagttctggcaggggggagaacaccgtctgcacgatcgctttttataccagcgcgatagcggcgcctggaaaatagaccgtctggcgccgtaa

SEQ ID NO: 210870 - DNA, 1275 bp, Klebsiella pneumoniae
atggcaagcagtaacttgattaaacaattgcaagagcgggggctggtagcccaggtgacggacgaggaagcgttagcagagcgactggcgcaaggcccgatcgcgctctattgcggcttcgatcctaccgctgacagcttgcatttggggcatcttgttccattgttatgcctgaaacgcttccagcaggcaggtcataaacctgtggcgctggtgggcggcgcaaccggtctgattggcgacccaagcttcaaagccgctgagcgtaaactaaacaccgaggataccgtgcaggagtgggtggataaaatccgcaaacaggtggctccgttccttgattttgactgcggcgacaactcggcgatcgcggcgaataactatgactggtttggcagcatgaacgtgctgaccttcctgcgcgatatcggtaaacacttctctgtcaaccagatgatcaacaaagaagcggtgaagcagcgtctgaatcgtgacgatcagggtatctcctttaccgagttctcttacaatctgctgcagggttacgactttgcctgcctgaacaagctgcacggcgtggcgctgcagatcggcggttctgaccagtggggcaacatcacctccggcatcgatctgacccgtcgtctgcatcagaaccaggtgtttggcctgaccgtaccgctgatcaccaaagcggacggcaccaaattcggtaaaaccgaaggcggcgccgtgtggctggatccgaagaaaaccagtccgtacaaattctaccagttctggattaacaccgcggatgctgatgtctatcgcttcctcaaattcttcacctttatggacattgcggagatcaatgccctggaagaagaagacaaaaacagcggtaaagcgccgcgcgcccagtacgtgctggcagagcaggtgacgcgccttgtccacggcgaagaaggcctggaagcggcgaagcgcattaccgaaagcctgttcaacggtaacctgagcgacctgagcgaagcagacttcgaacagctggcccaggatggcgtgccgatgatcgaaatggaaaaaggcgccgatctgctgcaggcgctggttgattccgagctgcagccgtcccgcggtcaggcgcgtaaaaccgttgcctctaacgcggtgaccatcaacggcgaaaaacaggccgacccggaatatgtattcagtgacagcgatcgcctgtttggccgctacaccttgctgcgtcgcggtaagaaaaattactgcctggtctgctggaaataa

SEQ ID NO: 210871 - DNA, 861 bp, Klebsiella pneumoniae
atgaagaacatcctcgccattcagtctcacgttgtgtttggccatgccggcaacagtgccgccgaatttccgatgcgtcgtctgggcgccaatgtctggcccctgaataccgtacagttctctaaccatacgcagtacggcaaatggaccggctgcgtcatgccgccttcgcatttgacggagatcgttcaggggattgccgatatcgacaagctgcagacctgcgatgcggtactgagcggctatcttggctccgctgagcagggagagcatatcctcggtatcgtgcgtcaggttaaggcggccaatccggcggcgaaatatttttgcgatccggtgatgggtcacccggagaagggctgcatcgttgcgccgggcgtggcggagttccacgtgcgctatgcgctgccggccagcgatattattgccccgaatctggttgagctggagatcctgtgcggtcatccggtcgccagcgtcagcgaggcagtggccgccgcgcgggagctgattgcccaggggccggaagtggtattagttaagcatcttgcccgtgcgggtctgagtatggatcgttttgagatgctgctggtgacggccgaagaagcctggcatattagtcggccgctggtggatttcggcctgcgtcagccggtgggcgtcggcgatgtgaccagcggtctgctgttggtaaaattgctgcagggggcaagtctgcgcgatgcgctggaacacgtcaccgccgcggtgtacgagattatgctcgccaccaaaaatatgcaggaatacgaactgcaggtagtagcggcgcaggatcgcatcgccgtaccggagcactgcttcagcgccacccggctgtaa

SEQ ID NO: 210872 - DNA, 606 bp, Klebsiella pneumoniae
atgaaactgttctacaaacccggcgcctgttcccttgcctcgcatattgccctgcgcgaaagcggtctggattttaccctgcagagcgtggatctggcccagaaacggctggaaaacggggaagactatctgctgatcaacccgaaaggtcaggtgccggcgctgctgctggatgatgatatcctgctcactgagggcgtagccatcatgcagtacatcgcagaccaggtgccggatcgtcatctgctggcgccggtgggctcgattgcgcgctatcagactctcgaatggctgaactatgtggccaccgagctgcataaaagctttaccccgctgttccgcccggataccccggaggactataagcctgtcgcgcgggggctgcttgagaaaaagctgcaatacgttgatgcagcgctggcagacaaacagtggctgaccggccatcgcttcaccattgccgatggttatctgtttacggtgctgcgctgggcctatgctataaaactggatatggctgcctatggtcatatcggcagctggatgacgcaggtggcagcgcgtccggcggtggcggccgcactggcggctgaaggcttaaaataa

SEQ ID NO: 210873 - DNA, 1506 bp, Klebsiella pneumoniae
gtgtctactgcaaacaataaaccagcagaaagcgtgagtctgaacgctttcaaacaaccacgcgcgttctatctcattttctcgatcgagttgtgggagcgttttggttactacggcctgcaagggatcatggccgtttatctggtaaaacagctgggtatgtcggaagcggattccattactctgttctcctcctttagcgcgctggtttatggcctcgtcgccattggcggctggctgggtgataaagtgctgggtaccaagcgtgtcatcatgctgggcgctatcgtgctggcgattggctatgcgctggtggcctggtccggtcatgacgccgctatcgtctatatgggtatggcgaccatcgccgtcggtaacggcctgtttaaagccaacccgtcctccctgctttctacctgctatgacaaaaacgacccacgtctggacggtgcatttaccatgtactacatgtccatcaacatcggttcgttcttctctatgctggcaaccccgtggctggccgcacgttttggctggagcgtagcgtttgccctcagcgtggtggggatggtgatcaccattattaacttcgccttctgtcagaaatgggttaaacagtacggctctaaaccggactttgccccggtacacatgggtaaactgctggcgaccatcgctggcgtggtggtgctggtcgctatcgccacctggctgctgcataaccagggtatcgcacgtatggtgctgggcgtcgtcgcactgggtatcgtcgtgattttcgccaaagaaaccataggcctgaaaggcgctccgcgtcgtaaaatgatcgtcgctttcctgctgatggtagaagcgattgtcttcttcgtgttgtacagccagatgccgacctcgctgaacttcttcgccatccgtaacgtggagcactcgatcctcggtctcgcctttgaaccggaacagtatcaggcgctgaacccgttctggatcatgattggtagcccgattctggccgccatctacaacaagatgggcgaccgcctgccgatgccgcacaaatttgctatcggtatggtactgtgctctggcgcattcctcgtcctgcctttaggggcgaagttcgccagcgacgccggtatcgtctcggtcaactggctgattctgagctacgcgctgcagtctatcggtgaactgatgatttccggcctcggcctggcgatggtcgctcagctggttcctcagcgtctgatgggcttcatcatgggcagctggttcctcaccacggcaggcgcggcgatcatcgccgggaaaatcgctaacctgatggcagtcccggagaatgtcaccgatccgctggtgtcgctggaagtgtacggtcacgtattcctgcagattggtatcgtcaccgcggttatcgccgccctgatgctgctgaccgcgccgaaactgaatcgtatgactcaggacgacagcgcggacattaaagcacgcgaaaccgcggctgcctga

SEQ ID NO: 210874 - DNA, 258 bp, Klebsiella pneumoniae
atgttatacagagttaaattttaccgtttcgatatcgttggtatttttatctttcgggttcgccggtttgccgggaaaaggcgatatattctactgatctggcgtaagcatagtgatatggtccattatcttaaaaaatcatgggtcattatcctgacaatctttactcatccgttgtattgcctgacatttatttccattccagtaacattcaatcaacataaagttgcgagcatgatctggatcacaaatgcatag

SEQ ID NO: 210875 - DNA, 636 bp, Klebsiella pneumoniae
atgaacaaagccaaacgcctggctatccttaccaggctgcgggaaaacgatccccaccccactaccgaactgcatttcagttcgccattcgagctgctgattgccgtcctgctttctgcacaggccaccgacgtaagcgtcaacaaagcgacagccaaactctatccggtggccaatacgcccgcagcgatgctggccctgggggtggatggggtaaaatcgtatatcaagactatcggcctgtttaacagcaaagcggaaaacgtcatcaaaacctgccgcatcctgttggagcagcacaatggcgaggtgccggaagacagagcggcgctggaggcgctgcccggcgtgggccgtaaaaccgccaacgtggtgctgaataccgcctttggctggccgaccatcgccgtggacacgcacatcttccgcgtctgcaatcggacgcagttcgcccctggcaagaacgttgagcaggtggaagagaagcttctaaaggtggtccccgccgagtttaaggtcgactgtcatcactggctgatcctgcatggacgttatacctgcattgcccgcaagccgcgctgcggctcctgcctgattgaagatctttgcgaatacaaagataaagtctacgcctga

SEQ ID NO: 210876 - DNA, 699 bp, Klebsiella pneumoniae; identical to SEQ ID NO: 138632

SEQ ID NO: 210877 - DNA, 624 bp, Klebsiella pneumoniae
atgatgttaaaaacgatgcgtaaacacggcgtcacgctggcgctgtttgccgccggttccaccgggctgacggcggcgatcaatgagctgaccaaaagcaccatcgaccagcaggcggccctgcagcaaaaggcgttattcgaccaggttttacctgccgaccgctataataacgatctgcttaagagctgctatctggtcagcgccccggcgctgggcaaaggccagcataaagtgtggatcgccaaaaataacgatcgaccgatcggcgcggtgatggaagccaccgcgccggacggctactccggagcaatacagctgctggttgccgccgattttagcggcacggtcctcggcacccgcgtaactgagcatcatgaaacgccgggcctgggtgataaaatcgaacttcgcctgtcggactggattacccattttgccgggaaagtcatccacggccagggcgatagccactgggcggtcaaaaaggatggcggcgattttgaccagttcaccggcgccaccatcaccccccgggcggtggtcaatgccgttaagcgcgcaggcttatatgcacaaacgctgcctgcgcaacttcctgaattcaccgcctgtggagaataa

SEQ ID NO: 210878 - DNA, 1053 bp, Klebsiella pneumoniae
atggttttcagaatcgcaagctccccctatacccataaccagcggcagacctcgcgtattatgctgctggtgctgctcgccgctgtgcctggcattgtggtccagacctggtttttcggctggggcaccgtactgcagattgtcctcgccgccctgacggcctgggcgaccgaagccgctattctcaaactgcgtaaacagcctgttgctgccacgctgaaagataattccgccctgctcaccggcctgctgctggcggtgagtattccgccactggccccgtggtggatggtggtgctcggcactgcctttgccgtagtcatcgccaagcagttgtacggaggcctgggccataaccccttcaacccggcaatgatcggctatgtcgtgctgctgatttcgttcccggtgcagatgacctcctggctgccttcctatgagatagccgcccatatcccggcattcagcgacgcgctgcagatgatcttcaccggtcataccgccgccggaggcgacatggccagtctgcggctgggtatcgacggcgtcagccaggccaccccgctggatacctttaaaacctccctgcatgccggacatagcgttcagcaggtgctgcaattgccggtctacggcggcgtgctggcaggtttgggctggcagtgggtgaatatcgcctggctggcaggcggccttttcctgctgtggcagaaggcgatccgctggcatatcccggtcagcttccttgttagcctcggcctgtgcgccaccctcggctggattttttcgccgcagagcctggcctcaccgcagatgcatttgctctccggggcgaccatgcttggcgccttctttatcctgaccgatccggtgacggcctcaacaaccaaccgcggccgtctgatctttggcgccctcgctggcctgctggtctggctcatccgcagcttcggtggttatccggacggcgtggcgtttgccgttctgctggcgaatattaccgtgccgctgatcgattactacacgcgcccgcgcgtatatggccaccgttga

SEQ ID NO: 210879 - DNA, 1956 bp, Klebsiella pneumoniae
atgtttaagctattttccgctttccgaaaagacaaggtctgggatttcaacggcggtattcacccgcctgaaatgaaaacccagtctaacggcaccccgctgcgtcaggtttccctgccgcagcgctttgttatcccgttgaagcagcacattggcgccgagggcgaactgtgcgttaaagtgggcgaccgggtgctgcgcggccagccgctgacccgcggctggggaagaatgctgcccgttcacgccccgacctccggcaccattgccgccatcgctccgcacactaccgcgcacccgtcggcgctggcggagatgagcgtgatcattgacgccgacggcgaagaccgctggatcgagcgcgatggctggagcgactatcagacccgcacgcgtgaagcgctgatcgagcgtatccaccagtttggcgttgctggcctcggcggcgcaggcttccccaccggcagtaaactgcgcggtggcggagataaaattaaaacgctgatcattaacgccgccgagtgcgagccctatatcacggcggatgaccgcctgatgcaggactgcgcggcgcagattgtcgagggtatccgcatcctcgctcatatactgcagcctgaagaagtgctgatcggcattgaagacaataagccgcaggccatctcaatgctgcgggcggtgctctgcgacgcccatggcatttcgctgcgcgtgatccccaccaaatatccctccggtggcgccaagcagctcacccaaattcttaccggcaaacaggtaccgcacggcggtcgttcatcggacattggcgtgctgatgcagaacgtcggtacggcttatgcggtgaaacgcgcggtgattgacggtgagccgttaaccgagcgcgtggtcaccctcaccggcgaagcggtaaccagaccgggcaatgtctgggcgcgtcttggcacgccggtgcgccatctattgaacgatgccggtttctgccccagcgccgagccaatggtgatcatgggcggcccgctgatgggctttaccctgccgtggctcgacgtcccggtggtgaagatcaccaactgtttgctggcgccttccgccagcgagatgggcgaaccgcaggaagagaaaggctgcattcgctgcagcgcctgcgctgacgcctgcccggccgatctgctgccgcagcagctgtactggttcagcaaaggtcagcagcacgataaagccactgcccataatctggcggactgcatcgagtgcggcgcctgcgcgtgggtatgtccaagtaatattccgctggtgcagtacttccgtcaggaaaaggccgagatcgcggcgattcgtcaggaagagcagcgcgctgcggaagccaaagcccgattcgaggcccgacaggcgcgcctggagcgtgagaaagccgcgcgcgccgagcggcataaaaaagccgccgttcagcctgccgccaaagatcaggaggcgattagcgccgccctggcccgggtacgggataaacagcgcgatgccgcgcagccgatcgtgatccaggccggcgccaaacctgacaacagcgaggcgattgccgcccgcgaagcgcgtaaggctgaggcccgggcgcgcaaagcgcagcagcaggccgcgccgatggtagccccggccgtcgaaccggtcgacccgcgcaaggcggcggtggaagccgctatcgcccgcgccaaagcgcgtaaagccgaacagcaggccgcgccggtggaagccccggccgtcgaaccggtcgacccgcgcaaggcggcggtggaagccgccatcgcccgcgccaaagcgcgtaaagccgaacagcaggccgcacaacaggatctcgcgtcagccgcagccaatgacgacccgcgcaaagcggccgtcgccgcggctatcgcccgcgttcaggcgcgtaaagcaacacagcaggcagttaacgaggaataa

SEQ ID NO: 210880 - DNA, 579 bp, Klebsiella pneumoniae
atgagcgcagtctggatagccgtgatcgccatcagcctgttagggctgattttcggcttaatactgggatacgcctcgcgtcgtttcgcggtgcaggacgacccggtggtggaaaaaattgatgagctattgccgcagagccagtgtgggcagtgcgggtaccctgggtgtcgcccctatgcggaagcagtcggcgtacagggtgagaaaataaaccgctgcgcgccgggtggcgaagcggtgatgttaaaaatcgccgccttgctgaacgtcgacccgcagcctgtcgacggcgacgcacaggaagcggagccggcccgcatgctcgcggtaattgacgagccgaactgcattggctgtaccaagtgtatccaggcctgtccggtggatgccatcgttggggcgacccgcgccatgcataccgtgatgagcgacctgtgcaccggctgcaatttgtgcgtcgccccctgcccgacccagtgcatttcactcgttccggtggccaccaccccggagacttggaaatgggatctgcatacgatcccggtgcgaaatattcctgtggaacaacatgtttaa

SEQ ID NO: 210881 - DNA, 582 bp, Klebsiella pneumoniae
atggctgattatttactgctctttattggtacagtcctggtcaataacttcgttctggtgaagtttcttggtctgtgcccgtttatgggggtttccaaaaagctggaaaccgcaatggggatggggctcgctaccaccttcgtgatgaccctggcctctatttgcgcctggctgattgatacctggatccttatcccgctaaatttggtttatttgcgtaccctggcctttattctggttatcgccgtggtggttcagtttactgagatggtggtgcgtaaaaccagcccggcgctctatcgcctgctggggatctttctaccgctgatcaccaccaactgtgccgtactcggggtagcgctgctgaatattaatctgggccacaatttcctgcagtcggcgctgtacggctttgccgccgccgtcggcttctcgctggtaatggtgctgttcgcggcgatccgtgaacggctggtggtggccgatgtccccgcgccgtttcgcggtaatgccatcgcgctgattaccgccggtttaatgtctctggccttcatgggctttagtggtttggtgaagttgtaa

SEQ ID NO: 210882 - DNA, 441 bp, Klebsiella pneumoniae; identical to SEQ ID NO: 135261

SEQ ID NO: 210883 - DNA, 216 bp, Klebsiella pneumoniae
atgaccgtgctggactacttattaaaatttcgcaaaatcagttcgctggaaagccttgaaaaactatttgatcaccttaactactccctgactgacacccaggagatcgtgaatatgtatcgcgccgccgatcatcgtcgcgcagagctggtctccggtggtaaattgttcgatgtgggccaggttcctaaatccgtttggcgattcgtgcagtaa

SEQ ID NO: 210884 - DNA, 1371 bp, Klebsiella pneumoniae
atggccgcttttccgcacaatttcttatggggtgccgctaccgcagcgtatcaggttgagggaggacacgacgccgacggtaaaggaccgtcaatctgggatatctactctcatctgccgggtaccacctttgaaggcaccaccggcgatattgccgtcgaccactatcaccgttttcgcgaagacgtggcgttaatggccgagatgggcctgcaaagctatcgattctccatctcctggccccgcctgctgcccgccgggcgcggtaaggtgaatgaagcgggagtcctgttttacagcgatctgatcgacgaactgctggcgcacaatattgagccgatgatcaccctctatcactgggatctgccgcaggccctgcaggatgagggcggctgggaagcgcgcactaccgccgaggccttcgccgagtacgcccgcctgtgctatgcgcgctttggttcacgggtgaagctgtgggctaccttcaacgaaaccattgtcttcattgggcacggctacattaacggcctccatcccccggcggtccgcgatccggcgcgtgccattcaggcctgccaccacgtgtttatcgcccatgcgctggcggtgaaggcctttcgcgagatggctgtggccggcgagattggcttcgtcaacgtactgcaaccgcataccccgctcaccgacagcgaggcggacattaaggccaccgaactggctgacgccatccatactcactggctgtacgatccggtgctgaaaggcacctatcctgccgacctgctggcgcagacccaggcgctgtggggggtacctcgctttgctccaggcgacgacgcgctgctccgtgacaaccgctgcgactttatcggtctgaattactatcgccgggaaacggtatctgcccagccgcctgagatcgctaccggcggcgagcctggcgtggagggattattctatttcgtgcgtaatccccagagtacatataccgaatggggctgggaaatctggccgcaggggctaactgacggcattatgatgattaaggcgcgctatggcgatattccgatatatatcaccgagaatggcctcggcgcgaaggacccgattattgacggggaagtggtcgacgacccgcggattgattatctcagcagccatattggcgccctcgaaaaagcgctggcgctgggggcagatgtgcgcggctattacccctggtcatttatcgatctgctgagttggctcaacggctatcaaaagcaatatggttttgtctatgtcgatcaccagcaaaatctggcgcggaaacgaaagaagagtttttattggtacaaatctgttattgccagtcacggcgaacagcgttaa

SEQ ID NO: 210885 - DNA, 1041 bp, Klebsiella pneumoniae
atgagcgatgcgatccgggtggggctggtggggttcggttacgccagcaaaacgtttcatgcgccgttgatcggcggcacgccgggtatggcgctgaaggcggtcgccagcagcgacgccgataaggtccatgccgattggcctggcgtgaaggtaatgagtgcgccgggggatctgctggacgacccggatatcgatctggtggtcatcgccaccccgaacgacacccactttccgctggcgaaagcggcgctggaggcgggaaagcatgttgtggtggataagccctttaccgtgacactgtcacaagctcgcgagctggaaagcctggcgaagcactgcggtcggatactttcggtgtttcataaccggcgatgggacagtgatttcttaacggtcagcgcgttgatcaacgaaggtcagctgggggaggtgtgttacttcgagtcgcatttcgatcgcttccgaccacaggtgcgccagcgctggcgtgagcaggcgggtcctggcagcggcatatggtatgacctcgcgccgcatctgctcgaccaggtcgtggtgctgtttggcctgccggtaagcatcacggtggacctcgcgcagcttcggcccggcgcgcaatccaccgactattttcacgccgtgctggcctatccgcagcggcgggtagtactgcatggtacgttactcgccgccgcggagagcgcgcgctttatcgtccacggctcgcgggccagctatattaagtacggccttgacccgcaggaggagcggctaaaaaacggtgaacggctgccgcaggaggactggggatatgatatgcgcgacggtaccctgacccgcgctgaaggggatgaacgtagtcaggagaaatggctgacgctaccgggtaattatcccgcctactatgccgctatccgcgacgcgcttaacggcgtaggggaaaacccggtcccggccagcgaggcgattcagataatgaccctgattgagttgggtatcgagtcggccagacatcgcgccacgctcagcctggtctga

SEQ ID NO: 210886 - DNA, 1002 bp, Klebsiella pneumoniae
atgattgattcctcattgccattaaccgacattcatcgtcatcttgacggtaacatccgggcccaaaccatcctcgatcttggccgcgaatttaatatcgctcttcccgcaaccaccctcgacacgctgcgtccccacgtccaggtcaccagccttgagcccgatctggttagtttcctcgccaagctcgactggggggtaaaggtcctggcctcgctggaagcctgtcgccgcgtggcgtatgagaacgtcgaagacgcggcgcgaaatggcctgcactacgttgagctacgcttctctccccgctatatggcgatgacccaccggctgccggtcgacggcgtggtagaggcggtaattgccggggttcaagagggatgccgcgatttccaggtcgacgcccggctgatcggtattctgagccgcaccttcggcgaagccgcctgtcaggaagagctggcggcgctgctcgcccaccgcgagggcatcactgccctcgacctcgccggcgatgagctaggcttcccgggtacgttgttccgcaaccattttaaccaggcccgcgacgccgggtggcatatcaccgtccacgcgggcgaagcggccggcccggaaagtatctggcaggccattcgtgagctgggcgcggagcgcatcggccatggggttaaagcggtagaggatccagccctgatggactacctggccgagcaccgcatcgggattgaatcctgcctgacctcgaacgtgcaaaccagcaccgtggcctccctggcccagcatccgctgaagcagttccttgagcacggcgtgctggcgagcctcaacactgacgatccggcggtccagggtgtggacatcattcacgagtataccgtggcggcgccggcggcagggctgagccgggagcagatccgtcaggcgcagatcaacggcctgaccctggcgttcctcggcgaacaggaaaaagccgccctcattcagcgggttgccaaaggctga

SEQ ID NO: 210887 - DNA, 1218 bp, Klebsiella pneumoniae
atgaaatgcaaggcaagtagatgtaccggccaaaggatccaaactgcgtcagtccctgacacgatgctgaccacagggataacggcgttgttttcactaacctgcgcgctggcagtagccaatgtttattcagcacagcctttactcgactcgatggcggtcagcctgaaggtgtcgccaggcatgattggcagcgtcatcaccgctacgcaggcgggctatgccattggcctgctgttcctggttccgctcggggactggttgaaccgtaaatacgtggtgatgagtcaactgttgctttcagtagcggcgttagtcgcggcagggttatcccccaatatagcaacgctgcttggcgccatgctgatcgtcggcctgatggccgtggtggtgcaggtgctggtggcctgggtggcaatactggcgacgccgcagaaacgaggccaggcggtgggtaccctgaccagcggcattgtttcaggcatcctgttatctcggtttatctcaggcgcgatagccgatatcgccggctggcgagccgtgtatctcacggctgcctgtctgatgttgatgattgccgggatcgtctggaaaatcatgccttcgcccccgcagcagccgcagccgcaaaagccgacttacctttccttattgaagtccgtgtttcagctgtacctcaccgagccgcaactgagaaagcgcgggatcctggcgctatttatcttcgccgctttcagcatgctatggacgaccatggtcatgccgctcaccgccctttccctctcgcacacccagacggggatgtttggcttagccggcttcgctggcatgctggccgccgccagagcgggcaagtgggctgaccagggatgggctcagcgcactaccggcctggcgttggcgctgctgaccatctcatggcttcctatcggctatgccgaaacctctctgctttggctgatagctggcgtcattgcgctggactttgcggtacaggccgttcatgtctccagccagagcctgatcattgccgccaggcctgcagcggcaagccgcctggttggggcttacatgtgtttttattcgctgggcagcgcggcaggggctatcgttgccacacagctttattcccactggggatggcaggcggtctgccttgcgggcgccgcggtcagcgcgtgtgcatttctgatctggtcaggatcgcgtcaatcatga

SEQ ID NO: 210888 - DNA, 465 bp, Klebsiella pneumoniae
atggcaaagcaggaatcacttagaaccagtgaatgtccggtggcgagaacgttggaatcaattggtgaacgctggtgcctgatgattatccgcgaagcatttgacgatgtgcggagattcagcgagtttcaaaaaaatttggggctggccaaaaatatccttgcctcgcggctgaagcatctggttgatatcggtattttcgagattttaccggcatcggatggcagcgcatacaaggaatatgtcctgactgaaaaggggcgctccgtgtttcccattgttgttgcgctgcggcaatggggagagcgttatatgtttgagcaaggggaaacctattcggtcctgctggataacgcgcacggccagccccttcagtatctggatgtgcgttccgctcagggggataaactgcaaccaggcgactgtcatcgccggcgcattgtgtcagatacccgcgccgaataa

SEQ ID NO: 210889 - DNA, 186 bp, Klebsiella pneumoniae
gtggagagcgtaatccataacaatattgagggttttctgctgttgttattaagcatgtggccgattctgctggtggtattcattggcgtcgcaatttcattctataccatgctgttacgcaagacggcgctggcctgcctgcttttcgccctcgccatcggcgccgcaggctggagtctcgcttag

SEQ ID NO: 210890 - DNA, 363 bp, Klebsiella pneumoniae
atgaaggaaatcggcttaccgttattgcttctgaccgcgctggccagtccggcttttgctgcagactgtcagccaaacggcattggcggctctttttgcattaacgatgacggtacgactaccgacacggtgcctaacgaagtcaacggcatggatacatactcgaataatggcggctataccagttccctgcccgatcggtcaggggcggatgaagcactggaaggttcatcgctgtcgacgcagcaagtcgtcggcagcggacagagcgacagtgcgctggcgggtcgcgactggcattcgcccgccaatttgaatgatggcgccgccacctccagtatgagcctgctggataaaccctga

SEQ ID NO: 210891 - DNA, 528 bp, Klebsiella pneumoniae
atgcgcgataaatattccggcctgcagattgggattcattggctggtttttttgctggtagtagtagcctatgcggcgatggagctgcgcgggttttttccccgcagtgaacggccattgattaatatggtgcatgtttcctgcgggatcaccattttcgtgctgatggtggcgcgtctgctggtgcggctgaaatcgccggcgccgccgatcgtaccgaaaccatcgccgatgatgaccggtttcgcccatcttggtcacctggcgatctatttgctgttcattgccttgccgttgatcggcatggtgatgatgtactggcgcggtaacccctggtatgcctttggtctgaccatgccgtatgccccgcagagcgattttgagcgggtggataccctgaaggcgatccatgaatggttggccaatgccgggtactttgtgattggcctgcatgctctcgccgcgctgctccatcattactggtggaaggataatactctgctgcgaatgatgcctcgtaagcgctaa

SEQ ID NO: 210892 - DNA, 276 bp, Klebsiella pneumoniae; identical to SEQ ID NO: 135271

SEQ ID NO: 210893 - DNA, 1119 bp, Klebsiella pneumoniae
atgaaatcacgcgcagcagtggccttcggccccggtcagccgttaaaaatcgttgagatcgacgtcgcgccgccgaaaaaaggcgaagttctggtgaaaatcacccacaccggggtgtgtcataccgatgccttcaccctctccggtgacgatccggaaggtgtcttcccggcggtgctgggccatgagggcggcgggattgtcgtggaagtaggcgagggcgtcaccagccttaagccgggcgatcacgtcattccgctgtataccgccgaatgtggcgagtgcaaattctgtaagtcgggtaaaaccaacctctgtcaggcggtgcgtgccacccagggtaaaggactgatgccggacggcaccactcgtttctcgtacaatggcgaaccgatctatcactatatgggcaccagcactttcagcgaatatacggtttgcgccgagatttcgctggcgaaagtcaatccgcaggcgcctttggataaagtgtgcctgctgggctgcggcgtaaccaccggtatcggcgcggtgcataacacggcgaaggtcaaggctggggatagcgtcgcggtctttggtctgggcggcattggtctggcggtgatccagggcgcggtgcaggcgcaggccgggcgcattctggcggttgataccaacccggataaattcactctcgctaaagagatgggcgcgaccgattttatcaatccgaacgactacgataagccgattcaggatgtgattgttgagctgaccgacggcggggtggatttcagcttcgagtgcatcggcaatgtaaatgtgatgcgcgcggcgctggagtgctgccataaaggctggggtgagagcgtgatcatcggtgtagccggcgccgggcaggagatcaagacccgtccgttccagctggtgaccggccgcgtgtggcgcggttccgccttcggcggcgtaaaagggcgcagtcagctgccgggcatggtggaagacgccatggcgggtaaaattcgcctcgatccgtttattacccatcgcctgccgctggagcagattaacgaggcctttgatctgatgcatgaaggtaaatcgattcgcaccgtgatccactttggcgaccagtaa

SEQ ID NO: 210894 - DNA, 2373 bp, Klebsiella pneumoniae
atggcaactggcaatgcgccgcgcggattcccccggatcctgcagtggcttctcgccggactgatgctcatcatcggtctggctgtgggtattcttggggcaaaactggccctcgtcggcggtacactgtacttcgcgctgatgggcgtggtcatggtcatcgcggcggtgttgattttccgcaaccgccgcggcggtattctgttatacgccgtggcgtttatcgcctcggtgatctgggcgattagtgacgctggctggaactactggccgctcttctcgcgcctgtttgcgctcggcgtactggccttcctggccgccctggtctggcctttcctcgccagcccaccggcgaaaaaaggcccggcctatggcgtcgccgccgttctcgccgtggcgctggcggtgagctttggctggatgttcaaatccgcaccgctggtcagcgcgactgaagcggtaccagtcaagcccgtcgcgccaggcgaacagcagaaaaactgggcgcactggggtaacaccacccacggcgaccgtttcgccgccctcgaccaaatcaacaaacaaaacgtcaaccagctgcaggttgcctgggtagcgcatactggcgatatcccgcagagcaacggctccggcgcggaagatcagaacaccccgctgcagattggcgatactctctacgtctgtaccccttacagtaaagtgctggcgctggatgtggacagcggaaaagagaaatggcgctatgactccaaatcctcttcacccaactggcagcgctgccgcggcttagggtattacgcagatagccaggcgcaaaccgcgcaagcgtcaggcacgcagccggccgcctgttcccgtcgtctgttcctgccgaccatcgacgcccgcctgatcgccattgatgccgataccggcaaactgtgcgaaagcttcggcgatcgcggtattgtcgacctcagcgtcggcatgggtgaagtgaaagcgggttactatcagcagacctccaccccgctggtggcgggcaatgtggtggtggtgggcggccgcgtcgcggataactactccaccggcgaaccgccgggcgtggtccgcgcgtttgatgtccacaccggcaaactggcgtgggcgtgggatccgggcaatccagcgctgaccggtgttccgccggaaggccagacctacacgcgcggtacgccaaacgtctggtcggcgatgtcctatgacgcgaagctgaatctgatctatctgcccaccggcaacgccacgccagatttctttggcggcgaacgtaccgcgctggacgataaatacagctcctctatcgtggccgtggatgccaccaccggccaggtgcgctggcacttccagaccacacaccacgatctgtgggactttgacctgccgtctcagccgctgctgtacgatctgcctgacggcaagggcggcaccaccccggtgctggtgcagaccagcaagcagggcatgatctttatgctcaaccgcgagaccggcgagccggtggccaaagtggaagagcgtccggtgccggcgggcaacgtcaaaggtgaacgctactcgccgacgcaaccttactcggtagggatgccgatgatcggcaaccagacgttgaccgagtccgatatgtggggagcgacaccgatcgacctgctgctgtgccgtattcagttcaaagagatgcgccatcagggcgtctttaccccgccaggtgaagatcgttccctgcagttcccgggctcgctcggcggcatgaactggggcagtgtttcgctggatccaaacaacagcctgatgtttgtcaacgatatgcgtctgggcctggccaactatatggtgccgcgcgcgaaggtggcgaaagacgccagcgggatcgagatgggcatcgtgccgatggagggcacgccgtttggcgcgatgcgcgaacgtttcctgtcgccgctgggcattccgtgccagaagccgccgttcggcaccatgttcgcggtagatctgaaaaccgggaaactggtgtggcaggtgccagttggcaccgtagaagacaccgggccgctgggcatacgtatgcacatgccaattccaatcggcatgccgacccttggcgcatcgctggcaacgcagtccggactgctgttcttcgccggcacccaggatttctacctgcgcgcctttgataccgcgaacggcaaagagatctggaaatcgcgtctgccggtcggcagccagtccggcccgatgacctacgtctcaccgaaaaccggtaagcagtacatcattatcaatgccggcggcgcccgccagtcaccggatcgcggcgattacatcatcgcctacgcgctcccagaccatcactga

SEQ ID NO: 210895 - DNA, 924 bp, Klebsiella pneumoniae
atggaaaaaaatggtctcttcagtcagcgcattcgcttgcgccatctacacaccttcgtggccgtcgctcaacagggaacgctggggcgcgcggctgaaacattaaatctgagccagccagcactctcgaaaacgcttaacgagctagaacagctgaccggtacccggctgttcgagcggggtcgtcttggggcgcagctaaccctggtcggcgaacagtttctgacgcatgccgttaaggtgcttgacgcccttaattcggccggccaggcgctgaaccgcaaagagggcctgaataacgatatcgtgcgcatcggcgcgctgcccaccgccgcgctggggatcctgccgacggtgatcggccagtttcacaagcagcaaaaagatatcacgctgcaggtcgccactatgaacaacaccatgctgctcgccggcttaaaatccggggagatcgacatcggcattggtcgtatgtccgacccggagctgatgagcgggctgcattacgaactgttgttccttgaatccctgaagctggtggttcgcccgggacatcccctgcttcaggagacggtgacccttagtcgggtgatggagtggccggtggtggtctcacctaaaggcaccgtgccgcggcaaaacgccgaagcgctgctccagagccagggctgtaagatgcccgccggctgcatcgagaccctctccgcctccctgtcgcgccagctgacggtggattttgactatgtctggtttgtcccttccggggcggtaaaagacgatcttcgccgtggcgtgctaaccgccctgccgatcgccacccagggcgccggagagcccatcggcattttaacccgcgtcgatgcgacactgactccgggtacgcagacgctgctcagcgctatccgtaagtccatgcctgcctga

SEQ ID NO: 210896 - DNA, 621 bp, Klebsiella pneumoniae
atgaaagagtatctgcctgaaaccgcctcgcagacggcgggaccctatgttcatatcggcctggcgccggacgccgcaggctttcatatttttgagaaaaattttggcccggtcctcactaccgctgataccgccggggagcgcatcaccattgaaggccgggttatcgacggctccgggacgccggtccgcgatgtgctgctggagatctggcaggccaacgccgcgggtcgctataaccatcctgacgatcgtcaacagcagaaagccgtcgacccggccttccgcggctgggggcgtacctgctctgatttcacctccggcatttggcgctttgaaaccatcaagccgggcccggtggccggtcgcgatggccggctgatggcgccgcacgtcaacctgtgggtggtggcgcgggggatcaatattggcctgaatacgcggatgtactttgccgatgaacacgaggctaacgccagcgacccggtgctgaatctcatcgagtgggaggtgaggcgcaaaaccttaatcgccgagcgcgaggttcgcggtacggaagtggtctatcgttttgacattcatctgcagggcgagaacgaaaccgtctttttcgatatttag

SEQ ID NO: 210897 - DNA, 741 bp, Klebsiella pneumoniae
atgaacgacaaatggtccccacgtgaggttgtccatcgcgattacagtagccacccgcccgcttacgcgccgggctataaaaccagcgtcctgcgctcgccaaaaaacgccctcatctctctgcagaactcgctgtcagagatcaccggcccggtatttagccgcgacgacctcggccctctggataatgacctaatcctgaactatgccaaagaaggcctgcctatcggcgagcggatcatcgtccacggttacgtgcgcgatggattcggccgaccgatgaaaaatacgctggtggaagtctggcaagccaatgctggcggtcgctaccggcataaaaaagatcagtatctggcgccgattgacccgaactttggcggctgcggccgggtgcttaccgatgaaaacggctattactgttttcgcaccatcaaacccggcccctacccctggcgcaaccaggccagcgactggcgtccggcgcatatccatttttctctctcgggcgacgcctgggcccagcgcctgatcacccagatgtattttgaaggcgacccgctgattaagcagtgcccgatcgtcaggactattaataatgacgacgccgtgcgcacgctgatcgccgagctggacatgcacgccgccgtaccgctggattgtctggcctaccgcttcgaccttgttctgcgcggccaccgcgccacgctgtttgaaaatcgcactcagggggccgcccgatga

SEQ ID NO: 210898 - DNA, 1344 bp, Klebsiella pneumoniae
atggcgaacaccatcacggctgatgagattcgggagcacttttcacaggccatgtcggccatgtaccagcaggaagttccgcagtacggaacgctgctggagctggtggctgacgtcaacctggcggtactggaaaataatccgcagctgcatgaacagctcgctaacgctgacgagctggcgcgcttaaacgtggagcgccacggcgcgattcgcgtgggcacagcggaagaactggcgacgctccgtcgcatgtttgccatcatggggatgtatcccgttagctattacgatctctcgcaggccggcgtgccggtccactccacggcgtttcgtcccatcgacgatgccgcgctggcgcgcaatccatttcggattttcacctcgctgctgcgcctggaactgattgaaaatcgcgccctgcgcgagcgggccgaggcgatcctcgcgcggcgcaaaatcttcaccccccgctgcctggcgctgattgcgcagtatgaagcagagggcgaattcacctctgccgacgcgcgcgagtttgtccaggaggcgctggagacgttccgctggcaccggcaagccaccgtcgatgaggagacttaccatgctctgcatcgcgagcaccgcctgattgccgatgtggtctgttttccggggtgtcatatcaaccatctcacgccgcggacgctggatattgaccgcgtccagtccctgatgccggagtgcggtattgaacccaaagcgttgattgaagggccaccgcgccgggaggtcccgatcctcctgcggcagaccagctttaaggcgcttgaggagccggtgatgttcgccggagaacaccgaggcacccatagcgcccgctttggcgaaattgagcagcggggcgtggcgctgacgccgaaagggcgcgcgctgtacgatcggctgctgcaggcggcaggaaccgggaaagacaatctcagccaccagcagcatctacaggaggtgtttagcgaatttcccgacagcgaatttctgctccgtcagcaggggctggcctggtttcgctaccgcctgacgcccacgggtgaggcacatcgccaggcgtttcgcccgggcgacgatccgcagccgctgattgagcgcgggtgggtggtcgcccagccgattatttatgaagattttttaccggtcagcgcggcgggcatttttcagtccaatctgggcaacgaaacccaggcgcgcagccacgggaacgccagtcgcgaggcgtttgaggcagctctgggctgcccggtgcaggatgagtttgaactataccgacaggcggaggagcgcagcaaacgacgttgcggtctgctgtaa

SEQ ID NO: 210899 - DNA, 1506 bp, Klebsiella pneumoniae
atgcaacatccgtcgaaaccgttggcgaaaacccgtcagggaacgctggccgggagcgcagaacaggggattcatatctggcgcggcattccgtacgccgcgccgcccgtgggcccgctgcgctggcgcgcgccgcagccagccgcccgctggcagggggtacgtccagccgagaccttttccgccgccagctggcaggacattgactactgccgcgagctcggcggcggcgatcctggcgccttcagcgaagactgcttatatctcaacgtctgggccccggccagcgcagcgcagccgctgccggtgatggtctggctgcacggcggcgggtttaccatcggcgccggcagcctgccgccttacgatggcaaagcgcttgccagccgcgacgtggtggtggtgacagttaactaccggctgggccatctcggttttttcgcccatccggcgctggaagaagaggcgggcgaacgtctctataatttcgcgttgctcgatcagattgccgctctgcagtgggttcaggagaatatccacgccttcggcggggatgccgccaacgtcacgctgtttggcgaatccgccggggcgcgcagtgtgctgtcgctaatggcctccccgaaagcgaaagggctgtttcataaagcgattattcagagcgggtatacgctacccgatctgccgcgggaaaaagcgctggaaaaagggcgcctgctggcggaacacttcgccttaccgcaagccagcgctgaggaattgcgggcgatccccgcggaggccttctggtcgctcaccgcgccgctgaataccgggccagcgcctattgccggagacgcggtgctgccgcagccgatgctggagaccttctttgccggccgccagcatccgataccggtgatgatcggctccaatagcgatgaagccagcgtgatggccgtgttcggcgtcgatattgccgggcagatccagaagctgcgccgtgagcgccgtctggggctggggctgatcaaactcctctatcccggcgtgaagggcgatgaagcgctggggcgggaagtttgccgcgacatggccttcaccacccttggttatgtagtgatgcaggcgcaacagcgcgtgggtcagccgtgctggcgctactggtttgattatgtcgcggaagcggagcatgacgcctacccgcatggggcctggcatggcaacgaggtgccctacgtgtttgataacctgcggttgaccgacccggtgcggcagtacgccagcgaagcggatctggccttcgccgctcaggtcgctgactactgggcgcagtttgcccgcctcgccagcggcgagcagacgctttccggcgcggtgcgctggccggcgtgcctgcgcgggcgggatcgcctgttgcgcattggcttgcataagcgcgccgggtttaaagtggagaaccgctttatgcgcgccagactggcgctgtttcgccgggtgatgaagcatcacgtgacgctggaataa

SEQ ID NO: 210900 - DNA, 1089 bp, Klebsiella pneumoniae
atgcaagtgaaagcagccgtcacgctgggctaccagcagccttttgtcatcaaagacgtcgaggtcgccccgccggggaaggacgagatattagtgaaaattgtcgccaccggcgtctgccataccgacgccgtgatgcgcgacaaccccggggtggtgcctatgccggcgatcctcggccatgaaggcgccgggatcgttgccagcgtcggcgaggcggttagcggcatcagggtaggagaccacgtggtgctcagctacgccgcctgccaccactgcgaaaattgtttaagcaaccacccttcggcttgcgaagattttaatacgcttaattttggcggccgacgcgaggatggcaccaccccctaccggctgggagaccaggatctgtccctgttctttggccagtcgtctttcagccagtatgtggtcacccgcgccagcaacgcggtcgtggtcgacccggaggttgatctcaccctgctcggcccgctgggctgcggtatccagaccggtagcgggacggtgctcaaccgcctgaaaccggtggtcggcgaatcgctggtggtgtttggctgcggcgcggtggggctcagcgccatcatggcagcgaaattaaccggctgttcgcagattatcgcggtggatatccatgccagccgcctcgccctggcgggcgaactgggcgccacccatcagatcaacggcaaggaacaggatgccgtcgccgtgattaaacaaatcaccggtaaaggcgcccactacgcggtggaaacaaccggcgtctccgctatcgttctgcaggccgtacacgcggtgaaaccgctgggaacggtggcgattgtgggctttaccggagacatcacccttaacgtgcagaacgacctgatggcggagggaaaatcgctggtcggggtgatagaaggcgacgccgtgccggcgctgtttattccgctgttggtgcaactctataaacagggaaaattccctatcgataagcttatcgcccgctatccgttggccgatatcaaccaggccttcgccgattcggcgtccggcaaggtgatcaagccggtggtggtcatgtga

SEQ ID NO: 210901 - DNA, 1845 bp, Klebsiella pneumoniae
atgccctggctacacgccagaggaaatgaaaaaaacaggctgttcctctggacagggcttttttaccttttttctgctggcaacaattggattattaatcgtttttgtctagagtgggcggaaattatcacgcagcgtgatgacgcgttgcgaatcaattcacccgtgcagaaggacgctttctcaggcatgaaccgcagacgttttcttaaatcttccatggctgttgccgccgtatgcggaacgtcaggagtcgcttccttattcagtcaggccgcttttgccgaagacgcgggcattgccgacgggcaaacgcgtcgttttgattatgctgttctgcaggcgatggctcacgatctggcgcgccagccgtggggcggcgccccgcgcgatctgccgccgacgctcgccaatctcaccccgcaggcctataacagcatccagtacgatgccaaccactcgctgtggaacaatattgaagagcgtaagctggacatccagtttttccacgtcgggatggggttccgtcgccgcgtgcggatgttctctttagacgccagcacccagcaggcgcgcgagatccacttccgtccggagctgtttaagtacaatgacgccggtgtggatacccgtcagctggaaggacagtctgacctcggcttcgccgggttccgggtgtttaaagcgccggagctggcgcgccgcgatatcgtggcgttcctcggcgccagctacttccgcgcggtagacagcacctatcagtatggcctgtcggcccgcggtctggcggtggatacctttaccgataccccggaagagtttcccgactttacgtcgttctggttcgaaacggtcaaaggggacgccacggtgtttaccgtttacgcgctgctggacagcccgagcatcactggcgcctacaagttcaccatccactgccaggatacccaggttatcatggacgtggaaaaccacctgtacgcccgcaaggatatcaaacagctgggtatcgcgccgatgaccagtatgttcagctgcggcaataatgagcggcggatgtgcgacaccatccatccgcaaatccacgactccgatcggctgtcaatgtggttgggcaacggggaatgggtctgccggccgctgaataacccgcagaagctgcagttcaatgccttccaggacaagaacccgcgcggctttggtctgttgcagctggaccgtgatttctcccactaccaggatgtgatgggctggtataacaagcgtcccagcctgtgggttgagccgcgtaaccagtggggcaaaggggcggtcagcctgatggagatcccaactaccggcgaaacgctggataatatcgtctgcttctggcagccggaaaaggcggtgaaggcgggcgacgaactggacttccgctaccgtctttactggagcgcgcagccgccggtgagcactccgctggcgcgcgttctggccacccgcaccgggatggggggcttccccgaaggatgggcgccgggtgaacactacccggataagtgggcgcgtcgttttgccatcgactttgtcggcggcgatttgaaggcggccgcgccgcgcggtattgaaccggtgatcaccctctccagcggggaagcgaagcagattgagatcctctacgtcgagccgttcgatggctaccggatccttttcgactggtatccgaccaccgactcaaccgacccggtggagatgcgtctgttcctgcgctgtcagggagaagccatcagcgaaacctggctctatcagtatttcccgccggcagcagataaacgcaactacgttgacgatcggatcatgaaataa

SEQ ID NO: 210902 - DNA, 579 bp, Klebsiella pneumoniae
atgaccgcagatatcccagcagtacctgagtcgatcccggtaaccgacgcgctgacgctaatcgccattgatgagcgctacgttagcgacctgcaccagctggtggtcaaaaaccagcgctggctacagcagtcgctcagttggcccgccgaggtgcgcagcgaagacgagacccgacgtcatgtgcagggcaacgtgatgctgcatcagcgggattacgccaaaatgtttttgctgtttctcgataagcagctagtcggggtcctgtcgttcaatcagatcgagccgcagaataaaacggcctatattggctactggatcgatgaagagcaccaggggcaagggctgctttcccgttcattacaggcctttatccgccattatgccgccagcgggctggtgcgccggtttgtgatcaaatgccgggtggcgaacacccgcagcaaccaggtagcgttgcgcaacgggtttgttctggaaggctgtctccgacaagccgagtatctgaacggtagctatgacgatcagaatatctacgcccgcattattgaccgcgatgaggcattaaagcgcgcctaa

SEQ ID NO: 210903 - DNA, 981 bp, Klebsiella pneumoniae
atgcgtaaataccgtctcagcgaacagacccggcagtattgttatgaggaagagcatggcaaacaaagcgtcaccctgcgccagatcgtggcgcttattgatttcgctgacgttaaagcgggcagcgaaggcggctgggtggatgaggaatgcgctctcagccagcagggggagtgctggatctacgatgtcaacagcgtggtcttcgccggggcgcgcatccgcgacgacgcccgcttaaccgggttctgcgtggtcagccatgaggccaccatcggcggacaggcctgcattcacgccgcgcagatcagccatcacgcgcagatcagtgacaacgtcacggttacgcagagccaggtgcgcggttattgtcgccttgccgacgaggcgcgtcttctcccccactgccaggtgattgccgcgcgcgggttaaccgccgatcgcgacaaagtcctgcagatctatcagcgagccaccgtcagcgcctcgcgcattctccaccaggcgcaaatctacggcgatgccttcgttgagcatgcgtttgtcgaacatcgggcggaagtgtttgaccaggcaagacttgaagggaacgaagaaaacgacgtctgggtatgcgataacgcccgggtatacgggcacgcgcgcctgatcgccggtcgcggagaggatgccattcccaccgtgcgctacagttcgcaggtggcagagaatgcggtgattgaaggcaactgcctgctgaagcatcgggcgatggtcggcggcgaggcgcagctgcgaggtggtccgattctgctcgacgacgatgtgctgatccaggggcggacagtcatcaccggcgatgtgatcgttgagcaccaggtctccatcaatgacgaggtgcagattgccgcacaggagggagaggccattcatctgcgcggcccgaaaacgcttgacggccagcagcacatcacccgcacgccgctgttaggcgcgctttaa

SEQ ID NO: 210904 - DNA, 1005 bp, Klebsiella pneumoniae
atgaataaaacgcaaacgccgcggcaggtgctaaacctgccggcgggttattttggcatggtgctcggcaccatcggaatgggcttcgcctggcgttacgccagcaccctctggccggtcagccgcagcattggtgatgggctggtgacgctggcgatggcgatgtgggtcctgctcagcatggcgtttatcagccgggcgatccgctttccggcgagcgtgctgcgggagatgcgtcatccggtgagcagcagcttcgtcagcctgtttccggccaccacgctgttggtggcgattggtttggctccctggtgccggccgctggcgatcgggctgtttgtgccgggcgtggcgctgcagctcgcctatgccgcctggcaaagcggtgggctatggcgggggaaccatcctcgcgaggccaccacgccggggttgtatctgccgacagtagccaataattttatcagcgcgatggcctgcggcgcgctgggattttccgatgccggactggtgttcctcggcgccggggtcttctcctggctgagcctcgagccggcgatcctccagcgtctgcgcagcgcaggcgagctgccgacgccgctgcgcacctcgctggggatccagctggcgcctgcgctggtggcctgcagcgcctggctcagcgtcaacggcggggaggccgataccttcgctaagctgctgtttggttacggcctgctgcagctgctgtttatgctccgtctgatgccctggtatcttcgtcagccgttcaatgcttctttctggagcttctcgttcggcatttccgcgctggccaccaccggtctgcatctcggccaggccaggggagacggcttttttcatcatctggcgatgccgctatttatttttagcaatctggttgtcggcctgctgctgctgcgtacagcgttgctgttggtcagcgggaaactgttgctccaggtcgaccgggaaacactcctgaataagaaggaaggatcatga

SEQ ID NO: 210905 - DNA, 597 bp, Klebsiella pneumoniae
atgacaaagcgtgacgcggattattttagtcaaaaatacagcctgacccgcacccattccgaggtgctgcatgccgcgacgattgtgccgccggggcgggcgctggatctgggctgcggcaacgggcgtaacagcctttatctggcggcgaacggcttcgcggtgacggcgtgggataaaaatccgatgagcgtcaacaatctggaaagtattcgcgccgccgagcgactggataatctgcaaacggcggtgaaagacctcaacagcctgagctttgacggcgagtatgacctgatcctctccaccgtagtgatgatgttcctcgagcctgacaccatcccgggcctgatcgccaatatgcagcgctgcaccgccgccggcggctataacctgattgtggcggcgatggataccgaagactatccctgcaccgtcggcttcccgtttgcctttaaacctgatgagcttcgtgattattaccagggctgggagctgctgaaatacaatgaggacgtcggcgagctgcatcgcaccgacgccaacggcaatcgcatcaaattgcgcttcgccaccctgttggcgcgcaagcctgcctga

SEQ ID NO: 210906 - DNA, 669 bp, Klebsiella pneumoniae
atgcgtactcgcgttttactgaaagtcgccgctctggcgggaatattggcgttgaccggctgtgcggcgaaagtggcgcaaccggatcagtattcgggcttcttaaaagattattccagtttgaaagaaacgacctctgcctccggcaagccggagctgcgctggatcgatccgaacttcaatccggccaactatgacaatatcgtttatcacccggtgacctactatccggtaccgaagccgaccacccaggtaggggagaaggcgctgcaggatattcttaactacaccaacaaagagctgaaacaggctatttccgagcgtaaaccgctggccactaccgccggcaagcgcagcctcatcttccgcggggcgatcaccggggtggactccagcaaagaggggctgcagttctatgaagtgatcccggttgctatgattgtcgccggcacccaggccgccaccggccatcgtaccatggacaccaatctgtactttgaggcggaggtcattgacgccagcaccaataagccggtcatcaaggtcgtacgtaaaggggaaggcaaaaccctggcgaatgagaatacaccgctgaccgtcgataccctgaagcaggttatcgatgatatggcggtcgacgccgttaaattcgatccctctcagcgttaa

SEQ ID NO: 210907 - DNA, 897 bp, Klebsiella pneumoniae
gtgaacgcattactctatgcactcgttgtcgtgatctggggtacaacgtggatcgcgatttttttacaacagggaccggtggccgcgccggtatcgattttctggcgtttcgccgtagccagcgtcacgatgctggcgattctgctcgtcacacgacgcctgcggccgctgggcgcgaaagatcatctctgctgcctgctgcagggctgctgcgtcttctgctttaatttctggtgtttttataccgccgccgcctggatcaataccggtctggaatcggtgatcttttcgatggcggtactgtttaacgccatcaacagctttctctttttccgccagcagccgccgggccgcttctgggccgccgccgcgctgggtctcgccggtatcgtcatcctgttctgggacgacctgctggccaacggactgaacgcctcgctgctgtgggggatcgggctgagcgccctgggtacctacggtttttcgctcggcaatatgttcagtattcgccaccagcgccgcgggctggaaacgctgaccaccaacagctgggcgatgctctacggcacgctggtgatgggggcgatcgctctgctgcgcggcgataattttatgccagaatggaccgtcagctatctgggcgccctgctttacctggcgctgttcggctcggtcatcgcctttggcgcctatttcactctcgtggggcgcatcggcgccagcaaagccgcctacagtacgctgctgtttccgctggtcgccttatccatttccaccgtctatgaagggtatgtctggcacagcagcgccgtgatcgggctggcgctgatcctgctgggtaacatggtgatgtttgccaaaccggaacagctattgctgcgccgaaggctggcctga

SEQ ID NO: 210908 - DNA, 870 bp, Klebsiella pneumoniae
atgggttacgggacatttgaaacattacggcgacagaacgcggtgctgaagggaaccgtggagctgaattccggtattcaactggccgcctggtataacaattgcgataccgtgacggtgcgcagcgaccatcatactttaagtctgtacgtggctgatggctacgaaagctatcaaaagacgccgcacggctggaaaaatggcggcggcccggatcgtttttgtctgatgccgaaaggcgatgaaagcgtatgggatatccgcggcgatctgtcgtttgtgcatctttactgtaccgatgcgcacctgcgtcgcgtcggcgaggaggtgtgggaccgcagcccggcgaacttcaccctgcaggaaaagaccttcgccagcgatgataaaatcaccgcagtgtatcgtcagtttttgctggctaacgactggcggcagccggcgaaccagctgaccctcagcgctgccagcagcttactgcttacccatctgatccagcactattccaccgtgcagtggcgtttgccgacggtcaccggcgggctggcgccaggcgtaaagcgtcacgtactggcctggatcgatgctcatctcgatcagcccttgaccctggccgacctggcgcagcaggcgggtctgagtgagtttcattttgctcgtatgtttcgtcagtcgctaaatatggctccgcatcagtacgtcatgcagcagcgaatggcgaaggcgcaaaacctgatctgccatagcgcgctgccgttaaccgagatagcgctggcctgtggttttagctcccccagccatttcagccatcgggtcaaagccgccaccgggctgacgccctcccagctacgggcggcgcagcgcggatag

SEQ ID NO: 210909 - DNA, 1167 bp, Klebsiella pneumoniae
atgcgctcgtttagtcttccgcttcccactctgttcgctggcttcgtcgccgtgttggtggggtacgccagctccgccgccatcatctggcaggccgccgccgcggccggcgctacccccgggcagatcgccggctggatgacggctcttggcctcgccatgggcatcagtactctcgcgctgagcgcctggcggaaagttcctgtgctcaccgcctggtcaacgccgggcgctgcgctgttagttagcggcctgcagggggtgaccctcgccgaggccgtggggatctttattttcgccaacgcgctgatcgttatctgcggcgccaccggactgtttgcccggctgttgcagatcattccccattcgctggccgccgcgatgctggctgggatcctgctacggtttggtttgcaggccttcgccggcttacaggatcatctgccgctgtgcggcgggatgctcgccgcctggctgctgtgtaaagcgctgtggccccgcttcgccgtggtggccgcgcttgtgattggagcgctgattgcggcggcgtccggggatgtggctagcgccgccgtgccgctggcatttgtgacgccggaatgggtcgccccgcagtttactccggcgcttttgctcagcgtcggtctgccgttcttcctcgtcactatggcctcgcagaacgctccagggttcgccaccctgcaggcatcaggctataccgtaccggtctccgcactgatcgtcgtttgcggggggttggcactactgctggcgccgtttggggtttattccatctgcatcgcggcaatcaccgccgccatatgccagagcccggaggcgcacccggatccgaaccagcgctggctggcggccatagccgcgggcggtttttatctgctggccggtctgttcggcgggtcaatcaccgccctgatgtcggccctgccgccggcgtggatccagatgctggcgggtctggcgctgctcggcaccatcggcgggagtctgtttcaggcagtgcatcaggccagtgagcgcgatgcggcggtgctaaccttcctggtcaccgccagcggggtgacgctggcgggaattggctccgccttctggggcgtggtgctcggcggggtgagttacggcgtgctatccgcgctgcgccgcccgtag

SEQ ID NO: 210910 - DNA, 570 bp, Klebsiella pneumoniae; identical to SEQ ID NO: 135289

SEQ ID NO: 210911 - DNA, 1962 bp, Klebsiella pneumoniae
atgcgcctgcacaatcatcgtcttgaacttcttagtcctgcccgcgacgccggtatcgctcgcgaagcgatccttcacggcgccgatgccgtttacatcggtggacctggctttggcgcccgccacaacgccagcaacagtctgagcgatatcgccgggctggtgcctttcgctcatcgctttggcgcaaaggtatttgtgacgctgaacaccattctgcatgacgatgaactggagccggcgcagcggctgattaccgatctctacgacgcaggcgtcgatgcgctgatcgtccaggatatggggatcatggagctggatctgccgccgattgagctgcacgccagcacccagtgcgatattcgcagtgtggaaaaagcgaagtttctctccgacgccggcttcagtcagatcgtgctggcgcgcgaactgaacctcagtcaaatcaaagccatttacgaccacactgacgccactatcgaattctttatccatggcgcgctgtgcgtggcctattccgggcagtgttacatttcgcacgcccagaccggacgcagcgccaaccgcggcgactgctcgcaggcttgccgcttgccgtataccctgaaggacgatcaggggcgggtggtggcctatgagaaacatctcctgtcgatgaaggataacgatcagaccgccaacctggcggcgctgatcgacgctggcgtacgctccttcaaaattgaaggccgttacaaagacatgagttatgtgaaaaacatcactgcgcactaccgtcaaatgctggatgccattatcgaagatcgcggcgacctggcgcgcgcctcggctggacgcaccgagcatttctttatcccgtccacggataaaaccttccaccggggcagcactgactactttgttaatgcccgcaaaggcgatatcggcgcctttgattcgccgaaatttatcggcctgccggtgggtgaagttctgaaggtaggcaaagaccacctcgacgttgaagtcagtgaaccgttaaccaacggcgatggtctcaacgtgatgattaagcgcgaagtggtgggcttccgtgctaataccgtggaaaaaaccggcgaaaaccgttatcgggtatggccgaacgagatgccagcggatctgcataaagtgcgcccccatcagccgctcaaccgcaacctcgatcataactggcaacaggcgctgctaaagacctccagcgaacgccgcatcgcggtagacgtgacgttgagcggctggcaggagcagctggttctcaccatgacctgtgaagatggcgtcagcgtgacccacacccttgacggggagttcgccgaagctaaccaggcggagaaagcgttggccaacctgcgtgacggtgtcacaaaactggggcaaaccatctactatgcgcgcgaggtgcaggttaatctgccgccgctgtttgtgcccaacagcctgctcaaccagctgcgtcgggaaactgcggagatgctggatgaagcgcgcctcaacgcctggcagcgtggcacccgcaagccggtctccgtaccgccgccggtctacccggagacccatctctccttcctcgccaacgtctataaccacaaggcgcgggcgttctaccagcgctatggcgtacagctgatcgacgccgcctatgaagcgcacgaagagaagggcgatgtgccggtgatgatcactaagcattgtctgcggttcgccttcaacctctgcccgaagcaggcgaaaggctccatcaagagctggaaagccacgccgatgcagctgatccatggcgatgaggtcctgaccctgaagtttgactgccgtccgtgcgaaatgcacgtggtcggcaagatcaaaaaccatatcctcaaaatgccgcacccgggcagcattgtggcctccgtcagcccggacgatctgatgaagacgctgccgaagcgtaaaggggcctga

SEQ ID NO: 210912 - DNA, 231 bp, Klebsiella pneumoniae
atgttaaagagaagcataagcgccctgctgttgctgtgcgcattattttccgggcatctgttggcccatcgtcagggacacgaatactttccggtgcaaagtctcgaacagcagctgctgcacgaagcggatagcgatgagcttcgcagccagcacgaggaggccgccgcagacctgcgcgaacatcaccgctggcaggacgaccgtaaaccgcgggcatcctgccaatag

SEQ ID NO: 210913 - DNA, 285 bp, Klebsiella pneumoniae
atgaagaagttagctttactgtacgccgtaatgacgctgggaatgtcgtcatgggcttttgctgccgacaacccgccgccgccgccggaaaaaggcgcgcagcatcagggtaaaccgccggtgaaaaacggccaacacgaaggtaagcaagcgcaatacaacagcaaacagccacaacgagacggcaaacagccgcagcacgacggtaaacagccgcagcacaacggcaagcagccgccaaaagggagcgagcacagcgggaaaccgctgccgccgaaagcgtaa

SEQ ID NO: 210914 - DNA, 126 bp, Klebsiella pneumoniae; identical to SEQ ID NO: 135293

SEQ ID NO: 210915 - DNA, 1011 bp, Klebsiella pneumoniae
atgggtatcgaattatcggtgatctggttcgtgattatcgtctttgccacgctgatgtacatcgtcatggatggctttgatctgggcatcggcctgctgttcagcacggtgcggggcggcggggatcgcgacgtaatggtcaacagcgtcgcgccggtatgggatggcaatgaaacctggctggtgctcggcggcgccggcctgtttggcgcctttcccctcgcctacgcggtgatcatcgacgccctgtcgatccccctgaccctgatgctgatcggcctgatttttcgcggcgtcgcctttgagtttcgcttccaggctacgccgtcgcaccggccattctgggatcgcgccttttttggcggctccctgctggcaaccttcagccagggcgtggtggtcgggtcggtgatcaacggtttcaccgtcagcggtcgcgccttcagcggcggcatgtttgactggctgaccccgttcagcctgttctgcggactcggactatgcgtggcctatgcgctgctcggcgccacctggctggtgatgaaaagtgaaggcgcgctgcagcagagaatgcgcagcgcatcgcggcagttgctgggtgccctgctggcggtgtttgccgtcatcagcctgtggactccgctggcgcacccggcgattgctgcccgctggttcagcctgccgaatctctatttcctgctgccggtgccgctgctggtgatcctcgttagcggctggctgtggcgcacgctgcatcagcgcgaccgccatgtttcgcccttcacgctgacgctgggcctggtctttctcggcttcagcggactggggatcagcatctggccgcatattatcccgccggccatcacgctgtggcaggctgccgctcccccgcaaagccagggctttatgctggtgggcgccctgctgattattccggtcattcttggctacacctgctggagctattacgtgttccgcggcaaagttcagcccggggagggatatcactga

SEQ ID NO: 210916 - DNA, 1398 bp, Klebsiella pneumoniae
atgttcggtcttgatgcattccatctggcgcgagttcaattcgcttttacggtctcatttcatattatcttccccgccattactattgggctggccagctatctggcggtgctcgaaggcttatggctaaaaacaaaaaatcccgtctggcgctcgctgtaccatttctggtcgaagattttcgccgtcaacttcggtatgggggtcgtttccgggctggtgatggcctaccagttcggcaccaactggagcggtttctcacagtttgcaggcagcataaccggccctctgctgacctatgaagtcctgacggcgttctttctggaagcgggcttcctcggggtgatgcttttcggctggaaccgcgtggggccggggctgcactttttcgccacctgcatggtggcgctgggtactatcatctccaccttctggatcctcgcctctaacagctggatgcagaccccgcaggggtttgagatcgttgatggccaggtcgtgcccgtcgactggctggcggtgatctttaatccgtcgttcccctaccgattattgcatatgacagtagcggcgtttctcagtagcgcgctgtttgtcggcgcctcggcggcctggcatctgctgcgcggcaatcagtcgccggcgatccgtaagatgttctcgatggcgctatggatgacgctgctggtcgcccccgtccaggcgctgatcggcgatatgcatggcctgaataccctgaagcaccagccggcgaaaatcgccgccattgaggggcactgggaaaatccaccgggtgagccaacgccgttgctgctgtttggctggcccgatatggaccaggagcgcacccgctacgggcttgagatcccggccctgggcagtctgatcctcacccacagtcttgataaacaggtgccggcgttgaaagagttcgctcctgaggagcgcccgaattctactgtggtgttctggtcatttcgcctgatggccgggctaggcatgttgatgctgctgctgggcgtgctggccctgtggctgcgtcgcggcgaccggctataccactcgcggccgtttctgcgttttgccctgtggatggggccatccggcctgatcgctattctcgccggctgggtgaccaccgaggtgggccgccaaccctgggtggtgtatggcgttcagcgcaccgccgatgccgtttccgctcatggcgatctgcatatgtcggtcagtttattgacctttatcgtagtgtacagcgccgtcttcggcgtcggctacagctatatgctgcgcctgatccgcaaggggccgcaggagatgctcccggcgacaaccggtacgccagcccgcccgctgtccgccgccactgaaggttatctgcagaaggagtcccgctaa

SEQ ID NO: 210917 - DNA, 1413 bp, Klebsiella pneumoniae
atgaaaaagtatcaacagttggcgcagcaactgaccgagcagatcgcccttggcgtctggttgcctggcgatcggctgccgtcgctgcgcgagcaggtgatcagcagcggcatgagctttatgaccgtcagccatgcctatcagctgctggaaagccaggggcgcatcgtcgcccgtccgcagtcgggttattatgttgccccccagccggtgaagctccgccagccggcaccgcctgcccaggtcactcgcgatgaagccgtcgatatcaatacctatatctttgaggtgctccaggccagccgccaggcgtcgatgctgccctttgcctcggcctttccggacccgcgtctcttcccgctgcagcagctcaaccgctcgctggcgcaggtgagtaaaacctccaccgccatgagcgtcattgagaatctgccgccgggcaatgcagaacttcggcatgccattgcccgtcgctatgccctgcaggggatgaacgtctcgccggacgagatcgtcatcaccgccggggcgctggaggcgcttaacctcagcctgcaggcggtgaccgagccgggagactgggtggtggtggaaaacccctgcttctacggcgccctgcaggcgctggagaggctgcgtttgaaagcattgtcggtagccactgacgtcagggaaggcattgatctgacggcgctggaggcggccctgcaaaactatccggtgaaggcctgttggctgatgaccaacggccagaatccgctcggcttcaccctcagcgctgaaaaaaaagcggcgctggtggcgctgctggcgcgctataacgtgatgttgatcgaagatgatgtctacagcgagctctattttggccgcgaaaagccgttaccggcgaagttctgggatcgccaggagatgacgctgcactgcagctcgttctcaaaatgtctggtacccggctttcgtatcggctgggtggcggccggcaaacaggcgcggcggatccagcagctccagctgatgagtacgctttccaccagttcgccgatgcagttagccctggtggattacctgtccaccaagcgctatgacgcccacctgcgccgtctacgtcgtcagctggcggagcgtaaacagcaggcctggcaggcgctgctgcgccatctgccgccggaggtcatcgtccaccacagcgacagcggctactttctgtggatcgaactaccggaaggggccgacgctagcgcacttagcgtccgggcgctggcgtcgcacatcagtattgccccagggaaaatgttctccacctccgacagctggacctcgtttttccgttttaataccgcctggggctggggggaacgcgaagagcagggggttaagcgcttgggggagcttattcgcgaacagcttgtctga

SEQ ID NO: 210918 - DNA, 1146 bp, Klebsiella pneumoniae
atgagcaaaaaaattgcccgttgcagcctttatgtgctgggtatggcttgtttgaccgttcaggcggcagagccgctcacctcgctggataaaccggaagggcggctcgatattattgcctggccgggatatatcgaacgcggtcagaccgacaaacagtacgactgggtgagtcagttcgaaaaggacaccggttgccaggttaatgtcaaaaccgctgccacctctgacgagatggtcagtctgatggccaaaggcggctacgatctggtcaccgcctcgggtgatgcttcgctgcgcctgatcatgggcaaacgcgtgcagccgatcaacacggcgctgattgccggctggggctcccttgatccgcgtattgcgaagggggcgtggtttaacgtcggcggtaaagtctatggcacgccgtatcagtgggggccgaacctgctgatgtacaacacccgcgtattcccgacgccgccggacagctggcgcgtggtgttcgtcaagcaggatctaccggatggtaaaaccaaccaggggcgggtgcaagcctatgatggcccgatctatatcgccgacgccgcgctgtttgtcaaagccacccagccgcagctggggatcgaagacccctatcaactgaccgaaacccagtacaacgcggtgctgaaagtcctgcgcgaccagcaaccgctgatccatcgctactggcatgacgccaccgtacagatgaacgacttcaaaaacgaaggggtagccgcctccagttcgtggccctatcaagccaacggcctgaaggcggaaggccagccggtcgccaccgtgttcccgaaggagggggtaaccggctgggcggataccaccatgctgcacagcgaggcgaagcacccggtctgcgcctataaatggatgaactggtcgctcacgccgaaggtgcagggcgatgtggcggcctggttcggttcgctgccggtggtgcctgagggctgtaaagccagcgcgctgctcggtgataaaggctgtgagaccaacggctatgagcagtttaaccgcattcacttctggaaaacgccggttgcggaaggcgggaaatacgtgccctatagccgctggactcaggactatattgcgataatgggcggccgctaa

SEQ ID NO: 210919 - DNA, 1014 bp, Klebsiella pneumoniae
atgacgtacgcggtcgagttccagaatgtatcgcgcctgtatggcgatgtgcgggcggtggatggggttagcattggcatacgcgatggagaatttttctcgatgctgggtccgtccggctcgggtaaaaccacctgcttgcggctgattgccggttttgagcagctctccggcggaaccatccatatctttggtcagccggccagcgaactgccgccctggcagcgggatgtgaataccgtgttccaggactacgcgctatttccccacatgtcgatccttgacaacgtcgcttacggcctgatggtcaaaggcatggcgaagaaagcgcgccatgcccgcgcccaggaggcgctggagaaggtggcccttggctttgctcatcatcgcaagccctcccagctctccggcggccagcggcagcgggtcgcgattgcccgggcgctggtgaaccagccgcgggtgctgctgctcgatgagccgctgggcgccctggatttgaaactacgcgagcagatgcaggtggagctgaaaaagctgcagcagtcgctggggatcaccttcatcttcgtgacccacgaccagagcgaagcgctgtcgatgtcggatcgcgtggcggtgtttaacaacgggcgcattgagcaggtggatgccccgcaggatctctatctgcaccccaggaccgcgtttgtggccggttttgtcggcaccgccaacgtttttgcagccgaggcggcccgacgattgtgcgggatggcgggcagctggtcgctgcgtccggagcatgttcgcctgcagggcggcggcgaggtgcaggtgcagggcgtggtgcaggcggtgcagtatcagggggcggcgacgcggatcgagctccgcctcgcggatggcgacaaactgctggtcagccaggccaacatcgatggcgcggcggcggccagcgttccgcgaaccgggcaaatagtacaggcgtcatggtcgcgctcggcgatgaccccgctggaaagcggaggctga

SEQ ID NO: 210920 - DNA, 930 bp, Klebsiella pneumoniae
atgaccatggcaataactcctgcgcagaccgggcgcatatcggggatcttctggcgccgaccggcgctgggcctgtttttactgctgctcgggccgctgatgtggtttggcatcgtctatctgggatcgctgctgaccctgctgtggcagagcatttatacctttgacgacttcaccatgtcggtgaccagcgacttcacgctggctaacctgcgggcgctgttcaaccctgccaactacgacattattgtgcggaccctggtgatggcgctgtgcgtcacgctggccagcgcgctgctggcgctgccgatggcctggtatatggcgcgctacaccagcggcaaaatgaaggccttcttttatatcgcggtcatgctgccaatgtgggccagctatatcgtcaaagcctatgcgtgggtgctgctgctggcgaaagatggcgtggcgcagtggttcctcggtcatcttggactggagggggcgctgaacgcgctgttgagcgtcccggcggttggcggcaataccttgtccacctccggccttggacgctttctggtgttcgtctacatctggctgccgtttatgatcctgccggtgcaggcggcgctggagcgtattccgggatcgttgctacaggcctcggccgatctcggcgcagccccgcggcagacctttcgctacgtggtgctgccgctggccattcccggcatcgccgctgggtcgatcttcaccttttcgctgacgctaggcgactttatcgtgccgcagctggtgggcccgccgggatactttatcggcaatatggtttactcgcagcagggggcgatcggcaatatgccgatggcggcggcgtttaccctggtgcctatcgtcttgattgccctctatctggcgttcgtgaaacgtctgggagccttcgatgcactctga

SEQ ID NO: 210921 - DNA, 807 bp, Klebsiella pneumoniae
atgcactctgaacgcgcgccctggtatctgcgactggcgacctggggcggggtgatattcctccactttccgctgctgattatcgccatctatgcttttaatacggaagatgcagcctttagctttccgccgcaggggctgacgctgcgctggttcagcgaggcggccgggcgcagcgacattctgcaggcagtgacactgtcacttaagatcgccgccctgtcgaccaccattgccttagtgcttggcacgctggctgcaggagccctgtggcgcagcgccttttttggcaaaaacgcggtgtcgctactgctgctgctgcctatcgccctgccggggatcattaccggcctggcgctcctgacggcgttcaaagcggtcggccttgagcctggcctgctgacgatcgtggtggggcacgcgaccttctgcgtggtggtggtgtttaacaacgtcatcgcccgcttccgccggacttcgtggagtatggtggaagcctcgatggatttaggcgctaccggttggcagacctttcgttacgtagtgctgcccaatctggggtcggcgctgctggcggggggaatgctggcattcgctctgtcgtttgatgaaattatcgttaccacttttaccgcggggcatgaacgcaccttgccgctgtggttgctgaatcagctggggcggccgcgagatgtgcccgtcaccaacgttgtcgcgctgttggtgatgctggtaacgacgataccaatcttaggggcctggtggctcacccgcgacggcgataacgacgccggaaacgggaaataa

SEQ ID NO: 210922 - DNA, 1428 bp, Klebsiella pneumoniae
atgcaacacaacctattgataaacggtaagttagtggcaggtgaaggcgagaaggttccggtatataaccctgcaaccggcgaagtgatcctggagattgccgaagcgacagcggcccaggtcgatgccgccgttgaggcggcggaccgggcattcgatgcctggagtcagacgacgccgaagacgcgtgcggaatgtctcctgaagctggcggacgccatctcggcgcaggctgaaaccctggcgcagctggagtcgctgaactgcggcaagccgctgcactgcgtgattaatgatgaaatgccggccatcgtcgacgtcttccgcttcttcgccggcgccgctcgctgcctgccggggatggcggccggagagtatctcgaagggcatacctcaatgatccgccgcgatccggtgggcgtggtggcctccatcgcgccgtggaactatccgctgatgatggcggcctggaagctggccccggcgctggcggcgggcaactgcgtagtgataaaaccctcggagatcaccccgctgacggcgctgaagctggcggagctggcaaaagatatcttcccggagggggttatcaacgtgctgtttggccgcggtaaaacggtgggcgaccccttgaccgcccacgttaaagtgcgaatggtctccctgaccggatcgattgccaccggggcccatatcatcggccataccgcctcgtcgattaaacgcacccacatggagctgggtggtaaggcgccagtgatcgtttttgacgatgcggacatcgatgcggtggtggatggggtgcggaccttcggtttttacaacgccggccaggactgcacggccgcctgccggatctacgcccagcagggtatctatgaccagctggtggagaaacttggggcggcggtggccagcctgaaaatgggggcgccggaggacgctgccaccgaactgggtccgctgagctcgctggcccatcttgagcgcgttagcgcggcggtggaagccgcaagggcgctgccgcacattaaagtggtcaccggcggcagtcgggctgacggcgcgggctattacttccagccgacgctgctcgccggcgcccggcaggaagacgctattgtccagcgcgaagtgtttggtccggtagtcagcgtgacgcctttcagcgatgaagcgcaggccctgagctgggcgaatgactctcaatatggcctggcctcctcggtatggacgaaagatgtcggtcgcgcccatcgtcttagcgccaggctgcagtacggctgcacctgggtcaatacccactttatgctggtcagcgaaatgccgcacggtggccagaagctgtcaggctacggcaaggacatgtcgatgtatggccttgaggattataccgtggtccgccatgtgatggttaagcatagctaa

SEQ ID NO: 210923 - DNA, 123 bp, Klebsiella pneumoniae
atgtccggaatcatcacgctggtcatcgcgctaatcctgctggtcgcggcggtgtataatcttatttcctacattcgtgaccggcgcagcgccagtctgcccagcaaaaaaaccaagcgctga

SEQ ID NO: 210924 - DNA, 174 bp, Klebsiella pneumoniae; identical to SEQ ID NO: 138629

SEQ ID NO: 210925 - DNA, 750 bp, Klebsiella pneumoniae
gtgaacggtttttattcgtccgtcgctggcgccacgctgcgctggcacgatttcccgggagatggccttccggtggtgtttatccacggccttggctgcgcgtcatcctacgattatccccgcattgccagcgatcccgcgctccgcgaacggcgcaaaatactcatcgatctgccgggcttcggctatagcgataaaccgcgcgtgtttagttacaacatacatgagcaggctttagttttggagcagttcctcagccacctgcgcctgcagcgcttcgcgctgttcgggcatagcatgggagggagcatcgccatcgaagcggcggggctactgggcgagcgggtgaccacgctgctggtctcggaacccaacctgttcgccggcggcggcgagtacagcaggcgcattgcggcgcagtcagagacagcctttgtcgctgacggctatgccaggctgctggcggaggagcgctcgccgtgggcgggttgtttacaaaactgcgccccctgggccgtctggcgggctgccagcagcctgatacgcggcagcgacacgccctggtttacccagctatgccagctgcgctgccagaaaatgctgatcgtcggagagcggtcgctcccttatgcggatagcgacctcgttcaggcacaagggatcccggtcggcatcgtgccccatgccggacactcgatggcgtgggaaaatccgcaggggctggcgcagcttatcgccagccatagttaa

SEQ ID NO: 210926 - DNA, 1434 bp, Klebsiella pneumoniae
atgacaatcacctgcaatctgtacattaacggccagtggcacgatgccgaaggccgccgcacctttacccgacgccgcccggcccacgatgaggcagcctcggtggccgctgccgccagcctcgccgacggcaaacgctgcgtcgaagccgcggcctgcgcctttccgctgtggcgcgatactgcgccggcggaacgacgtcgcttactgctcgaggcggcggaacagatgctgttgcgggaggcgaaatttatcgccgccatggcggcggagaccggcgcgaccgcgcactgggccggatttaacgttcatctggcggcagatattctgcgtgaagcggcggcgctgaccacccagattgaagggcaaataattccgtccaacgtgccgggtaacctggcgatgggcgtccgccagggggcgggagtggtgctgggcatggcgccgtggaacgcgccgctgattctggccacccgggccctggcgacgccgctggcctgtggcaacacggtgatccttaagggcgccgaactttcccccgccgctcagggactgattatcgacgcccttgacgcggcgggcttcccgccgggcgtggtgaactatcttacctgtgcgcctgaagatgcgccggcgctggttgaatcgctgatcgcccacccggcggtgcggcgcgttaactttaccggctccacaccggtggggcgcattatcgcccgcacctgcggacagtatctgaaaccagcggtgctcgagctcggtggaaaagcgcccctgctggtgctggacgatgctgatattgagcaagcggcggcgggcgctgtttttggcgccttcgccaacgccgggcagatctgcatgtccaccgagcgcattattgtcgacaatgccgtagcggaggcgtttatcccgctgctggccaggcgcgccgccgccctgcctgccgccctcacgggcccggttgtcgatatgaacaccatcgcccgctgcaacgcgctcattgacgatgcgttagcgaaaggcgctcgcctgctgaccggtggtagagccaacgatacccatatgagcccgaccctgctggacggcgtgacccgcgagatgcggctgtggcgtgaagagtccttcggtccggtgaaagcgattattcgcgttcatagcgaagaggaggcgctggcggtggccaacgacagcgagtatggtctttccgctgcggtctacagccgcgacagcgccagagcgtggaacgtagcgcaacgtctgcataccgggatttgccatatcaatggcccaacggtgcatgatgaggcgcaaatgccgtttggcggctgcaaagcctccggctatggccgctttggcggccgggccgggatcgcggaattcaccgagctgcgctggataacgatccagacccagccccgcgagcttcccttctga

SEQ ID NO: 210927 - DNA, 1599 bp, Klebsiella pneumoniae
atgtctacagggaaaaccacgctggcgctgctgctgagcgcactgctgccggccggcgccgcctgggccgcaggcaatgacactctggtctactgctcagaagcctctccggagtccttcaatccgcagatcgccagctccggtccgtcgttcgtcgccagctcgcaggtactgtataaccgtctggtgagctttgacccggtgaaaaatacgccgatcccgtcgctggccaccgagtggcacgtctctgaggatggcaaaacctggacctttactctgcgtcagggggtgaagttcaacagcaacaaattcttcaaaccgacccgcgattttaacgccgacgacgtcctgttctccgtgctgcgccagatggatcctcagcatccttatcataaggtgtcgcaggggaactatgaatacttccacgacgtgggcctcgataagctgattaaatcggtgaaaaaggtggatgattaccatgtccagttcgagctcaacgagccgaacgcggcgtttcttgccgactggggcatggacttcgcctctattctgtcggcagagtatggtgaggcgatgctgaagaaaggaacgccggaaaacgttgataactggcctgtcggtaccgggccgtatgcgctgcagcagtataaagtggattcgcaaatccgctatattgccaatccccactactgggaaggcgaggtaccgaccaagcacctgatcttctccattacgccgaacgtcgagactcgtctggcgaaactgcagaccaacgagtgccagattattcccgcgccgtcgccggtacagttcccggtgattaagggcaataaagatctggcgctgcatgcggttgaggcgctgaacgtcggctatctggcgtttaacaccgagaaaaaaccgtttgataatgtgctggtgcgccaggcgttaaactacgctaccgacaagcaggcgatcgtcaaggcggtattcctcgattccggcagcgtggcgaaatcaccgatcccgtcgacgatgctcgggtataagaaagatctcccggactatgactacgatccgcagaaagccaaagcgctgctcaagcaggcgggtctggagcaaggcgcggaagtgaccctgtggtcaatgccggtccagcgcccctacaacccaaactcaaaacgcattgccgaaatgatccaaaacgactgggcgaaagtgggggtgaaagccaaaattgtcagctatgaatggggcgaataccttgccggtatgcgtaaaggggagcacgacagcgccctgtatggctggatgtcggacaacggcgatccggacaactttgctggcacattgctcagctgtgataatatccagaccggctccaacgccgcccgctggtgtgataaatcctatgacgcgctggtaaagaaagcgctgttggtgagcgatccgcaggcgcgggccaaactctacgaacaggcgcaggagatcttttatcagcaggcgccatggattaccctggcgaccgggaaaaccttctatgcgacgcgcagcaacgtcagcggctacaccgtcagcatgatggggagcgatttttccaaagcgaagctgaattaa

SEQ ID NO: 210928 - DNA, 234 bp, Klebsiella pneumoniae
atggcacatctggatgaggttatcgtcaaagtcgatgacaccctggccgagggcgttatcgcgcatatgaatgagctgctaatcgccctgagtgatgatgcgcaactcagtcgtgaggaacgctatatccaacagcagcgtctgcgcaccgccatcgcccatcatgggcgacagcatcaggaagagcaggacgcgcgccgcgagcagttgaccaaaggcggcgcgatcctctga

SEQ ID NO: 210929 - DNA, 426 bp, Klebsiella pneumoniae
atgaacgcgtcgctcactctcgcctgcctgatcgccgccggcgttggcctggtagtgcagaacactctgatggtgcgcatcacccaggcggcgtcgacaatccttatcgctatgctgctcaattcgctggtcgggatcgttatcttcgtgacgatgttactgctgcgccagggcgtcgccggctttcaggagctggccctgagcgtgaagtggtggacgctgatccccggcctgctggggtcctttttcgtcttcgccagcatcagcggttatcaaaacgttggcgcggcgacgaccattgcggtactggtggccagccagctggtgggcgggttgattatggatttagttcgcgcccacggcgtgccggtgcgggcgctgatcggaccgttatgcggggcggtgatgctggtggtgggcgcctag

SEQ ID NO: 210930 - DNA, 519 bp, Klebsiella pneumoniae
atgtccattcgccctgccattaaagacgactgcgcggcgatcgccgagatctataaccatgccgtcgtccataccgccgccatctggaatgataaaactgtggataccgacaaccgcatcgcctggtttgaagcccgccagctggctggatttccggtactggtgagcgaggaagacggcgtcattaccggttattcctcgtttggcgactggcgggcgtttgacggctttcgccataccgtggagcattcggtgtacgttcatcccgaacatcaggggaaagggctgggccgcaagctgttggtcgccttgatcgccgaagcgcgacggctgaataaacatgtgatggtcgccggcatcgagtcgcagaatcacgcttcgctgcatctgcatgaaacgctgggctttatcaccaccgggcagatgccgcaggtgggcaccaaatttggccgctggctggatctgacctttatgcagctgcagctggatgcgcgtcaggacccggacggcaaagcatga

SEQ ID NO: 210931 - DNA, 582 bp, Klebsiella pneumoniae
atgaatactatagaagacaacctcaatcagcgcatcagcgcgcgcatccgcatcgagcgcgagtcccgcggctggtcgctgaacgaccttgccgaacgggccggcgcctcgcgggcgatgatccataaaatcgagcgcggcgaaagcagcccgaccgcctcgatgctgggccgtctttccggcgccttcggcatcagtatgtcgaccctgatcgcccgcgcggaaatgcaggagggcaagctgctgcgctttgccagccagccggtatggcgcgacccgcaaagccactatctccgccgccacgtttcgccgcgcagcgatttgccgatcgatctggtgcagattgagctgccgcccggtagcgatgtgccgatgcccgccgcgtcctatgcgcttgcccgccagctaatctggctgcaacagggcgagctggtgtttgtcgaaggcaatacccgccatgagatgcaggcgggggattgtctggagcttggcccgcccaacgattgtcgctttattaatgaatccgcagagacctgcgtctatctggtggttcgccttaatcaatcgccatccggctcttaa

SEQ ID NO: 210932 - DNA, 1038 bp, Klebsiella pneumoniae
atgacagatcaaccgcaacgccatcgccgctgggtgctggcttcccgtccccatggtgaaccgacggcagagaatttccgcctggaagagagcgaagtgccgacgccaggcccgggtcaagtgctgctgcgtaccgtttatttatctctcgacccgtatatgcgcgggcgcatgagcgacgcgccgtcctattcgccgccggtggccattggcgcggtgatggtgggagggaccgtgagtcgtgtggtcagctcaaatcatgccgattatcaaccaggcgactgggtgctgggctacagcggctggcaggattatgaactctccgacggcagcggactggtgaagctgggtgacaatccgcaacacccgtcctggtcgctgggagttctggggatgcccggcttcaccgcctacatgggtttgctggacatcggccagccaaaggcgggcgaaacgctggtggtcgccgcggcgaccgggccggttggcgccacggttggacagatcggcaaaattaagggctgccgcaccgtcggcatcgctggcggcgcggaaaaatgccgctatgcggttgagacgttaggctttgatctctgccttgaccatcgtgcggatgattttgccgaacagctggcccaggcctgcccgcagggtattgacgtttattatgaaaacgtcggcggcaaggtttttgacgcggtgctgccgctgttgaataccgcagcgcgggtacccgtctgcgggctggtgagcggctataacgccaccgggctgccggacgggccagatcgtctgccgctgctgatggcgaccatcctcaaaaagcgcatccggatgcagggctttattattggccaggattacgggcatcggatcgccgaattccagcagcagatggggcgctgggtgcaggaggggaaaattaaatatcgcgaacagcttatcgacggtctggaccaggcgccgcaggcgctgatcggcctgttaaaaggtgagaacttcggtaaggtagtgatccgcgtcgcggcggacgactaa

SEQ ID NO: 210933 - DNA, 936 bp, Klebsiella pneumoniae
atggcactgccgattatgattgattgcgatccgggacatgatgacgcgatcgccctggtcctcgccctcgcctcgccggagctggaggtgaaagccgtcaccgcttccgcaggcaaccagaccccggagaagaccctgcgcaacgtgctgcgtatgttgacgctgctgaaccggccggacattccggttgccggcggcgcgtggaagccgttgatgcgcgatctgatcatcgccgataacgtgcacggcgagagcggactggatggcccgagcctgcctgagccggcctttgcgccgcagaactgcaccgccgtcgagctgatggctagcgtgctgcgggaaagccaggagccggtgactctggtggccaccggaccgcagactaacgtggcgttgctgctcgccagccatccggagctgcacgcgaagatcgcccgcatcgtgatcatggggggcgccatggggctgggcaactggcagccggcggcggagtttaatatctacgttgatccgcaggccgcggaaatggtctttcagtcggggatcccggtggtgatggcgggccttgatgtcacccataaggcgcaaatccttcccgccgatatcgagcgattccgccagattggcaacccggtgtcgaccatcgtcgccgaactgctcgacttctttatggcctaccacaaagatgaaaagtggggcttcgacggcgcgccgctgcacgatccctgcaccatcgcctggctcctcaagccggagatctttaccacgatcgaacgctgggttggcgtagaaacggaaggcaaatatacccaggggatgacggtggtcgattactaccatctgaccggcaatcggcccaataccaccctgatgctggatgtggaccgcgaagcctttgtcgatctgctcgcccagcggttagccttctacgcctga

SEQ ID NO: 210934 - DNA, 300 bp, Klebsiella pneumoniae
atgaaagatgtagtagataaatgcagcaccaaaggctgcgccattgatgtcgggacgatcattgataacgaggactgcgtctaccgggccgagaaggtgttcccaagccgcgaagaagcggaatccaccgtagccgccgtgcgcgaacgtgctgccgccgcagcgccggccagtgaaccgccgcaggtcgattacaccatcgtcgccgctggcgacgcggtgaaactcgacctctccatcgccttctcctgccaggcggaaaagatcattttcgagttatccctgcgaaatctgctttaa

SEQ ID NO: 210935 - DNA, 1737 bp, Klebsiella pneumoniae
atggataatgtcgtttatgcggactgcgtattgattaacggcaaggtcgccacggtggacgcacattttagttttaagcgcgccatcgccgtgaagcagggatggattattaacgttggtgaagaccaggagattcagcagcatattggtccccagacgcaggtcattgaccttggcggcaaactcattttacccgccgcgcatgactcacatatccatatcggctggctcgctgacagctggcattgcctgaactgccaggacgtgcgttccctggcagtactgcgggaaagactgcgcgaccaggcagcccgcactcccgccggggcatggattcgtgtctgcggtctggatccaaacgcaatcaaggagtgcgcggccgagcagcgctctctgacgcgctgggatattgacgacgtcacggccgatcatcccaccctgctcgccctgtgggacggtcactcctgcatcgtcaacagccgggcgctggccctctccggtcttgacgccagcacccctgatcccctcggcggacatctggggcgaacggccagtggcgaactggacggcaatttcatcgacctgcccgccctgcatctcgcatccggcacgatgccccgtctgaccgtagcggccctcaaagagaaccttctggcagcccagcgcctgatgaacagcgaagggtatgccagctacacggaaggcgccatgggtccgggggaaaacacgcgcgaggtgggcgctgcgggggatcgcgccatcgccgcctaccgtgaactgcaggatgaaggaaaactcaccgcccgggtatccatcgccttttactccgccgagcgggtatccatcgccttttactccgccgagcggggcgttcagtcctgcgccaccctgaagcgcgatctggatagctttgatttctcccagttcaccgaccgggactggctggactgtcggaccataaaactgttctgcgatggcgttcccacatcgcacacagcgtggatgaatcaggattacgccgaccggccgggatatcgcggacgctcggtgtttggtggccccgaggcgaccgaggaagcacaagttgaggcgctacagcagatgattctgctggctcaccagcggggttttcaggtggctgtccatgcggtcggcgataaggcggtaaaagtcacgattaacagcttcgtgcaggcgattcagcgctatccgggggagagccgacggcattatgtgctgcacggctcaatgggcgatcggcaagatttcgtgatggcggcaaaatacggcattctgctttccgaacaaccctcacccggcggcccggcatatgactatgaacagcgcgcccgctactgtggcatcaagggggaaatctgcaaagggctacgggatatcatcgaccttggggtcatcatcgccggcgggtcagatggcattatggcgctggtgaactggcgcaaaatggttcaggcagcggtcacccgcaaatcatcttccagcggcaaggttattcgcccggagctggcaattagcgtggcggacggcgtgcggatgtacaccatcaatgcggcctatcaggaagggaaagaagcggtacgcggatcgatagaggtcggcaaagtcgctgattttcaggtgctggaccgcgatatcttcgccgtagcccatgaggagattggcgccagccgcgtggtgatgactatggttggcggaaacgtcgtctttcaagactaa

SEQ ID NO: 210936 - DNA, 2106 bp, Klebsiella pneumoniae
atgaaaatcctgtccgtgcgtcacgccgccctcccggccctgctcttgccgctcattgccgcagcccaggccgctgatgaacaaaccatggtggtgaccgccgcgccaaccacggtttctgaactggatacccccgccgccgtcagcgtggtgaatggggatgagatgcgccaggccgcgccgcgcgtcaatctctctgaatcgctgggcgccgtgccgggcctgcaggtgcagaaccggcaaaactatgcccaggatctgcagctgtcgattcgcggctttggctcgcgctcaacctatggcgtgcgcggactgcgcatctatgtggatggcattccggccaccatgcccgacggccaggggcagacctcaaatattgatatcggcagcgttgacaccattgaggtgctgcgcggccccttctctgccctgtacggtaactcgtccggcggggtgatcaacgtcaccagccagaccggcacccagccgcccaccgtggaagccagcagctactatggcagcttcggcacctggcactacgggatgaaagccactggcgccgttggcgacggcagccacgcaggcgatgtggattacacggtctcaaccaatcgcttcaccacccatggctatcgcgatcacagcggcgcgcgcaaaaatctggcgaacgcccggctgggggtgcgcatcaacgacgtcagtaagctgactctgctgctgaatagcgtggatatcaaagccaatgacgccggtggcctgaccgccgatgaatggcgcgataacccgcgccagtcaccgcgcggcgaccagtataatacccgcaagaatacccgacagacccaggccggcctgcgctatgagcgccagctcagtgcccaggacgatctcagcgttatgatgtacgctggagaacgtgaaaccactcagttccagtcgatcccgcgcgcgccgcagctgaagccgagccatgccggcggggtgatcgaccttacccgtcactaccaagggatcgatacccggctgacccatcgcggagagctgctggtgcccgtcacgctcaccgccggtctcgactacgaaaacatgagcgagcggcgcaaagggtatgaaaactttgtgatggtcaacggcgcgccgcagtatggcgaacagggcgcgctgcgccgtaacgaacgcaacctgatgtggaacgtcgacccctacctgcagacccagtggcagctcactgacaaactctcgctcgatgccggggttcgctacagctcggtatggttcgactcgaacgactactacatcaccccaggcaatggcgatgacagcggtgatgccagctatcacaaatggctgcccgcgggctcgctgaaatatgccctgaccgacgcgtggaacgtctatctttccgccggccgcggcttcgagacgccaaccattaacgaactctcctaccgctccgataaccagagcggcctcaacttcggcctgaaaccctccaccaacgacacggtggagatcggcagcaagacgcggatcggcaacgggctgttcaccgccgccctgttccagaccaataccgataatgagattgtggtcgacagcagcagcggcgggcgcaccagttataaaaacgccggcaagacccgccgtcaggggatggagctggggctggatcagcagtttggcgagagctggcgtctgaaggcggcctggacctggctggacgcgacctatcgcactaacgtctgcgacgacgccagctgcaatggcaatcgcattccggggatcgcgcgcaatatgggctacgcctcctttggctatcagccggagcaaggttggtacgccgggagcgatattcgctatatgagcgatatcatggccaatgacgaaaacaccgccaaagcgccctcctggacggtggttggcctgacgactggctataaatggagctacggcaggatggatatggatctgttcggtcgcatcgacaacctgttcgaccgggagtacgtcgggtctgtcatcgttaacgagtctaacgggcgttactacgagcctgccccgggacgtaactacggcatcggcctgaacctcgcctggcgcttcgaataa

SEQ ID NO: 210937 - DNA, 1062 bp, Klebsiella pneumoniae
atgtcattacgtcattttgccgcgccgcgtctgcgccattcactgctcgtcacttctctgctgctggcaggcagctttagcgcccacgccgcggaagagatgctgcgcaaggccgtcggaaaaggggcctacgaaatggcctacagccagcaggagaatgcgctgtgggtcgccacatcacagagtcgttcgctggacaaaggcggggtggtttaccgtcttgaccccacaaccctcgacgtgacgcagattattcacaacgatctgaagccgttcggcgccactatcaaccatgccaccggcacgctgtggtttggcaataccgtcgacagcactgtcaccgctattgacgccaaaaccggcgccgtgaaggggcgcctggtgctggacgagcgtcagcgcagcgaaaccgtgcgtccgctgcagccgcgcgagctggcggtcaatgagcagaccaacacggtctacattaccggtctgggcaaagagagcgtgatttgggtggtagatggcgcaaccctgaagctgaaaacgaccattaccggcaccggggcaatggcgacgggtctggcgatcgatccgcaggctaagcgtctgtataccaccaacgccgacggcgaactgctgaccatcgacagcgagagcaacacgattgcgtcgcgcaaaaaattgcaggatgacggcaaagcgcatttctatcttaacctgagtctcgataccgccggccatcgtgcctttattaccgacagcaagcagccggaagtgctggtggtcgatacccgcgacggcaaggtgctggagaaaatcgccgcgccggagtcgctggcggtgctgtttaaccccgcgcgcaacgaagcctatgtgacgcatcgtaaggccggggaagtcagcgttatcgacggcaagagctacaaggtagtgaagacctttaaaacgccgactcaccccaacagcctggcgctctccgaggacggcaaaacgctgtacgttagcgtgaaacaagcttccagccgtgagaaagaagccaccgcgccggacgatgtgatccgcatcgccctgtaa

SEQ ID NO: 210938 - DNA, 222 bp, Klebsiella pneumoniae; identical to SEQ ID NO: 135506

SEQ ID NO: 210939 - DNA, 1455 bp, Klebsiella pneumoniae
atgaatacgaaacacgaaaatgcagcggagcatcatgctgcaaaacgccactggcttaactcacatgaagcgggttatcacaaagcgatgggcaaccgtcaggtacagatgatcgccatcggcggcgccatcggtaccggtttgttcctcggcgccggggcacgtttacaaatggcagggccagcgctcgccctggtctatctggtctgcggcatcttctccttctttattcttcgcgccctcggcgaactggtcctccaccgcccctcgagcggcagcttcgtctcttatgccagggagttcctcggtgaaaaagccgcttacgtggccggctggatgtacttcgttaactgggcgatgaccgggattgtcgatatcaccgccgtggcgctgtatatgcactactggggcgcgtttggcgatgtgccgcagtgggtcttcgccctcggcgcgctggctatcgtcggcaccatgaatatgatcggcgtgaagtggttcgccgaaatggagttctggttcgcgctggttaaggtgctggcgatcgtcgcctttctcgtggtcggcaccattttcctcggctcgggtaagccgctggacggcaatgccaccggcttccatctgatcaccgataacggcggcttcttcccgcacggcctcctgccggcgctggtgctggtgcagggggtggtcttcgccttcgcctccatcgagctggtggggaccgcggccggagagtgtaaggatccggagacaatggtgccgaaggccatcaacagcgtgatctggcgtatcggtctgttctatgtcggttcggtggtgttgctggtgctgcttctgccgtggaacgcctaccaggccggacagagcccgttcgttaccttcttctcaaagctgggcgtgccatatatcggcagcgtgatgaacatcgtggtgttaaccgcggccctctccagccttaactcgggtctctacagtaccgggcgtattctgcgctcgatgtcgatgggaggctccgcgccgaagtttatgtcgaagatgagccgtcaccacgtcccttacgccgggatcctggcgacgctgggggtatatgtagtcggggttttcctcaactatctggtgccatctcaggtatttgagatcgtactcaacgtcgcctcgctggggatcattgcctcctggggctttatcgtggtgtgtcagatgcgtctgcgcaaagcgatcaaggaagggaaagcggcaaaggtcagcttcagaatgccgggggcgccgttcacctcctggctgacgctgctgttcctgttcagcgtgctggtgctgatggccttcgattatccgaacggtacctacaccataggatcaattccgctgctggcggtattgctggtggctggctggtttggtgtgcgtaaacgcgtgcatgagattcacagcacggcgccgacgctgaggaagtaa

SEQ ID NO: 210940 - DNA, 888 bp, Klebsiella pneumoniae
atgctaaaagagaacgtaaacgatctgctctcctttatggtggtggcgcgtgaacgcagctttacccgcgcggcggcccagcttggcgtgtcgcagtcggcgctcagccatgccatgcgccatctcgaaacgcggctcgatgtccggctgttaacccgcaccacccgcagcgtggtgccgaccgaagcgggcgagcgactgattcagcgcctcggtccgcatctggaagagatcgagcaggccctggctgcattgcgcgacacccgagaacgcccggcgggcaacctgcgcattaccgccggggagcatgccgccagcgcggtactctggccggcgctaaagccatttatgctgcaatatcctgatattaacatcgaaatcactgttgataatgggcttacggatatcgtgggtgaccgcttcgacgccggggtgcgtctcggcgaacaggtggcaaaagacatgattgccgtgcgcatcgccccggatatgcggatggcggtggtgggttcgccggcctatctgcagcgggccggtacgccgcaaacgccctgggatcttgcccaacatcgctgcatcaatctgcgcctgccgacacgagggggactttacgcctgggaatttgcccgcgatggccgggagattcaggtgcgggtggagggacagctgatcctcaacagcctgccgcagcgcatcgacgcggcggaggcgggcctcgggctggcctacgttccggatgactgcgtggcggaggccttagccagcggccggctggtgcgggtgctggcggagtggacccccgccttccccggctaccatctctattaccccagccggcgccagcataccagcgctttcacgctgttactggaaactctgcgacgctga

SEQ ID NO: 210941 - DNA, 552 bp, Klebsiella pneumoniae
atgaatatcaacgtggtcggcaccagcggctcaggcaaatccactttggcccggcgcctggcgcacaggctgggactaccctggatcgaactcgatcgcctgtactggcggccgaactggcagggcgcgccggatgaggcatttttcgccgccattgccgccgcgacggccacgccgggctgggtgctggatggcaattacaatcgcagccgcagcgttaaatggcgggcggtggatttggtgatctgggtagattatggtttctggcgcacgctgcgccaggcggtatggcgggcggcgagccgggcgtggcgacatcaggagctgtggccgggcacgggcaactgcgagagttttcgccgttcgttctgcagccgggaatccatcatcctctggacgctgaaaacctggcggcagcatcgccgacgctatctggccgatatgcaggatccgcaatatcgccatattcgcttcgtccgggtgcgcaatccgcggcaggccgaggcgctgctccgcgagctggaagcgcagcgttcagccgggcatatctaa

SEQ ID NO: 210942 - DNA, 1008 bp, Klebsiella pneumoniae
atgtcttatcgaatcagtattctggataaaagtccgcttgccgccggggaaaccgccgcgcaggcgctggcgcgtacattaacgctggcgcaacacgccgaagcctggggctaccaccgcttctgggtcgccgaacaccacaataccgatcagctggcgagcccctcgccggagctggttatcgcctggctgctgggccacacccggcggatccgtcttgggtccggcggcgtcatgctccagcactatagcccctataaggtcgcggaaaactttaacctgctggccgccctcgcgccgggccgcatcgatctcggggtcggcaaggcgcctggcggcctgccgctctccacccgcgccctgcagcagggcctgcatcaagaggagaaagggacctttgccgatcagctggcgcagctggataactggctgtcgctgactgagcccgggggagaggagagcctacgcgccacgccgatcccgccgcgccgggcagacggttttctgctcggcgccagcctggagagtgctgaactggccgcccgccttgactggaactttgtctttgccgcccatctcaatggcgacagcgcgctgcgccgtgccgtgttcaaccgctggcgcgagctcagcccgcgtgaggcgatggtcgccgtccaggtggtggttgctgacgatccggccaccgccgccgcgctggcgcagcaggtcgaggtgtggggcgtcgagctggagaacggccagcgggtgaccgtcggcagtgaggcgcaggccgtcgcttttgcccgccaggccggcagccgaccgacgcgcattgcccgccgtgaatcttcgctgatctccggtactcccgaacaggttaaagcccggcttgacgcgctgcaggcggaagaacagttggatgaactcatcattgatacccccattagcgacgggccagcgcgcctgcactccctgcgcctgctggcgcaggctcactacggcaaggaggtgctgaatgtcctttga

SEQ ID NO: 210943 - DNA, 1122 bp, Klebsiella pneumoniae
atgtcctttgaacaacaactgattagctggcggcgcgagctgcaccagaacccggagctctcactgcaggaggtggccaccaccgcgcggatccgcgactggctgcagagcggcgggctgaccctgctgccctacgatctgaaaaccgggctggtcgccgaagtcggcagcggcgacaaggtgattgccctgcgggcggacatcgacgcgttgcccatcgaggaggcgaccggtctgccttaccgctcgcagaatcaaggggtaatgcatgcctgcggccacgatattcacaccagcgtgatgctgggggcggcgctgctgctgaaggtgcgggaagcggaactcccggggcgggtgcggatcctgtttcagccggcggaggaaaattttggcggggcgaaaaccctgatccgcgccggggcgctggaggaggtgtcggcgatcttcggcatgcacaatgagcccggcctgccggtgggcgaatttgccacccgcggcggcgcgttctacgccaacgtcgaccgcttcgtcttcaaagtgaccgggaagggggcgcatgctgcccgcccacatgaaggaagggatgcgatcctgctggccagccagctggtgacggtgctgcagagcgtggccagccgggaggtgaacaccctcgactcggtggtgctcagcgtgacgcggatccagggaggcaatacctggaacgtgctgccggagagcgtcgagctggaggggacgctgcgcactcacagcagtgaagtgcagcagcgggtcaaggcccgggtcagcgagattgccgccggtttcgccagcgcctttggcgcgcagattgacgtcttctggtacgccggcccgacggcgctggtcaacgacgcccgctgggccgacttcgccagcgaggtggcagcccaggccgggtaccgcacccaccatgccgatctgcatctcggcggcgaagattttgcggtctatcttcagcatattcccggggcgttcgtcagcatcggcagcgccagcgaatatggtttgcaccatccggcatttaatccggatgaacggctgattgcgcccgcggcgcactatttcgcccgtctcgcggaagaagcgttacaacacatttaa

SEQ ID NO: 210944 - DNA, 1314 bp, Klebsiella pneumoniae
atgtctgaaaatcgacaattgcgtctgggaaccatattgcatggcgcatcgggaaatatgtccgcctggcgtcatccggcggcccaggcggacgccagtattaattttgatttcgtcacccagacggcgctaaaagcagaagcggggaagctggattttatttttgtcgccgacggtttatatattaacgaaaaatcgattccccattttttaaatcgcttcgaacccttaacggtactttccgcgctggccgcgatcacccggcgactggggctggtggggaccttatcgacttcgtacagcgagccgtttaccaccgcccgccagttcgccagccttgaccatttaagccagggacgggcggggtggaacgtggtcacttccccgctggaggggtcggcgaaaaacttctcccgggcccaacatccggatcatgcgctgcgctatcgcattgccgatgaatacctgcaggtggtgaaaggcttatgggattcatgggaagaagatgcctttgtgcgcaataaggagactggccagttctttgataaaaataaactgcatacgctcgatcaccacggcgatttctttaaagtcgccgggccgctgaatattgcccgcacgccgcagggccgaccgattattttccaggccggcgcgtcggacgacggcaagaaattagccgcgcgccacgccgatgccatttttactcatcaggactcgctggccgaggcgcaggcattttatcgggatgtcaaaagccaactcgccgcatatcatcgcagtccggaccaactgcatattttccagggcgtcagcgtcatcgtcggggatgacgccgaggacgcggagcggcagtaccagaccaccgcggcgttggtctccatcgaggatgcgctgaattatctcgggcgctatttcgaacaccatgacttttcgcagtacccgcttgatgaaccgttcccggatattggcgacctcggacaaaacagcttccgcagcaccaccgacgagattaaacgtcacgcccgcgagcggggcttaaccctgcgccaggtggccctggaggcagccagcccgcgtccgcgctttaccggcaccgccagcgatgtcgctgatggcctgcaactgtggttcgagcagcacgcggcggacggcttcattattcagggcggcacgccggaaaccttcccgcgctttgtggatgaggtggttccgctgttacaggcgcgcggactgttccgtcgcgactatccgggcaccaccctgcgggaaagtctgggtctggcgctacccgctaatcaattccaaaaataa

SEQ ID NO: 210945 - DNA, 933 bp, Klebsiella pneumoniae
atgcagaaaacaacactcttgctggccgtcgcgttggcatttagcgcctcatcgtggggtcaggacgtcaagatcaatggcaccggagtgagcctggaggccaacaaaacgccgattcacacagcgaaaaatccgcaggccattgccctgttgccgcaagatctgcatctggcggtgccggggaaattcaccgtcgcggtggcggccctgaactctccgccgctgacggtctttgccgatgacaacaaaaccctgctcggcagcgaggcggatatcgcccggctggtggcggagagcctcgggctggaagtaaacgtggttcccacttcatgggaagactggccgctgggggtcacctccggcaaatatgatgccgcgatcagcaatattaccgtcaccaaagagcggaaagagaagttcgatttcgccacctaccgcaaagactcgctgggcttctacgtcaaaagcaccagcccgctgagcaagattgacaaagcggaagatatcgccgggctaaagattattgtcggctccggcaccaaccaggaggcgatcctgctggcgtggaacgcggagaacgtcaagaaggggctgaagccgtttatcccggtctacaccaaggatgatgccgcccagacgctggccctgcagaccggacgagccgacgccttcttcggccccaacgtgattggcgcgtggaaggcggcgctgaccggcaaaaccaaactggtgggtagcgtcgatggcggctggccgaaagcggcgcacatcgcggtaacgctgaaaaaagacagcgggctggtgaatgccgtccaggcggcgctgaacggggctatcgccagcggggactacgccaaagtgcttaaccgctggggcgaaggggtggaaagcattccgcaatcggaaatcaatccgcccggactgggcgactga

SEQ ID NO: 210946 - DNA, 510 bp, Klebsiella pneumoniae
atgagcgaagcattccgcgatatttctccggaggctccggagctgcagccgattattagcgggctgtttgccgaatatgccgcccgctacggcgactatttttcccgcgatgcggaagtggagttaagtgagtggtatgtgccgccgcaggggctgtttattgtccttgagcgtgagggcgaaattatcgccaccggcgcgtataagccgaaggatcgccacaccgcggagatcaaacgtatctggacgcaccgccgtctgcgccagcaggggctggcggcgaaggtggtccaggagctggagcgacgggcggtgctggccgggtacagccatatctacctgaccaccggtttccgtcagccggaggcggtaaagctctatctcagccaggggtatgaggcgcagtttgacctcacgagagacccggaagagtacagtcagccgccgtacgatggccggctgcggttcactaaagcgctggcggtgagcgcctacagccacagcgcctga

SEQ ID NO: 210947 - DNA, 927 bp, Klebsiella pneumoniae
atgcattcatctgaaacgatcaaagtggtgccggcgcgctatccgctgcgagtggtcggggctctggtcgccctgctggtgctggcggtggtgatccagtcggtggcctttaacccgcgctgggagtggggcgtcttcgcccgctggttcttcgacccggtgatcctcgaggggctgggtcaaaccctgctcctgaccctgctcggcacggtgctaagcgtgatcttcggcggcctgctggcgctggcccgtttgtcctcatcgtggctgctcagcagtctcgcctggggctatatctggctgtttcgctcgctgccgctgattgtggtgctgatcattctctataacttttcctatctctacgacaccctgtcgctggggatcccgtttaccggcgtcacctgggccagctatcagaccattaacgtgctggggcaattctccacggcggtggtgggcctgaccctggtgcagagcgcctataccgcggagattattcgcggcggctttctcggcgttgaccacgggcagtatgaagccgccgccgcgctggggctacccgcctggcggcgcacgctgcgcattattctgccgcaggcgctgcgtaccatcctgccatccggcttcaacgagatcatcagtctggccaagggaacggcgatggtgtatgtcctggcgatgccggaactgttctacaccatccagatgatctacaaccgtacccaggaggtgatcccgctgttgatggtcggcgctgcctggtatctggcgatcaccagcgtcctctccgccattcagtatctggtggaacggggcctggcgcgcagcgagcgccgctcggcggtaaacagcgcccgcagcagccgtctgaatcaacccgcacgtcaagcgcagccgcaggaggccgttcatgcccagctctcataa

SEQ ID NO: 210948 - DNA, 780 bp, Klebsiella pneumoniae
atgcccagctctcataatggccatatctctatcaccggggtcagcaaatactatggccgccacaaggcgctggacgatgtgtcgctggagatccccccgggcacggtgacggtgatcctcggcccttccggctcgggcaagtccacgctgctgcgcaccataaatcacctcgaacgggtcgatgagggatttattcagattgatggcgactatatcggttatcgccgcaaaggcgacaagctgtatgagatgaaagaaaaggagatcctccgccagcggatcaacgtcggctacgttttccagaactttaatctgtttccgcacctgacggtgctggagaacctgatagaggcgccgatcgcccaccagcaggtcacgcgcaaagaggccattgcccgtgcctatgaactgctggacgtcgtcggactgcgcaataaagccgacgcctggtcacggcatctctccggcggccagcagcagcgtatcgccattgcccgggcgctggcgctgaacccgcgggtgatcctgtttgatgaacccacctcggcgctggatcccgagctggtgggcgaggtactggatgtgatcaaaaagctggcgcgatcgggcaccaccctggtggtggtcacccatgagattggctttgcccgcgaggtggccgaccaggtggtgtttatggtcgacggcaggatcgtcgagcagggcagcagcgacgaggtgctcaaccatccgcagcatccgcgtacccggcagtttttatccagggtgctgccgtcatga

SEQ ID NO: 210949 - DNA, 879 bp, Klebsiella pneumoniae
atgacccttgttctcagcgcttttgtcatgagcgctcacgcggcgctggatctgcgcgccaatgagcagccattgccggtcacccgcgacccgcaggcgatagcgaaaattccgccgggctatcgcttcgtcgagccggggacgctaacggtggcgatctcggcgctcaattcgccgccgctggccctgctggccagcgacaaccgcacgcggatcggtagcgacccggatatagcccgcctgctggccggaagccttggcctgaagctcaggctggtgcccaccgcgtgggaggactggccgctgggcatcgcctccggccgctacgatgtggcgctgatcaatatcgcggtaaccgagaagcgcaaagagaagttcgattttgcgacttaccgggtggactccctggccttctcggtgaaatccaccagcgatatagccgcggtaaacggacccgccgatctcgcggggcgcaaagtgatcgtcgggtccggcaccaatcaggagcggatcctgctgggctggaacgaggacaaccgcgccgccggacggccgcaggcccagccggtctacctgaccgatgatgcctccggcaatctctatatccagtccgggcgggcggatatctttttcggcccgcagtcggtggcagcctataaagcggcgcttaacggccagacccgggtggtgggcctggggccgaaaaaagcgtgggtggcgacaaccaccaaaaaaggcaacggtctggtctatgccctgcaggcggctctcgacggggcgattgcccgcggtgaatatcagcaggtgctggcgcgttggggggagcagggcgaagcggtggcgcagtcggtggtcaacccgccggggataacctactaa

SEQ ID NO: 210950 - DNA, 618 bp, Klebsiella pneumoniae
atgataaccgtttatggcgtgccgggatggggctcgacgattagcgagctgatgctctccctggccgatattccctacgaggtggttgacgtggagggctttgaccagcccggtccggcgcgcgagcgtctgcggcagattaatccgctgtgccaggtgcccaccctgaggctggccgacgggagcatcatgaccgaaaccgccgccatcgcgctgatgatcctcgaccagcgtcccgatctggcccccgcgccggggacgccgcagcgtcaacagttccagcgtctgctggtctggctggtggccaacgtctatcctacctttacctatgccgattatccggaacgctgggcgcccgccgccgcggagcagctggtggagaattgtcgccagtaccggaaaaatctctatctctggttcgaacagcagctggctgccgggccgtgggcgctgggcgcgtcggtaacgttgctggattgctatatcgcggcgatgtacagctgggggccgcgacaggcgtggtttgacgaccacgcgccaaaattcgccgccatcgcccgggcggtctgtcagcgaccggagctggccgtggcgctacgccgtaacaagctgatttaa

SEQ ID NO: 210951 - DNA, 228 bp, Klebsiella pneumoniae
atgccgcatgtagatattaaatgttttccccgtgaactgactgacgaacaaaaaaccgcgctggccgccgacatcacagaggtgctgatccgccatctgaacagcaaagagagcgccgtcagcgtcgcgctgactcaggttgagccggacgcgtggcaggcggtgtgggacagtgagatcgccccgcagatggcgcagctgataaagaagccgggttatagcatgtag

SEQ ID NO: 210952 - DNA, 1617 bp, Klebsiella pneumoniae
atgcgtatctctgtgattagcgcagcggtttgctgcgccctttttccgctcatcagcgtcagcgccgccggcttgagcgtggagcaacggctggcgcagctggaagcgcgcctcaatctcgctgaacagcaggccagcgaggccagccgccgcgcgcagcgggcagaacagcaaactgccgccgccgagcagcgcgccgcggcggcggagcagcaggtgcaggcgctcagccagcagaccacggctcgcgaacaaaaacagcaggccactaatcagcaactgagcgagcagctggcgaagcgcgccccggacgatgggtttacctttaacgcctacgcccgttccgggatgttagtcaacagccatggtaaaggcgcccgcggcgggccgggcgtctccccggccagttcgctcaacggcgatgcccatgtcggtcgtctcggtaacgaaaaagataattacgctgagctgagctttggcaaaaagctcaccttcaacgatggttcatgggcgcgctttaagaccatgctcgccgacggggccaccaacccggatccgtgggttcaggataacgacagccaccatctgaacattcgtcagctgtacgttgagatgggtaactttgccgaattcaccggtccgttaaaacgcgcctcaatttgggccggcaagcgctttgatcgggataacttcgatatccactttaccgatagcgacatcatgttcctcggcggtacaggcggcgggatcaatgatgtcgactggggaagcggcctgcgcggcgactattcggtgtatgcacgtaacttcggcgaccttggcagcgataattacgcggataatgacatccagaatctgctgttcaccgccaaccatttttacggcaactggcaactgatgaccacggtgatgaccgcccagggcaacgatgatctgaaagataatacctcgaccaccgggagctatgccctgcgcagcgataacaccgccaaaaacggctactacgcgatgctggccctgcacgacaaacaacagttctacggcctggcgccgggggtgtctgaaagcgccctgcaatacggcgtcgggctgggcgccgaagcgcgtcagccggggagcgatggcgatctgaccgagaacgcggcctccctgcgctttgcgtcgtatggcatcctgccgttggggaaaaactggcagctggcgccgtcggtgatagcccagcatagcgaagaccgctatcgcgacggcgaccgctacgactgggcgacgtttaacctgcgggtatcacaggggatctccgctcacttcgccctgctgtatgaggcctcgtggcagtatatggatctcaatccgaacgggcgcagctatcgctataatgacaacgtttatcagtatcaggcggtgcgcggtgatttctacaagctgaccttcgcccccacctttaaagtgggtgatgtgctggatatcaaggcgcggccggaaatccgcttctttgccacctggatgaactgggataaagcgctggatcgctacgcgataaatgacgatttcggcagcaaaggctttaccgccggcgggacatggaacttcggcgtgcagacggagatttggttctga

SEQ ID NO: 210953 - DNA, 1383 bp, Klebsiella pneumoniae
atggcagaaacaacgtttaccctgtggcggcagcgccttggctatggcattgccgatctctcctgcaaccttgtgtggcagatgatctctctgtatctgatgttcttttacaccgacgtcatgggtctcccggcctattatgtcggcctgatgttcctggtcacccggctggtagacggcgtggccgacgtgctgatggggctggtgatcgacaataccaccacccgctgggggcgctgccgcccctggctgctgatcggcgccctgccttttggcctgctgtgtattctggccttttatgtgccggatttcggcaccaccggcaaactgctgtacgcctttgtcacctatctgtgtctgtcgttcctctacaccctggtgaatattccgttctgcgccatgctgccgtttttaaccagtgattccgcagaacgcaccacgctgtcggcggtgcgcattttgctgggctcccttggcgccaccatcgtcgccgtggctacgctgccgctggtcggcatgctaggcaaaggcaaccagcagcagggattcctctataccgcggtgatttttggcgtactggcggcctttttcctgctggtgagctttcgcaacgtcgaagaaaagatcacccttaccggggagcgcatgaccctgaaacgcgcctggattagtctgcgcgccaatcgtccgtggtgggtcttcgccagcaatatctttctgatgtggggtgcctttttctttcagaccggggccctggtgtacttcttccattattacgtcgggaataccgagctgacggcggttatcgccgggatctccaccttcgttcccctgctcggcaccctcaccgtcccgctgctggcccgacgcatgaaaaaacgtcatgtctatctggtggccagcgcggtcaatttgctcgggatggggattatgatggtgtctggcgcccacgttctgggactgatcgtcggggccgtgatcctctccctcggcgccggccaacgcacggctatctatttctcgatgcaggccgacccggtggattacggcgtgtggaaaaccgggattaataccgcagggatcctgacctcgataaacggttttctcggcaaggtggcgatggctggtgccggggctatcaccggcgtgctgctctcctccagcggctatatcgccaaccacacgcagagcgacagcgccctgttggccatcaaggcctgctatctatacattccggcgctattgatcctcgcctcgatgctgtggatgggccgcttctaccgcctcgacgatcagtatgagcagattcgtgccgaccttgatgccggacgcggcgcctcgccagccccggccccgaccgccggagaatcccccgccatgtaa

SEQ ID NO: 210954 - DNA, 1569 bp, Klebsiella pneumoniae
atgtcacaagcaattcaatacaattccagcgtggcgatgatccgtcacccgcgctttttacagcgtgcggccgacctgacgcccgcgctgcaacgcctgcgccagacgccgcaggccatcgtcgaggccgtcgctgaaccaggagcgctgaacggctggcgggggaataccgtccgcacgccggaacagttttatcagcaaccgctcaacgtcggcgacagcatcattattgattttggcagccattttgttggctacctgcagttcagctgccgcagcgtcggcagcccgcccgatgccccggcacatctgcacttcaccttcggcgagacgctgagcgaagtctgtgagccgttcagcgaataccagggatggctgagcagcagctggttgcagcagcaggatctgtggcttgacgtcctgcccgcccgggtcgctctgccacgtcgctattgcctgcgctacctgaaggtggaggtcaaagcgctgtcgcgcaagtttcgtctgcagttcgatgagatcgctctggaaaccgtcacctctgccggcagcccgcacccggcggtcatcgccgatccgcagttgaaagccattgatgacgttgccgttcgtaccctgaaaaactgcatgcaggaggtgtttgaagatgggccgaaacgcgaccgtcggctgtggctgggcgacctgcgcctgcaggcgcaggtgaatgacgtgaccttcggccaccacgatctggtccgccgctgcctgtatctctttgccggccatacccgggaagatggcatggtttccgccaatgtctttgttcagccagaggtacgcgccgatgacacctttctgtttgattactcattgttttttgtcgacgtgctttataactacctgcaaagcaccggcgacacggaaaccgtcggtgagctgtggcccacggcgcggcggcaaatcgagctggcgctgacccgctgcgattctcaggggctggtgcgcgacagcgatgactggtgggtatttatcgactggcaggcggagctgaataaacaggcctcggcgcaaggggtgctcatctactgtctgcagcgcgccctctggctggcgcagcgttttgaaccgcagcgggtacccgactacactgccacgctctggcagctgaaggaggccgccctccaccacctgtgggacaacgagcggcaggtgtttatcagcggcgccgtgcgtcaggtctcatgggcgtcgcagatctggctggtgctggcggaagttggcaccgccgggcagcgtcaggcgctgatgcgccgcctgcagcagcagccgcccgccattgccatgaacaccccgtacctgcgtcatcatcacattgttgccctgctacagtccggcctgcgcgaggaggcggtggcggagatcaaagcctactggggggcgatggtcgcctacggcgccgacaccttctgggaaattttcgacccccaacatcctgacttttccccgtatggcagtaagcttatcaacagttactgccatgcgtggagctgtaccccggcctggtttattcgccagtacggactttaa

SEQ ID NO: 210955 - DNA, 825 bp, Klebsiella pneumoniae
atgatgacactgaccgttgagtattatttcacccatccccaggataagctcggcatgtacgccagtgacccggaggataatagccaggagcatggccatgaatttgccgaactggtgatcgtcgaggaggggcatgggttacacgttattaatggtcgcccgctgtatatccaacagggagacgtattttacgtccagcctggcgatgtgcattattatgatgagctggggacgctgaagctgattaatgtcttaattaatccggcggtggcctttggctatttacagcagatggagggattgctgcagcaattatccgcgcagcgcgccgcctgctatggctggctggcgccggagactcgcagctattgccgggaactggtggaaaagatattttccccggcgctgagggcggcggataataccccgctacgggagtctctctttttccagctggtgaccaccattctcacaaccgagtcggaagccgaatatagcagcactcgctataaactgcataaattactcacctggcttcaggaacactgtttcgaagaacataactggcagcagctggcggagcaatttcatctcaccacccgcaccgcgtttcgccatattaaagaggccaccggattaaccccggataattatctgaaacgtctgcgactggtctccgcgcgggtcaaattacgcgaaacggagatgaccattaccgaagtggcttatctgtgcggcttcgccaacagcaaccactttaccaccctgtataaaaaagtgtttggcctgacccccagcgccgatcgccgccgcccaccgggttaa

SEQ ID NO: 210956 - DNA, 582 bp, Klebsiella pneumoniae
atgagccgctttcgccacgttgaactgcagtacgccagccgcctgctcaaccacggcccaaccattttgatcaccagctacgatgccccgtccgaccggcgcaacgttatggccgccgcctggtcaatgccggtggaattcgccccgccgcgggtggctatcgtggtggataaaagcacctggacgcgggagatcatcgagcgcaatggcaccttcggcattgtggttcccggcgtcgcagccgccagctggacctacgccgtcggcagcgtcagcggccgcgatgaggacaaattcaatgcctgggggatcccggtagtaaccggtccggagctggggctgccgctgatcgaggagaaatgtctggcatggatggagtgccggttgctgccggcgacggcggcccagacccagtacgataccctgttcggggaggtggtctctgccgccgccgatgagcgcgcgtttgtcaccggacgctggcaattcgacgacgataagctcaataccctgcatcatcttggcaccggcaattttgtcgccagcggccgtcatgtgcgggcaaactccctcgacgaataa

SEQ ID NO: 210957 - DNA, 702 bp, Klebsiella pneumoniae
atgcgcacgctgacccctatcaccctgcaggaggtctctttcgccttcgcagagacccccattcttgaccgcttcacgttgcatatcgaacccggccgcatcgtggcgctactgggcccttccggctgcggcaaaagcacgctgctgcgtctgctggccgggctgagcgtgccggccagcggcgaaatccgctttggcgacaggctggtcgcccgcgcaggatggggattgcccccggagcagcgcgatatcggcatggtttttcaggattatgccctctggccgcatatgagcgtggcgcagaacgtcgcctttccgctgcgcatgcgcggcgtctcccgcagcgaacgcgagcgccgggtcagcgaggcgctggcgcgggtaggcctcaatggctttgccgaacgtaagccttcaggcctctccggcggtcagcagcagcgggtggcgctggcgcgggcgatcgtcgccgcgccgcgggtgctgctgtttgatgaaccgctctccaacctggacagcgaactacgcgaatcgctgtgtggcgaaatgagccgcctgctgcgacagctcggcatcaccgccctgtatgtcacccatgaccgacgtgaagccgagctgttagccgaccagattgtctatttatccgcgggccgcgtggccgctgtccgcgccgttacgccaacctcaggggaagttgcatga

SEQ ID NO: 210958 - DNA, 969 bp, Klebsiella pneumoniae
atgaacaccgttatgaccgttaagaaaggagtggtactcgcgatggctctctccgccatgatgctctccagcgcccatgcgctgaccgtttacaccgccggacccggctcgctggcgaaaagcctggccagcggttttgaacaacagaccggggtgaaggtgacggttttccaggccaccaccggcaaagtgatggcccgactggaggccgagcaggccaacccgcaggcggatgtgctgatctccgcctcgtgggataccgccgaagatctgcaccagcggggctggttgttgccttttgcgagcgccaacgccgaccaggtaccggcgaacctgaaatcggcggactatatcgcccagggcgtctccgccctgggtattgtctggaacagtaaaagcggcaccccggaaccgaaagagtggcgggatctcacccagccggcgtttaaagacaaggtgacaacccccgacccggcgctctccggcgcgtcgctggatttgctgatcgggctgcaaaacagcatgggcgaccaggcctggcaactgtttgacgatctgaaaaagaacggcatggtagtcagcggacccaacgcccaggcggtgacgccggtgatgcagggagcgaaagcggcggtgtttggcgcggtggattatgtctcctacggcaatattcagcagggcgagtcgctgaaggtgatcttcccggccagcggaacggtgattgccccgcgcccgatgatgatcctcaaaaccagccagcatcccggcgatgccaaagcctttatcgattacgtgctgtcgccggaaggtcaggcgaaggtcgccgacgcctggctgatgcccgcccgccgcgacgtggcggctaaacgtccgctactggacgcgctgaaggtgctgcccaccaccagcgagggcagcagcgagcggggcgccgtgctcgcccgcttcagtcagctgtacgcgcagtaa

SEQ ID NO: 210959 - DNA, 1656 bp, Klebsiella pneumoniae
gtgaaacaaacattcctttccggcgcgacccttgccgccctggtgatgctggtcgcgttaccgttagtgtttattctgctgcaggcgatttttccccattttagcgccggttcgctcggggacgcctttggcggcatcccggcgctgctggccgatcctcagctgccggcgatgctcggcggtacgctgtggatcgccgccggcgtggcgctggtcagcgtaatgattggcctgccgctcggcatcctgcgcggtatgttttcgctgccgctgccccggctgtgggatctcctgtttttgatcccctttctgacgccgccctatatctcggcgctctcctggatgctggccctgcaaagccagggctatctgcagcagctgaccggctggcagctgaacgatctgctgttcagccgcagcgggatcgtgctggtgatgacctttaacatatttccggtggtctactttgccgtctcccgcagcctgctggcgagcgggacccggctggcggtggtcgcccgcgtccatggcgccagcgcctggcgcgccttctggcacgtgacgctaccgatgctctctccggcgctggcggcggggatgctgctggcgtttaccctcgccatcgaggagtttggcgtaccggcggcgctgggcagccgggcgggagtggtgatgctgacggtcggtattgagaaaaagctggccgactggccggtggatctccctggcgccgcgctattgtcgctgctgctgatggcggtggcgttgttcgcctggtggctgcaaaggcggctggtgggggagaaagaggtcaccagcgtcaccggtaagccgggggagaaccacggggcatcgctgggctggatgacgctgcccgccgtgctggcgatggcggccgtcggcggcctggcggtcggcgtccccgccgtctcgatgatgctcaccagcgtgatgggcacgctctccggtggcgtgagtgttgagaatgtcacgctgcgtcatttcgcggcgctgtttgaccatcagggagatgccctgtcggccctcggcaccagcctgtcgctggccctgggttcggcgctaatcgtcggcgcgctgggcctgctggccgcctggctggtgatggtgcagaagattaaagggcgcgggatggtggacgcgctgtcgctgatgccggcggcgctgccgggcgtggtggtgggggtcggtttgatcctgctgtggaatcagcccttctggccgcgctcgccctataacacgctgtggatgctgctgctctcctattgctgcctgctgttgccctggccggtgcgctatgtcggcagcgcgctgcgccagctgggcccgaaccttgagcccgccgccagggtgcacggggcgtcgccactgcaggcgctgcggttgattgtcctgccgctggtctttccggcgttgctggcggcgatgctgatggtgttcgcggtggcctcccgggagctggtgacctcgctgctgctctctccggccggtacgcaaaccgtggcggtgtttatctggcgccagttcgaacagggttccgtcggtcagggcatggcgatggccagcctgacgttgttgaccggtctggtcctgatgctgacggcgctggcgctgatgcagcgccgcacgtgcggttaa

SEQ ID NO: 210960 - DNA, 846 bp, Klebsiella pneumoniae
atgagtccctttttacgcgcctatttttcccgtctgagctggacgggtgagcctgatgtttccattgataccctgcgggaactgcatctgcagcataacagcgccatcccctttgaaaacctcgacgtcctgctgccgcgtgaaatccaccttgacgatggggcgctggaagagaagctgatcgccgcccgccgcggggggtattgttttgaacagaatggcctgctggagcgcgcgctgcgcgagataggctttaacgtccgcagcctgctgggccgcgtggtgctggccaacccgccgcagatgccgccgcgtactcaccgtctgttgctggtggaggtggcgggggagcgctggatcgccgacgtcggcttcggcggccagacgctgaccgcgccgatcaaactgctggccgatatcccacagcaaacgccgcacggcagctatcgtctggtgcatgaaggggatgagtggacgctgcagttcaaccatcacgaacactggcagtcgatgtaccatttcgatttaggccgccagtatgcgtctgattatgtgatgggcaatttctggtcggcgcactggccgcagtcccacttccgtcaccatctgctgatgtgtcgtcatctcccggacggcggcaaaatgaccctcaccaacttccactttacccactgggagaataaccatgtggtggagaaggtcgattttgccgatgtctccgcgctgtatgaagcgctgcagacccgtttcggcctgggggtggacgatcctaaacatggcttcagcgaagcggcgctggcggcggtgatggcggcgttcgatacccatccggaagccgggaagtaa

SEQ ID NO: 210961 - DNA, 681 bp, Klebsiella pneumoniae
atgatccagtatctgaacgtcttcttttacgatatctacccttacctgtgcggcaccgtctttctggtgggcagctggctgcgctacgattacgggcagtatacctggcgcgcctcatccagccagatgctggataagcgcgggatggtgctatggtcgaacttatttcatatcggcattctcggcatcttctttggccatctctttggcatgctgaccccacactgggtctactcgtggttcctgccgatgtcccagaagcagctgatggccatgatccttggcggcgtatgcggcgtgctgaccctggtaggcggtatcggcctgctgatgcgccgcctgaccaacccgcgaattcgcgccacctccacgaccgcggatattttgatcctgtgcattctgctgattcagtgcgcgctggggctgacgaccatccccttctccgcccagcatccggacggcagcgaaatgctcaagctggtggactgggcgcaggcggtggtcaccttccacggcagcgcctcggcgcatctggacggtgtcgcatggatttaccgcgtccacctggtgctcggaatgaccatctttctgatcttccccttcacccgcctggttcacgtctggagcgcgccggtggaatatttcacccggcgttaccaggtggtacgctcccggcgctga

SEQ ID NO: 210962 - DNA, 696 bp, Klebsiella pneumoniae
atgcggatcctgaaagtgatcggtctgctgctggagtaccccgacgagttactgtgggagaaccgcgacgacgccctggcgctgatcagggccgatgtcccttccctgacgccgtttgtcggtgaactgttgacggctccgctgttggatcgccaggccgaatggtgcgaggtgttcgagcgcgggcgcgccacctcgctgctgctgtttgaacatgtgcatgccgaatcccgcgaccgcggccaggcgatggtcgacctgatgaatcagtatcagcaggcgggtctgcagatcgattgtcgcgagctgcccgaccatctgccgctgtatctggagtatctcagtattctacctcccgcggaggctcgggaggggctgcagaatatcgcgccgattctggcgctgatcggcggccgtcttaagcagcgagcctgcccgtactaccagctgtttgacgccctgctggcgctggctaaaagcccgctcaccagtgacagtgtcacaaaacaggtggcgggagaaaagcgcgacgatacccgtcaggcgctggacgccgtgtgggaagaagagcaggtgaagtttatcgaagataatgcgaccgcttgcgatagctcgtcgatgcaagcttatcaacgacgctttagtcaggatgtggcgccgcagtacgttgacatccgcgccggaggcccgaaatga

SEQ ID NO: 210963 - DNA, 1545 bp, Klebsiella pneumoniae
atgaaaatccgttctcaggttggaatggtgctgaatctggacaaatgcatcggctgtcacacctgctcggtcacctgtaaaaacgtctggagcagccgcgaaggcatggagtatgcgtggttcaataacgtggagaccaaaccgggcattggctaccccaaaaactgggaggaccaggatcagtggcaaggcggctggatccgcggcattagcggtaagctgacgccccgcctcggcaatcgggtcagcgtgttatcgaagattttcgccaacccggtgctgccggcgatcgacgattactacgaaccctttacctacgactaccagcacctgcacaacgcgccggagagcaaatatctgccgaccgctcgcccgcgctcgctgatcagcggcgagcgtatggataagattagctggggcccgaactgggaggagctgctcggcggcgaattcgagaaacgcgcccgcgaccgtaacttcgaagccatgcaaaaagagatgtacggccagttcgaaaataccttcatgatgtatcttccgcgcctgtgcgagcactgcctcaacccgagctgcgtggccacctgcccgagcggcgccatctacaagcgtgaggaagatggcatcgtactgatcgatcaggacaaatgccgcggctggcggatgtgcatcagcggctgtccgtacaaaaaaatctactttaactggaagagcggtaagtcggaaaaatgcatcttctgctatccgcgcattgagtccgggcagccaacggtctgctcagaaacctgcgtcgggcgcatccgctatcttggcgtactgctgtatgacgccgaccgcattgaagaggcggccagtaccgaacatgaaaccgacctctatgagcgccagtgcgaggtgttccttaatccaaacgatccggcggtcatcgaggaagcgctaaagcaagggatcccgcacaacgtcattgaggcggcgcagaagtcgccggtctataagctggcgatggactggaagctggccctgccgctgcatccggagtatcgcaccctgccgatggtctggtacgtgccgcccctgtcgccgatccagtcggttgccgacgccggcggcttaccgagcaacggcaacatcctgccggcggttgagagtctgcgcatcccggtgcaatacctggcgaatctgctgagcgccggcgataccggaccggtcttgcgcgcgctgaaacggatgatggcgatgcgccactacaagcgctcgcaaaccgtcgagggcgtcaccgatacccgcgccattgaagaggtgggcctcagcgttgagcaggtcgaagagatgtatcgctatctggcgatcgccaactacgaagaccgcttcgtgatccccaccagccatcgcgaactggcggaggatgcctttccggaacgtaacggctgcggctttaccttcggcgatggctgccacgggtcagatacgaaattcaacctgtttaacagccggcggatcgacgccatcgacgtcagcggcgtgcgtaagcatggggagggcgagtga

SEQ ID NO: 210964 - DNA, 3741 bp, Klebsiella pneumoniae
atgagtaaacttctggatcgctttcgctactttaagcagaagggcgagacctttgccaacggccacggccaggtctacaacaacaaccgtgactgggaagatagctaccgtcaacgctggcagttcgacaaaattgtccgctccacgcacggtgtgaactgcaccggctcctgcagctggaaaatttacgtcaaaaacggcctcgttacctgggaaacccagcagaccgattatccgcgcacccggccggatctgccaaatcacgaaccgcgcggctgcccgcgcggcgccagctactcctggtatctctacagcgccaaccgcctgaagtacccgctggcgcgtaaacgactgattgagctgtggcgcgaagccctggcgcagcatcccgacccggtgctggcatgggatagcatcatgcaggatccggcaaaaacccgcagctataaaacggcgcgcggcaaaggcggttttgtccgctccagctggaaagagctgaaccagctcatcgccgccgccaacgtctggaccatcaaacactatggcccggaccgcgtcgccggcttctcgccgatcccggcgatgtcgatggtctcctacgccgcgggcactcgctatttatcgttgattggcggcacctgcctgagcttttatgactggtactgcgatctgccccccgcctcgccgatgacctggggcgaacagaccgacgtgccggaatccgccgactggtacaactccagctacattattgcctggggctccaacgtgccgcagacccgaaccccggacgcccacttctttaccgaagtgcgctacaagggcaccaaaactatcgccatcacgccggactattcggaagtcgctaagctctgcgaccagtggctggcgccgaagcaaggcaccgacagcgcgctggcgatggccatgggccatgtgatcctcaaagccttccacctcgataacccgagcgattactttctcaactactgccggacctacaccgacatgccgatgctggtgatactcgagccgcgcgacgacggcagctatacgccgggccgtatgctgcgtgcttccgacctgcttgacggtctcggggaaagtaataacccggaatggaaaaccgtggcctataacagcgacggcgaactggtggcgccgaacggctccatcggctttcgctggggcgaaaaaggcaaatggaatctcgaacaacgggcagacggcaaagatgtcgagcttaagctgtcgctgctggatattcgcgacagcgtggtgtcggtgggcttcccctactttggcggcaacgaaaacccgcattttcgcagcgtagcgcagtcaccggtgacccttcacccgctaccggctaaacagctgacgctggccagtggcgaaagcggcctggtggtcagcgtctatgacctgattctggccaactacggtctggatcgcgggcttgacgatgtcaatgcggcgaaggatttcgccgaagtcaaagcctataccccggcatgggcggagcagatcaccggcgtaccgcgtcaacatatcgaacaaatcgcccgcgagtttgccgatacggcgcataagacccacggccgctcaatgattatcctcggcgccggggtgaaccactggtaccacatggatatgaactaccgcgggatgattaatctgctggtattttgcggctgcgtcggccagagcggcggcggctggtcgcactatgtcggtcaggagaaactgcgcccgcagaccggctggctgccgctggcgttcgccctggactggagtcgtccgccgcggcagatgaacagtacctcttatttctacaaccacgccagccagtggcgctacgaaaaactgaccgcgcaggagctgctgtcgccgctggccgacgccagcaaatttagcggcagccttatcgacttcaacgtccgtgcggaacggatgggctggttaccctctgcgccccagctcaacgtcaacccgctgaccattaagctgcaggccgaggccgccgggctctcccccgcggagttcaccgtccagtcgttaaaatcaggcgatattcgctttgccgccgagcagccggatagcggcaaaaaccatccgcgcaacctgtttatctggcgctcaaacctgctgggatcgtccggtaaggggcatgagtacatgttgaaatacctgctcgggaccgacagcggtattcagggtgatgaactgggcgccagcgatgaggtaaaacctgaggaagtcgagtggcagaccgcggcgattgagggaaaactcgacctgctggtgacgctggatttccgcatgtccagtacctgtctcttctccgatattgtcctgccgaccgccacctggtatgaaaaagacgatatgaacacctcggacatgcacccgtttatccacccgctctccgccgccgtcgacccggcctgggaggcgaaaagcgactgggagatctacaaggatatcgctaaatccttctcgcaggtctgcgttggccatctcggcaaagagaccgatgtggtgctggtcccactgcagcatgattcccccggcgaactgtcgcagccgttcgaggtgcttgactggcgcaaaggcgaatgcgatctcattccaggcaaaaccgcaccgtccattgccctggtggaacgcgactacccggccacctgggaacgcttcacctctctcggcccgctgctcgataagctcggcaacggcgggaaaggcattgcgtggaatacgcaaagcgaagtcgatttcctcggcaagcttaactacgtcaagcccgacggtccggccaaaggccggccgcggatcgacagcgccattgacgcctccgaagttattcttagcctcgccccggaaaccaacggccaggtggcggtgaaagcctggcaggcgctgggagagtttaccggccgcgatcatacccatctggcgctcaataaagaggatgagaagatccgctttcgcgatattcaggcgcagccgcgcaaaattatctccagcccgacgtggtcgggactggaaagcgagcacgtctcctacaatgccggttataccaacgtgcatgagctgatcccatggcgcaccctctccggccgccagcagttgtatcaggaccatccgtggatgcgcgcttttggcgaaagcctggtagcctatcgcccgcccattgatacccgcagcgtcagccagatgaaggccgtgccgccaaacggctttccggaaaaagcgctgaatttcctgacgccgcaccagaagtgggggatccactccacctatagcgaaaacctgctgatgctgacgctgtcgcgcggcgggccgatcgtctggcttagcgaaaccgacgcgaaagagctgggcattgaagataacgactggattgaagcgttcaacgccaacggggctctcaccgcgcgggcggtggtgagccagcgggtgccgccggggatgaccatgatgtaccacgctcaggaacggattatgaatatcccgggttcggaagtgaccggtcgtcgcggcggcattcataactcggtaacccgcgtctgtccgaagccaacgcacatgattggcggctacgcccagctggcctatggctttaactattacggcaccgtcggatcgaaccgcgacgagttcatcatgatccgcaaaatgaagaatattgcctggctggatgacgaaggtcgcgatcaggtacaggaggcgaaaaaatga

SEQ ID NO: 210965 - DNA, 1383 bp, Klebsiella pneumoniae
atgtcggtgcagaatgataaagataatcattaccttttgaacaactggcggcctgaaaacaaggcgttctgggaaaataaaggccaagccattgcgcgaagaaatctatggatatcagtggcctgtttgctgcttgctttctgcgtatggatgttattcagcgccgtagcggtgaatctcaataaggtcggttttcatttcaccaccgaccagctttttttattaaccgccctgccttcactttccggcgcgatattacgggtcccctactcctttatggtacccctttttggggggcgctactggaccgtattaagtaccgttatcctgatcgtgccttgtatttggttaggggtggcaatccagaatattactactccgttctgggtatttattattattgcgctgctgtgcggttttgccggagcgaattttgcttccagcatgggaaatatcagtttctttttccccaaagcgaaacagggcagcgcgctgggagtcaacggcggccttggcaatctgggcgtaagcgtgatgcagatggtcgccccggcggtcatcttcctgccgctcttcacctttctcggcgtccatggcgtcacccagcccgatggttcgacaatcaccctgagtaatgcggcgctcgtctgggtaccgctgctgctgctcgccaccgtcgcggcatggttcggcatgaacgatatcgccggttcaaaggcctcgattcgcgatcagcttcccgtgctcaagcgaccgcatatgtggctgttaagcctgctctatctggcgacgtttggctcgttcatcggcttttccgccggctttgccatgctggcgaaaacccagtttcccgcggtcgatatcctcaagctcgccttctttggaccgttcatcggcgcgctggcgcgctcgttcggcgggatcatctccgaccgtctcggcggcgtgcgggtgacgctggttaacttcgtcctgatggcgctgtttaccggcctgctgtttctgaccctgccaggcagcggctccggcagctttctcgctttctacgtggtgtttatggggctctttttaaccgccggtctgggaagcggctccaccttccagatgatcgccgtcatcttccgccagctcaccatcgacagcgtaaaacagcgcggcggcagcgatgaagaagcgcagcacgaggcggtgaccgataccgctgccgcgctgggctttatctcggcgatcggcgccatcggcggcttctttattccgaaagccttcggcacctcgctggcgatgaccggctcaccggttggcgcgatgaaagtcttttttgtcttctatgtggtttgcgtgctggtgacctggctggtctacggccgccgtaaacccgcttaa

SEQ ID NO: 210966 - DNA, 537 bp, Klebsiella pneumoniae
atgcaggccgccatgcgcctggcgctgcgcggcggctttgccgccatgaccgtgcggcagatcgcccgcgaagcccaggtggccgccgggcagctgcaccaccacttcacctccatcggcgagctgaaagcgcaggttttcatccgcctgatccgcgagatgctcgacatgccgctggtggctgaggacgccagctggcgcgagcgcttgttctcgatgatcggcagcgaggatggccgactggaaccctatatccgcctgtggcgcgaaggccaggtgctggccgacagcgatccggacatcaaagcggcctacctgctgaccatgaatatgtggcatgccgagaccgtcgccatcatcgagcagggcctcgccagcggcgaatttcggtcggctgagcctgcggcggatatcgcctggcgctttatcgccctggtgtgcggcctcgacgggatttatgcgctggacacgcaggccctggatgaggcggcgtttagccgctatgtaaataagatgattacgctggagttgttttag

SEQ ID NO: 210967 - DNA, 1500 bp, Klebsiella pneumoniae
atgtcacggcaatggatgacgctgatggcgattttgctggtttatattccggtggcgattgacgctacggtgttgcatgtggccgcgccgaccctcagcgtggcgctgggtagcagcggcaatgagctgttgtggatcattgatatctactcattagtgatggccgggatggtgctgccgatgggcgcccttggcgataagatcggctttaagcgcctgctgctgctcggcagcgccatttttggcatcgcctcgctgtgcgccgcgctgtcgccgacgtccatgacgctgattgcctcacgcgctttgctggcggtgggggcggcgatgatcgtcccggcgacgctggccgggatccgcagcacctttgccgaggccagccagcgcaatatggcgctggggctgtgggcagcggtcggctccggcggcgcggccttcggcccgctggtgggaggtatcctgctggagcatttctactgggggtcggtgttcctgatcaatgtgccgatcgtgctggtggttatcgcgattaacgcgaaagtggtgccgcgccagcccgcgcgccgcgaacagccgctcaatctactgcaggcgctcgttttgattgccgcgatcctgatgctggtgtttagcgcgaaatcggcgctgaagggccagctggcgctgtggctcaccgcgctggtggcgctcggcggggcggcgatgttaacctggtttatccgcaagcagctgtcggcggcccgcccgatggtggatatgcgcctgttcacccatcgcataatcttaagcggggtgatgatggcgatgacggccctgattaccctggtcggttttgagctgctgatggcccaggagctgcagtttgtgcaccagaaaacgccgttcgaggcggggatatttatgctgccggtaatggtggccagcggcttcagcggcccgattgccggcctgctggtgtcgcggcttgggctgcgcgaggtggcgaccggcgggatgctgctcagcgccttcagctttctcggcctggcgttgaccgatttcagtacccagcagtggctggcctgggggctgatgacgctgctgggctttagcgtggccagcgcgctgctggcctccagttccgcgattatggcggcagcgccgaaggagaaagcggcggccgcgggggcgattgaaaccatggcctatgagctgggcgccggtctcggcatagcgctgttcggcctgatcctgacccgcagctacagcgcctctattgcgctgccgtctggcctgagtggcgccatggcgcagcaggcggcgtcatcgattggcgaggcggtgagtctgtcccaggcgctgcccgccggggtggcgcaggcgctgatggcggcggcgaagacggcttttattcaggctcatagcctggtgctggcgacggcgggtgtattgcttctactgctggccgccgggatctggcgcagcctcgccaccgtggcgaaaccgcagtcggcgctatag

SEQ ID NO: 210968 - DNA, 798 bp, Klebsiella pneumoniae
atgagcgacaatatacccaatacgctgagcgccaggcaggccgagcacgaccctaactttatgctgtctctggcccgcgggcttgaggtccttaacgccttcaccccccagcgccagcggctgaccatttcccagctcagccagaaaacgcaaatctcgcgcgcggcggtacgccgctgtttgtataccctcgccgcgctgggcatggtgcacagtccggatggccgtagctatgaactgctcccccgggtgctggccgtcggccacgcctatctggcaggcacgccgctggccaaggtggcgcagacggcgctggataatcttggcaaagcgctcggcgaatcctgttcggcggccacgctcgacggggataacgtgctctatattgcccgcgcggcggtcaataatttactgagcatcgatctggggcgcggcagccgcctgccggcgtgggccacgtcgatggggcgggtgttgctgagcgcgctgccggaggaacagctggaagtgacgttgtcacgagttacgcttattcgctacactccgcataccctgtgcgatttgtccggtttacgtgcagagatcgcccgggtgcgcatgcagggctatgccctcgccgaccggcagatcgaggtaggcttgtgctcgctggcggtacccgtgctgtcgcgtcacggtcaggtggtggccgccctgaatgtcggggtacctgccgcgacggtcagcgccgcggcgttaaaagagaaggctctcgccccgctacggcgcgcggcgatggatctgtcgctgcagctatag

SEQ ID NO: 210969 - DNA, 1119 bp, Klebsiella pneumoniae
atgactgccaccgtagagcaaatcgagagctggattgtggatgtcccgaccatccggccgcataaattgtcgatgaccaccatgggctgccagtcgctggtgattgtgcgccttacccgttccgacggcatctgcggcatcggcgaagccaccaccatcggcggcttgagctatggcgttgagagccccgaggccatcttgtcagcgatcacccattatctgacgccgctgttgaaagggcagccggccgataacctgaatgcgctgaccgcccgcatgaacggcgccattaaaggcaacacctttgcgaagtccgccatcgaaaccgcgctgctcgacgcccagggcaaagccttaggtctgccggtatcagccctgctcggcggcgcgctgcaaacggcgttgccggtgctgtggaccttagccagcggcgataccgcgaaagatatcgctgaaggagaaaaactgttggccgaaggccgccaccgggcgttcaaactgaagatcggcgcgcgtgaactcgccaccgacctgcgtcatacccgcgccatcgttgaagcgttaggcgaccgcgccagcatccgtgtcgacgtcaaccaggcctgggacgccgccaccggcgcaaaagtctgccgcgaactggcggcgatgggcgtcgatcttatcgaacagccggtcagcgcccatgataatgccgccctggtgcggttaagccagcaaattgaaaccgcgatcctcgcggatgaagcggtcgcgaccgcttacgatggttatcagctggcgcagcagggctttaccggcgcttacgcgctgaaaatcgccaaagccggggggccgaacagcgtgctggcgctggcccgcgtcgcgcaggcggcagggattggcctgtacggcggcaccatgctggaaggcaccgtagggaccgtggcttctctgcacgcctggtcgacgctgccgctgcagtggggtaccgagatgttcggcccgctgttgctgaaagacgatattgtcagcgtgccgctcacctttgccgacggtcaggtggcgctgccgcaaacgccgggccttggcgtcgagctggatgaagacaaactgcatttttatacccgccagccgtag

SEQ ID NO: 210970 - DNA, 291 bp, Klebsiella pneumoniae; identical to SEQ ID NO: 137544

SEQ ID NO: 210971 - DNA, 927 bp, Klebsiella pneumoniae
atgagtaatgtattcgtacaacaaccagctattcagaaattattacgcgacagtgccggattagatgttgccggcggcgatgaacgttttaaggcgattattcatcgtctgctggaaaatatctgcacgctcatcgacgactataacgttacggaagaagagttctggcacgcggtaaactatttgcacgagctgggcgggcgtcaggaggcggcgctgctggcggcgggtctgggactggagcatctcctcgatctgcgccaggacgccatcgacgcggcagcgcatcgggaaaccggcaccccgcgcaccatcgaagggccgctgtacgtggctaatgcgccgctggccgagggtcacgcccgcatggatgacggcgccgacgccggagaagtgatgtggctgcacggtgaagtcaaagacaccgaaggccggccagtggccaacgctattgttgatatctggcatgccaacaccctcggaaattattccttcttcgacccaggccagagtgagtacaacctgcgccggcggatccgcaccggcgccgatggccgctacagcgtgcgcagcatcatgccctccggctacggctgcccgccggatggcccaacccagaaactgctggacagactgggtcgccacggcaaccgtccggcgcacattcactttttcgtctccgcgccgggtcataaacatctgaccagccagattaacctcaatggcgataaatacctgtgggacgattttgcctttgccacccgcgacggcctgattgccgatccggtaaaagtgaccgaccgcgagatcatcgcgcagcgcaatcttgagggagagcacaccgaggtttgttttgatttcaccctgtgtaaagcgttgagcgccgacgaagagcagcgcgggatccgcctgcgcgccaaagagtaa

SEQ ID NO: 210972 - DNA, 1383 bp, Klebsiella pneumoniae
atgcaaaaaacgctctcgacgctcaaagacaaaatcaataatgccttagttgtcgaccgtgaaaatcatatttaccgttgccaccgctctatatttaccgaccagcagttatttgattttgaaatgaaacatatcttcgaaggtaactgggtatttcttgcccatgaaagccagattgccgagccgggagattattataccctgacgctgggacggcagccggttattattacccgcgataaaaagaatgagctgcacgcgctaattaacagctgcgctcaccgcggcgccatgttatgtcgacgcaaaaccgggaataaaaattctttcacctgtccgttccacggctggaccttcagcaataatggcaaattattaaaggccaaagatgagagcactggcggctatccgccgagctttaaacaagacggctcccacgacctgcaaaagttgccgcgttttcagtcctatcgcggtttcttattcggtagcctcaatgccgacgtgcagccgctggaggcctatctcggggaaacctgcaagattatcgacctgatcgtcgaccaggcgccggaggggctcgaggtacttaagggttcgtcgagctatgtatatgagggcaactggaaactgggcgcggaaaacggcgccgatggctatcacgtcagcgtggtccactggaactacgcctcaaccatgtcacgccgcaactatgaagcggaagggacgcacgcggtggatgccaacggttggtcaaaaagcctcggcggcggctatggatttgataacggccatatgctgttgtggacccgggcgctcaacccggaagtgcgcccggtctatgcccaccgcgaacggctgcaggcggaatttggcgaacgccgtgccgaccagatggtcaacgaaacccgcaacctgtgcctgtaccccaatgtctacctgatggatcagttctcgacgcaaatccgcgtaatccgccccattgcggtggataaaaccgaagtcaccatctggtgctttgcgccgaaaggggaatccgaccaggccagagcgctgcgtatccgccagtacgaggatttctttaacgtcagtgggatggggacgccggacgacctcgaagagttcagcgcctgtcagcgcggctatctcggcgaaaatctgccatggagcgacctcagccgcggcgcgctgcgctgggtcgatggcgcggatgagcatgcgcaacatgccggcttttcgccgcggttaagcggggtgaaatcggaggacgaagcgctgtacatcgcccatcaccaccactggcagacgctgatgctggcggccattgaacaggaacaacagcgttacgaccagtccattacccagcgcgtggaggtggcctga

SEQ ID NO: 210973 - DNA, 486 bp, Klebsiella pneumoniae
atgcttaacctcgaacaggttcgccagtttctctactacgaagcccgtctgctggacgatcgtcagtgggacgaatggctcagctgctacagcccgcaggtggtctactggatgccggcgtggggcgacgatgaccagctgacccgcgacccgcaaaaagagatttcgcttatctactaccccaaccgcgaagggctggaggatcgcgtctaccgcattaaaaccgagcgctccggggccagcacgccagagcagcggaccacccacatcatcagcaacgttgagctgatgggcgaaagcgacgagggtctggaggtgcgttacagctgggtcacctggagccatcgctatcagcacacggatgcctatttcggctctacctgctgcacgctaatcgaacaggacggcaggccgcagatcgtccgtaaaactgtgcgcctgaataacgactatatccgtcaggtgattgacgtttaccacatttaa

SEQ ID NO: 210974 - DNA, 1017 bp, Klebsiella pneumoniae
atgaccttcaatattgctcttaattttgaggacggcgtaacccgctttattcagtgccatgccggagagaaagtcctggatgccgcctatcgccagagggtgaatctgccgatggactgctcggacggcgtttgcggtacctgcaaatgccactgcgccagcggtgagtacgaactgggcgaagattatctcgacgaggcattaagcgacgacgaagcgcagaatcgccaggtgctgacctgccagatggtcccgaccagcgactgcgtgatcgatgtgccggtggccgccgcgcagtgtaaaaccgcgctgaccaacaccggggcgcaggtacgacaggtgaatttactgtccgataccgccatcgaactggtggtcgccctcgatgagccgctggccttcctgccggggcagtacgtcaacattcaggtgccgggcacgcctcatgtccgcgcctactcattcagctcgcaaccggggtccctcgaagggcgttttctgatccgtaacgtgcctggcgggatgatgagccagtggttaacccagcgggcgcggcccggcgatcgtcttaccctcagcggcccgatgggcagcttctatctgcgccacggcgaacgtccgctgctgatgctggcgggcggtaccggcctggcgccgctgctctccatgctccataccctgcagacacagggcagccagcgtccggtgatgctgctgtacggtgttactcgtgactgcgatctggtgaaaaccgacgcgctggatacctttattcaacagttgacggggtatcgttggctaccggtggtggccgatgaaaacagcacttgcccgcagcgcggctttgtcaccgaccatctcgacgacgcgatgctgaacaacggcgacgtggacatctatctctgcggcccgccgccgatggttaacgcggttgccacggcgttgcgcgaccgcgggatcaccccggcggggttctggtatgagaaatttatcgccagccagagcgcggcggcataa

SEQ ID NO: 210975 - DNA, 774 bp, Klebsiella pneumoniae
atgcgttttaccgataaagtcgtcatcatcaccggcgcggcgcagggcattggccgccagacggcggagcaggcggctgcagaaggcgcggctctgctgctcatcgatcgctcgtcatacgtccatgagctggcggcgacgctggcgcaatccggctgtctggtgctggcgctggaggcggatctggaagcgtgggaaagtaccgagcaggcgtttgccgccggggtcgctcattttggccgtatcgacgtgctgatcaacaacgttgggggcaccatctgggcgcgcccctttgccgaataccagccggagcagattgagaaagagatccgtcgctcgctgttccccacgctatggggctgccgcgcggcgctgccatggatgctgaagcagggcaaaggcagcatcgtcaacatttcgtcggtggcgacggcgggagtgaatcgggtgccgtactcggcggcgaaaggcggcgttaacgcgctgacccggtcgattgccatggagtacagcggcagcggtattcggattaacgccgtggccccgggcgggaccgaggcgccgccgcgcctgacgccgcgtaacgaagagcagccgagcgagcaggaaaaggcgtggtatcagcaggtcgtcgatcagacggtggcgagcagtctgctgcaccggtacggcacgctggcggaacaggcgaatgcgatcctgtttctcgccagcgatgaggccagctatatcaccggcgtgacgctgccggtagccggaggcgatctcggctaa

SEQ ID NO: 210976 - DNA, 879 bp, Klebsiella pneumoniae
atggagaaaaagagagccacgacgatcggcttcgccgccattatcttatggagcacgatggtcggattgattcgcggcgtcagcgaaggactgggagcggtcggcggcgcggcgatgatttacagccttagcggcctgctgctgatctttaccgtcggctttcccaacctgcgccagatcccgcgtcgctatctgctggccggcagcgtgctgtttgtcagctatgaaatctgcctcgcgctgtcgctgggctatgccgccagccgccagcaggccattgaggtggggatggtcaattacctgtggcccagcctgacgattttattcgccattctctttaatggccagaaaagcagctggctggtgatccccggcctgattctcgccctgctgggcgttggctgggtgttgggcggtgagcatgggctacagcccgatgagattatcagtaacgtcatttccagcccgcttagctatctgctggcctttgtcggggcgtttatctgggccgcctactgcacggtgacggccaaatatgcccgcggtaaaaacgccattacgctgttcgtcctgttaaccgccctgacgctatggctgaaatttctcgccagcgaccagccgccgatgctgtttagctggccggtggtcattaagctgatgacggtctccgtggcgctggggctggcctacgcggcgtggaacgttggcatcctgcacggcaacgtcagcctgctggcggcggcctcctacttcacgccggtgctctcctctgcgctggcggcgatcctgctgagtgcgaccctgtcgtggtccttctggcagggggccgggatggtatgtctcggctccctgctctgctggtacgccacccgccgttag

SEQ ID NO: 210977 - DNA, 588 bp, Klebsiella pneumoniae
atggacgtcagccgcagaaagttctttaagatctgcgcaggcggtatggccggaactaccgccgccgccctgggctttgcccctaaaatggcgttggctcaggcacgcaatttcaaattgctgcgtgcgaaagagatccgcaacacctgcacttactgctccgtgggctgcgggctattaatgtatagcctcggcgacggtgcgaaaaacgccaaagaagcgatctaccatatcgaaggggacccggaccatccggtgagccgcggcgcgctgtgcccgaaaggggcaggcctgctggactatgtccacagcgaaaaccgtctgcgttatccgcaataccgcgccccgggctcggataaatggcagcgcatctcgtgggatgaagcctttaaccgcatcgcccgactgatgaaagccgaccgcgacgccaactttattgaaaagaatgaacagggcgtgacggttaaccgctggctttccaccggcatgctgtgcgcctcggcggcaagcaatgagaccggcatgctaacgcaaaaatttgtgcgatcgctgggtatgctggcggtagacaaccaggcgcgcgtctga

SEQ ID NO: 210978 - DNA, 2412 bp, Klebsiella pneumoniae
atgaccaaccactgggtggatatcaaaaacgccaacgtcgtggtggtgatgggcggtaacgccgccgaagcccatccggtgggtttccgctgggcgatggaggcgaaaaacaataacgacgccacgctgatcgtcgtcgacccgcgctttacgcgtaccgcgtcggtggccgatatctatgcgccgattcgttccggtaccgacattaccttcctgtcgggcgtgctgctgtacctgatcgaaaacaataagatcaatgccgagtacgttaagcattacaccaatgccagcctgctggtgcgggatgattttgccttcgaagaggggctgttcagcggctacgatgcggaaaaacgccagtacgataaatcgtcctggaactaccagttcgatgaaaacggctacgccaaacgcgatgaaacgctcacccacccgcgctgcgtgtggaatctgctgaagcagcacgtttcccgttacacgcccgaggtggtcgaaaacatctgcggtacgccgaaagcggacttccttaaagtgtgcgacgtgctggcctcaaccagcgccgcggaccgcaccaccaccttcctgtatgccctgggctggacgcagcacaccgtcggcgcgcagaacatccgtaccatggcgatgatccagctgctgctcggcaatatggggatggccggcggcggcgtcaacgccctgcgcggccactcaaatattcaggggctgaccgatttgggcctgctgtcgaccagtctgccgggctatttgacgctgccatcggacaaacagaccgatttgcaaagctacctcagcgccaacacgccgaaggcgaccctgcccgagcaggtgaactactggagcaactacccgaaattcttcgttagcctgatgaaatccttctacggcgaggcggcgcaaaaagagaacgactggggctttgagtggttaccgaagtgggaccaggcttacgacgttatcaaatacttcaatatgatggataacggcaacgtcaccggctatatctgccaggggtttaacccggttgcctccttcccggacaaaaacaaagtggttcgcagcctcagcaagctgaaatatatggtggttatcgacccgctggtgaccgaaacctcgaccttctggcagaaccacggcgagtctaatgatgtcgacccgtcggcgattcagaccgaagtcttccgtctgccgtcgacctgctttgccgaagaggacggttcgatcgccaactccggccgctggctgcagtggcactggaaaggtcaggatgccccaggtgaagcgcgcaatgatggcgaaatccttgccgggatttaccatcgcctgcgcgaactgtaccgcaccgaaggcgggaagggcgcggaacccctgctgaagatgagctggcgctacaagcagccggaccatccggaatcggaagaggtggcaaaagagaacaacggctacgcgctggcggatctctacgatcaaaatggcactttgctggcgaaaaaaggccaactgctcaatagcttcgcgctgctgcgcgatgacggcagcaccgcgtcgtcttgctggatctataccggcagctggaccgagcagggtaaccagatggcgaatcgtgataacgccgatccttcgggcctgggcaatacgctgggatgggcctgggcgtggccgctcaatcgtcgggtgctgtacaaccgcgcttcggccgatatcaacggcaagccctgggatgcgaagcggatgctgatccagtggaacggcaacaagtgggtcgggaatgatattccggacttcaataccgcgccgccagggagcaacaccgggccgtttatcatgcagcaggaggggctgggtcgcctgtttgcgctcgataaactggcggaagggccgttcccggagcactacgagccgatggaaaccccgcttggcactaacccgctgcacccgaaggtggtctccagcccggtggtgcggttgtatgaagaggacgccattcgcttaggtaagaaggataaattcccgtatgtcgggaccacctatcgtctgaccgagcatttccacacctggaccaagcatgcgttgctcaattccatcgcgcagccggaacagtttgtcgaaatcagcgaagggctggcgaaaagcaaaggtatcgctaacggcgattgggtgaaagtcagcagcaagcgcggcttcattcgcgcggttgccgtggtgacccgccgactgcgcacgctgaacgtcaacggccagcaggtggagaccgtcgggatcccgctgcactggggttttgaaggcgtggcccgcaaaggctacatcgccaacaccctgacgcctaacgttggcgattccaactcgcaaacgccggagtacaaggcgttcctggtcaacatcgagaaagcgtaa

SEQ ID NO: 210979 - DNA, 885 bp, Klebsiella pneumoniae
atggcgatggaaacccaagacattattaaacgctccgcgaccaacccgatcacccccgcgccgcgcgcgcgggactataaagcggaagtcgccaagcttatcgatgtctcctcctgcgtgggctgtaaagcctgccaggtggcctgttctgagtggaatgacatccgcgatgacgtggggcactgcgtcggggtgtacgacaacccggcggatctcagcgccaaatcctggacggtaatgcgttttagcgagaccgaacagaacggcaaactggagtggcttatccgcaaggatggctgtatgcactgcgcagagccgggctgcctgaaagcctgcccgtccgccggggcgattattcagtacgccaacggcatcgtcgatttccagcaggaaaactgcatcggctgcggctactgcattgcggggtgtccgtttaacgtcccgcgcctcaataaagaggataaccgggtctataaatgcaccctgtgcgtggatcgggtcagcgtcggccaggagccggcctgcgtgaaaacctgtcctaccggcgcgatccacttcggtacgaagaaagagatgctggaggtggccgaggagcgggtggctaagcttaaaaaacgcggttatgccaacgccgggatttacaacccgccgggcgtcggcggaacccacgtgatgtacgtcctgcatcatgccgaccagccggagctgtatcacaagctgccgaagaaaccgcagatcgataccagtatcagtctgtggaagggggcgctgaaaccgctggcggcggcgggctttatcgccaccttcgccggactgatttaccactacatcggtatcgggccgaacaaggaagttgacgacgacgaggagaagcatgatgagtaa

SEQ ID NO: 210980 - DNA, 657 bp, Klebsiella pneumoniae
atgagtaaatcgaagatgattgtgcgcacgacgtttatcgatcgcgcctgtcactggacggtggttatctgtttcttcctcgtggcgctgtcgggaatatcgttcttcttcccgacgctacaatggctaacggaaaccttcggcacgccgcagatggggcgtattctgcacccgttctttggggtgctgatttttgtcgcgctgatgtttatgttcgtgcgctttgtccaccacaacatccctgataaacaggatattccgtggctgaaaggcatcgtcgaggtgctgaaaggcaacgagcataaggtggcgcgcgtcggtaagtataacgccgggcagaagatgatgttctggaccatcatgagcatgatatttgtgctgctggtgaccggggtgattatctggcgcccatattttgcggaatatttcccgatgcaggtgattcgctatagcctgctgattcatgcgacgtcggccatcattctgatccacgccatccttatccatatgtatatggcgttctgggtgaaggggtcgattaagggaatgattgaaggcaaggtgagccgccgctgggcgaagaaacaccacccgcgctggtatcgcgatgtcgaacgcctggaggcgatgaaagagagtcgtgaagggatgaagtaa

SEQ ID NO: 210981 - DNA, 819 bp, Klebsiella pneumoniae
atgggcaacaagaaaagcggtaatccggtcgacacggcggcaaaaatcgcgccgctcgacaacaaagcgtacgagaaagcgctgcgcaaactccacgttgagctggtgaaactgcagcgctgggtggtacacaaaggactgaaagtgtgcattgtctttgaaggccgggacggcgccgggaaaggcggcaccattaaggccatcaccgagcgcgtcagcccgcgtatcttccgggtcgtcgccttaccctcgcccaccgagcgcgaaaaaagccagctttactttcagcgctatatcaagcatctcccggcggccggcgaaatcgtgattttcgatcgcagctggtataaccgcgccggcgtcgaacgggtgatgggcttttgtacgccggaggaggtgcagaagttcctcgacggcgcgccgatggtggagcgcggcatggtcgaatcgggcattattctgctcaagtactggctggaggtctctccgcaggagcaggagcgccgtctgcgggatcgcatcgacgacgggcgtaaaatctggaagctctcgccgatggacattaagtctttcaaccgctgggatgaatataccgctgcccgcgacgccatgttcgccgccaccgataccgcctgggcgccgtggttcgtcgcccgctcggagaataaaaagcgcgtgcgtctaaatatcatcacccatctgctgtcgcagatcccctatgaagctttaccggtggagcctgtgacgctgccgaagcgcaaaattggcaaaatgaaacagactaattttcctttccgcttcattccggagaagttttga

SEQ ID NO: 210982 - DNA, 441 bp, Klebsiella pneumoniae; identical to SEQ ID NO: 136857

SEQ ID NO: 210983 - DNA, 1155 bp, Klebsiella pneumoniae
atgaaaaaaacgattttttcactggcgctgggcacctttggacttggcatggcggagtttggcattatgggcgtgctgccggatatggcgcacgatgtcggaatatccatacccgccgccggcaatatgattgcctggtatgccttcggcgtggtgatcggcgcgccgatcatggcgctgctctccagccggttttccctgaaatcggtgatgctgttcctggctggcctgtgtattctcggcaataccctgtttaccttctccagtagctacgccatgctggcgcttggccggctggtttccgggtttccccacggggcgttctttggcgtcggcgcgattatcctgtcgaaaatcgcgccgccggggaaggtgaccgccgcggtggcggggatgattggcggcatgacgatcgctaacctggtgggcgtcccgggcggcacctggcttgggcatcacttcagctggcgctatacctttgcgcttatcgcggtatttaacgtggcggtatttctggcgatcttctgctgggtgcccacgctttatgaccgggccagcacgcggctgcgcgagcagttccgttttcttgcctccccggcgccgtggctgattttcgccgccaccatgttcggtaacgccggcgtgtttgcctggttcagctatatcaagccctttatgctcaatgtatccggctttgctgaaagcaagatgatgctgattatgatgctggcggggctgggaatggtggtcggcaatctgttcagcggcaaaatttccgggcgctacagcccgctgcgcattgcggccatgaccgacggggtcatagccgtgacgctgctgctgatctttgccttcggtgaacagaaagtcgcttcgctggcgctggcgtttctctgctgcgcgggactattcgccctgtcagcgccgctgcagatcctgctgctgcagaacgccaaaggcggcgagatgctgggggcggccgggggacagatcgcctttaacctcggcagcgccatcggcgccttctgcggcggaatgatgatcgcccagggctttggctggaacagcgtggcgctccccgccgccgcgctgtcgtttctggcgatgagcgccttgctcatctatggctgtcatcagcggcgacaagcttactaa

SEQ ID NO: 210984 - DNA, 1092 bp, Klebsiella pneumoniae
atgacgctgagtcaggatattctggccgaactggcggagatcgcccccggttccccgctcgatcaggcgcgcgccgtccgcgatgccgccacccgtcacgcccagggaagttatgaagtgctgttccgccagcaggacgctgactttcctcttgatgaacgcttcgcggtggccgcgaaggtggcaaaactgcaccaggcggacgcgctggcggcgcactatgccggtttcggcctcgccgatccgaccaccgatcgtctggtcccggcgctggcctttgcccgcctgctcaccttcacccccgttgaagccactcccggcgcgctgcacaccttaaccagcgcgggctggagcctgcggggcatcgtcaccctggcgcagctggtagcctttgtcagcttccagagccgactgctgctgggcctgcgggcgctcaaccataagcccatcgtcagcgcagatacgccgctggtcgccggatactggcataccaccccgtacgcgcagagcggcaaagcggccccggttcgcttcacccgcgacgagttgcactgggaaccctggctggccgataaaccgctggcggaattcaacgctgaagaacaggcgattctggccaaatatggccatagcgactccccctactttcgcctgctggcgcgcaaccagccggtgctggagcagcggaccctgaccgataagggcattttctataccgcgggaggattgccgcgcgccgaacgcgagctggccgccacggtcgccagtaaaatcaacggctgtatttactgcgcctcggtgcatgcccgcaaagcggcgcagctggcgaaggacgagaccgccgtcgacacgctgctggcggtgacgccgggagaggatctgcgcgacgggcaatcgccgcgctggcaggcggaaatcgacgccgccgccgcgctatcggtgacgccacccgcattaaacgccgatcatctggcggcgcttgatgagcagggcttagatactctggcccagctggatctgctgcagtccgcggcctttttcgcctgggccaaccgcctgatgctgaccctgggcgaaccctggcgtgagtag

SEQ ID NO: 210985 - DNA, 987 bp, Klebsiella pneumoniae
atgccaaaacgcctcggtttttttacccgtctgctcgatcagggctccgcgcaaacgcgctaccggctggcggccgaacagatccgccacgcggagcgtttgggcttcgacagcgcatggattgcccagcaccattttcatgaacaggaaggcggcctgccttcaccgctggtgtttctcgcccacgtcgcggcgcagaccgaccggatccgtctcggtacggcgattatcaccttgccgatggaaaatccgctgcgcgtcgccgaagacgcggcggtactggatttactcaccgacggacgtctggaggtgggttttggctccggcggcacgccaacctcgtttctgcccttcggcctgaccagcgagcagcgcggggcggcgtttgccgaccatctgcacctgatccatagcgcctggcgcggcgacacgctgagccacccggacaaccgtctctatccgccggcgccgcagctggcggagcgtatctggatcgccaccttctcggcggagggcgctatccgcgccggtcaggcgggacacgggttgatgctgtcccgcactcagccacggccgcccggcgagccacgcctgccgctggacgccattcagaacccgatcatcgacgcctacctggcggcgctgccggacggcgttgcgccgcggatcctcgcctcgcgcaccgccttcgtcgccgacagtctcgcccacgccctgcaggtcgccgagcccggtctgcgcaagcaggcaactcagcaccgggcggcgggtcatacgatagaaggtgacagtgtcaccgactatctgcaacagcttgatgcccacgttggcgatcctgagcatgttattgcctccctggcgcaggacagcgtgctggcccgcgccaccgatatttcgtttcaggtgcactcggtcgagccttcgcaccgggatacgctgcgttccattgagctgatcgctcaacatattgccccccacatcagataa

SEQ ID NO: 210986 - DNA, 1617 bp, Klebsiella pneumoniae
atgaccgttttgtccgttgaagatctacgcatcagctaccgctcgcggggcgaatggcgcgaggtggtgcacaacatcagcttttccatccagcgcggcgaaatgctggccttcgtcggagaatccggctcggggaaaaccaccaccgcgcaggccattatcggcctgctggcggataatgcccgccgggatgccgggcggattgtcctcaatggcgaagtgattagcgactggtcggataaacgcctgaaccgcctgcgcggagtgagcatcagccaggtcccgcaggatcccggtaattcgctcaacccggtaaaaaccattggtcagcaggtggaagagatcctgcggctgcatcagtccctctccgccgctgagcgccgacagcaggttcttaacctgctcgctaaagtcggtctcagccacccggaacagcgttttgaccagtatccgcatcagctgtctggcgggatgaaacagcgggtgctgatagccatcgccattgccctgcagccggatctgattattgccgacgagcccaccagcgccctcgacgtcacggtgcagaagcgcattctcgacctgctcgatatcctgcgtcgcgagtcgggtaccgccgtgctgtttgtcacccacgatctggcgctggccgccgaacgcgccgaccggatcatggtgtttcgccagggagagattcaggaacaaggcgccaccgagacgattgtccagcgtccgcagcatccttacacccgccagctgctccacgacctgcaggatgcgccgttgaggctaacggcggcgcgtcaccggccgctggccacgccggccattcgcgtggaggggatcagcaaacgcttctcgctgggcaaacaggcgctgcaggcgctcgacagcgtcagctttgaggtcagacgcggcagcacccatgcgctggtgggcgaatccggctccgggaaaaccaccctggcgcggatcctgctgggctttgagcgcgccgacgccggacaggtcatcatcgacggtatcgacgccgggcatctcagccgcgaggcacagcgtcagttgcggcgcaagatccagtttgtctaccagaaccccttcgcttcgctcgacccgcgccagacgctgtttgcgattatcgaagagccgttaaaaaactttgagcgcctcagcgcggcgacgcgtcgccagcgtgtggagagcgttgccgcccgggtggccctggcccccgagctgctgtcgcgtacgccgcgggagctttccggcggccagcgccagcgggtggcgattgcccgggcgctgatcctcgagccggccatactggtccttgacgaagcgacttcggcgctcgacgtcaccgttcaggcgcagatcctcgccctgctgcagcagctacagcagcagctgggtctgagctacctgttcattacccacgatctggcgacggtcaggcggatcgccgacagcgtcacggtgctgcgcgccggccaggtggtggagcatggcgacgtaaaccgcctgttcgccgccccgcagcaggcctacacccgcgaactgatcgccgccattccccaggtttccccccgcttagcacaggcccacacggagaacgcataa

SEQ ID NO: 210987 - DNA, 849 bp, Klebsiella pneumoniae
atgagcctggtcgactataccatcgcggttcgccgccgcccggagtggcgtagagtgcgcctgcagcctggcctgtggctggcgtgggcggtgatgatcgccgccctgttaatggccattgccccacagtggtttacctccgctaacccgctggaggggatccccggcgctcagcgcctggcgccgcaggcgcactactggctgggtaccgaccagctggggcgcgacctgtggacgcgggtggtttacggcgcggtgcattccctgtctgcggcgctgatcgccgttgccatcggcctggtggtgggtaccgcccttggcaccctcgccggggcgctggccggacgcgtggaatccaccatcatgcgcctggtcgatgtcctgctggccatcccctccctgctgctgcagctcacggtgattattctgctgggtttcggcacggtgaatgcggcggtggcggttggcgtcgcggctatcgccagcttcgcccgcctggcgcgagcagaagtggtgcgcgtgcgccacagcgattacgtcgaggcggcccggggcagcggcggcacctttttcgccgtcttctggcgccatattctgcccaactcgctcactgcggtgcttgctttcgcgacgctgcagttcggacaggcgatgttggccctggccaccctcagcttcctcggctacggcaccccgccgccggtcccggagtggggactactgatcgccgaaggtcgcaattacctgtcaaccgcctggtggctgaccaccttccccggcctcgccgtggtcgccgtggtccttgccgccaatcgtcttagccgccagtggagtggagcacgcccatga

SEQ ID NO: 210988 - DNA, 945 bp, Klebsiella pneumoniae
atgagcgcttatcttctgcgacgattcggccaggggctgctggtcctgtgggcggcctttaccctcacctttttcctgctgcaggtcctgccgggggatgcggtgctgatcaagtttcagaacccggaccttggcctgagcccggcgcaaattgcggagatgcggctggcctacggcgccgatagcccgctgtggcgccagtacctgcacacgctgctggcgatgctgcacggcgacttcggctattccctgcaggcgggtctggcggtcagcagtctgattgccagcaacctgccggataccttaagcctcgcgctgccggccttcctgctggccgtggcgctggcgttcgccctcgctttcgcttcgcggctgccggggctgcgctggctgagcaattttctgcagtcgctaccggtgctgtttatctctctacctaccttttggttgggtatcgccctgatccagctcttctcgtttcagttgcgctggatcccggtaatcaaccccggcccactggaaggactgattttaccggttatcgccgtcgcactgcccatttccgccccactggcgcagatcctgatgcgcagcatggatcaggtggcggttcagcccttcgtcgcggtcgcccgcgccaagggcatgagcgaaacgggcgtcctctggcgccatgtgatggggaatgccctgctgccggcgctgaatattgccgggctgctgctcggcgaactgattgccggggcgctgatcaccgagaccgtcttcggccgcagcggcctcggccagctgacccagcaggcggtcaataaccaggatatcgccgtactacaggcggtggtgatgatctccgccctcggtttcgtcctgatcaacctgctggtcgacctggtcatgccgcgactggatccccgactccatttacagaccggaggtgcgaaatga

SEQ ID NO: 210989 - DNA, 1623 bp, Klebsiella pneumoniae
atgcatcgtcattttcgcctgcccgcgctggccgcgctgtttctcaccggcgccttttccgtctgggccgccgacacgccggttaaaggcggcaccttaatttatctggagcagcaaccgcacaccaatctctatccgcccgccggcggattttacccgaatggcgggattctcaatcagataaccgacaagctcacctggcagaacccgaaaacgctggagattgagccgtggatcgccgagagctggaccagcaatgccgataaaaccgagtacactttccacctgcgcaaaggggtcactttctcagatggcacaccgctggacgccgccgccgtcgccaaaaacttcgatacctatggtctgggagataaagcccatcgtctgcccgtctcggaggtcatcaataactaccagcgcagcgaagtgatcgacccgctgacggtaaaattctacttcaacaagccgtcgccgggcttcctgcagggaaccgccaccatcggctccggtctggtatctctcagcaccctgcagcgtaattttgaagagctgggcgatgcccgacatattatcggctccggccccttcgtcgtacaggatgaaaaaccaggccgcgagctgacgctggtggcgcgcaaggattaccagtgggggccgaaaaacattgcccagcaggggcccgctaacctcgacggcatcacctatattgtgacgccggaagacagcgtgcgtatcggcgcgctgctggcaggtcaggcgggctttattcgccaggtgcaggcctacgatgaaaagcaggctaccgatcagggatttaagatctacgctgcccctacccgcggggtcaacgacagtctgagcttccgcccggataacccactggtcgccgacctgcgggtgcgtcaggccctgctccatgccaccaacgccaggcaggtggtggagacgctattctccgctaactacccgcaagccacctccgtgctggccagctctgccgccggctatgtcaatctcagcgataaactcaccttcgaccaggccaaagcccggcagttgctggatgacgccggctggaagcccgccgccgacggtattcgcagcaaagacggtcagcggctggcgctgaccgtctatgagtcgctgccgcagccgcaaaataaggaagtgctgcagctgatcgcccagcagtggcgccaggtgggtgtggcgttgacggtcaaagccggggatgccggtagccgtacgctggataacctcgacccgcagaaaaccccgctcaccgtctcagaagtgggccgcgccgacccggatgtggtgaaaagtatgttcttccccaacaaccgcgatgcgctgctgcagaaaggcggctccagcgataaagtgcagcgcttccgcgatgataagctcaatgacctgctgaccggcatctccgcggcggttgagccgcagcagcgcttgcagttaaccggtgacgcccagcgctatctgatcgataacgcctatgtgatccctattttcgaagagccgcaggtgttcgccggcgcgccgtgggtcaaaggcgtcagcttcgaggccgtcggtcgtccgtcgttctacggcgcgtggctggacaagcactaa

SEQ ID NO: 210990 - DNA, 1011 bp, Klebsiella pneumoniae
atgaaggcagctgttgttacccacgaccatcaggttaacgtcacggaaaaaacgctgcgcccgctggaatacggcgaagcgctgttgaaaatggaatgctgcggcgtgtgtcatactgacctgcacgtgaaaaacggcgattttggcgataaaaccggcgtcattctcggccatgaagggatcggggtggtacaaaaagtcggcccgggcgtcacctccctgaagccgggcgaccgcgccagcgtggcgtggttcttcgaaggctgcggccactgcgattactgtaacagcggcaacgagacgctctgccgctcggtgaaaaacgccggctataccgtcgatggcggcatggcggaggagtgcatcgtcaccgccaactacgcggtaaaagttccggacggcctcgactccgccgccgccagcagcatcacctgcgcgggcgtcaccacctacaaagcggtcaaggtctcccacatcaaaccgggccagtggatcgccatctacggcctcggcgggctgggtaacctggcgctgcagtatgcgaagaatgtgtttaacgccaaagtgatcgctatcgacgtcaacgacggacagctggagctggcggcctcgatgggcgccgacctgaccatcaactcccgcaatgaagatgcggcgaaagtgattcaggaaaaaaccggcggcgcccacgctgcggtagtaaccgcggtggctaaagcggcctttaactcggcggtggatgccgttcgcgccggtggccgcgtggtcgcggtgggcctgccgccggaggcgatgagcctcgatattccgcgtctggtgctggacggcatcgaagtggtcggttcgctggtcggcacccgtcaggatctggtggaagcctttcagtttgccgccgaaggcaaagtggtgccgaaagtcaccctgcgtccgctggaagatatcaacgctatcttcaaagagatggagcaaggtcagatccgcggccgtatggttatcgatctgcgtagctaa

SEQ ID NO: 210991 - DNA, 600 bp, Klebsiella pneumoniae; identical to SEQ ID NO: 136847

SEQ ID NO: 210992 - DNA, 954 bp, Klebsiella pneumoniae
atgcctgatacccccttaatccaacagattcgtaccgcctcgcggttaatggtgcgcgagctgggctttatgagcaccacgctggccgccacccattattcaccttcggcggtgcaaaccctgcttgaggtatcgatgaggggggagatgacggccgcgcagctggtcacgttgctgggactggaaaaatcaagcgtcagccggatggtctctcgtctgctggcggctggtgagctggaggagcgtccttgcgcggaggatgcgcgcgcgaaatcactcgccctgacggcaaaggggcacgatacggtggcgaaaattaacgcctggggtacccgtcaggtggtggaggcgttagaccatctggatgagacgcagcagcaaactgtcgccactggactggcggcctatgcccgggcgctggcgcagtgtcgggatagcgcgctcgcggatacggctccgcaaatttcgctgatgaccggctaccagccggggatgatcggccggatagcccagatgcacggggagtattacgcccgtcatcatgactttggcgctttttttgaaggcaaggtcgccagcggcgtagcggaatttgccacccggctctcctccccggccaaccagatctggctggcgatccgcgaagggaaaatcgtcggctcgctggctatcgatggcgaggacctcggccagcaggaggcgcatttgcgctggttcattctcgatgacagctgccggggaaccggcattggcaggcggctcctcagcgaggcgatggctttctgcgatagtcgccagtttagcgcggtgcagctgtggacctttaaagggttggacgcggcccgcaaactgtatgaatcctttggcttcacgttaatccgagaatggcagggggagcagtggggaaaggtaatgaccgagcagcagtttacccggtccggaaacaccggctaa

SEQ ID NO: 210993 - DNA, 1716 bp, Klebsiella pneumoniae
atgagtacattactaactgcccatgcgctccacgtggagacggcttttgggccgctgtttaactccctctccttcaccctgaagaaaggcgaccggatcggtctcatcggccataacggttgcggcaaaagcaccctgctgcaggtgctggacggcaccctcgcgcccacctcgggcagcgtctcgcttgccggtcagtgtctgatggcccgcgttgaacagcatctgccggaggcgctgcatacgcagtcgctgctgcaggcggtgctggccccattacccgctgatgtacgggaagcgcagcgctggctggccgaacgcctgctggcgcagatgggctttcccccggcggtgatggagcagcagaccgccaccctgagcggcggccagcacacgcgtctgctgctggcccgggcgctgatccgccagcctgatctgctcttgttggatgagccgggtaaccatctcgatctgcccaccctgctgtggctggaaagcttcctgcaaacctggcaggggagcttcgtactggtgtcacacgacaacaccttactggatgctgtaactaatgcgagttggatcctccgtgaccagacgctacattgcttcgccttgccctgcagcgctgcccgtcaggcactgcaggagcaggatgaaagcgccgcgttacgtcataaggcggagcaaaaagagatcgaccgggtcagcgccagcgcccggcggctggccacctggggtcgggtctatgacaatgaagatctcgcccgcaaagccaaacagatggagaagcaggtcgcccgcctgaaagacgagcagaccgagctcagcgtcggcccgccgtggcgcctggtgttacagggggacgccctgccggccgaccgccttttggagatggacacccttcccgtctcgcccgcgccgggtcagccatccctcttcaccaccggcgtggcgcgcctgcgcagcggcgatcgcgtggccatcatgggacgtaatggcggcggcaaatcgtccctgctgcgcctgctgtggcagcagatgaacaacgcatcgcctctcccggggctgcgcctgcatccccggttgcaccccggctactatgaccagacgctggcgcagttgccggacgaggccagcctgctcgaggccctgacgccgtttgccccgtcggcggacacccgtaaacgggcgctgatcgccgccgggtttggctgggcgagacatagccagaaggtcagcaccctcagcggcggcgagcgatcgcggctgctgttcgttggcctgtcgctggcgcgctacagtctgctgctgctggatgaacccaccaaccatcttgatatggagggtaaagcggcgctggcgcagacgctgcgcgattaccccggcggcgtgctgctggtcagtcatgaccgccagctgattagcgaaagctgtaaccgcttctggctgatcgacagcgccgggctaacggagtggcacagtctggaggaggtctatgcccgtctgcaggccgtggcgcccgccccggacagtcggctcgctttgcaaagtacacccgccggggctgacgatgatgaggaggcgctgctggcgcggctgattgacctggagcagtggctggctgacgacatggcccgcaagccaaaacatcaaaagccgtcactgcaggcacagtggcaagaggagattgcccgcctgcttaaccaactgacgtaa

SEQ ID NO: 210994 - DNA, 708 bp, Klebsiella pneumoniae
atgcaaaaattaaccccaggcgcgaataaagcgaatgcgattctgatccgtattgtcttgtttcttatcggcggtatcgccatcatcgccggaatgtgcctcttcagcggtgatatgtggatgctcaccccgcgggcggaacagtatcagcccgccaccggcgatctggtggatgtcgtcatctatgagccgagtaaatttatcttcgccctgctctacgtgtgtattattaccctggtctggctgctggcggtacgtaaaatcccctggcggccgatacagcatcctatattagcgctgataatactgattgccgccgggatatttattttcctccacccggaggtcaccccgggtcgggatgccagtattcagtacggtaaacacaacatttcttacactgccattttctggagcaaaacgaattcagatcgacatgtcactcaaccctctaaatatgaaatttttgttgaagcgaaagatccccgctggcttatcgacagaaacaatcttggccgcgcctggcgctgtgaagtcaagcggcatacccagttttacaccctgtcattcaatgagggctggtttccggacggcgatccgcaggtcatggcccgccagtgtactcaggtaagcgatctgaatgcgctcagtgaaacggcaatcatgattgcccgcccgatcgccaccgtccctgtggaggcaccgtaa

SEQ ID NO: 210995 - DNA, 1698 bp, Klebsiella pneumoniae
atgcaatttacccataagaaaaaccgttccctgtacatcccctacgcgggtcccgttctgcttgaattccccctgctcaacaagggaagcgccttcagtatggaagagcgcagcaatttcaacctgctcggcctgctgccggaagtggttgaaactatcgaagagcaagcggaacgcgcctggatccagtatcagggattcaaaactgaaatcgacaaacatatttatctgcgtaacatccaggacaccaacgaaaccctgttttatcgcctgatcggcaaccaccttgaagagatgatgccggttatctataccccgacggtaggcgcggcctgcgaacgtttctccgagatctatcgtcgcgcccgcggcgtctttatctcctaccagaatcgccataaccttgacgacatcctgcaaaacgtcccgaaccacaacgtgaaagtgattgtggtcactgatggcgagcgcattctcggccttggcgaccaggggatcggcggaatggggatcccgatcggtaaactgtcgctgtacaccacctgcggcggcatcagcccggcttacaccctgcctatcgtgctggacgtcggaacaaacaaccagcagctgctcgacgatccgctgtatatgggctggcgccatccacgcattaccgacgacgagtactatcagttcgttgacgacgtgatccaggcgattaaggcccgctggccggacgtgctgctgcagttcgaagattttgcgcaaaagaacgccatgccgctgctcaaccgctaccgcaatgaaatctgctcgtttaacgacgatattcagggcaccgcggcggtgaccgtcgggacgctgatcgccgccagccgcggcgccggtagccagctgagcgagcaaaaaatcgtctttctcggcgcgggttcggccggctgcggtatcgctgaacagattatcgcccagatcgtccgcgaaggactcagtgaagaagaggcccgccagcgcgtgtttatggttgaccgcttcggcctgttaaccgacggcatgcctaatctgctaccgttccagaacaagctggtgcaaaagcgtgagcagctgcagagctgggataccaccagcgaggcgctgtccctgctggacgtagtgcgcaacgtgaagccgaacatcctgatcggcgtctcgggtcagccgggactgttcacggaagagattatccgcgagatgcacaagcactgcccgcggccgatcgtgatgccgctctccaacccaacctcacgggtggaagcgacgccgcagaatatcctgagctggaccgacggcgaggcgctggtcgccaccggcagtccattctccccggttaccgtgaaaggcaagcagtatcccatcgcccagtgcaataactcctatatcttcccgggtattggactgggggtgatcgcctccggcgcgtcgcgggtcacagacgagatgctgatggctgccagcgaaaccctggcgcagcactcgccgctggtcaacaacggcgaaggtccggtgctgccggagctgaaggatatccagaccgtctcacgggcgattgccttcgcggtgggcaaggtggcccaggagcaaggcgtggcggtgaaaacctccgctgaagcgctgctgcaggccattagcgataatttctggctgccggaatatcgcaattatcgccgcacctcgatttaa

SEQ ID NO: 210996 - DNA, 141 bp, Klebsiella pneumoniae; identical to SEQ ID NO: 136841

SEQ ID NO: 210997 - DNA, 852 bp, Klebsiella pneumoniae
atgaaattatctgcccttgctgttgctaccgccctgttcagcggcgcggtcttcgcggcgcctctgacgctgcaaacttacaacccgcaggaaaaaggactttttgccgtcaactcgaccctcgtttccggtccgcatgaagcggtacttttcgacgcgcagttcagcgtcaaagatggggaaaagctggtggagatgatcaggaaaaacggcaaaccgctatcgcggattgtgatcacctctggcgatccggatttctattttggtcttgagccgctggtaaaagccttcccgcaggcggaggtggtcgccacgccggaggtcgtcaaacatattgcagccaccaaagcggccaaactggcgtactggggcccgcaaatgaaagacggcgcgccgacgcaggtgtatgtcccgcaggcgctggaggccaacagctttaccatcgatggcgagaaagtgaccatcatgcagccgcatgactacgcggcgttcgtctggatccgggcgaacaaaacgatcctcggcggcaccggcgtggcgtggggtatgcatctctggaccgccgacacccagacgccggccagtcgtcagcaatggcgtaatacgctggaccagatgatcgccctgcacccgcagcgggtgatcccgggccattatctcggcaccccgccggagggagacagcgcggtgcgctttacaaaaacttatctccagcagttcgagcaggcgctgaagacgcattcggattcggccggggtgatcaaggcgatggaggcacagtggccgggcctggcggagaccagctcgctggagttaagcgccaaagttaataccggtgagatgaagtggtga

SEQ ID NO: 210998 - DNA, 894 bp, Klebsiella pneumoniae
atggacagggtgattgctgcgcaggtgtatctgcgcatctgcgagctgggaagtcttagcgccgcggcgcgggcgctggggatgtcgcgcccgatggtgagccgctatctggaacaaatggagagctgggccggcgcccggctgatccatcgctcaacccggcggctgacgctgaccccggccggggagaaggtattgctcaagacccgcggtttgacgcggatcgccgatgaaatcgccggcgagcgtcagcgggccgatcccagcggcacactgcgcgtcgcctgcgcgcactttaccgccatgcagctgatctctccgctgctgccggactttctcgcccgctatccactactgcgcctggagctggatatcaataaccatccggtcagcctgatcggcgagcgtatcgacgtggccattcgcattaccgacaacccggaggcgggggccatcgctcgtcgcctcggagtgtgccgttcgctgctctgcgccgcgccgggctggatgcgccggcatggcccattgacgacgcccgacgatctgcaacgacataactgcctgctatacagccatttcgccagccagcactggcagttcagcgatgcgcaggggcgggaagcgtcggtggcggtgaacggtaatctgagcgcagggatatcttcattgctgctggaggcggcggttgccgggtgcggcattgcgatgcttcccgaactggaggcccggggcgcgattgccagcggcacgctggaggtggtgcttccggagtggacgccaaaggcgttgagcgtttacggcatctatctttcccgcgactaccaacctgacggattaccgctatttcttgatgcgctgcagaggcgtctgggagaggagactggccacggctga

SEQ ID NO: 210999 - DNA, 246 bp, Klebsiella pneumoniae; identical to SEQ ID NO: 136918

SEQ ID NO: 211000 - DNA, 915 bp, Klebsiella pneumoniae
atgcaagatgaaaaaccgccaatgaagaagttacccacctccatgttgccagaagagacggctccacgtccggagttcccggagcaagaacaaaccccgccgggtctggatgcggaaatggagccatccccggaccacggtgaaaccagctacaccggctccgggcgactggccggtaagaaagcgttaattaccggcggcgactccggtattggccgtgcggtggcgatcgcctttgcccgcgaaggcgccgacgtcgcgataaactatctgcccgaagagcaaaaggatgcggatgaagttatcgccctgatcaaagccgaagggcgcaccgcggtcgccctcccgggtgatattcgctcagaatccttctgccagtcgctggtggccgacgcggtggaacagctgggaggtctgagcatcctggttaataacgccgggcgtcagcaatactgtgaaacccttgaggaactcactaccgaagatttcgacgctaccttcaaaaccaacgtctacgcgccgttctggatcacccgcgccgcactgcctcaccttcaggccggaagcgcgattatcaataccacctcggtgcaggcgtataaacccagcccgatcctgctcgattatgcgcagaccaaagcctgtctcgcgatcttcactaaatcgctggctaaacaggtggcgaaacgaggcattcgcgtaaacgccgtagcgcctggcccttactggacggtgctgcaatccagcggcggccagccggacgagaaggtgaaacagtttagcaaagacacgccgatggggcgcccggggcaaccggtagagatcgccccgctgtatgtcaccctggcatccgatgcctgctcatatacctccggacaggtgtggtgttctgacggcggggatggtgtggtctaa

SEQ ID NO: 211001 - DNA, 216 bp, Klebsiella pneumoniae; identical to SEQ ID NO: 136916

SEQ ID NO: 211002 - DNA, 507 bp, Klebsiella pneumoniae; identical to SEQ ID NO: 136915

SEQ ID NO: 211003 - DNA, 183 bp, Klebsiella pneumoniae
atggtcaaacggcaaaccatcgcgctcctcgccgccgaggaacaggttccgctggtattaaccgccaggcagcaggcgctggtggacgcggtagcgaacaggatgctaccagcggaacgcaatcccgtatcgcctgtcggcaaaccgcgcgcgaaggccagggcggggtccggatcgcgctga

SEQ ID NO: 211004 - DNA, 1626 bp, Klebsiella pneumoniae
atgcaacgggaagagtggtttcacagagcggtcatctatcaggttgacagttcgctcttttatgatgccaatggcgatggttttggcgatctcgcgggcattcgccaaaagctacactacattcgcagcctcggagcgacggtgctctggctgactccgttctatctcactcctctgcaggatgatggctatgatatcagcgatcatctgcagcccgatccgcggttcggcactatcgctgacgtgattgagctgattgcccgcgcccgcgagctgggactgcgggtgatcattgagctggtgatccagcacacctccgcgcagcacccgtggttccaggcggcgcgacgcgatccccggtcgccgtggcggccgtattatctgtgggccgatcggccgccggataacgacgatcctcccatgtttcccggcgttgaggagagcgtctggcgctgggacgaacaggctgggcaatattatcgccacatgttttatcaccacgagcccgacctgaatctcgcccatccgccggtgatcgctgaaatcgaaaacattatcaccttctggctgcaggctggggtgtctggctttcgtctcgatgccgcgtcacatctggtcaagcaggccggaaagggcgacgagacgcgcggctacccgctgctgacccatctccggcaggttgtacagcgcctcaatcccgatgcgatactcctgggggaagtggacgtcgcggtagaagattaccgtcattatttcggccagggcgatcggctgcagatggtgcttaatttttggcttaacaaatacctctacctcagcctggcgcagcagcgcgccgcgccggtggtgaaggccctgcaggcgatggtgaccccgccggacgggtgctgcttcgtcaactggctgcgcaaccatgatgaactggatcttgaggggattggcgagcgcaacaagcgccaagttatccgcacctttgcccctgataaatcgatgtccgtttaccagcgcggcgtacgccgaagactggcgccgatgctggacggcgatacccgacgcatagcgttagcccatgctatcctgctggcgctgcccggcgtgccggtgatgcgctatggcgacgagattggcatgggtgacgatctctccttaccggagcgctacgcggtcagaacgccgatgcagtggtcggccgcggccaacgccggcttttcccgggcggcgcgggatgatttgccggtaaaaccggtggccagcgggcggttccgctaccaacggatcaatgttgaaacggcgctgcgccatcccaggtcgctgctgcatcgggtacgcaatatggtattggcgcgcacggaatatactgaaccgggatccctcccttttactctccttaccctaaagcccgacgcggtgctgggcttgctctatcgcagcgaatcgcgggaggtactgatgctggccaactgcagccagcaggcggtagaggtcctgctcccgccgctggccgagggctactggagcccaattctggaagataagctctatcaggatgggctgcacggcgggaaagatgcgcggctggcactctccgggtatggttaccgttggttcagccgcagcctgagttag

SEQ ID NO: 211005 - DNA, 996 bp, Klebsiella pneumoniae
atgtctgtgatggttattaccggtggaaccgcgggagcgggcaaagctaccgcgctgcgtttcgcccgcgctggatatcacgtggcgctgatcgcccgagacgaaacgggtttgcaggagacgcgacaggcctgtgaacggtttggcattaaaacgctggctattagcgccgatgtcgtcgatgccggggcgctgcagcgcgccgccgccgaggtggaaaccaccctcggggcaatcgacgtctggatcaacaacgccatgaccaccgtgctggcgccctttcgtcagatgagcgaggaggagtttcgccgggtgacggaggtgacctatctcgggtacgtgaacggcacccgcgcggcgctggaggtcatgatcccccgggatcggggggtgattattcaggccggctcggcgctggcctggcgttcaatcccactgcagtcggcttactgcggagcgaaagcggcgatccgcggctttaccgatgccgtgcgaaccgaactgatgcatgagaaaagccacatccagttgaccatggtgcaactgccggggatgaacaccgcccagtttggctgggcgcgaaacaaaatggatcaggccatgcagccggtgcccccggtctatcagccggaagtcgccgccgaggctatttacagcgtcatccagcgcccggtcaacgagctgtgggtcggaaaaagcaccatccagtcgatcctcggccaggtcttcttccctcgcctgctcgatcggctgatggtgaaaaaagcgtgggagggacagtttaccggtcagccaaagtcgtcagaccaacaggacgacctgttcacgccggtgcgcggcaatcatccgggccacggcccctttaacgatggcgcacggcgtaaagcagtcaccatcagcgccgatctcccgggtaaagtcgccgccggcgtcggggtagcggtggcgacgatggcgctgcgggcgttgttccgtcgttccggaaaacggcgctaa

SEQ ID NO: 211006 - DNA, 447 bp, Klebsiella pneumoniae
atggaaatggtccttagagccgcagcaatctatctgatcctgttgattatttttaagattgccggcagaagaaccctgatgcaattaaccaactttgacctgatactgttgctgattatcagcgaagccacccagcaggcgatgctcagcacagactattcggttaccgggtcgatgctgactatcgtcaccctggttagtattgatattttgttcggctatattaagaaaaaatttgctcaggcagaaaattttctcgatggtacgccggttatcgtggtggaaaatggtgctgtcatcgacgagaagattaagctcgtcaatatctctgtcgatgatatcctgctggcggccaggcagcaccatggcatttatgaattgaaagcgatcaaattcgctattctcgagcgtaacggccagatatccattattcctgagcaggaatag

SEQ ID NO: 211007 - DNA, 504 bp, Klebsiella pneumoniae
atgattaagaatcaacagccttgtcctatcgtcgatgagaatgaacgctccttacgctttgaatatcgtttccgccgctatgggataattgttttgagtctcatcattcttaccgcgttaagcggcctgtggtcctccggttatttcagtgaagcacacagggaaactagtggaggcgaattaagcgtcgattatcagcgctatgccaggctgatgagtgaaaccgagtttaatattcagattaaaccggatacggccagcgacaccattatcagcttcgccgccccgttattaacccgctaccagatcggtgatatccgtccgcagccggataaaatgtatagcgccgacgggaaattacatctcgtctatcagcggtcgaccccgccttcaccgatatctgtgtggttagccgttaccccaaaaacggccggtaatatctccctgcaggcggtagttaacgatcgctattctgtaacctggcagcagtttgtctatccgtag

SEQ ID NO: 211008 - DNA, 1299 bp, Klebsiella pneumoniae
atgacagaaagtagcattaccgaacggggcgcgccggaactggccgatacccgtcgtcgtatttgggcaattgttggcgcttcctcggggaatctggttgaatggtttgatttttacgtttactcattctgctcgctctatttcgcgcacatcttctttccatccggaaataccaccacccaactgctgcaaacggcaggcgtatttgccgccggatttctgatgcgtcctatcggtggatggctgtttggtcggatcgctgaccgccggggacgtaaaacgtccatgcttatctcggtctgcatgatgtgctttggctcactggtgattgcctgtctgccgggttatgcggtgatcggcacctgggccccggcgctgctgctgctggcgcgtctgttccaggggctgtctgttggcggagaatacggcaccagtgcgacctatatgagtgaagtcgcggtggagggaaagaaaggcttctatgcctccttccagtacgttacgctgattggtggtcaactgctggctgtattagtggttgtggcgctccagcaggtgcttagcgatgaagatctccatgcctggggatggcgtattccttttgccctcggggcggtactggctatcgtcgcgctgtggctgcgtcgccagctggacgaaacctcgaagcaggagacccgggcgctgaaagaggctggctcattaaaagggttgtggcgcaatcgccgggcctttgcgatggtgttaggctttaccgccgccggatcgctgaccttctacaccttcaccacctatatgcaaaagtatctggtcaacacggcgggcatgacggccagcaccgccagcgtgatcatgaccgcggcgctgttcgtttatatgctggttcagccgctattcggcgccttctcggataaagttggccgccggacctccatgctgtgctttggcgtgctggcgacgttatttaccgtgcctattctcagcgccttgcaaaaagtgagctcaccctatgccgccttcggcctggtgatctgcgccttactgattgtcagtttctatacctcgatcagcggcatcctgaaagcagagatgttcccggctcaggttcgcgcgcttggggtcgggttgtcctatgccgtcgcgaacgcattgttcggcggctctgcggagtacgtcgcgctgtcgcttaagtcggcagggatagagcacgcgttctactggtatgtgacggtgatggccgccattgccttccttgtctccctgatgttgcatcgcaaagggaaggggttgcgtctgtaa

SEQ ID NO: 211009 - DNA, 324 bp, Klebsiella pneumoniae
atgcgtacgataatagtgattgcttcgctgctgttaaccggctgtagccacatggcaaatgatgcatggtccggtcaggacaaagcccagcattttctggcctcagcgatgctctctgccgctggcaatgaatatgcgcaacatcagggttacagccgggaccgcagcgccgctatcggcctgatgttttccgtcagccttggcgcctcaaaagagctttgggacagccgcccggctgggagcggctggagctggaaggattttgcctgggatgtcgccggcgcgaccaccggctacgctgtatggcagttggctcatcagtaa

SEQ ID NO: 211010 - DNA, 1356 bp, Klebsiella pneumoniae
atgttgtcaaaatttaagcgtaataaacatcaacaacaccttgcccaactccctaagctttctcagtcagttgatgatgtagagttcttttacgcccctgcggaattcagggaagcgttactgacccggattgcccacgccactcagcgtatatgcattattgcgctctatctggagcaagatgatggcggaaaaggaattttgcaggccctttatgacgccaaacgccagcgtccggaactggatgtccgcgttctggtggactggcaccgcgctcagcgtggccgtatcggcgccgccgcctctaataccaatgccgactggtattgtcggatggccaatgaaaatccaggggtagatatccccgtttacggcgtgccgattaacacccgggaggcgctcggcgttctccatttcaaaggctttattattgatgactgcgtcctctacagcggcgccagcctgaatgatgtttatctgcatcagcatgataagtatcgctatgatcgctatcagtgcatccgtaacggcaaaatggcggacatcatgttcgactgggtcgacaacaatctggttcaggggcgcggcgttaaccgtctcgacagaccggatcggccaagaagcccggaaatcaaaaacgacattcgccagtaccgtcaggagctccgcgaccgcagctaccattttgtcggcaccgctggtgacgaagaactctccgtcaccccgctggtaggcctgggtaaatcgagcctgctgaataaaaccatctttcacctgatgccctgtgccgaacacaagctgacgatctgcaccccctacttcaacctccctgccgtactggtaagaaatatcatccagctgctgcgcgatggaaaacaggtggagattattgtcggcgataaaacggctaacgatttctacattcctgaagatcagccgtttaaaatcatcggcgcccttccctatctgtatgagatcaacctgcggcgtttcctcagccggctgcagtattatgtcaataccgatcagctgatcgtccgcctgtggaaggatgacgataacagctaccacctgaaaggcatgtgggttgacgatgagtggatgctgctcactggcaacaacctgaacccgcgcgcctggcggctcgatctggaaaacgccattctgatccacgatccaaagcggcagctgggggccatgcgggagaaagagctgaagctcatccgcacccacaccacggtagtgaaacattatcgggatctgcaaagtatcgccgactatccggtgaaagtgcgaaaactgatccgccgtctgcggcggatccgcattgaccggctgatcagccgtattctctga

SEQ ID NO: 211011 - DNA, 2661 bp, Klebsiella pneumoniae
atgagccaacgaggcctggaagcgctgctgcgaccaaagtccatcgccgttattggcgcatcaatgaagccgcagcgcgctggctatctcatgatgcgcaacctgttagccggcggcttcaatggcccggtgatgccggtcacccccgcctggaaggcggttcttggggtactggcatggcctaccatcgagagcctgccgtttaccccggatctggcggtgctctgtactaacgccaggcgtaatctcgaattgctcgaagccttagggcaaaaaggctgcaagacctgcatcatcctctcttcgcagccggaacagtacccggcgctgctcgaatgcgccgcgcgctatcagatgcgtctgctcggccccaacagtctcggactgctggccccatggcaagggctgaacgccagcttttcaccggtgccgatccatcgcggtaaactggcctttatctcgcagtcggccgccgtctccaatactatccttgactgggcgcaacagcgcgagatgggtttttcctacttcatcgccctgggcgatagcctggatattgatgtcgatgacctgctggactttctggcccgcgacagcaagaccagcgccattttgctgtacctcgagcatctcagcgacgcgcgccgctttgtctccgccgcgcgcagcgcttcgcgaaacaaacctatcctggtgattaaaagcggccgtagtccggcggcgcagaagctattgcacgccaattccgggatggacccggcatgggatgcggccattcagcgcgctggtctgctgcgggtgcaggatacccatgagctgttctctgcggtggaaacgctcagccacatgcgcccgctgcgcggtgaaaaactgatgatcgtcagcaacggtgcggcgccggcggcgctggcgctggatgagctttggttgcgaaacggtaagctggcgactctcagcgaggagacgcgcgacgccctgcgtcaggcgttgccggttggcgtggagatcgccaacccgctggatctacgcgatgacgccagtagcgaacactatcagcgggcggtgaatgttttgctcaacagtcaggattatgacgcgctgctggtgatccactctcccagcgccgccgcgccgggcaccgagagtgccctggccctgattgacgctctgaagcatcacccgcgcggtaaacgcggtaaatatgtcaccgtgctgaccaactggtgcggcgaattttcctcgcaggaagcgcgacgtttattcagcgatgccggcctccctacctaccgtacgccggagggcacgatcaccgcttttatgcatatggtggaataccgtcgcaaccagaaacaactgcgcgagacgccggtgctaccagactccttaaccgccaataccagcgaggcgcatgctctgctgcagcaagcgatagatgacggcgccaccacgctggatactcacgaggtcagcccggtgcttcgggcctatggcatccacacgctgccaacctggattgccgctgacagcgcggaagcggtgcatatcgctgagcagataggctatccggttgcgctgaagctgcgttctccggatatcccgcacaaatcagaagtacagggggtcatgctctatttgcgtaccgccgccgaggtgcagcaggctgcagatgcgatgatcgatcgcgtcaaactggcctggccccaggcgcgcattcatggattgctggtgcaaagcatggccaatcgcgctggcgcccaggagctaagagtagtggttgagcacgatcccgtcttcggcccgttgattatgctgggcgagggcggcgtggagtggcgggccgaggaccaggccgccgtggcgctgccgccgctgaatatgaacctggcgcgttatctggtgatccaggcgatcaaaaataagaagatccgcggccgcagcgccttgcgcccgctggatatcgctggcttaagccagctgctggttcaggtctcgaacctgatcgtcgactgcccggagatccagcgcctggatattcatcccctgctcgcctccggcaacgagtttacggcgctggacgttaccctggggcttgctcccttcagcggcgacagtgaaagccgtctcgctattcgtccctatccgcaccaactggaggagtgggtggtgatgaaaaatggcgatcgctgtctgttccggccgatcctcccggaagatgagccacagttgctcgcatttatcgcccaggtcaccaaagaagatctctattatcgctattttagtgagatcaacgaatttacccatgacgacttagccaatatgacccagatcgactacgatcgagaaatggcgttcgttgccgtcaggaccagcgcagagaagagcgagatcctcggcgtgacgcgggcgatctccgatcccgataatattgacgccgagtttgccgttctggtccgttcagatttaaaagggttaggcctggggcgaaggttgctggaaaagctgatcgcctatacgcaaagccatggcctgcagcgccttaatggtattacgatgccaaataaccgaggcatgataggcctcgccagaaagctgggattcaccgtcgatattcagctggaagatgggattgtcagcctgtcgctgcccctgaatcagggataa

SEQ ID NO: 211012 - DNA, 699 bp, Klebsiella pneumoniae
atgactgataacgctgtccttcgcctgcgcgccgaacgtctcgcgcgagctacccgccctttccttgcgcgcggcaatcgcatccgccgctgccagcgctgtctgctgccgctcaagcagtgcctgtgcgccacgttaacctcagcgcaggccgccagccgcttctgcctggtgatgtttgatacggaaccgatgaagcccagcaacactggccggctcatcgccgatattctgccagataccgaagcgtttcagtggtcgcgtaccgaaccgccgcaggcgctgctcgatctggtcgcccatcctgattatcagcccatggtcgtatttccggcctcctatgccgggccggatcgccaggtcctgagcgcgccgccgtccggtaaaccgccgctgtttatcatgctcgacggcacctggaccgaagcgcgcaaaatgttccgtaagagtccttatctcgacgcgctgccgattatctccgtcgatctgtcgcgcatctctgcctaccatctgcgcgaggcgcacgccgacggacaatattgtaccgcggaagtggccatcgccctgctggatctggcgggcgatgccccggccgccgctgcgcttggcgagcacttcacccgcttccggacccgctatctggcgggaaaaacccagcataagggcagtatcacagcgggccaggtggaaaacgtttaa

SEQ ID NO: 211013 - DNA, 426 bp, Klebsiella pneumoniae; identical to SEQ ID NO: 135861

SEQ ID NO: 211014 - DNA, 1086 bp, Klebsiella pneumoniae
atgagcgacgaactgaaaaataaaagcggcaaggtcaaagtgatgtatgtccgcagtgatgatgattctgacaaacgcacccataacccacgtaccgggaaagggggaggtcgtccaggaaaatctcgtgttgacggccgcagccgccctgcgcgtgacgaacgaaacagccgcggcgacgatcgcaaacgtgacgaccgtaagcgtgacgatcgcaaacgcgatgattttcatcgcgacgatgcgtctccgtggcgtaccgtttcccgcgctcctggcgatgagacgccggtaaaagaagatcacggcgggatcagcgggaagagctttatcgatccggaagtgctgcgtcgtcagcgtgcggaagagacccgcgtatatggcgaaaacgcctgccaggcgctgttccagagccgtccggaagctatcgttcgcgcctggtttattcagagcgtgacgccgcgctttaaagaggcgctgcgctggatggcggccaaccgtaaggcctatcacgtggtggacgaagccgagctggcgaaagcctccggcaccgagcaccacggcggcgtctgcttcctgatcaaaaaacgccacggcacttctgttgctcaatgggtcgcgaaggccggggaagaagattgcgttctggcgctggaagatgtgggtaacccacataatctcggggcgatcatgcgcagctgcgcgcactttggcgtgaagggcgtggtggttcaggatgccggcgtgctggagtccggggcggcgatccgtacggcggagggcggtgcggagcatgttgaaccgatcaccggcgacagctttatcgataccctcgatcagttccgcaaagcgggctacgcgattgtctcaacgtccagccataatggtaccccgctgtttaaagccgagctgccgaagaaaatggtgctggcgttaggccaggaacgtgatggtctgtccgatgcggcgatttccagcgccgatctcagcgttgccatcgacggtaccggcaacgttgaaagcctgaacgtctctgtggcgaccggcgtcctgctggcggaatggtggcgtcagaacaaggcgtga

SEQ ID NO: 211015 - DNA, 690 bp, Klebsiella pneumoniae
atgaccacccctttaacctggcatgacgtgctggcggatgaaaagcaacaaccctattttctcaatactctgaagaccgtcgccgaagagcgccagtcggggatcaccatctatccaccgcaaaaagacgtcttcaatgcgtttcgctttactgaactgggcgatgtcaaagtcgtcattctcggccaggacccctatcacggcccgggtcaggcccatggtctggcgttctcagttcgtccgggcgtcgcgatcccgccttcgttgctgaatatgtataaagagctggaggccacgatccccggctttacccgccccacccacggttatctcgaaagctgggcacgacagggcgtgctgctgctgaatacggtcctgaccgtccgcgccggacaggcgcactcgcacgccagtctgggctgggagacctttaccgataaggttatcgctttaatcaatgagcattgcgagggagtagtttttctgctgtggggctcccatgcgcagaagaaaggcgcgattatcgatcgtcagcgccactgcgtgctgaaggcgccgcatccatcaccgctctctgcgcatcgcggcttctttggctgcaaccatttcgtacagaccaaccagtggctggttgaccgcggcgaaacgccgatcgactggatgccggtccttcccgctgaaagcgagtga

SEQ ID NO: 211016 - DNA, 384 bp, Klebsiella pneumoniae
atgattactggtatccaaattactaaagcggcaaacgacgacctgctcaactctttctggctgctggatagcgaaaaaggcgaagcgcgctgcctgtgcgccaaaggtggttttgcggaagatgatgtggttgcggtaagcaaactgggtgaaatcgaatatcgtgaaatcccggtggacgtgaaaccggaagtgcgcgtcgaaggcggtcagcacctgaacgttaacgtgctgcgtcgcgaaaccctgctggacgcggttgagcatccggaaaaatatccgcagctgaccattcgtgtttccggctacgcggtacgcttcaactctctgacgccggaacagcagcgcgacgttatcgcccgtacctttaccgaaagcctgtaa

SEQ ID NO: 211017 - DNA, 1332 bp, Klebsiella pneumoniae
atgactgtaacgactttttccgaacttgaactcgacgaaaacctgctggaagccctccaggataaaggtttcactcgcccgacagccattcaggccgccgctattccgcctgcgctcgatggccgtgacattctcggttcagcgccgaccggcaccggtaaaacggcggcgtatctgctgccagcgttgcagcacctgctcgatttcccgcgtaagaaatccggcccgccgcgcattcttatcctgacgccgacccgtgagctggcgatgcaggtggccgaccacgcccgcgagctggcgaagcatacccatctggacatcgccaccattaccggcggcgtggcgtacatgaaccacgcggaagtgttcagcgaaaaccaggacatcgtagtcgccaccaccggtcgcctgctgcaatatattaaagaagagaatttcgactgccgcgccgtcgagaccctaatcctcgatgaagccgaccgcatgctggatatgggttttgcccaggatatcgaaaccatcgccggtgaaactcgctggcgcaagcagactatgctgttctccgcgacgctggaaggcgatgcgatcaaagacttcgctgagcgtctgctggaggagccggttgaagtttccgccaatccgtcaacccgcgagcgtaagaaaatccatcagtggtactaccgcgccgacgatatcgaacataaaaccaaactgctggtgaatctgttgcaacagccggaagccacccgcgctatcgtgtttgtgcgtaagcgcgagcgcgtgcatgagctggctaactggctgcgtgaggccgggattaacacctgctggctggaaggcgagatggtgcaggccaagcgaaacgaagctatcaagcgcctgaccgacggccgcgtcaacgtgctgatcgccaccgacgtcgctgcccgcggtatcgatattccggacgtcagccacgtctttaacttcgatatgccgcgtaccgcggatacctacctgcaccgtatcggtcgtaccggccgcgccggtaaaaaagggaccgccatttctctggtcgaggctcatgaccacctgctgctgggtaagattggtcgctatattgaagagccgttgaaagccagagttatcgatgaactgcgcccgacgacccgtgcgccgagcgagaagctgacgggtaagccatcgaagaaagtgctggcgaagcgtgcgcagaagaaaaaagatgaaaaagagaaaccgcgggtgaagaagcgccaccgcgatacgaaaaatatcggtaagcgccggaagccaagcgcggccgggacgccatcagcgtccagcgatgagtaa

SEQ ID NO: 211018 - DNA, 738 bp, Klebsiella pneumoniae
atgtctcagtcgaagtttgcgctgccgcgcaatggttttaccttcaaacggttctttgtcgctcacgatcgctgcgccatgaaggtgggtaccgacggcattttgctgggcgcctgggcgccgattgccggagtgaagcatgtgctggatattggcgcgggcagcggcttgctggcgctgatgctcgcgcagcgtaccggagatgatgtgcatgtcgaggcggtagaactggacgaagaggccgccgctcaggcgcgggaaaacgccctcgcgtcgccgtgggcttcgcggattgaggtctggcaggccgatattcatcagtggcagccgtcgcaaactcgacgctatgaactgataatcagtaatccgcccttttttgccgaaggcgtgccatgcgcgacctcgcagcgagagcaggcgcggtacaccactacgctcgatcacgcctccctgctgacctgtgccgcagagcatattaccgaagaaggttttttttgcgtggtgttgccggtggatattggtaatgcgttcatcgaacgggcaagggcgatgggctggcatctgcgactgcgtactgacgtggcggagaccgagctgcgaccgccgcatcgggtgctgctggctttctccccgacggcaggggagtgtttcagcgacaggctggcgatccgcgggccagagcagcaatattcggaaggctttaccgctctgaccgaggacttttatctctttatgtga

SEQ ID NO: 211019 - DNA, 1620 bp, Klebsiella pneumoniae
atgaataccactcctgacttctcttgtgatgtgttgattatcggcagcggcgctgccggtctttcccttgccctgcgcctggctgagcacagttcggtgaccgtgctgagtaaagggccgatcagcgaaggttcgacgttctacgcccagggtgggattgccgccgttttcgacgagacggacagtattgaatcccatgtcgaagataccctgattgccggcgcagggttatgcgatcgccatgcggtcaccttcgtcgccagcaatgccagatcatgcgtccagtggcttatcgatcagggcgtattgtttgacactcaggtccaggccaatggcgaagagagctatcatctcacgcgcgaagggggccacagccatcggcgcattctccacgccgccgacgctaccggcaaagcggtggagacgacgctggtcgataaagccctcgcccaccccaatatccgcatccttgagcgcagcaatgccgtcgacttgatcgtatcggataagattggcttgccaggcacgcgccgggtggtcggggcatggatctggaatcgtaataaagagcgggtggaaacctgcagcgcgaaagccgtagtactcgctaccggcggggccgcgaaggtttaccaatataccactaaccccgacgtctcttccggagacgggattgcgatggcctggcgggcgggatgtcgggtggcgaatctggagtttaaccagttccaccccaccgcgctatatcacccccaggcgcgtaatttcctgcttactgaagcgctgcgcggcgaaggcgcccaccttaaacgcccggatggcacccgctttatgccggactttgacgagcgcggcgagctggccccgcgcgatatcgtcgcccgcgccatcgaccatgaaatgaagcgcctgggcgtagactgtatgttccttgatatcagccataaacccgaggcgtttgttcgccagcatttcccgatgatttatgaaaagctgctcggcctgggaattgatttaaccaaagagccggtgccggtcgtccccgccgcgcattacacctgcggcggcgtgatggtggatgataatggccgcaccgacgtcgatggtttatacgccatcggcgaagtcagctacaccgggctgcacggcgcgaatcgtatggcgtcgaactcgttgctggagtgcctggtctatggctggtccgccgcggaggatattacccggcgcctgccgctcgcccagaaggtcgccacgctgccagcatgggatgaaagtcaggtggagatcccggatgaactggtggttatccagcacaactggcacgaactgcgcctgctgatgtgggattacgtggggattgtgcgcaccacccgcaggctggagcgcgccctgcggcgcattaccatgctccagcaggagctggatgagtattacgcccgcttccgcgtctcgaataatttgctggaactgcgcaatctggtgcaggtggcggagcttatcgtacgctgcgcgatgttgcgtaaggagagccgcggtctgcattataccctcgactatccgcagccgctgcctgacagcggcccgtcgatactctcgcccctggctcacataaagagataa

SEQ ID NO: 211020 - DNA, 576 bp, Klebsiella pneumoniae
atgagcgagcagttaacggatcaggtccttgttgaacgggtccagaaaggagatcagaaagcgtttaatttgctggtagtgcgctatcagcataaggtcgcgagcctggtttcccgctatgtaccgccgggcgatatcgctgacgttgttcaggaatcgttcgttaaggcatggcgtgcgctggactctttccggggagatagcgctttttacacctggttataccgtatcgccgtcaacacggcgaagaattatctggttgctcaggggcgccgtccgccgtccagcgatgttgacgccaacgaggcggaaaacttcgaaagcggcggggcgttgaaagaaatttcgaaccctgagaacttaatgttgtcagaagaactgagacaaatagtttttcgtaccattgaatcgctcccggaagatttacgcatggcaattacgttacgggagctggatggcctgagctatgaagagatagccgctatcatggattgtccggttgggacggtgcgttcgcgtatcttccgggcgcgagaagctattgataataaagttcaaccgcttatcaggcgttga

SEQ ID NO: 211021 - DNA, 651 bp, Klebsiella pneumoniae
atgcagaaagaaaaactttcggctttaatggatggtgaaacgctggataacgaactgctcaacgagctgagtcgttcttctgagatgcaaaaaacctgggagagttatcaccttatccgcgatacgctgcgtggcgataccgctgaggtgctgcaatttgatatctccgcccgggtgatggccgccattgaaaatgagcccgttcgtcagacggctccgcttattcctgaatctcagcccgcaccgcatcagtggcggcagatgccgttctggaacaaggtacgtccgtgggccagctccctgactcaaatgggcgttgccgcctgtgtatcgcttgcggttatcgtcggcgtccagcactataatggtcagtctgattccgctcagcagccagaagcgccggtgttcaatacgctgcccatgatgggtaaagcaagcccggtaagtcttggcgtgccggctgacgcgtcagcgggaagcggccagcaggcgcaggtccaggaacagcgccgccgaattaacgccatgctgcaggactacgaactgcagcgccgcctgcacgctgagcagcttcagtttggccaggcccagactcagcaggccgcagtccaggtaccgggctatcaaactttaggaacgcaatcgcagtaa

SEQ ID NO: 211022 - DNA, 957 bp, Klebsiella pneumoniae
atgaagcaactttggtgtgccatgtcgctcatggcaggcagcctgttgttctctgtcaacgcctcggctgatacatcgtccggggcgttgttgcagcagatgaacctggccagccagtctctcaattatgagctgtcttttgttagcatcagcaaacaaggcgttgagtcgctgcgctatcgtcacgcgcgactgaacaaccaaccgctggcgcagttgctgcagctggacggtccgcgccgggaagtggtcctgcgcggcacggaaatcagctattttgaacccggtctcgatccgttcaccctgaacggggactatatcgtcgattcgctgccatcgctggtatatagcgatttcaaacgcctctccgcggcgtatgattttatctccgtgggccgtacccgtatcgctgaccgcctctgcgacgtgatccgcgtcgtggctcgcgacggcacgcgctacagctttatcgcctggctggatgctgaaaccaagctgccgctgcgcgtcgatttgctcgaccgcgacggggaaacgctggagcagttccgggtcgtctccttcaacgttggcgataacgtcagcgccagcatggagacgctggcaaaagcgaatttgccgccgcagctgtcggtgcctgaaggaggcgacaaagctaacttcaactgggcgccgacgtggctcccgcagggcgtgactgaggtttccagcagccagcgccgtcttcccacctttgacggtccggtagaatcacgtctctattccgacggcttgtttagcttctcgatcaatatcaaccgcgccacggcggccagcagcgaccagctgttgcgcaccggccgacgcaccgtcagcacgacggtgcgcgataacgcggagataaccgtagtgggcgagctgccgccgcagacggcgaagcgtatctctgacagtattaaattcaaggcagtacaatga

SEQ ID NO: 211023 - DNA, 480 bp, Klebsiella pneumoniae
atgattaaagagtgggctaccgtggtttcctggcataacggcgtggcgcaggtgcactgcgacgttaaagcctcctgcagcagctgcgcctcccgtgccggctgtggtagccgggtgctaaacaagctggggccgcagaccagccataccattagcgtgccctgcgagcagccgttggccgcggggcaaaaagtggagctggggatcgctgaaagcagcctgctgggctcagcgatgctggtgtatatggcgccgctggcggggctgtttgtaatggcgtctatttttcaggtgctgtttgccagcgatattgcgtcactttgcggcgcgctgctgggcggcgtcggcggcttcctggtggcgcgcggtctgtcgccgcgactggcggcacgtcagtcctggcagccggtgattttgaacgtcgcactgccgccggatctgctgcgtgttgatacgccttcctccgacatgggccagtga

SEQ ID NO: 211024 - DNA, 153 bp, Klebsiella pneumoniae
atgccttacgagtatcatgaggccgctgtactgtgcctgacgttttttaatccgaaaacgccgcattctacactacatccgcgaaaccaggaaatgctgttagatccagcatacccgcagaaattgtggcgttgtaacaggaaaggtaaataa

SEQ ID NO: 211025 - DNA, 1800 bp, Klebsiella pneumoniae
atgaagaatatacgtaacttttcgatcatcgctcacatcgaccacggtaagtcgacgctgtctgaccgtatcatccagatttgcggtggcctttctgatcgtgaaatggaagcccaggttctggactccatggatcttgagcgcgaacgcgggatcaccatcaaggcgcagagcgtcaccctggactataaggccagcgacggtgagacctaccagctgaactttatcgacaccccgggccacgtggacttctcttatgaagtttcccgttctcttgccgcgtgcgaaggcgcgctgctggtggtagacgccgggcagggggtagaagcccagaccctggccaactgctacaccgccatggagatggatctcgaagtggttccggtactcaacaagatcgacctgcctgcggccgaccctgagcgcgtagcggacgagattgaagatatcgtcgggatcgacgcccacgacgcggtgcgctgctcagcgaaaaccggcgtcggcgtgaccgacgtgctggagcgtctggtgcgcgatatcccaccgccggaaggcgatccggacgcgccgctgcaggcgctgattatcgactcctggttcgataactacctcggcgtggtgtcgctggtgcggattaaaaacggcaccatgcgcaagggcgacaagatcaaggtcatgagcaccggccaggtctataacgctgatcgtctgggcatcttcaccccgaaacaggttgaccgtaccgagctgaaatgcggcgaggtaggctggctggtctgcgcgatcaaagacatcctcggcgcgccggtgggcgataccctgaccgccgcccgcaacccggcagacaaagcgctgcctggctttaagaaggtgaaaccgcaggtgtatgccggcctgttcccggtgagctccgatgattatgaagctttccgcgacgcgctgggcaaactgagccttaacgatgcctctctgttctacgagccggaaagctctaccgcgctgggcttcggcttccgctgcggcttcctcggcctgctgcacatggagatcattcaggagcgtctggagcgtgaatacgatctcgacctgatcaccaccgcgccaacggtagtctacgaagtagagaccacctccaaagaagttatctacgtcgacagcccgtccaagctgccgccgctgaataatattcaggagctgcgcgagccgatcgccgagtgtcacatgctgctgccgcaggagttcctcggcaacgtgattaccttgtgtgtcgagaagcgtggggtgcagaccaacatggtttaccacggtaaacaggtggcgctgacctatgaaattccgatggcggaagtggttctcgacttcttcgaccgcctgaagtccacctcccgcggctatgcgtcgctggactacaacttcaaacgcttccaggcgtcgaacatggtacgcgtcgatgtgctgatcaacggtgagcgcgtcgatgcgctggcgctgatcacccacaacgataacgcgccgtatcgcggccgcgagctggtggaaaagatgaaagatctgattccgcgtcagcagttcgatatcgcgattcaggcggccatcggtaaccacattatcgcgcgctctacggtgaaacagctgcgtaaaaacgtcctggcgaaatgctacggcggcgacgtcagccgtaagaaaaagctgctgcagaagcagaaagaaggtaagaagcgtatgaagcaggtcggtaacgttgagctgccgcaggaagcgttcctcgccattctgcacgttggtaaagacggcaaataa

SEQ ID NO: 211026 - DNA, 975 bp, Klebsiella pneumoniae
atggcgaacatgtttgccctgatcctggtgattgcaaccctggtgacgggcgttttatggtgcctggacaagttcatttttgcaccgaaacgtcgtgaacgtcaggccgctgctcaggcagcgaccggcgagcaactggacaagaagacgctgaagaaagtcggcccgaaaccgggctggctggaaaccggcgcatcggttttcccggtgctggcgatcgttctggtggtacgttcatttatttatgagcctttccagatcccttcaggttcgatgatgccaacgctgctcatcggcgattttattctggtggagaaatttgcctacggcattaaagatcctatctatcagaaaacgctgatcgagaccggccatccgaagcgcggcgacatcgtggtgtttaaatatccggaagacccgcgtctggactacattaagcgcgcggtggggttaccgggtgataaggtcacctacgatccggttgccaaacaggtcactattcagccgggctgcagttccggacaggcctgcggcaacgcgctgccggtgacctattccaacgtggagccgagcgattttgttcagaccttctcccgcagcaacggcggcgaagcgagcagcggtttctggcagttgccgaagggcgaaaccaaagccgacggcattcgtcttaccgagcgtcaggagacattgggcgacgtgacgcaccgaattctaatggtgccgattgcccaggatcaggttgggatgtactaccatcagtccggtctgccgctggccacctggattgtgccgcccggtcagtacttcatgatgggcgacaaccgggataacagcgccgacagccggtactggggctttgtgccggaagccaacctggtcggaaaagcaaccgctatctggatgagttttgaaaagcaggaaggtgaatggccgaccggcgtgcggttatcgcgcattggtggaattcattaa

SEQ ID NO: 211027 - DNA, 681 bp, Klebsiella pneumoniae
atgaaccccatcgtaattaatcggcttcaacgaaagctgggctacacttttcatcatcaggagctgttgcaacaggcattaactcaccgcagtgccagcagcaaacataatgagcgcctggaatttttaggtgactccattttaagtttcgtgatcgcgaatgcgctgtatcatcgctttcctcgtgtcgatgaaggcgatatgagccgtatgcgcgcgacgctggtgcgcggcaacacgctggcggagatcgcccgcgagtttgagctgggcgagtgtctgcgcctcgggccgggagagctgaaaagcggcggtttccgtcgcgaatcgattctcgcggataccgttgaagcgttaattggcggggttttcctcgacagcgatattcagaacgttgaacgcttaatcctctcctggtaccagacccgtctggacgaaatcagtccgggcgataagcaaaaggatccgaagacgcgtctgcaggaatatctgcagggacgtcatctgccgctgccgtcttacctggtggtccaggttcgcggcgaagcgcacgatcaggaatttactatccactgccaggtcagtggcctgagtgaaccggtggttggcacaggttccagccgtcgtaaggcggagcaggctgccgccgaacaggcgctgaaaaagctggagctggaatga

SEQ ID NO: 211028 - DNA, 906 bp, Klebsiella pneumoniae
atgagcgaagaaaaaagttattgcggatttgtcgccatcgtgggtcgtccaaacgttggcaaatccacgctgttgaacaagctgcttgggcagaagatctcgatcacctcccgtaaagcgcagaccacccgtcaccgcatcgtcggtatccataccgaagggccgtatcaggcgatttacgttgatactccgggcctgcatatggaagagaagcgtgccattaaccgcttaatgaacaaagcggccagcagttcgattggcgacgtggaactggtcatcttcgtggtggaaggcacccgctggacgcaggacgacgagatggtgctcaacaagctgcgcgacgcgaaagcgccggtgatcctcgcggtcaacaaggtggataacgtgcaggaaaaagcggatctgttaccgcacctgcagttcctcgccagccagatgaatttcctcgatatcgtaccgatctcagcggaaaccggcaccaacgttgataccatcgcggcgatcgtgcgtaagcatctgccggaagcgatccatcacttcccggaagattatattaccgatcgctcacaacgctttatggcctccgaaatcatccgtgaaaaactgatgcgtttcctcggcgctgagctgccgtactccgtcaccgtggaaatcgaacgtttcgtcagcaacgagcgcggcggttacgatatcaacggcctgatcctcgtcgagcgcgaagggcagaaaaagatggtgattggcaacaaaggcgccaaaattaaaaccatcggtatcgaagcgcgtaaggacatgcaggagatgtttgaagcgccggtgcacctcgagctgtgggtgaaagtgaaatccggctgggccgatgacgagcgcgccctgcgcagtctcggttacgttgacgacctctga

SEQ ID NO: 211029 - DNA, 738 bp, Klebsiella pneumoniae
gtggatggatggcagcgcgcctttgtcctgcatagccgtccgtggagcgaaaccagcctgatgctggacgtcttcacggaagaatccggtcgcgtgcgcctcgttgccaagggcgcacgctccaaacgctctaatctcaaaggcgctttacagccctttacccccttgttggttcgcttcggcgggcgcggcgaagtcaaaaccctgcgcagcgcggaagccgtttcgctggcgctgccgctcagcggcatcaccctctacagcggtctctacgttaacgagcttatctcccgcgtgctggagcacgaaacacgcttctccgaactctttttcgactacctgcactgcattcaggcgctcgccggggccagcggctcgccggagcccgcgctgcggcgttttgagctggcgctgctcgggcacctggggtatggcgtggattttctccactgcgccgggagcggcgagccggtagacgacaccatgacctaccgctatcgtgaagaaaaaggctttattgccagcctggtgattgataacaacacgtttaccgggcaccatttgaaagcattggcgagtcgcgagtttcctgatgttgatacgctgcgcgccgcgaagcgctttacccgtatcgccctgaagccctatctcggcggcaaaccgctcaagagccgggagttgtttcgccagtttatgcccgcgcgaaaggcgcgagccgataatacgaataatgattaa

SEQ ID NO: 211030 - DNA, 732 bp, Klebsiella pneumoniae
atggctgaattattgttaggggtcaatattgaccatatcgcgaccttgcgtaacgcccgcggcaccgcttacccggatccggttcaggcggctttcattgccgaacaggccggcgctgacggcatcaccgtgcatctgcgcgaagaccgtcgccatattaccgatcgcgatgtgcgtatcctgcgcgagacgctgcacacccggatgaatcttgaaatggcggtcaccgaagagatgctgacgatcgcctgcgaaaccaaaccacacttctgctgcctggtgccggagaaacgtcaggaagtcactaccgaaggcggactggacgtggccgggcagcgcgacaagatgcgcgatgcctgtcaacgcctggcggatgccggcatcctggtctccctgtttatcgatgcggatgaagcgcagatcaaagcggcggcggacgttggcgcgccctatatcgaaatccacaccggctgctatgccgatgccaaaaccgacgccgagcaggccagggagctggaacgtattgccaaagcggccacctacgccgccagcctcgggctgaaggtgaatgccggccacggtctgacctaccacaacgtgaaagcgattgctgcgctgccggaaatgcatgagctgaatatcggtcacgcgattattggccgtgcggtgatgagcggcctgaaagaggcggtggcggaaatgaagcgtctgatgctggaagcgcgcggctaa

SEQ ID NO: 211031 - DNA, 381 bp, Klebsiella pneumoniae; identical to SEQ ID NO: 135844

SEQ ID NO: 211032 - DNA, 261 bp, Klebsiella pneumoniae
atggcgctgttaattaccaaaaaatgcatcaactgcgatatgtgcgagccggagtgcccgaatgaggccatttcgatgggtgacagcatttatgagattaacagcgaccgctgcaccgagtgcgtgggtcattacgacacgccaacctgccagaaagtgtgcccgatcccgaatacgatcctgaaagatccggcacacctcgagagtgaagaacagctgtgggataaattcgtgctgatgcaccacgcggataaaatttaa

SEQ ID NO: 211033 - DNA, 849 bp, Klebsiella pneumoniae
atgaactgtttaacgcgtattcgtcagcgctatcccaccctggcggcgagcgacaaaaagttggccgattatattctgagccagcccgatgagacccggcacctcagctcgcagcagctggcggcggaagccggtgtgagtcagtccagcgtggttaaattttcccagaagctgggattcaaaggctttccggcgctgaagctggcccttagtgaagcgctggcgagtagcccggatccgcactccgtcccggtgcataaccacattcgcggtgacgatccgctgcgtctggtcggcgagaaactcattaaagacaatgtcgccgccatgcatgcctcgctggacgtcaacactgaagagacgctacgggaagccgtcacgctgctgcgcaacgcccggcgagtgatcgtcaccgggattggcgcctccggcctggtggcgcgtaactttagctggaagctgatgaagatcggcatcaacgctgtttctgagcaggatatgcatgccctgctggcgacggtgcaggccatgtccagcgacgatcttctgctggcgatctcttactccggcgagcgccgggagatcaatatggcggccggtgaagcgctgcgcgtcggctgtaagatcctggcgatcaccgggtttagcccgaacgccctgcaacagcaggcgacccactgcctgtatactatcgccgaagagcaggcgacgcgcagcgccgccatctcctccaccagcgcgcaaatgatgctcaccgatctgctgtttatggggctggtgcagcaggatctggagcgggcgccggagcgcattcgccatagcgaagcgctggtgaaaaagctggtctga

SEQ ID NO: 211034 - DNA, 636 bp, Klebsiella pneumoniae
ttgcagcacactgaacggagagtggtgtttttcgatctggacggaaccttacaccaacaggatatgttcggcagttttctgcgctatctgctgcgccatttgccgctgaacctgttgctggtggtgccgatggggccggtgatccttgccgggctggcagtgagcggacgggcggcgcgctggccgatgagcctcctgctgtgggcgacaacctttggccgccgcgaggcggtgctgaagcggctggaagcggagtttgtcggctggtttcgccatcatgtgacggcgtttccggtagttcatgcgcggcttaccgcctacctgaccagcaccgatgccgacgtctggttgatcaccggctcgccgcagtcgctggtggagcaggtctatcgcgataccctctggttgccgcgggtgaatctgatagccagccgcaccgcgcgccgctggggcggctgggtattgaccctgcgctgcctggggcatgaaaaggtggtacagctggagaaaaagattggcgccccgctgcggctgtatagcggctatagcgatagtgagcaggataatccattgctcggcttttgccagcatcgctggcgggtaacccctcagggagagcttcagcagctggagtaa

SEQ ID NO: 211035 - DNA, 510 bp, Klebsiella pneumoniae
gtgtctgacctcgaactcaatgatgaatactggatgcgtcatgccctgacgctggcgaaacgcgcctgggaagagggcgaggtgccggtgggcgcggtgctggtgcataacaatcaggtcattggcgagggctggaaccggccgataggccgtcacgaccccaccgcccatgcggagattatggccttacgccagggcggactggtgctgcaaaactaccgcctgatcgacgccacgctgtacgtgaccctcgagccctgcgtcatgtgcgcgggcgcgatggtgcacagccgtatcgcccgcctggtgtttggcgccagggatgccaagaccggcgccgccggctcgctgatggatgttctgcaccacccgggaatgaaccatcgggttgagattagcgaaggcgtgctggcagagtcctgctctgccatgctgagcgacttcttccgctggcggcgggaagagaaaaaagcgctgaagaaagcccgggcgcagactggggaaagttaa

SEQ ID NO: 211036 - DNA, 1617 bp, Klebsiella pneumoniae
atgccgcacattcgacgacaaccttgcgttttttccggacatcgcctgctgaggaacctgaagctgcagaagattaactctctgaaaaaattaaagattaattatctgctgatcggcattgtcacccttttgctggcggcggccctgtggccgtcgatcccctggtctggtaaacccgagaaccgggtggcgggcattatcgctcgcggcgagctgcgcatcagcaccatcaactcgccaatgaccttcgccaccatgaacaataaagcgttcggtctggattatgaactggcgaagcagtttgccgactaccttggcgtcacgcttaagataaccgtccggcaaaacatcagccagctgtttgacgacctcgacgacggtcaggccgatatgctggccgccggactggtctataaccaggagcgagtgaaaaactatcaggccggccccacctactattctgtttcacaacagctggtctaccgcgtcggcaatacccggccgcgcaccctcgcggcgctgaccgccgagcagctcactatcgctccgggccacgtggcgatcaacgacctgcagaccttaaaagccgagaaatacccggatcttgcctggcgcgtggacgaaaaacgcggtaccacggcgctgatgcaggcggtgattgacggtaaacttgattacaccatcgccgactcggtggccgtcagcctgtttcagcgcgtccatccggagctggcggtggccctcgatatcactgacgaacagccggtcacctggtttagtgcccgggacgacgataattcgctgtcggcggcaatgcttgatttcttcaataacattaatgaagacgggacgctggcgcgcctggaggagaaatacctcggccacggcaacgatttcgattatgtcgatacccgcaccttcctgcgcgcggtggaaaatattcttccggaggtgcagccgctgtttgaaaaatacgcccgcgagattgactggcgcctgctggccgccatcgcctggcaggaatcccactgggatccgcaggccacctcccctaccggcgtgcgcggtatgatgatgctcacacgcaatacggcgcaaagcctgggtctaaccgaccgcaccgatgcggcgcagagtatcgacggcggcatgcgctacctgcaggatatgatggataaagtgccggattcgatcccgaaagatgaacgcatctggtttgcgctggccgcttataatatgggttatgcccatatgctggacgccatggcgctcacccgcaaacagaaaggcaatcctaacagctgggcggacgttaagctgcgtttaccgttgctgagccagaaaccctattacagcaaactaaaatacggctatgcccgcggccatgaggcctacgcctatgtggaaaacatccgcaaatatcagataagccttgtcggctatttgtcagagaaggagcgccagcagcagcaaacgctggccctggcggaggattacccggccgtgctccccaatgagctcgaagagccgcaggagaccaccctgccctttttcaagtttcgcgccgataagcagatggataatgcccggatgaaactccccggccacctgtattaa

SEQ ID NO: 211037 - DNA, 3888 bp, Klebsiella pneumoniae
atgatggaaattttgcgtggttcacctgcactgtcggcattccgtattaataaactgctggcacgatttcaggcggccaaccttccggtaagcgccatatatgccgaatatattcattttgccgatctgaatgccccgctgagcgctgacgatcgcgagcgcctggcgcgactgcttcagtatggcccgagcttgagcagccataccccgaccggtaaattactgctcgtgacccctcgccctggcaccatctctccctggtcttctaaagctaccgatatcgctcacaactgcggtctggcgcaggttgtgcgtcttgagcgcggcgtggcgtattacgttgaagcctcaaccctgaccgaagcgcagtgggccgcggtggcggcggagctgcacgaccgcatgatggagagcgtcttcgacgagctggaagcgggcgagaagctgttcgctcaccatcagccgacgccggtcaccagcgtcgacctgctgggcgaagggcgtcaggcgctgattgacgccaacctccgtctgggtctggcgctggccgacgacgaaattgactacctgcaggacgcgtttacccgcctgggacgcaacccgaacgatatcgagctgtatatgttcgcccaggcgaactcagagcactgtcgccacaagattttcaacgccgactggatcatcgacggcgaacagcagccgaagtcgctgttcaaaatgatcaaaaacacctttgaaaaaacgccggactacgtgctgtcggcctataaagataatgccgcggtgatggaagggtctgaagtcgggcgctatttcgccgaccatcagaccgggcgctacgacttccatcaggagccggcgcacattctgatgaaggtggaaacccataaccacccgacggccatctctccatggccgggcgcggcaaccggctccggcggcgaaatccgcgatgaaggcgccaccggccgcggcgcgaagccgaaagcgggcctggtgggcttctcggtttccaacctgcgtatcccgggcttcgaacagccgtgggaagaagatttcggtaaaccggatcgcattgtcaccgccctggacatcatgaccgaaggcccgctgggcggcgcggcgtttaacaacgaatttggtcgtccggcgctgaacggctacttccgcacctatgaagagaaagtcaccagccacaatggcgaagagctgcgtggctaccacaaaccgatcatgctggccggcggtatcggcaacatccgcggtgagcacgtgcagaagggcgagattaccgtcggcgcgaagctgatcgtgctgggcggcccggcgatgaacatcggcctcggcggcggcgcggcgtcttctatggcctccggccagtccgatgccgatctcgatttcgcctccgtacagcgtgacaacccggaaatggagcgccgctgtcaggaagtgatcgaccgctgctggcagttgggcgacgccaacccgatcctctttatccacgacgttggcgccggcggtctctccaacgccatgccggagctggtgagcgacggcggccgcggcggtaaattccagctgcgcgatattctcagcgatgagccagggatgagtccgctggagatctggtgtaacgaatcgcaggagcgttatgttctggcggtcgccccggagcagctgccgctgttcgacgaactgtgccgccgcgagcgcgcgccttatgccgttatcggcgaagccaccgctgagcagcatctgagcctgagcgacagccactttaacgatcagccgatcgacctgccgctggacgtcctgctcggcaaaacgccgaaaatgacccgcgacgtgcagactctgaaagctcagggtagcgcgctggatcgccaaccgattacccttgccgatgcggttaaccgcgttctgcatctgccgacggtggccgagaaaaccttcctcgtcaccatcggcgaccgcaccgtgaccggtatggtcgcccgcgaccagatggttggcccgtggcagatcccggtggccaactgcgcggtgaccaccgccagcctcgacagctactatggcgaagcgatggcgatgggcgagcgcgccccggtcgccctgctggacttcgcggcctctggccgtctggcggtcggtgaagcgctgaccaacatcgccgccacgcagattggcgagctgaaccgcgtgaagctgtcggctaactggatggccgccgccggccacccgggtgaagacgctggcctgtatgaggcggtgaaagcggtgggcgaagagctgtgcccggcgctgggcctgaccattccggtcggtaaagactcgatgtcgatgaaaacccgctggcaggaaggcagcgagcagcgcgagatgacctccccgctgtcgctggtcatctctgccttcgcccgtgtcgaagatgtccgtcataccgtcacgccgcagctttcgacggaagataacgccctgctgctgatcgacctcggtaaagggcacaacgcgctgggcgcgacggcgctggcgcaggtctatcgccagctcggcgacaagccggctgacgtgcgcgatgtcgcgcaactgaaaggcttctggaatgcgatgcaggccctggtggcgcagcgtaaactgctggcctaccacgaccgctccgacggcggtctgctggtcacgctggcggaaatggcctttaccggccactgcggcgtggaagcggatatcgccgcgctgggcgacgaccatctggccgcgctgttcaacgaagagctgggggcggtgattcaggtccgcgccgcagaccgtgaggcggtggaagccattctggcggttaacggcctggcggactgcgtgcattacctcggtaaagcggttgagggcgatcgcttcgtgctgaccgccggcggtcagacggtgttcagcgaaagccgcaccacgctgcgcatgtggtgggcggaaaccacctggcagatgcagcgtctgcgcgacaacccggcctgcgccgatcaggagcatgaggcgaaagccaatgatgccgacccgggcctcaatgtgaagctctcgtttgatattaacgacgacgtcgccgccccgtacattgccaccggcgcgcggccgaaagtggccgtcctgcgcgagcagggggtgaactcccacgttgaaatggcggccgccttccatcgtgccggctttgacgccatcgacgtgcatatgagcgacctgctggccggccggaccggtctgggcgatttccatgccctggtagcctgcggcggcttctcctacggcgacgtgttgggcgcgggcgagggctgggcgaagtcgattctgttcaacgagcgcgtgcgcgatgagttcgcgaccttcttccatcgtccgcagacgctggcgctcggcgtgtgcaacggctgtcagatgatgtccaacctgcgcgagctgatcccgggcagcgacctgtggccgcgctttgtgcgcaaccagtctgaccgctttgaagcgcgctttagcctggtggaagtgacgcaaagcccatccctgctgctggaaggcatggttggctcacggatgccgattgcggtctcccacggcgaaggtcaggtggaagtgcgcgacagcgcgcatctggctcagcttgagagcaaaggtctggtggcgctgcgcttcgtggataacttcggcaaagtgaccgaaacctatccggcgaacccgaacggttccccgaacggtatcaccgcggtgaccagcgaaagcgggcgcgcgaccatcatgatgccgcacccggaacgcgtcttccgcaccgtaagcaactcctggcacccggagaactggggcgaggatagcccgtggatgcgtatcttccgtaacgcgcgtaaacagctgggttaa

SEQ ID NO: 211038 - DNA, 1440 bp, Klebsiella pneumoniae
atgattgagactacatccttgaagcgactctctcttttcccccgttcgctgcgtcagctggtgacgctctcttttgtgctgatcctgctgccattgctggtgctggcctggcaggcctggcagagcctgaacgcccttagcgcccaggcggcgcatattaaccgtaccaccctggtcgacgcccgacgcagcgaggcgatgatcaatgccgcactggagatggagcgcagctatcgccagtactgcgtgctggacgatccgacgctggcgcgcgtctatcaaaaccagcggcagcgctacagccagatgctggacgcccacgccggcgtgctgccggatgagaagctctggcaggcgctgcgtcaggatgtcagcgatctggcgcagctgcagtgtaaaaatagcggacccgatgcccaggcagccgccagactggaagttttcgccagtaataacagcgatatggtgcaggcgacccgggcggtcgtctattctcgtggccaacagctgcagcaggagatagccgaacgcggccagttttttggctggcaggcgctggtgctgtttctgctgagcctggcgctggtgctactcttcacccgcatgattatcggcccggtgaaaggcatcgaaagaatgatcaatcagctgggggcagggaagtcgctggacgacgccgcattgtttaccggcccgcgcgagctgcgatcggtgggcaagcgcatcatctggctcagcgagcgcctggcgtggctggagtcgcagcggcatcaatttcttcgccatctgtcgcatgagctgaaaaccccgttggccagtatgcgtgaaggtaccgagctgttggccgaccgcgtcgcggggcccctgacccctgagcagcaggagatcgtcgagatcctcgacagcagtagccgtaacctgcaaaagctgattgaacagctgctggactataaccgaaaacaggccgacggcccggtggctcgcgaagcggtggacctggtggacctggtggaaaacgtcgtggcggcgcacagcctgcccgcgcgggctaaactgatgcataccgaactgacgctgcaggcgcggcgttgcctggcagagcctgcgctattgataagcgtaatggataatctctactccaatgcggtgcactatggcgctgaatccggtaacatccgtatccatagctaccggcacggagagcaggtgcgtattgatgtcgccaacagcggcgaaccgatcccggccgcggaaaaaaacatgatattcgagcctttttaccaggggagtcaccagcgtaaaggggccgttaagggcagtggactggggttgagtatcgcccgcgactgcgtccggcagatgcaaggggagctcagcttagttgatgcgcccgccgggcaggtctgttttcgcattacgcttccctcagcgccggaataa

SEQ ID NO: 211039 - DNA, 687 bp, Klebsiella pneumoniae
atgtcccaattcctggcctggcgccgttccctcagcggatggctgctttcaggcattgcttgtctgacgctggcggggtgttccgccggcttttcaccgcataccgcggaaggtaccgccgcccccgggcaggcgcagcatcaggtggccgattttgtcgcggtagactgcgcggatatctgggcgcacagcagcgatgccagcgacaaaaatcccctctactggctgcggggcattgactgtgccgatcgcctcgcgccggcgcaggcgcgggcggaggcgaaacgccataccgacgacagctggcaggacgcgttccgtcgcggcatcctgcttgctgatgctaaaattacccctgaggagcgccgcgacctggtggcgcgtctcgataccttcagcccgcaaatcgccgttcaggtccgcccgctgtatcagctctggcgcgacggccagacccgtcagctgcagctggtggaagagcgtgcccgttacgctaagcttcagcagtccagcgatagcgaactggagacactgcgtcagcaggagctggcgctgcgcgagcagctggagctgaccacccgcaagctggagaacctgacggatatcgaacgccagctctccagccgcaagccgggcggcaatttcggcagcgaaaaagtgccggaggtgatccatgacgatccgtaa

SEQ ID NO: 211040 - DNA, 1338 bp, Klebsiella pneumoniae
atgacgatccgtaaaccggcgcgtttactgctggtggatgacgatccgggactgttgaagctactgggcatgcgcctggtcagcgaaggctacagcgtggtcaccgccgagagcgggccggaagcgctgcgcgtgctggggcgtgagaaagtggatctggtgattagcgatctgcggatggatgaaatggacggcctgcagctgtttagcgagatccagaagggccaccccggcatgccggtgatcattctcaccgctcacggttcgattcccgacgccgtggcggctacccagcagggggtgttcagcttcctgaccaagccggtcgataaagatgccttatataaagccattgatgaggcgttggagcagcgctcgccggccaccgacgaagcctggcgccaggcgattgtaacccgcagcccgctgatgctgcgcctgcttgagcaggccggaatggtggcgcaatcggatgtcagcgtactgattaatggccagagcgggaccgggaaggagatcgtcgcccaggcgatccacaacgccagcccgcgtcatgataagccgttcgtggcgatcaactgcggcgcgctgccggaacagctgctcgaatccgaactgtttggccatgcgcggggcgcttttaccggcgcggtcagtaaccgtgaaggattattccaggccgctgagggtggtacgctgtttctcgacgagatcggtgatatgccggttgcgttgcaggtgaagctgctgcgcgtcctgcaggagcgcaaggtgcgcccgctgggcagcaaccgcgatatcgaaatcaacgtgcggattatctccgccacccaccgcgacctgccgaaggcgatggcccgcggcgagtttcgtgaagacctgttctaccgcctcaacgtagtgaacctgaaaataccgccgctctccgaacgcacggaagatattccgctgttggccaaccatctgctgcgtcagtccgccgatcgccataagccgttcgtgcgggcgttttccagcgatgcgatgaagcggctgatggccgccaagtggccgggcaacgtgcgccagctggtgaacgtgatcgagcagtgcgtggccctgacttcgtcgccagtgatcggcgacgcgctggttgagcaagcgctggagggcgagaacacggcgctgccgaccttcgtggaggcgcgcaatcagtttgagctgaactacctgcgcaagctgctgcaaattaccaagggcaacgtcactcacgccgcgcggatggcagggcgcaaccgcaccgaattctataagctgctgtcgcgccatgagctcgacgccaacgactttaaagagtag

SEQ ID NO: 211041 - DNA, 339 bp, Klebsiella pneumoniae
atgaaaaagattgatgcgattattaaacctttcaaactggatgacgtgcgtgaagcgctggccgaagtcggcatcaccgggatgacggtaacggaagtgaaaggctttggccgccagaaagggcacaccgaactgtaccgtggtgccgagtatatggtcgattttctgccgaaagtaaaaattgaaattgtagtgaccgacgatatcgtcgatacctgtgtggataccatcatccgtaccgcacagaccggtaaaatcggcgacggtaaaatctttgtcttcgacgtggcgcgggtcattcgtattcgtaccggcgaagaagacgacgcggcgatttaa

SEQ ID NO: 211042 - DNA, 1191 bp, Klebsiella pneumoniae
atgcttgacgctcaaaccatcgccacggtaaaagccaccattcccctgctggtagagaccggcccgaaattaaccgcccatttctacgatcgtatgttcgcgcataatccggagctcaaagagatcttcaacatgagcaaccagcgcaacggcgatcagcgtgaagcgttattcaacgctattgccgcctacgccagcaatatcgataacctgcctgccctgctgccggcggtggaaaagatcgcccagaaacacaccagcttccagatcaaaccggagcagtacaatattgttggcagccatctgctggcgaccctcgatgaaatgttcagtccgggccaggaagtgctcgatgcctggggtaaagcctacggcgtgctggcgaacgtctttatcggccgtgaagccgagatctatcagcaaaacgccagtaaaaccggcggctgggaagggacccgcgcgttccgcatcgtgaagaaaaccccgcgcagccagcttatcaccagctttgagctcgaaccggttgatggccagccggtcgccgattaccagcctggccagtacctggccatctggctgaaaccggaaggcttcgaatatcaggaaatccgccagtactccctgacccgcaaagcggacggcaaaggctaccgcattgcggttaaacgcgaggaaggcggtcaggtttccagctggctgcataaccatgccagcgaaggcgatgtggtctatctggccgccccggcgggagatttcttccttaacgttaagccgcagacgccggtcactctgctctctggcggcgtcgggcaaacgccgatgctggcgatgctggatgcgctggcgaagagcggtcatcagggtcaggtgaactggttccatgcggcggaaaatggcgacgttcacgcctttgccgatgaagtgaaggcgctcggcgcggcgctgccggcgtttacctctcacgtctggtatcgcaccccgactgaggccgaccgtcaggctggacgttttgatagcgaaggtttgatggatttagcagcagtggcggacaatattcgcgacccgcagatgcagtattatctctgcggcccggtagcgtttatgcagtttgcagcgaagcagctggtcgaattagggatcaacaaagacaacattcattacgaatgcttcggcccgcataaggtgctgtaa

SEQ ID NO: 211043 - DNA, 1254 bp, Klebsiella pneumoniae
atgttaaagcgtgaaatgaacattgccgattatgatgccgaactgtggcaggctatggagcaggaaaaagtacgtcaggaagagcacatcgaactgatcgcctccgaaaactacaccagtccgcgcgttatgcaggcgcagggctctcagctgaccaacaaatatgctgaagggtatccgggcaagcgttactacggcggctgtgaatacgtcgacgtggttgaacagctggcaatcgaccgcgcgaaagaactgttcggcgctgactatgctaacgtccagccgcactccggctcccaggctaactttgccgtctacaccgcgctgctgcagccgggcgacaccgtgctcggtatgaacctggcgcagggcggccacctgactcacggctccccggttaacttctccggcaaactgtacaacatcatcccttacggtattgatgagtccggtaaaattgactatgacgacatggcgaagcaggctcaggaacacaaaccgaagatgatcatcggtggtttctccgcttactccggtatcgttgactgggcgaaaatgcgtgaaatcgctgacagcatcggcgcttacctgttcgtcgatatggcgcacgtggcaggcctgattgccgctggcgtgtacccgaacccggttccgcatgctcacgttgtgaccaccaccactcacaaaaccctggcgggtccgcgcggcggcctgattctggcgaaaggcggtagcgaagagctgtacaaaaaactgaactctgccgtgttcccaagcgcgcagggcggcccgctgatgcacgttatcgcggcgaaagcggtggcgctgaaagaagcgatggagccagagtttaaagtttaccagcagcaggttgcgaaaaacgctaaagcgatggtggaagtgttcctgaaccgcggctacaaagtggtgtctggcggtactgagaaccacctgttcctgctggatctggtggataaaaacctgaccggtaaagaagctgacgccgctctgggccgcgccaacatcaccgtcaacaaaaacagcgtgccgaacgatccgaagagcccgttcgtaacctccggtatccgtatcggttctccggcagtgactcgccgcggctttaaagaagcggaagtcaaagagctggctggctggatgtgtgacgtgctggacaatatcaatgacgacgcggtcattgagcgcgtgaaaggtaaagtgctggatatctgcgcccgcttcccggtatatgcgtaa

SEQ ID NO: 211044 - DNA, 468 bp, Klebsiella pneumoniae
ttgtgtattacgtttaaatcacacgtctctcataacgagctgattatgaacacactccgctattttgattttggcgcttcccgctctctgttgctgcttatcgcccgcatcgccgtggtgattctgtttattctttttggctaccccaaactgctgggctttgacggtacggtgcagtacatggccgcctccggcgcgccgatgccgaccctggcggcgattatcgccgtcattatggaagtgcctgccgcgattctgattgtgctcggctttttcacccgcccgctggcggtcatctttattttctacaccctgggcacggcggtgattggccatcactactgggatatgactggcgatgcggtattgccgaacatgattaacttctggaaaaacgtcagtatcgccggcgctttcctgctgctggcggtaaccggccccggggcgatctccctcgaccgccgctaa

SEQ ID NO: 211045 - DNA, 1197 bp, Klebsiella pneumoniae
atgcagcgtactggctttgataacgcccgggtccggcaggccaataagtcgatttttctttcccatctgtggcgggaaaagcagctcagtaaatcacagctctctcaactcaccggtctctccattccggcggtgagcaatattctggccgagctgcttagcgagggattgatcggtcactcaacggaacacttgagcaaacggggcgtgaacagcggcagctaccagatccccgagcacggcgcctggacactgtgcatgaatatcaccccgaccagcattgaatatcagcttgccgacgcccgcctgctggcagtggatggtcatcagcatttgccggtcaacgcgcccactcctcaggccctgcttgaggccatcgttgaatgctggcggcatatccaccgccgctacccgcagcacagcatcaatctcgcccttggcgtgcatggacaggttgatccgattaccggcgtttcacaaaccatgccccaggcacgctggaaaacaccgatcgaaataaagtatctgcttgaggagcggcttggcgtgcaggttcgggtggataacgactgcgtgatgctggcgctggcggagaagtggcagcatcagggtacacagcaggatttttgcgtgatcaacgtcgactacggtatcggctcgtcatttgtgattaacgatcatatttatcgcggcagtctgtacggcagcgggcagattgggcatacgattgtcaatcctgacggcaaagcctgcgactgcggaagatacggttgcctcgaaaccgtcgcctctctcagcgcgctgaaaaaacaggcccgaatgtggctcaaaacgcagcctgaagcaacgctctcccctgagcagttaaccacggcgtcgctcattgaggcctggaaagagggagatgtgcaaattcgcgcatgggttgataacgctgccaacgcgattggcttaagcctctataatttcctgaatatattaaatattaatcaaatatggctttacgggcgcagctgcgccttcggtgagcagtggctggaaagtatcgtcaaacaaacgggtttcaacccctttgaccaccgggatacgccgcgagcgcacgccacccaaattggctttggccagctgacacgcgcccagcagctgatggggataggttatctgtacgttgaggagcaattgcagacgctggtttag

SEQ ID NO: 211046 - DNA, 3276 bp, Klebsiella pneumoniae
atgtacggttcggttaaggtctggcaggaaatcatttcattaccaacgtggacgacgggagcggaagatccgaaccctatgtttctggaaaaacgtgtttatcaaggatcttccggcagcgtctatccctacggcgtgattgataccctgaccggcgaacgcgaaatgcgcgattatcaggcagtgtggatggagaatgatttccttcgggtcatgctgctaccggagcttggcggccgtattcaccgggcatatgataaagtcaaacaacgtgatttcgtctattacaatgaggtggttaagccagccctggtagggctgctcgggccctggatctccggcggaatcgaatttaactggccgcaacatcaccggccgacgacctttaagccggtcgatttttctattcagcagggagaaaacggcgcgcagaccgtatggatgggggaagcggagcccatgcgcggtttgcaggttatggccgggtttacgctctatcctgaccgcgcgctgattgaaatcactggcaagatcttcaatggtaacgccacgccgcgccatttcctgtggtgggccaaccctgcagtaaaaggcggcgatgcccaccagagtgtattcccacccgatgtcaccgctgtattcgaccatggtaagcgtgatgtttccgctttcccgattgccaccggtatctactacaaagtggactattctgcgggggttgatatctcccgttataaaaacgtcccggtacccacttcgtatatggcggagaagtcggattacgattttgtcggcgcttatcatcatgacgagcgaggcgggttactgcatgttgccgatcaccatgtctctcctggcaagaaacagtggagctgggggtacggggattttggccaggcctgggatcgaaatctgactgatgaaaatggcccttatattgagctgatgaccggcgtcttcaccgataaccagcctgactttacgtggcttgcgccttatgaagagaaggtgtttgtgcaaaatttccttccctacagcgagttagggatggtgcaaaatgccaatacacagctggcactgaagctggttcgcgagtctgggcaactgcagcttggcgtatatgccattgctccgctaaatcatatcgtggttgaactcagcgctgaccatcagccattgtacgaaactcagctgacgctgaagcccggtgagagctggcagcagacgctgccggaaaatggcgtcgggcgcttaaccctcaaagtgaaaaccgccgagaaccagccgctgctggattatcaggaacatattacccaacagacgccgctgcccgaaccagctatagcgcccgcgttaccggaagcgatccacaatggcgacgagctctattttatcggccagcaccttgaacaatacaaccacgcaagccgctacgccggggattactatcgtcgggcggttgagctcgatccgcaggattatcgcaataatgttgccctcggtaccctggcgttcaacagtgccgactgggcgctggcggaacagtgtgcccgtgctgcgctacagcgcgcgcatcgtttgaataagaacccgcgagatggcgaagccagtatgctgcttgccagcgtgctggaaaggatgggggatgatgcaggcgcctgggatcactattacaaagcctcctggagcggtaattgccgtgacgccgcctggtggtcgctggcgcggctggcgatgaagcgcggtgatgttgccgatgcgctggaaaaagtaaacaccagtctgcggttcaacgccagcaatcctctggcgatggggttgaaaacgctggcattagccaacagtgggcagaagaaagcagcgctggagtttattttcgcctctcttgaacaatacccattgagctatccgctgcactgcgcgcgctggatgattgagcggagcgacgacgcgcgagaaaccctgctgcgcatcacggggcgcagaggggtcaacgccagcctgctggcgggttggctgctctctatcggacagacgtcggcggtgaaagaggttcttgcggttctggacagtcaggaagcgctgccgatgctctggcgtgcgtcgctaagtgatgatgccaatgaacgccaacagtttattgccgccgccgagcactgccatgcgcacaatgttcgtttccctaactcgctcgatgaagttcagatgctgcagtcgctgggcgacagcgcttttgcccgctatctactcggttgcttctggtacagcaaacgtcgctatgacgaggcggtgagctgctggcgcgagacgctcgaaaaatctcccgattatgcgcccgctcatcgtctgctgggcgtttactcgtggaataaacagcaggatgcaacgcaggcgctggcttatctgcagcgcgccgtagcgctggagccggaaaatgcgcgcttcctgtttgaactcgattttttgcaaaaattactggccaggtcggtacatgagcgactgacgacgctggtggaacgtaaagccgtggtgctgaagcgggacgacctgaccgctgagctgctaagcctgtggaacgcgtccggtcattatgccgatgccgccgcgattctggatacgcgcgtattccatccctgggaaggaggagaagggaaaatcaccggccagtatttgctcaatcagctccatcgggcattacagttcatcgagcgtggggcgtttaaacaggccacggactgtctgaaagccgcattacgctatcccgacaatctgggggaggggcgactgcttgggcaaacggataacgatatctggtatttgctgggctactgcgcagaacaggctggggatgcgcagcaggcggcggaatattaccagcttgcccggcaagggggctcaacgctggacgccgggcggtactacaacgatcaacccgccgattatcttttctggcagggcattgcgctgcgtaagagcggtaacccagcgcaggccgagcagtacttccgccattttatcgactgggccgcgcagcatcgggatgacgttccgcaagtcgatttttttgccgtctctcttccggacctggtggttctcgatgtatcagcgcagcagagacatcagcagcactgcttgtttattgaagcgttgggccatctggggctgggcaacgtatccgcctgccagcagaggatgcagcagcttctgcaaataaatccggctcatgataaggcgcatctgattcgccatgccctgcaaagcggcattttttcctga

SEQ ID NO: 211047 - DNA, 1437 bp, Klebsiella pneumoniae
atgaacaacgcgcagacacatctgaaaatgggctacgtctggacgatttgtctggtcgccgcctgcggtggtttactgtttggctatgactgggtggtgattggcggcgctaagccattttatgaagcctggttttcaattacggacccggcgcagtccggctgggcgatgagctcagcgctgttgggctgtattttcggcgcattaatttcgggatggtgcgcagacaaactggggcgcaagctgccattaattctttccgccgtgctgttcagcgcgtcggcctgggggacggcggtcgccagtcatttcgatatgtttgtggtttaccgcattgtgggcggcgtagggattggtctggcttccgctctcagcccgctttacattgccgaagtcagtccggcagagaaaagagggcgttttgtcgcggtcaatcagctcaccatcgtgattggcgtactggccgctcagttaatcaatctgatgattgctgaaccggtggagccgggggcgacgcagcagatgattgtggacagctggaatgggcagatgggctggcgctggatgttcggtgcggaactggtgccggcgctggcgtttctggtcctgatgttttttgtccccgagtcgccgcgctggctcatgaaggccggtaaaccggagcgcgcccgggctgcgctggaacgcattggttctgccgactatgccgacaggatcctgcgtgaaatcgcgcataccctggaaaaggataacaataaagtctcctatggcgcgctgttggctccccaggtgaaaccgattgtgatcattggcatggtgctcgccatattccagcagtggtgtgggattaacgtcatctttaactacgcgcaggagatttttgcctcggcggggttcgatattaacagcacgctgaaatcgatcgtcgcgacgggcgtcgttaatctggtctttaccattgcggcgctgccgctggtggataaaatcggtcgccgtaaattaatgctgcttggcgcttcgggattgacgctgatctatgtgctgatcgccggcgcttacgccatgggcattatggggtggccggtactgttgctggtgctggcggcgattgctatttatgcgttgaccctggcgccggtgacctgggtgctgctggcggagatttttcccaaccgcgtacgtggactcgcgatgtctttaggtaccctggcgctgtggatcgcctgtttcctgttaacctatactttcccgctgcttaatgccggtctgggcgcggcaggaagcttcctgctgtatggtgtcatttgcgctgccggctacctctatatcctgcgcaacgtcccggaaacgaaaggtatcaccctcgaagcgctggaagagcagctggcgcagcgtcatacgggcgttaatgcggcgaagcaggagcagatgcgctaa

SEQ ID NO: 211048 - DNA, 834 bp, Klebsiella pneumoniae
atggcggaagagtggattctggagaacgcgcatctgcggatgtgcgtctcttctctgggcggcaaagtgcaaagtttattctcgcggcaatatcaagcgccggtgctatatgaaaatcccgccggcggcatgtttccgatgctgccattggccaatcgcgtcgccggcaaccgttttatttttcatgggcaggagattgtcctgcctcgccaccatgccgacgagtatttctttcttcacggtgacggctggttacagcgctgggatattattgagtgcggcgccgagtattgtgtattacagctgcgtcggcagcatgcctgcggtttcgattatctggcgcagctccgctaccagttgctgcgtaaccagctgatagcggagctaacgcttacccactatggggaggtccctgcgctttacggctgcggctttcatccctttttccctttcgatgaacgcagcaaggttcagttccaggtcagcggttactggccggaaggggagaatcatttacctctcaactggcaaggaaacttgcccgactatgccaatttcagcgtggctcagttcggtgaagatcgttggctgaacgtgggttattccggctggggcgggcgggcgaaggtaagtaatgacgtgatgaatatcacaattctatcgcaaactccgtggttgatgctgttcagaatgcaaggtgaatcattcctttgcctcgagccgcaaagccatccggtaaacgcccacaacatggatgggcagccggggctgcgagttttaggcgcgggagagaagctgaatttttcgctgaaaatcatcatcgagggagcataa

SEQ ID NO: 211049 - DNA, 1137 bp, Klebsiella pneumoniae
atggtcttgcactccacgcgctggctggcgctcagttatttcacctacttttttagctacggtatttttctgcccttctggagcgtctggctggccggaaacgggctgactccggaaaccatcggcattttgcttggcgccggtctggtggcccgttttctcggcagtctgctgattgccccgcgggtgagcgatccctcccggctgatcaccgcgctgcgcgtgctggcgctgttaaccttgctcttcgcgctggccttctgggccggcagccacgtagcatggctgctggcgatcatcatcggcttcaacctgttcttttcgccgctggtgccgctgacggatgctctggccaatacctggcaaaagcagatcaccatggactatggccgggtgcggctgtggggatctattgcctttgtgattggttcggcgctgaccggcaagctggtgagcctgttcgattaccgggcgatcctgctgatgctaagcctgggggtcgcctcgatgctgctcggcatgctgcttaagccgtcggtgatgccccagggggagtcgcgccagcagcagggggccggaatggcggcctggctgacgctggtgcgccaaagctggcgctttctcgcctgcgtttgtctgctgcagggagcgcatgccgcctactatggctttagtgccatctactggcagcaggccggctattccgcctcggcggtcggttatctatggtcgttaggcgtggtggcggaagtggtgatcttcgcgttgagtaaaaaggtgttccgccgcttcagcgcccgcgacctgctcttgctctccgccgtctgcgggctgattcgctggggactgatgggctggaccacggcgctgccgggactcatccttgcgcagatccttcactgtggcaccttcacggtgtgtcatctggcggcgatgcgctatatcgccgcccgtcagggtagcgaagtgatccgtctgcaggccgtctactccgcggtggcgatgggcggcagtattgccatcatgaccgtcttcgccggtttcctctatcagcacctgcaccagggcgtattctgggtgatggccctgctgacgctcccggcgatggctatacggccaaaagcggtggcggcctag

SEQ ID NO: 211050 - DNA, 1278 bp, Klebsiella pneumoniae
atgatgaccgtcattgaaccaccatctgcgctttccagtccacagcgccgtagccaggtgctcctgatgttttatctgcccggacagtcggtgacgactgaacggcttggcaggatcaacctcgttgatgagaccacggcccggcaggatattgaggagaccggacgcgaaattcagcgttaccaccgtttgaccctccagtcacaggtggacggcagctatcggattgaaggcgccgcgctcgaccaacgtttatgtctgctgcatgcgctgcggcgggggctgcgcctctgcccacagttcgttaatcatcattttaccccggcgctgaaaacgcagcttaaacaggaaggcattgcccgcaccttatacgatgataccaatctgcaggcgctggtgaaccgctgcgcgcgggcgctcaatcgccagtttgactgccgcgacgtgcagtttctgcgcttgtacctgcagtactgtctgctcgaacatcaccggggatactctccggacttcaatgaggaacagcaacgctgggctcaaaccgccgccgagttcaccctggcgcaggagattgtccgccactggcagcgtcgggtcggcgctccgccccatgtcggagaaccttttttcctctcgctgctgtttatgttgctcaaaacccccgacccggtccgcgacggtcacccgcacgatcgccgcctgcggctggctatctccggcctgatccaccgcttccagatcctcgctggcagagcgttcagtgatgagcaggggctcagcgatcaactctatattcatttgtcgcaggcgttgatccgcagcgtgtttgctatcggcatcgacagcacgctcacagaggaagtgacccggctctaccctcgcttactgcgtaccacccaggcggcattgagcgaattcgaggaggcctggcacatccgttttaatgaggaagagaccggtttaatcgcggtgatctttggcgcctggctgatgcagaaaagcgacctgcacgagaaacaggtgctgttgctaaccgatgacaacccagctattgaagaggccctggaacaacagctgcgcgaactaacgctgctgccgctgaatatcaaataccagagcgtagagcgctttcagaaggaaggtgcgcccaaaggggtgacgcttatcgtcaccccctatgcgacggcgctgccgctgttttcgccgccgctgatccacgcggagaactacttcactgaacgccagcagcagcatatctgcgccatgctcgaggactag

SEQ ID NO: 211051 - DNA, 639 bp, Klebsiella pneumoniae; identical to SEQ ID NO: 139299

SEQ ID NO: 211052 - DNA, 981 bp, Klebsiella pneumoniae
atgtcagtaatttttactccgcgcgcgcgattttcgcgctggaaagcgctgtggccgctggcgctgttgctggctgtgagcatcatcggcggcatctggctgtggcgggcgtggccgcaggtgctgatgcagagcgcagtctggcagcgttcgctaaacctggaactcagccgcctgctgcaggcggtggcggagaacccggcggcggcagggctgtcgctgctggggtttagcttcgtttacggggtgctccatgccttagggcccggacacggtaaaattgtcattacgacctggcttgccacccatcccgcgaagctgaaatcaagcattggcctgacgctggccgcttctttactgcaggggctggtggccatcgcgctggtggtcgtggtgctggcgctgctgcagctgccggcgtgccagctgcacctcagcagtttctggctggagaaggggagctatttgctggtgggcgcgttagggctgctgctgtgctggcgggcgttaaaaaagctgcgtctgctgctgcgccggccaacgtttaccgcttttactccgcatcatgttcataacgaacactgcggctgcgggcatcagcatctcccggccccggagcagctgcaggctggcgacgactggcgggctcgcgccgcgatcgtcctgtcgatgggtatgcgtccctgctcgggggcgatcatggttctgctgttcagcaaggtaatcggcgtttttggctgggggatggcggcggcgctggcgatggcggcgggaacctcgttgactatcacggcgctggcgctgttggtgcatgggttccgccaactggcgatccgcctcagtcgccatcaggcgccagcgttatggaagcaggttagttgggcgacgctggcgctggccggcggcgtcatattgctggcggcggcaggggtgatgtggctcagcgccgtccctgccggcggtgggatccgtccgttttag

SEQ ID NO: 211053 - DNA, 837 bp, Klebsiella pneumoniae
atggccgcaaatatcgtttctcccgcgcagagcgggcggttctattatggctgcgccggcgccgccgggctgctggcgggcctggcgatcgtattctggtttccagccctggccagctggtggccgtcagatctggtgcgtgtctaccacgccatgccgtatgttatgcgattcggggtggcgagtgtcgcggatattccgctggtggcctacgccaccctaacgctgtcgggcttcgtgctggccttttgtcatcccggtcacagtaaactgcccattgttgcctgggctgtgcataaccagccctcgccgcgggagatggtcgactggatcctgcgcagctgggtgttgcagttcggttttctggtgatcattttctggcgtttcgcgtttatgggtaagctaagcagcgacaggctaatgcagatcgtgggcatctttaacgacgtatgctatctggccacgctggtgctggctggaatactgctgcgcgacggctggcgcgactttcagggcgttgccgcaccggcaggcaatattcgcattccgctgatctttgccctgagtttttatctgccgtttcagctggtatggattttactcagtgcgcagcagtatgagctgccgctgtggggatggctgctgctggttccggcgatggtcggcgtgctgttagccaggctgacggtggtagggatagcgctgtgtttccggcgctggctggggacgcagggctgtctgcgttggcgcggaccgctggccttatttagcggcctgacggtgctctgtattggcggtaatgcggtgattcgccagatcctcaacatgataaaatga

SEQ ID NO: 211054 - DNA, 804 bp, Klebsiella pneumoniae
atgcatccgatgctgaacatcgccgtgcgcgccgcgcgcaaggcgggtaatttaattgccaaacactacgaaacgccagacaccgtagaaaccagccagaaaggcagcaatgattttgtgaccaacgtcgataaagccgccgaagcgattattatcgaaaccattcgcaaatcttacccgcagcacaccattatcaccgaagaaagcggtgaacacgctggcgaagagcaggatgttcaatgggttatcgatccactggatggcaccaccaacttcgttaaacgtctgccgcacttctctgtttccatcgccgtacgcatcaaaggtcgtactgaagtcgcggtggtctacgatccgatgcgtaacgaactgtttaccgcgacccgcggccagggcgcgcagctgaacggctaccgtctgcgcggcagcaacgctcgcgacctcgacggcaccattatcgcgaccggcttcccgttcaaagcgaagcagcacgccaccacctacatgaatattctcggcaacatgtttaccgaatgtgccgacttccgtcgcaccggctctgccgcgctggatctggcctatgtggccgccggccgcgttgacggttactttgagatcgccctgaaaccatgggatttcgccgcaggcgaactgatcgcccgtgaagctggcgcgattgtctgcgacttcaccggcggtcataactatatgctgacgggcaacatcgttgccggtaacccgcgcgtggtgaaagcgatgctggcgaacatgcgcgagcagctgagcgacgcgctgaagcgttaa

SEQ ID NO: 211055 - DNA, 735 bp, Klebsiella pneumoniae
atgctgcaaaatattcgaatcgtactggtagaaacttcccataccggcaacatgggctccgtagcccgcgcgatgaaaaccatgggcttaactaacctgtggctggtcaatccgctggtcaaacccgattcgcaggcgatagccctggccgcgggcgccagcgacgtgatcggcaacgcgcagattgtcgatacccttgatgaagcgctggcaggctgtagcctggtggttggcaccagcgcgcgctcccgcacgctgccgtggccgatgctcgacccgcgcgaatgcggtctgaaaagcgtcgccgaaggtcagcatgcgccggtggcgctggtctttggccgcgagcgcgttggtctgaccaacgatgaactgcagaagtgccactatcacgtggcgatcgccgccaacccggagtacagctcgctgaacctggcgatggcggtgcaggttatcgcctatgaagtgcggatggcctggctggcggcgcaggagcaagcgcagccggcggttgagcatgaagaggcgccgtacccgctggtggacgatctggagcgattctacgaccatcttgagcagacgctgctggcgacgggctttatccgcccgaatcatccggggcaggtgatgaacaagctgcgtcgtctgttcacccgcgcgcgtccggaaagccaggagttgaacatcctgcgcggcatgctggcgtctattgagcagcagaataaaggtaagtaa

SEQ ID NO: 211056 - DNA, 492 bp, Klebsiella pneumoniae; identical to SEQ ID NO: 139431

SEQ ID NO: 211057 - DNA, 1215 bp, Klebsiella pneumoniae
atgaaattaccgatttacctcgattactccgcaaccacgccggtggacccgcgtgttgccgagaaaatgatgcagttcctgaccatggacgggacctttggtaacccggcctcccgttcccaccgttttggctggcaggctgaagaggcggttgatatcgcccgcaatcagattgccgagctggtcggcgccgacccgcgcgaaatcgtctttacctctggtgcgactgaatccgacaacctggcgatcaagggtgcagccaacttttatcagaaaaaaggcaagcacatcatcaccagcaaaaccgagcataaagcggttctggatacctgccgtcagctggagcgcgaaggcttcgaagtgacctacctggcgccgcagagcaacgggattatcgatctgaaagagctggaagcagcgatgcgtgacgacaccatcctggtttccatcatgcatgtgaataacgaaatcggcgtggtgcaggatatcgctaccatcggcgagatgtgtcgcgcccgcggtatcatttaccacgtagacgccacccagagcgtgggcaagctgcctatcgatctgagccagctgaaagttgacctgatgtccttctccggtcacaaaatctacggtccgaaaggcatcggcgcgctgtacgtgcgtcgtaagccgcgtattcgtatcgaagcgcaaatccacggcggcggccacgagcgcggtatgcgttccggtactctgcctgttcaccagatcgtcggcatgggtgaagcttaccgtatcgccaaagaagagatggaaagcgagatggcgcgtctgcgcacgctgcgcaaccgtctgtggaacggcgtgaaggatatggaagaagtgtacctcaacggcgacctcgagcagggcgcgccgaacattcttaacgtcagcttcaactatgttgaaggcgagtcgctgattatggcgctgaaagacctggcggtttcctccggttcagcctgtacttcggcgagccttgagccatcctacgtgctgcgcgcgttaggcatgactgatgaactggcgcacagttctattcgtttctctttaggtcgtttcactaccgaagaagagattgactatgccatcgatctgattcgcaaatccattggccgtctgcgcgagctttctccgctgtgggaaatgttcaaacagggcgtggatctgaacagcattgaatggtcacatcactaa

SEQ ID NO: 211058 - DNA, 387 bp, Klebsiella pneumoniae
atggcttacagcgaaaaagttatcgatcattacgagaatccgcgcaacgtcggctcttttgacaacagcgacgagaacgtcggcagcggcatggtcggcgcgccggcctgcggcgacgtgatgaagctgcagattaaagtcaacaatgaaggtatcattgaagacgcgcgcttcaagacctacggctgcggttccgctatcgcttccagctccctggttaccgagtgggtgaagggcaaatcgctggacgaagcgcaggcgatcaagaacaccgatatcgccgatgaactggaactgccgccggtgaaaatccactgctcgatcctggcggaagacgcgattaaagccgcgattgcggattacaaaagcaaacgtgaagcaaaataa

SEQ ID NO: 211059 - DNA, 324 bp, Klebsiella pneumoniae; identical to SEQ ID NO: 137490

SEQ ID NO: 211060 - DNA, 516 bp, Klebsiella pneumoniae
atggactatttcaccctcttcgggttaccagccagctataccctctcgcttgaacaactggctgtccggtatcaggatctgcagcgccagtaccatccggataaatttaccagcgcgcctgcggcggaacagcttgcggcggttcagcattccgccactataaaccaggcctggcagacgctgcgccatccgctgactcgcgcagaatatctcctttcgctgcatggcttcgatctggccagcgagcagcataccgttcgcgataccgcgttcctgatggaacagctggaattgcgcgaagagctggatgagatcggccaggcgaaagacgacgcgcggctggaaggttttatcaaacgggtgaaagcgctgtttgatacccgtcagcagctgatggttgaccaattgcataatgagagctgggaggcggcggcggacacggttcgtaagctccgtttcctcgataaactgcgcagcagtgctgaagaactcgaagaaaaactgctcgatttttaa

SEQ ID NO: 211061 - DNA, 1851 bp, Klebsiella pneumoniae
atggccttattacaaattagtgagcccggcctgagcgccgcgccgcaccagcgtcgtctggcggccggtatcgacctgggcaccaccaattctctggtggctaccgtgcgtagcggccaggccgagactctgcccgatcatcaaggccgctatctgctgccgtcggtggtgaactaccacgcttcggggctgaccgtcggctatgacgcccggcttaacgccgctcaggatcctgccaataccatcagctccgtgaagcggatgatggggcgctctctcgccgatattcaaaaccgttacccgcatctgccgtatcagctgcaggccagtgaaaacggcctgccgatgatccagaccgccggcggcctgctgaacccgattcgcgtctccgccgatatcctcaaagcgctggccgtccgggcgaccgaagcgctggccggcgaactcgacggcgtggtcattaccgttcccgcttacttcgatgacgctcagcgccagggaaccaaagacgcggcgcgtctggcgggcctgcacgtgctgcgcctgctcaatgagccgaccgcggcggctattgcctacggcctcgactccggccaggaaggggtcattgcggtctacgatctcggcggcggcacctttgatatctccattctgcgtttaagccgcggggtgtttgaagtgctggccaccggcggcgactcggctctcggcggcgatgatttcgatcacctgctggctgactacctgcgcgagcaagcgggcttcagcgaccgcagcgataaccgtctgcagcgtgagctgctggatgccgccatcgcggcgaaaatcgccttgagcgatgccgaggcagcgcacgtcgaggtcggcggctggcagggcgatatcacccgcagccagtttaacgatctgattgccccgctggtaaaacgtaccctgatggcctgccgtcgggcgctaaaagacgctggcgttgaagcgcaagaagtgctggaagtggtgatggtcggcggttcgacccgcgtgccgctggtgcgtgagcgcgttggcgagttctttggtcgcactccgctgacctccattgacccggacaaagttgtcgccatcggcgcggcgatccaggccgatatcctggtgggcaacaagccggacagcgaactgctgctgctcgacgttatcccgctgtcgttaggcctggaaaccatgggcggcctggtggagaaagtgatcccgcgtaataccaccattccggtggcccgcgcgcaggagtttaccaccttcaaagatggccagacggcgatgtccattcacgtgatgcagggcgagcgtgagctggtccaggattgccgttcgctggcgcgctttgcgctgcgcggtatcccggcgctgccggcgggcggggcgcatattcgcgttaccttccaggtggatgccgatggcctgctgagcgttacggcgatggaaaaatcgaccggcgtggaagcctccatccaggtgaaaccgtcttacggtctgaccgatggcgaaatcgccaccatgattaaagattcgatgagctacgccgaacaggatattcaggcgcgcatgctggctgaacagaaagtggaagccgcgcgcgtactggagagcctgacaagcgcgctggccgccgacgccgcgctgttaagcgccgcggagcgtcaggccatcgatgccgctgcggagcaggtacgcgccgccgcggcaggcgacgacgctgacgcgattaaagaagcgattaaaaatatcgacacacaaacccaggaattcgccgctcgccgtatggatcagtcggtccgtatcgcgctgaaaggccaatccgtggacgaggtttaa

SEQ ID NO: 211062 - DNA, 336 bp, Klebsiella pneumoniae; identical to SEQ ID NO: 137494

SEQ ID NO: 211063 - DNA, 201 bp, Klebsiella pneumoniae; identical to SEQ ID NO: 137495

SEQ ID NO: 211064 - DNA, 1287 bp, Klebsiella pneumoniae; identical to SEQ ID NO: 137496

SEQ ID NO: 211065 - DNA, 777 bp, Klebsiella pneumoniae
atgtcagatacaaaaaatgaattagaaaccctgctggaaaaagcggcgactgagcccgcccatcgtccggcatttttcagcgcgctgctggaggccaccgtctgggtgccgggcagggcagccgatggcgagcagattgtcgaagatagcgcgctggatctgcagcattgggaaaaagacgacggtacctcggtgatcccattctttacctcgctggaggcgctgcagcaggcggtggcggatgaacaggctttcgtgatgatgccggcccgcacgctgatggcgatgacgctgggcgaatcgttattcctcaacccgaagctgccgagcggcaaagagttcaccccacgggaaatcagccatctgttaggcgaagagggcagcccactgagcacccagacggtactggaaggcggcgaagcgctgctgctgtctgaagtcgccgaaccgccggcgcagatggtcgattcgctaaccacgttgttcaaaacgctgaagaccgtcaagcgggcgtttctgtgctcgattaaagagcgcgccgacgcgccggccaacttattgatcgggattgaagcggaaggggatattgaagccattatccagaccaccggcagcgtggccaccgataccttgccaggcgacgaacctatcgatatttgccaggtggtggaaggcgagaagggcatcagccattttatgattgcccatatcacgccgttctatgaaaagcgctggggcagcttcctgcgcgattttaagcagaaccgcattatctga

SEQ ID NO: 211066 - DNA, 843 bp, Klebsiella pneumoniae
atggcattagtctctaacccacattcggcttattcaccgcgccttccctggctgggaggtatagctggcctgctggcaggcggcgcgatcctttatttttggccgcaatggaaccggacatggctaagcctggtgcctgcgccagtctccgtgtatacccgctttctcggggtcactctcgaagacgttccgttagtcacctattgccatcaggcgctgctgggttttctgatggtgctgctcgctcccggttacggtaagtcgacccttgccgcgtggatgatgcataacccagcgtcaagccgtcgctggcccggcgaggtattccgtgcctgggtcacaaaatttggcctgctggtcattgtcttttgcaatctgttctttttgtcccgggtcctatccggaaccctggcgttatatatttttattctccagcacatcagcgttgccgcggcggtggcgtcaggggtgctgctcctgcgtgacgcccggcgcctggcccgcacgttcgacgctcagctggcggacctgcgtcttctcatgatacttaccctcgggttccagacgattttgccggcgcagatcgcgctgatgagcgcccggggcgtgaatacgccgctgggctggtacattgttatcgcgcaaatggcaggggtgttactggcgtttatgctggtcggcgggctggtggcagcgctacgttctctgctgggcgaagagaggtgccgggcctggcgcggggatatggcgctcttcaacggcattgtcacgctgtgcgtgacgggatttctcctctatcacatggtgtctgcctatccgcgaatctttgccgccctgcattag

SEQ ID NO: 211067 - DNA, 858 bp, Klebsiella pneumoniae; identical to SEQ ID NO: 137500

SEQ ID NO: 211068 - DNA, 4950 bp, Klebsiella pneumoniae
atgaaaccatttcgtttagcggcgctatcactggcgctccttaccgcattttcattaaccgggtgtgatgacagcggtacaccgcaggcctcggccccggcgccagccgcggatagcaacccaggcgcgacggcaaaaccggaccgcgcccagctggcggcgctggcggaaaaaagccagggtaaagcgctgacgctcctcgacgcctcggaggtgcaactggatggcgccgcgaccctggtgctgacgttttccgtcccgctgcagccggaccaggatttctcgcgcagcgtgcatctggtcgacaagaaaagcggtaaggtggacggtgcctgggagctggcgccgaatctgaaagagctgcgtctgcgtcaccttgagccaaagcgcgagctgattgtctcagtcgacccgacgctgaccgccctgaacaaggcgacgctcgacaaaccgtttgagaagaccctgaccacccgcgatatcgcaccgagcgttgggtttgccagccgcggctcgctgctgccgggcaacgtggtcgccgggctgccggtgatggcgctgaacgtcgataatgtcgacgttaatttcttccgcattaagccggaatcgctctccgcctttgtcagtcagtgggaataccgtaactcgttaagcaactgggaatctgatgaactgctgaagatggcggatctggtctataccggccgcttcgatctcaacccggcgcgtaatactcgcgaaaagctgctgctgccgctgagcgatatcaagccgctccagcagcctggcgtctacgtggcggtcatgaacccggcgggccgttatagctacagcaacgcggcgacgctgtttaccctcagcgatatcggcgtctcggcgcatcgctaccataaccggctggacgtttttacccagagtctggaaaacggcgccgcccagtcgggcattgaggtgcagttgctcaatgccaaagggcagaccctggcggaagcgaaaagcgacagccagggccacgtcaccctgcaaaccgataaagaagccgcgctgctgctggcgcgcaaagaggggcagaccacgctgctcgacctcaagctgccggcgttggatctggcggaattctctatcgcaggcgcgcccggctttagcaaacagttctttatgtttggcccgcgcgatctctatcgtcccggcgaaacggtgatccttaatgcgctgttgcgcgatagcgacggcaagccgctggcggagcagccggtgaaactggaggtggttcagccggacggccaggtgatccgctcggtgatgagcaaaccagtgaatggcctgtaccagtttacttatccgctcgacagcggcgcggctaccggcatgtggcacattcgcgccagcgccggcgacaatcagccgcgcgaatgggatttccacgttgaagactttatgccggaacgcatggccctgaacctgacgccgcaggccgcgccagtcgcgccggatgccgacgtcacctttggcgttagcggcgcttatctctacggcgcgccggccagcggcaaccagctgcagggcaagctgttcctgcgcccgctgcgcgacgccgtcgctgcgctgccgggcttccagttcggcgatattgcggaagaaaacctctcccgtagtctggatgaagtccagctgacgctggacgaaaaaggccatggcgaagtgaccacctcaagccagtggcaggatagccattcgccgctgcaggtggtgttgcaggccagcctgctggaatccggcggtcgcccggtgacccgtacggttaagcagccgatctggcccgccgaggcgctgccggggatccgcccgcaatttacgctgaaggacgtttacgattaccgcaccgataccaccgtcaaacagccggtggtggatgaaaacagtaacgccgcgtttgatatcgtctatgccgacgtcaaaggcgagaaaaaagcgatctccggtctccaggtgcggctgatccgcgagcggcgcgactactactggaactggtccgacagcgaaggctggcagtcgcagttcgatcaaaaagatctgcaggagggcgaggagtcgctggacctgcaggccggccagatcggcaaagtgagcttcccggtggagtggggatcctatcgcctggaggtgaaaggaccggacgacgtggtcagcagcgtgcgcttctgggcgggctacagctggcaggataacagcgaaggcgccggcgcggcgcgtcctgaccgggtcaccatgaagctggataaaccgagctataaaccgggcgacaccatcaggctgcacatcgccgccccggcggcgggtaaaggctacgcaatggtggaatccagcgaagggccgctgtggtggcaggaaattgacgtcccggcggaggggatggacctgtcgatcccggtggataaaacctggaatcgccacgacctctacctcagcacgctggtggttcgtcccggcgataaatcgcgctcggcaacgccgaaacgcgcggtgggcctgctgcatctgccgctgggcgatgaaaaccgtcgcctgacgctggcgctggaggccccggacaaaattcgccccaaccagccgctgacggtgaaagtgaaagccagcgtcaaagagggcgaggcgccgaaacaggtcaatgtcctgctctcggcggtggatagcggggtactgaatatcaccgattacgctaccccggatccgtggaacgccttctttggccagaagcgttacggcgcagatatctatgacatctacggccaggtgatcgaagggcagggacgtgtggccagcctgcgcttcggcggcgatggcgacgagttaaaacgcggcggcaaaccgccggtcaaccacgtgacgatcgtcgcccagcaggcgcagccggtggtattgaacgatcagggcgaaggcacggtgacgttacccattggcgattttaacggcgagctgcgggtgatggcccaggcgtggacggcggatgacttcggcagcagcgaagataaagtggtggtggccgccccggtcatcgccgaactgaacaccccgcgcttcctcgccagcggcgataccacacggctggcgctggatctcagcaatctgaccgataaaccgcaaaccctgcaggtacatcttaccgccagcgggctggtaacgttgagcgagggccaactgccgccggtgcaactggcgccgggggcgcgcagcacgctgtttataccagtgagcgcgctggcgggcttcggcgatggtcaggttaatgcctccatcagcggcctgagcctgccgggcgaaaccttcgccccgctgcaaaaacagtggaaaatcggcgtgcgtccggcgtacccggcacagaccgtcaacagcggcgcagtgctgcagccaggtgaaagctggcagccgccggcggcgcagagccagggctttgccccgcaaacgctgcagggccaactgctgctcagcggtaaaccaccgttgaatctcgcccgctatatccgcgagctgaaagcctatccttacggctgccttgagcagaccgccagcggcctgttcccgtccctgtataccagcgcggcgcagctaaaggcgctgggcattagcggggacagcgacgaaaaacgccgcgcggccatcgatgtcggtatttcacgcctgctgcagatgcagctggaaaacggcggctttgcgctatgggatagagaggggccggaagagtactggctgaccgcctacgccatggacttcctcgtgcgtgccagcgagcagggctatagcgtaccggtcaacgccattaataaaggcaacgagcgcctgctgcgctatctgcaggagccgggcctgatgaccgtgcgctacagcgacgacgcccaggccagccgctttgccgcccaggcatacgccgcgctggtgctggcgcgtcagcaaaaagcgccgctcggcgccttgcgtgaaatctggagccgtcacgaccaggcgcgatccggcttgccgctgctgcagctcggcattgcgctgaaaactatgggcgatgcgccgcgcggcgacgccgccctgaagctggcggttgccaccccgcgccaggatgagaatcgttggctgggcgattacggtagcccgctgcgcgacaacgccctgaaactggcgctgctggaagagaataagctgctgccggaggtgcaaaatcagctgttgagcacgctgtcggaagaggcctatggccagcgctggctgtcgacccaggaaaccaacgccttgttccttgccggacgtacgctggcggacctgccgggcagctggcaggcgaaaacctcgctgcaggcggagccgttggccggcgacaaagcgcaaacccgcaacctcgacggcgatcggctggcggcgctgcaggtgagtaataccggcagtcagccgctgtggctgcgcctcgatagcagcggttatccgcaaagcgcgccacagccgggaggcaacgtgttggggattgaacgcgctattttcgatacccacggccagcagaaatcgctgacctcgctgcgcagcggcgaactggtgctggtcaagctggaggtgaccgccaaacgtaacgttcctgacgcgctggtggttgatctgttgccagccggtctggagctggaaaaccagaatctggccaacagcagcgccagcctgcaggagaatggcgacgcggtgcaaaacctgcttaaccagatgcagcaggcggatattcagcatatcgagttccgcgatgaccgtttcgtcgccgccgtcgctgtcaatgaaggccagccggtgacgctggtctatctggcgcgggcggtgacgccgggcacttatcaggtcccgcagccgcaggtggaatcgatgtatgcgccgcagtggcgggcgacaggagcggccagcggtccgctcaccgtgacgccgtaa

SEQ ID NO: 211069 - DNA, 2325 bp, Klebsiella pneumoniae
atgcgcgtattgcctcgggtaaaacgccgctggcgctggctggcggcgtttatttttctgctgtggctggcggtgctggcggccgatcgcctgtggccgctgccgctgcatgacgtcacgcctgcccgtgtggtggtggcggaagacgggacgccgctgtggcggtttgccgacgcgcagggcgtctggcgttatccggtcacgctcgccgacgtgtcgccgcgctatctgcaggcgctcatccagtatgaagaccgctggttctggcgccatccgggggtcaatcccttcgcggtgctgcgcgccgcctggcaggatcttacttccgggcgagttatctcgggcggcagcacgcttaccatgcaggtggcacgcctgcttgatccccatccacgcaccttcggcggcaagctgcgccagctgtggcgagcgctgcagctggagtggcatctgtcaaaaagcgacattctaaccctctatctgaaccgcgcgccgtttggcggcaccctgcaggggatcggcgcggccagctgggcctatctcggtaagccgcctgccagtcttagctacggcgaggcggcgctgctggcggtacttccccaggcgcccagtcgtttacgtccggaccgctggccgcagcgggcccaggcggcgcgtgataaagtgcttacgcgaatggtcagccagggcgtctggccggaacaggcggtaaaggaagcgatggaggagccagtatggctgtttccgcgccagatgccgcagctggcgccgcttttttcacgccgggcgctggcgaccagtcgtgatgaaaaggtggtgacgactctggatgccggactgcagcggcaactggaagatctggcgctgaactggaaatcgcgcctgccgccgcgcagttcgctggcgatggtcgtcgtcgaccacacggatatgaaagttcgcggctgggtgggctcggcggatatcaccgacgacagccgcttcggccatattgatatggtctcggcggtacgctcgccggggtcggtgctgaaaccctttatctacgcgatggcgatggatgaggggctgattcacccggcatcgctattacaggatgtgccacggcgttttagcgattatcgccccggtaatttcgacagcgggtttcatggcccggtgagcgccagcgaggcgctggttcggtcgctgaatctgccggcggtgcaggtgctcgaagcctatggaccaaaacgctttgcggctaatttacgcaacgccgggctgcccctgacgctgcccgctggcgcagagccgaatctgtcgctaatcctcggcggcgccggggcgcggctggaagatattgtcgcggcgtacagcgccttcgcccgccatggcaaggcggcgcggctgcgcctgaagccgagcgacccattgaccgagcgcgcgctgatgtcgcccggggcggcatggatcgtccggcgtattttggccggcgaagcgcaaccggttcccgatgcctcgctgccgcaggcggtgccgctggcgtggaaaaccggcaccagctacggctatcgcgacgcgtgggcggtcggcctcaatgcgcgatatctgataggcatctggaccgggcgcccggacggtacgccggtggtgggccagtttggcttcgccagcgccgtaccgctgctcaaccaggtcaataatctgctgctggcccgcccggcgatgagccgcggcgggctgccgagcgatccgcgcccggcaacggtcagccaggggacaatctgctggcctggcgggcaggatctgccggcgggcgacagcaactgtcgtcgtcgcctggccagctggcttttggatgccagccagccgccgactctgctgctgccggggcaggagagcgtacgcgggatccgcttcccggtgtggcgcaatgaacacggcgaacgggtggcggcggattgtcccggcgctcgggaaagccaggtcgaagtctggccgctgccgctggatccctggctgccggccagcgaaaggcggcgcgcgcgcctgggaccggcatcggagtcatgcccgccgttacagactcaggataccgcgccgctggtgctgtccggcatccgtgatggggcagtgataaaacgtctcccgggtgaggcgcgggtgatgttgccgctacaaaccagcggtggggaggggcggcgctggtggtttattaatggcgaaccgttagaggccgccggcgcaagaaccacgctaacgctggataaacccggcgagtggcagttggtggtgatggatgaagcgggccagacggcagccgccagctttaccctgcaataa

SEQ ID NO: 211070 - DNA, 432 bp, Klebsiella pneumoniae
atggctattgaacgtactttttccatcatcaaaccaaacgcggtggcaaaaaacgttattggcagcatcttttcccgctttgaagctgcagggttcaaaatcgtcggcaccaaaatgctgcacctgaccgttgaacaggctcgtggtttctatgctgagcacgaaggtcgcccgttcttcgacggtctggttgagttcatgacctccggcccgatcgtggtttccgttctggaaggcgaaaatgcggtacagcgtcaccgtgacctgctgggcgccaccaatccggcaaacgccctggcgggtaccctgcgcgctgactacgctgacagcttcaccgagaacggcacccacggttccgactctgtagaatccgctgcccgcgaaatcgcgttcttctttgctgaaggcgaggtttgcccgcgcactcgctaa

SEQ ID NO: 211071 - DNA, 1167 bp, Klebsiella pneumoniae
atgtctgaacaaattgtcacgcctgataccgccgctctgacggtgccgaacaaagatgccaaaatcaacctgctggatttaaaccgtcagcagatgcgcgagtttttcaaaaacatgggcgagaagcctttccgcgccgatcaggtgatgaaatggatgtatcactactgctgcgacgactttgatgagatgaccgacatcaacaaagtcctgcgcagtaaactgaaagaagtggcggagatccgcgccccggaagtggttgaagagcaacgctcaaccgacgggaccattaaatgggcgattgccgttggcgatcagcgcgtcgagaccgtctatatcccggaagaagaccgcgccaccctgtgcgtctcctcccaggtaggctgcgcgctggagtgcaaattctgctccaccgcccagcagggctttaaccgcaacctgcgggtatccgaaattatcggccaggtctggcgcgcggcgaagatcgtcggcgcggtgaagaccaccggcgtgcgtcccattaccaacgtagtaatgatgggcatgggcgagccgctgctgaacctcaacaacgtcgttccggcgatggaaatcatgctcgacgatttcggctttggcctttccaagcgtcgtgtgaccttgtctacctccggcgtggtgccggcgctggataaactcggcgatatgatcgacgttgcgctggcgatctccttgcacgcgccgaacgacaccattcgcgacgaaatcgtcccgatcaacaaaaagtacaacatcgagacgttcctcaactcggtgcgcggctatatttcgaagtccaacgccaaccagggccgggtgaccatcgagtacgtgatgctggatcacgtcaacgacggcaccgagcacgcccatgagctggcggcgctgctgaaagatacgccgtgcaagatcaacctgatcccatggaacccgttcccgggcgcgccgtatggccgcagctccaacagccgcatcgaccgtttctccaaagtcctgatggagtacggctttacgaccatcgtgcgtaaaacgcgtggcgacgatatcgatgccgcctgcggccagctggcgggcgacgtcattgaccgtaccaagcgtacgctgcgtaagcggatgcagggcgaagcgattgacgtaaaagcggtctga

SEQ ID NO: 211072 - DNA, 996 bp, Klebsiella pneumoniae
atgaatactgaagccactcaagatcatcaagaagcaaacaccacgggcgcgcgtctgcgtcacgcccgcgaacaactcggacttagccagcaagcggtggccgaacgcttatgcctgaaggtgtccacggttcgtgatattgaagacgataaggcccccgccgacctcgcctccaccttcctgcgcgggtacatccgctcctacgctcgcctcgtacatattccagaagacgagctgctgccgatgatggccaagcaggcgcccatccgcgcggcgaaagtcgcgccaatgcagagtttctctttaggcaagcgccgcaaaaagcgcgacggctggctgatgagcttcacctggctggtgctgtttgtggttatcggtctgagcggcgcctggtggtggcaagaccataaggcgcagcaggaagagatttcgaccatggccgatcagtcttccgctgagctgaacggcggcgacgccaacagccagaacgtgccgctggataccagcgcccctgcagccccgaccgccgatagcgccgcgaacagcgcgccaaccgataccgccagcgcaccgaccaccagcgcgccggcccagacgccagcggataataacgctgtcgtggccccttcccaggccaatgtcgataccgcggggacgacgccggcagctccggctaccaccccagcctcgccgttgccgaccgatcaggcgaacgtcacgactccggcggcgtcggcgcaggatctggtgatgaacttttccgccgactgctggctggaagtgagcgatgccaccggtaaaaaactgttcagcggcctgcagcgtaaaggtggtaacctgaacctgagcggtcaggcgccgtataagctgaaaattggcgccccggccgcggtacagatccagtatctgggcaagcctgtcgatttaagtcgttttatcagaactaaccaggttgcgcgtctgaccctcaatgccgaatcatcaccggcgcagtaa

SEQ ID NO: 211073 - DNA, 1122 bp, Klebsiella pneumoniae
atgcataaccaggctccgattcaacgtagaaaatctaaacgtatttacgttggtaatgtgccaattggcgatggggctcccatcgccgttcagtcaatgaccaatacgcgcaccaccgatgtggcggcgaccgtaaatcaaatcaaagcgttagagcgcgtaggcgcggacattgtccgtgtctctgttccgacgatggacgctgctgaggcgttcaaacttatcaaacagcaggttaacgtcccgctggtcgccgatatccactttgactaccgtattgcgctgaaagtggcggaatatggcgtcgactgcctgcgtatcaacccgggcaacatcggcaacgaagagcgcatccgcatggttgtagattgcgctcgcgataaaaacatcccgatccgcatcggcgtcaacgccggctcgctggaaaaagatctgcaggaaaaatatggcgagccgacgccgcaggcgctgctcgaatccgccatgcgtcatgtcgatcatctcgatcgtctgaacttcgatcagtttaaagtcagcgttaaagcctccgatgtcttcctggcggtggaatcctatcgtctgctggcgaaacagatcgatcagccgctgcatctcgggatcaccgaagcgggcggcgcgcgcagcggcgcggtaaaatcggcgatcggtctgggactcctgctgtccgaggggatcggcgatacgctgcgcgtctcgctggcggcggatccggtggaagagatcaaggtcggcttcgatatcctcaaatctctgcgtattcgttcccgcggcattaactttatcgcctgcccgacctgttcacgccaggagtttgacgttatcggtacggtgaatgctctggagcagcgtctggaagatatcatcaccccgatggatgtttcgatcatcggttgcgtggtgaacggcccgggcgaagcgctggtctccacccttggcgtcaccggcggcaacaagaaaagcggcctgtatgaagacggcgtgcgtaaagatcgcctggacaacaacgacatgatcgaccagctggaagcgcggatccgcgccaaagcctcgatgctcgatgaagcccgtcggattgacgttcaacaggttgaagcaaaataa

SEQ ID NO: 211074 - DNA, 1275 bp, Klebsiella pneumoniae
gtggcaaagaacattcaagccatccgtggcatgaacgattatctgccgggcgaaaccgctctctggcagcgcattgaaggctcactgaagcaggtgctcggtagctacggttacagcgaaatccgtttgccgattgtagagcagaccccgttattcaaacgcgcgatcggcgaagtgaccgacgtggttgaaaaagagatgtataccttcgaagaccgcaatggcgacagcctgacgctgcgtccggaagggacggcgggctgcgtacgtgccggcatcgaacatggtctgctgtacaatcaagaacagcgtctgtggtacgtcgggccaatgttccgtcacgagcgcccgcagaaaggtcgctaccgccagttccatcagatcggcgccgaagtgtttggcctgcagggcccggacatcgacgcggagctgattatgctgaccgcgcgctggtggcgtgagctgggcatctccgagcacgtcagcctggagctgaactccatcggttcgctggaagcgcgcgccaactaccgcgacgcgctggtggcatacctggagcagtttaccgataaactggatgaagacagtaaacgccggatgtataccaacccgctgcgggtgctggactccaaaaacccggacgttcaggcgctgctcaacgacgcgccggcgctcggcgattatcttgacgaagagtcgaaagcccactttgccggcctgtgcgcgctgcttgacgatgccgggatccgctacaccgtcaaccagcgcctggtgcgcggccttgattactataaccgcaccgtgttcgagtgggtgaccaccagccttggttcccagggcaccgtctgcgccggcggtcgttacgacggcctggttgagcagctgggcggtcgcgctaccccgggcgtgggttttgccatgggtctggaacgtcttgttttactggtccaggcagtgaatccggaatttaaagccgatcctgttgtcgatatatacctggtagcctccgggaccgatactcagtctgctgcaatgcgtctggctgagcaggttcgcgatgcgctgcccggcgtgaagctgatgaccaaccacggcggcggcaactttaagaagcagttcgcccgcgctgacaagtggggggcgcgcgtcgcgctggtggtcggtgaatcagagattgctgacggaaacgtggtagtgaaggatttacgctcaggtgagcaaactaccgtaacgcaggagagcgttgccgcgcatttgcgcacacttctgggttaa

SEQ ID NO: 211075 - DNA, 621 bp, Klebsiella pneumoniae
gtggaaacttttaacaacgagaacgatcaggtcgatgcgctgaagcgtttctttgccgaaaacggcaaagcgctggcggtcggggtgattttagggattggcgcgctggttggctggcgctactggacctcccatcagcaggataccgccagagacgcgtcgctggcttacgagaaggcgacttccgcgctgaaatcgaatacgccagaagtgctgtcaggggcagagaaattcgcggctgacaataaaaatacctacggcgccttcgcctctctcgagctggcacagcattttgttgaacagaacgatctgccgaacgctgaaaagcagctgcagcaggggctggcggccgcatctgatgataatctgaaatcggttatcagtatgcgtctggcccgcgttcagctgcaaatgaaacaggctgatgcggcgctgaaaaccctcgacagcatcaaaggtgagggctggaccgccattgtggccgatttgcgcggcgaaattctgttgagcaaaggcgataagcaaggggcccgtgcggcgtgggaagctggcgtgaaaagcgatgcttctcctgcgctcagcgaaatgatgcgtatgaaaatgaataatttgtccatctga

SEQ ID NO: 211076 - DNA, 1179 bp, Klebsiella pneumoniae
atgcaattgcgtaaattactgttgccagggctgctttccgttaccttgctgagcgggtgttcgctgtttaatagcgaagaagatgtggtgaaaatgtcaccgctgccgacggtagaaaaccagtttacgccgtccacgtcctggagcacctcggttggcgatggtatcggcgaattttactctaaccttcatccggcctttgccgacggcgtagtgtatgctgctgaccgtaaaggcaccgtcaaagcgctgaacgccgacgacggcaaagaggtgtggtcggtgaatctggcggagaaagatggctggttctcgcgcacgccagcgctgctttctggcggggtgaccgtctctggcggccatgtttatatcggcagcgagaaagcgcagctgtatgcgctgaataccagcgatggtaccgtggcctggcaaacccgtgtcgccggcgaggcgctgtcgcgtccggtggtgagcgatggcatggtgctggtgcataccagtaacggccagctgcaggcgctaaacgagaccgatggggccgtgaagtggaccgttaacctcgatatgccggcgctctccctgcgcggcgagtctgcgcctgcgaccgcctacggcgcggcgatcgtcggcggcgacaacggccgcgtcagtgcagtattgatgcagcaggggcagatgatttggcagcagcgtatttctacggccaccggcccgacggaaattgaccgcctgaacgacgtcgacacgacgccgatcatcgttaacggtgtggtttatgcgctggcttataacggtaacctgaccgcgctggacctgcgtagcggccagattatgtggaaacgcgagctgggttcggtgaatgatttcatcgtcgatggtaaccgtatctacctggtagaccagaacgatcgcctgctggcactgaccaccgacggcggtgtaaccctgtggacgcaaagcgatctgctgcaccgtttgctgaccgcgccggtgttgtataatggcaatctggtcgtcggcgatagcgaaggctacatgcactgggttaatccggaagatggccattttgtggcgcagcagaaagtggacagctccggcttcctgaccgacccggtggttgccgatggtcgactgctgatccaggcgaaagacggtacgctgtacgcgattacgcgttaa

SEQ ID NO: 211077 - DNA, 1479 bp, Klebsiella pneumoniae
atgatacctgtggtcgcgcttgtcgggcgccctaacgttggaaaatccacgctctttaaccgcctgacgcgcactcgtgatgcgctggttgcggatttcccggggctgactcgtgaccgtaagtacggtcgggccgaagtcgaaggccgcgaattcatctgtatcgataccggtggtattgatggtacggaagagggcgtggaaacccggatggcggagcagtcgctgctggcaatcgaagaggccgatgtggtgttgtttatggtcgatgcgcgcgcgggcctgatgccggcggacatcgcgatcgctaaactcctgcgctctcgtgaaaagcccaccttcctggtggctaacaaaaccgacggcatcgacgtcgaccaggcaatggcggacttctggtcgctcggcttgggcgatatctatccgattgccgcttcgcacggccgcggcgtgaccagcctgctggagcaggccctgctgccatgggtcgatgaggttaatccgcaggaagaagtggatgaagacgccgaatactgggcgaaattcgaagccgagcagaatggcgaagcggaagaagagccggaagacgacttcaatccgcaggatctgccgatcaagctggcgattgtcgggcgtcctaatgtcggtaaatcaaccctcaccaaccgcatcctcggtgaagatcgcgtggtggtttacgatatgccgggcaccacccgtgacagcatttatatcccgatgcagcgtgacgagcgcgaatacgtgctcatcgataccgccggggtgcgcaagcgcgggaaaatcaccgacgtcgtggaaaagttctcggtgataaaaacgctgcaggcgattgaagacgccaacgtcgtgctgctggtgatcgatgctcgcgaagggatctccgaccaggacctctcgctgctgggctttattcttaacagtggccgttcgctggtgatcgtcgttaacaagtgggatggcctgagtcaggaagtgaaggagcaggtgaaggagaccctcgactatcgtctgggctttatcgactttgcccgggtgcacttcatctccgccctgcacggcagcggcgtcggcaacctgtttgaatcggtacgcgaagcctacgacagcgctacgcgccgcgtaagcaccgcgatgctgacccggatcatgaacatggcggcggaagatcatcagccaccgctggtgcgtggccgtcgcgtgaagctgaaatacgcccacgccgggggctacaacccgcctatcgtggtgatccacggtaaccaggtcaaggatctgccggattcctacaagcgctacctgatgaactacttccgtaaatccctggacgtgatgggcacgccaatccggatccagttcaaggaaggggaaaacccgttcgctaacaagcgtaacaccctgacgccgaaccagatgcgtaaacgtaagcgcttgatcaagcacatcaagaaaagcaaataa

SEQ ID NO: 211078 - DNA, 1080 bp, Klebsiella pneumoniae
atgcagattggttttatcggcctcggcgcggtggtggaaaccgcctatttaccggcgctgcgtcgcctgggggacgtcatcgaccgctgccagggctatgacctggactgcagcagagcgctgccggggatccagcgctgtagttcgctgtcggcgctgctggccgaacccctggatacgctcttcattaccacctcatcacttcagcatctgcccgtactggagagggcgttagccagcggcatttcccgcatcgtggtggaaaagccgatcgtggccaaccttgagcaggccgcccggctgcgggcgctgctggcgccgactgagcaggccgcgcgggtgctggctcttgaccactggatggcgcgaggcgttgcgctgaacgctcctggcccgctgtggcgggcggaaggggaggccagcggcctgcctccgccgcacctgtcagcgcaggatatcgtctggatcgaaggttatttgcaggagccaagcggctttaacagcgctggtgagccggtcgcactcaattttgccaccggggagctggatacccggcagctgcgtcaccctgatggggtgatcctcgatatcggcacccatgtcctggcgatgctccgcgaaaccctgcacgccagcggaggcgatacggcgctgagcctttcccttcgggtggcgaaagaccgcctcggccatgacattgctcctggggatacgagcactgccgagggggaggcgcatctgcagggaaccctgggcactatcccgctcaatatctggctcaacaaatatgcgggtcccgcgggcgggcaaaagggaatgcgaataggactgcgggacgggcgaataatcaccctcgatcgcgcccctgagggcgaagtggtgacgctacaggacggcgagcgggtgcagcgctggacccggcccggggcgatctatacgcactgtcttgatgagcagatcctcggcgctgataatctgtttatccgggcgccggacagcgtggccgggctaacgcagcgtaggcttgaggaagtggaatggctgctcaggttgcagcagcaattacgcggcccgcattaa

SEQ ID NO: 211079 - DNA, 219 bp, Klebsiella pneumoniae; identical to SEQ ID NO: 138688

SEQ ID NO: 211080 - DNA, 1392 bp, Klebsiella pneumoniae
atgttaccctctcaatcccccgcaatttttaccgtaagccgcctcaatcagacggtgcgtctgctgcttgagcgcgaaatgggccaggtttggatcagcggcgagatctctaacttcagccagccttcttccggccactggtacttcaccttaaaagacgataacgcccaggtgcgctgcgcgatgttccgcaacagcaaccgccgggtgacgtttcgcccgcagcacgggcagcaggtgctggttcgcgccaacattacgctgtatgagccgcgcggcgactaccagattatcgtcgaaagcatgcagcccgccggcgaagggttgctgcagcagaagtatgagcagctgaaagcacagttaacggcggaaggacttttcgagcaaaaacataagcaggcgctcccctctcccgcccactgcgtcggcgtcatcacctcgaaaaccggtgccgcgctgcacgatattctccatgtcctcaggcgccgcgatcccgggctgccggtgatcatctacccaaccgcggtccagggtgacgacgcccccgggcagattgtgcgcgccatcgcgctggccaacgcgcgccaggagtgtgacgtactgattgtcggacgcggcggcggttcgctggaggatctgtggagttttaacgatgagcgggtggcgcgggctattttcgccagccagatccctatcgtcagcgccgtcggccatgaaaccgacgtcacgatcgctgattttgttgccgacctgcgggcaccgactccctcagccgccgcggaaatcgtcagccgcaaccagcaggagctgctgcgccagctgcagtccggacagcagcggctggaaatggcgatggactatttcctcgccagtcgccagcgccgttttacccagctgttccatcgcctgcagcaacagcatccacagctgcgcttggcccgccagcagaccgccctggaacgcctgcgccagcggatgcgtatcgccgtggagtcacagcttaagcgcgcagaacagcggcaaaagcgcaccgttctgcgtctgaatcactacaacccgcagccgcggatccaccgcgcgcagtcgcggatccagcagctggaataccggctggcggaaattatgcgtggccgcctcagcgagcggcgtgaacggtttggcaacgcggtgacccatctggaggcggtgagccccttagccaccctggcgcggggctacagcgtcacctcggtgagcgacggtacggtgctgaagcagacaaaacaggtcaaaaccggcgatctgctcaccacccgcctgaaagacggctgggtcgaaagcgaagtgaagcagatcgcgacggtgaaaaaaacgcgggccagaaagccttcgcccactaaaccagcggaataa

SEQ ID NO: 211081 - DNA, 1467 bp, Klebsiella pneumoniae
atgctacgtatcgctaaagaagccctgacgtttgacgacgtcctcctcgttcccgctcattctaccgttctgccgaatactgccgatctcagcactcagctgacgaaaaccattcgtctgaatattcctatgctctccgcagccatggataccgtaacggaagcgcgtctggctattgccctggcacaggaaggcggcatcggctttattcacaaaaacatgtccatcgagcgccaggcggaagaagttcgtcgcgtgaagaaacatgagtccggcgtggtcaccgacccgcagaccgttctgccaaccaccaccctgcgtgaagtgaaagagctgaccgagcgcaacggtttcgccggctacccggtggttaccgaagaaaacgagctggttggcatcatcaccggccgcgacgtgcgtttcgtcaccgatctgaaccagccggtcagcgtctacatgacgccgaaagagcgtctggtcaccgttcgtgaaggcgaaagccgtgaagtggtcttcgctaagatgcacgaaaaacgcgttgagaaagcgctggtcgtggatgagagcttccacctgcgcggcatgatcaccgtcaaagacttccagaaagcagaacgtaaaccgaacgcctgtaaagatgagcagggccgtctgcgcgtaggcgcggcggtcggcgctggtgccggcaacgaagagcgcgtagacgcgttggtagcggcaggcgttgacgttctgctgatcgactcctcgcacggtcactcagaaggcgttctgcagcgtatccgtgaaacgcgcgcgaaatatcctgacctgcagatcatcggcggcaacgttgccactggcgcaggcgcacgcgcgctggcggaagccggctgcagcgcggtgaaagtgggcatcggcccgggctccatctgtactacccgtatcgtcaccggcgtgggtgtgccgcagatcactgctgtttccgacgcggtggaagcgctggaagggaccggtattccggttatcgctgacggcggtatccgtttctccggcgatatcgccaaagcgatcgccgccggtgcggcggcggtgatggttggctccatgctggcgggtaccgaagagtccccgggtgaaatcgagctctatcagggtcgctcttacaaatcctaccgcgggatgggctcccttggcgcgatgtccaaaggctcctctgatcgctatttccagagcgataacgccgctgacaaactggtgccggaaggtatcgaaggccgcgtggcctataaaggccgcctgaaagagatcattcaccagcagatgggcggtctgcgttcctgtatgggtctgaccggctgtggtaccattgacctgctgcgtaccaaagctgaattcgtacgcatcagcggtgcgggcattcaggaaagccacgttcacgacgtgaccatcaccaaagagtccccgaactaccgtctgggctcctga

SEQ ID NO: 211082 - DNA, 1578 bp, Klebsiella pneumoniae
atgacggaaaacattcataaacatcgcatcctcatcctcgacttcgggtctcagtatactcagctggtggcgcgtcgcgtgcgtgagctgggcgtctactgtgagctgtgggcatgggatgtcacggaagcacagatccgcgaatttaatccaagcggcatcattctttccggcggcccggaaagcaccaccgaagagaacagcccgcgcgcgccgcagtatgtgttcgaagccggcgtgccggtatttggcgtctgctacggcatgcagaccatggcgatgcagctgggcggccatgtagaaggttctaacgagcgtgagtttggttacgcacaggttgaagtggttaacgacagcgcgctggtgcgcggtatcgaagattccctgaccgcagacggcaaaccgctgctggacgtgtggatgagccacggcgacaaagtgaccgccatcccagcggacttcgtaaccgtcgccagcaccgacaactgcccgttcgccattatggccaacgaagaaaaacgcttctacggcgtgcagttccacccggaagtgacccacacccgtcaggggatgcgtatgctggagcgcttcgtgcgcgacatctgccagtgcgaagcgctgtggaccccggcgaaaatcattgacgacgccgttgagcgtatccgtcagcaggttggcgacgacaaagtgatcctcggcctctccggcggtgtggactcttcggtgaccgcgatgctgctgcaccgcgctatcggcaaaaacctgacctgcgtattcgtggacaacggtctgctgcgcctgaacgaagcgcagcaggtgatggagatgttcggcgaccactttggcctgaacattgttcacgttgaaggcgagcagcgtttcctcgacgcgctggcgggtgaaagcgatccggaagcgaagcgtaaaattatcggtcgcgttttcgtggaagtgttcgacgaagaagcgctgaagctggacgacgtcaaatggctggcgcagggtaccatctaccctgacgttatcgagtctgccgcttccgccaccggtaaagcgcacgtcatcaaatctcaccacaacgtgggcggcctgccgaaagagatgaagatgggcctggttgagccgctgcgtgagctgttcaaagacgaagtgcgtaagatcggcctggaactgggcctgccgtacgacatgctctaccgtcacccgttcccgggccccggccttggcgtgcgcgtgctgggcgaagtgaagaaagagtactgcgacctgctgcgtcgtgcggacgctatcttcatcgaagagctgcacaaagctgacctgtataacaaagtcagccaggcgttcaccgtgttcctgccggttcgttccgtcggcgtgatgggcgatggccgtaaatacgactgggtggtttccctgcgtgcggtggaaaccatcgacttcatgaccgcgcactgggcgcacctgccgtacgatttcctcggccgcgtctccaaccgtatcatcaatgaagtgaacggtatctcccgcgtggtgtatgacatcagcggcaagccgccagcaacgattgagtgggaatga

SEQ ID NO: 211083 - DNA, 1206 bp, Klebsiella pneumoniae
atgtacaaggtctccgatcgcgacggactgtatgtagccgtgctgatctcaggcactatctcgtttcgttacgattaccgcattaacggccgccgggagacgctggttatcggtcagtatggtcgtgacggtatcacgctggccgaagccagggatgaactgatagcggctaaaaagctgctgaacgcaggccagtcgccggctgcggcgaagcgtgacggtatcaaacggatccgcggcgccgaaacatttacggtacataccgacgcctacatgaaacatgtggtcctggctgacagtacgcgggctatgaagcaatcagttatcgacagggatattttgcctgttctcggaaacaaaatgatgtccgagataacgacccctatggtgcgtgatctttgcgatcgcatagtcgagcgcggcggacgtgcgacggcggtgcaggcgcgtgaaatcatcagcagcgtttaccggtacgccaatgaccgcgggcacgggttattcaacccggccgcagatatcaaaccttcggcgatcgccatgtttaaaccgcgtgaccgttgcctgcagccggaagaaatcggcgtgctgttcaggtctctcgataccgtcagcactttgccaaccttaaaactggctgtgaagctcatcctgatcacgatggtgcgcaaaaccgagttcatcatggcgacgtggaaagaggtggatttcagcaaaggaacctggacgatcccatctgacaggatgaagggaagccggtcgcatgtcatctaccttccgcatcaggcacaggatctgatggtaggcctgcagatgtgtgccggcgggagtgattatctgttgccaggtcgctacagcaccagtaagccgttatccaatgccgctcttaactcagtcatcgatcgcgcggttgctgcggcagcggatgctggggagaacctgcaacctctaacagtgcacgacctgcggcgcacagcgagcacgcttttgcatgaagcgggtttcccttcagactggatagagaaggcgcttgcgcatgaacagaagggcgtgagggcagtttacaacaaggccgagtattcccggcagcgggcctacatgctgcagcagtgggcaaatatggttgatgcatggataaacggggagcattacgacctggtgccgttctccccgtctgcatttgaaaagtggatgaatgaacaatag

SEQ ID NO: 211084 - DNA, 192 bp, Klebsiella pneumoniae
atgaacattgccgaagaggcctcgctgatacgacaactcgaagaggcgcgcgccattatcaaccagaggaatggtgagatcattcacctgcagagagaagcggcgcgctaccgtgaacagcgggattctgcaaacgcgatggttaagttcctgcgttggctctttgagaattcttcgcaggcgacacaatga

SEQ ID NO: 211085 - DNA, 594 bp, Klebsiella pneumoniae
atgagcggaaaatacaccctgatctatgcggatccgccttgggcataccgcgacaaggcagccgacggtgaccgcggcgccggtttcaagtatccagtgatgaatgttctggatatctgcaggctgccggtatgggagctcgccgccgaagattgccttctggctatgtggtgggtaccgactcagccggtagaggcgctgaaagtcatggaggcctggggattccgcctgatgaccatgaagggattcacctggcacaagacgaacaagcataaagggaacagtgcgatcggcatgggccatatgacccgggcgaacagcgaagactgcctgtttgcggtgcgcgggaaactaccggcccgcatggacgcctcgatctgccagcacgtcacggcgccgcgcctggagaactcgcgcaaaccagacgttatccgcgagaaactggtgcagctgcttggcgatgtcccacgcattgagctcttcgcacgccagtcgtctcacggtttcgacgtgtgggggaatcagtgctcgtcgccggcggtggagttgctgccaggctgcgccgtgccagtagtgaagacggaggccgcatga

SEQ ID NO: 211086 - DNA, 159 bp, Klebsiella pneumoniae
atgactaacccacacgacagcattcgcgtaggaagtatcacgctggtttattcgtccgtgcgccgtggctggctggcgccaggcggccaggttatccagaacccgctgaaggctcagcgcctggcggagcaactgaatagcaagaaggtgtcagcatga

SEQ ID NO: 211087 - DNA, 294 bp, Klebsiella pneumoniae
atgaatcggatggaaaaataccacgcggattatgtctcgcaacgcaaagcgccccctcttgtcgccgtaacgccggcggcaatggagatcgagcagcgcgctattgctcgcgagaaaaaaggccagtaccgcctggccgctcgcctctggcttgagtgcatggatgcggccactggagaggttgagcgggcccgtatcgctatacgccgcgatcagtgcattggccgcgggaatcggcttcgccatggatgctatgccgggatctgcgccaccgcaggggtgatttatgactaa

SEQ ID NO: 211088 - DNA, 249 bp, Klebsiella pneumoniae
atgaaaggtgcatttaacagaaagcaactactggaggtggtgcctgtatcgatgagcactatcgaccgcatggagaaaaacggggagttccctaagcgtttctggatcacagacaagcgctgtgcctggaacagcgaagagatcgagcgctggctggatgaacgtcagcagaacggtacaacggagtttgctggaaaaaagcctccgcttgagcaacgagtatttcgccgggttggtaatgcggcgtga

SEQ ID NO: 211089 - DNA, 1023 bp, Klebsiella pneumoniae
atgtctaccaacgcacttaaggcagctgcgacaggaaaccaggtcgcgcagcatagcgacaaaccaaccactctggctggcttgctcgcagatccaaaaattaaggctcaaatggctttagcgcttcctaagcacatgactgcagatcgccttgcacgaatcgctaccactgagatccgcaaggttccaaaactggccgcatgtgaccaggccagtttcctcggggcaattatgcagtgtgctcaactcgggctggaaccgggcggtgcacttggccatgcatacctgattccgttcgacaaacgccagaaagtaaatggccgctgggaaactgtatcgacagaagcgcagctgattattggttatcgcggaatgattgacctcgcccgtcggtcaggtcaaatcctgagcatatcagcgcgtacagtccatgcgaacgacaaattcagttactcatacggactggaagaaacgctcgagcattcaccttgcgagaccggtgaccgaggagaacttacgcatgtttacgccgttgcacgcctgaaagatggcggcgttcagttcgaagttatgagccgggcagacgttgagaaagttcgtgccctgagcaaagccggaagcagcggaccgtgggtggaccactttgacgagatggccaaaaagacggtgatccgtcgcctgtttaaatacctgcctgtttctatcgaactgcaaaaagcggttgtgatggatgaacgagctgaagccggcctgagccaggataacgcagctgttatcaccggtgagtattccgtcgtagacgatgagcagcagagcatgacagcggtttctgaatctgatcgagaagaagcgcgtgaatacgctagcgccattctgaacagcctcgatccttctgtggatgatgcaaaggcgctttttaagcgggcagaagacgaaataaacgcgctggctgaaaagttaggcgatgaatatcaccagggattcatgacgacgcttaacgatatgcgtcctgaatttgcataa

SEQ ID NO: 211090 - DNA, 897 bp, Klebsiella pneumoniae
atgcagaacgctggaagcatggacagaaccaaatatctcggcggcagtgatgtcgccggtattctcggcattagcccatggcgcactccgcttgaggtgtatctggataaggttcagccacgtatcaaaccagtagatccttcaaagcagaaagttttcacgcgtggccagcgtatggagccatatgtaattgacctgctttctgaagagacgggcctagaaattattcaccgcggtaaccggtatatccatcgtgattacggatttatcgcagcagagatcgatgcagaagcggctaccggagaaaacatcgagatcaaaacagtgagcccattcaaggccaaagaatggggagaggttcagacagatgctatcccggtgcattacacggcgcaggccatgcatgggctaatggttacagggaagcaggtatgtgtattcggcgtcctgatcgggggtgatgacttccgtatctatcgtgttgagcgagacgaagaaaccatccaggccattctcgagaaagaggtcgctttctgggaccgggttaaaaacctgaaccctccagaagcaaccagcgtcagcgacatatatctgatgttcgaaaaggactcaggaacaagtatcgaggctgacggaaaggctctggcccttttcaatgacctgcgagatatgaaatcaaaattcaagtatctggaagatgaaattgccgtatcggaagagaaattaaagctctacatgcaggagcactcgattttgacgctggacggaaagccgatctgcacctggaaatctcaggtaagcaaccggtttgatcagcagttatttcaggcggcacacccagaactattcgaaaaattcaaaacagcaacgacatcacgcgttttcagaatgaagtaa

SEQ ID NO: 211091 - DNA, 300 bp, Klebsiella pneumoniae
gtgaacattcagcagattaacaacctgaaaaaaatcatgaacaacatcgacggcgactaccagcttaaccagatgctgtacgagcgccacgtcgagcttatcgacgcgatcaagttccatcagctgcaaaagccattctacgaactggagcgcaaaggcgtgcgcagcgagatcctggaagagctgatgatgagctctgagtttgaagaatgcctggctgcgtatcagcgggaactcaccggcatcattgccaagtgggatctggctgaccaactggatacggcgaggaacgcggcatga

SEQ ID NO: 211092 - DNA, 150 bp, Klebsiella pneumoniae
atgcaatggcaaatcattaacggctggtactgcgttacggcatgcgggctgatgagctggaagtttcgcacgctgccggaagctatcagctgggcattcgtcagcaaactggcagcaaaaacggaaatgggtatgggggtgagcaagtga

SEQ ID NO: 211093 - DNA, 582 bp, Klebsiella pneumoniae
atgaaaagcatctacgacataagacgcgacaacctcaatgagataatccggaaggatttcgataacacgcaactccggtttgccgagagaatcaaaaaatcagctaacctcgttaacaggtggagcaaggggacaaaaaatatcggcgctaacgcggcacgcgagatcgagtcgttcgccggaaaaggtcgtttctggctggatatcgaccatctgtcagataccccgacgctgccggagattatcgacccgcaggaatggagtgtggaaaagcaggcagcgtttaccctgggtgtatggatgggacagcatccggatctgaactcagagaaaaaggtttcggaagcggccggtatcggccaggcgaccgtaaatcgcatcctgaactgcgaaggctccaccagcattggcgtactgtcggctatcgccagggcgttcggccgcgatgcatatgagctgatcctgccgcctggtaatgctggtctgattgactatgaccaccatgaatacgccgggctgccgcaggaagagaaaaacaagatcaccgccttcatcaagttcatcgtcagccagaaccaatag

SEQ ID NO: 211094 - DNA, 234 bp, Klebsiella pneumoniae
atgagcgatgtgcaaaaatttgacttcaaacgctgctggctcgacctctctccggcagagcgtgaagagttcgcaagtgacgccggcacgaccagccactacattcaggttcacctgactggccgtagaagaattccacgtaagcctctgttagaaagactgtttaaagcctgcaaatcccgtaagtggatctccgcaaaatccgacctggtcctctggttccacgaacgttaa

SEQ ID NO: 211095 - DNA, 210 bp, Klebsiella pneumoniae
atggagatcattactcgcgtcgaagcggcaaaggcaggactaaagcgctactacaccggtaagcaatgtaagcacggccatgacagtgagcgatgggtatacaacgggcattgtgtcgaatgcaccctcgagactaaccgccgccgccatgctgagataaaacggctaatgcatgaggcctcaaaaggtaatgccgtggaggtgatctga

SEQ ID NO: 211096 - DNA, 768 bp, Klebsiella pneumoniae
atggcccgcattcgcaccattaagcccgagttctggaccgatgaagacatggcagaggtatcagaaccagcctgcttgttggctattggtctgcttaattacgcagatgatgaaggctatttcaatgcaaacccgaagcttatcaaagctgcagttttccctatccgagaaccatccgttcctattccggtactaatacgggagctttccaactgtggttatttatccatgttttccacccctgatggcaagcattttggggtcataactaatttccttaaacatcaggtagtgaataagccaaaagaaagcaaaatcaaaggtttacccctagtaccgtatgagtacggtactgatacggtacaagtaccattaggaatggatcagggatcagggatcagggaaataaaaacccctctctctgcgcgcgaagtaattcaagtccctccggttgtcgttgatggtatcggagagccaattggcaaattcaccatgcatgaaaactggaagccgtcagaggactttgtcatgcgcgccagaacatggggccatgcgctaccagctgacggttacaagaaatcagatctgatcgaattcatcacctactggatggcagaaggcaatgtgatgcaacacgtgcagtgggagcagaagtttgcccggctgctgatgaacaggaaaaaaagagcggcaggaaagcgcggtgaaagctctgacgatgaagtaccacactggaacagccctgaaggctggaaggatttcttatga

SEQ ID NO: 211097 - DNA, 786 bp, Klebsiella pneumoniae
atgagtaacgtattcgcagcaattcagaatcgtgatgccggcgccctggctcgcatgatgggtccggacaatcaccaggctcagcaagacaatgttgtgaacatcagcgcagagagacttgtcgatgccctgtttaaacagctcaagcaactgtttccggcagcagagcagaccaaccttaagaccgcacagcaggagaccgacgctaagcgccagtggatcgccgctttcgccgaaggtggtatccgtacccgcgagcaggtatcagcaggaatgcgccatgcccgtgcctgtgaatcaccgttctggccgtcaccaggtcaattcatcaagtggtgcaaagacagcaagatggtgcttggcgtgagcatcgaagatgtgatgggggagtttcaccgctacgccaaggagaaaagcctacagcctggcggaccagaacaattcccgtggcgccaccctgtcatgtactggattgtgtgcgataccaggcgcgcgatgtaccagcgtcagttaagtgagattgaagttgagaaacatgcgcgtaagcttcttgacgaatgggcatcaaaggtcgcggcaggtcatcagatacctgatccgattctgagcatccagtcgaagccagagcctataagcacccctccagaccccggtggcaatacctaccatccaccaggtcgaagcttcggatgcatgcctaacgcggcgacactcggaggtataaccccggcacagtggctgatggaggaataccggcgagggaaggcagcaggactcatcaagtaa

SEQ ID NO: 211098 - DNA, 348 bp, Klebsiella pneumoniae
atgcgaaagacagtacaggcactaggccggcttaaagcgggccagatgaacaaaaccgaaacggcgtatgcgcaagagcttgaactgcgtaagcgctacggggagatagcctggtaccggttcgaaggcatcaagctgcgtctggctgacaacacgttctacacgcctgacttcgccgtgatgctggcaaacggccaactggaaatgcacgaagtgaaggggggttactggaccgacgatgccagggtgaaaaccaaagtcgccgccgaccagtacccattccggatcatcggagtaacgaagctcccggcaaaagccggcggcgggtggaaggtcgaagagttctaa

SEQ ID NO: 211099 - DNA, 135 bp, Klebsiella pneumoniae
atggattttgatttcgtgaattacagtcggcggtcactgctgctgttcgtgatggtggcaaacatcattggttgggtggcaatcgtcgccgtcctgtatgtggcttatctggcgatcgagtgggtgacagcatga

SEQ ID NO: 211100 - DNA, 411 bp, Klebsiella pneumoniae
atgaacatcgaaacagtaaacgagctcattcggtcgctggagtctgcgggcgagctgtcgatcagagagcagaagttcctgaagctggcgaaatcgtaccagcagcttgctgcggagaatatggcgctgaaggcagccgttgcggaagagattgaagttatcaatggtggtggccagcggtactgcgtgaaggacggcatgtccataaatccgatatatgcgcgcggatggaatgaccaccggtctaatgtcacggcagtacaaacccccgccaccgatcgcatcgtagccgggattaaggctgatggggtggaggagtttgccgcgcatcttgtgtcaatggaatgtcatctagaggccgagtgggcgaagtctttcgttttggaggtgttaaatgtcaaaggtcgctga

SEQ ID NO: 211101 - DNA, 192 bp, Klebsiella pneumoniae
atgtcaaaggtcgctgattttgtgaaacgcatggagaagcaaggtcgccagtttgaagttaacggtaactttgttgttatctcgccgaccaatggacttgcaatgtccgacctgattgagatgcaaaacctaaataaaaaaggcgaacttgcggattatattgccaagcagctgcgcgagggggccaaatga

SEQ ID NO: 211102 - DNA, 426 bp, Klebsiella pneumoniae
atgaacaagcgacgctataccaacgaaaaaccgcgcattgagaaaaaaattaacaccgccgccatgaagattttgattgctcttatgccacgccaataccgacgggaagtgtggtcacgcggcgaagggatgatttattcaaactgcatgtggtaccagacgtgggaagtcgtcaccgttgactattggggggaggcagatagccaagaggcgtttgacattctccacaaccggctaatcgatgaaaccactgattgggatggcattgggtatgcgtatgacgccgaaaactcaaccggggaagaggttgataaagagaagttttattccccatggaggctgggtaacaaagttgggcgagctgaaattattcggcactgccgccagttggtgaaaaatggcgtgaaatgggagcgtgccgcatga

SEQ ID NO: 211103 - DNA, 744 bp, Klebsiella pneumoniae
atgacaactgatatcaccaaactggcgcagagcctgaaagcggcggcaactgacgtcaaggagactgcccatatagctcgatatgtgaaggcgaccattgccaggcaaacattcaaagagttaatgacgccggaaaacattctcgcattggtagaggcgctggagaagtcgcaagccacggaggctcactgcaatcgcggatggagcgaagcgcatgagcaggaggccagggcggaagcggcagagaagcgcatcgccgagctggacgcagagcttgagcgggagagagaaaaatcacggcgcgtgatgtttcgcatcgccgagctggagtcccgcaccgtgaagcctgcaccggtaattccatccgagcttcacccggatacgcagaagttggtgaccgacttctgcactgccctagcagagaagctgtacaaggcccaattaaaatacggctacgacgcggactggaaacaggatgggtggccaagtcaatgccagacgcactttcaccagcatatcgccaaaggtgatccgcgcgacgttgccgcttactgcgccttcatgtggtggcacggctggagcactaagcctgctgaatgcctggaaccccgcaccgtcactgtgaagttgccggactataggaatacttacaaatcaccattagctgatgaagttgagcatcaagtgcgattggcgcttgagttactctcgtctgccgctggcatcaaggtggaggctgagtga

SEQ ID NO: 211104 - DNA, 171 bp, Klebsiella pneumoniae
atgcgtaaattcaaagtgaccattgagaccgggattgttggcggaaatttcgaggaaatattcgaagttgaagatgatgcaaccgatgaagagattgcggcagaagctaaggatattttcctgaatcaatgcaattacggctaccacgaaattaccggggaggatgagtag

SEQ ID NO: 211105 - DNA, 213 bp, Klebsiella pneumoniae
atggctatcactgaaggattttgcgcggacctctactgcgactgtgatggttgtcagtcagggaaaatctatccgcaggggcaggctgattttattggccggaatatgaccgatatttctcagcaggcgcgcaaagctggctggcgcatcagcaaagaccgccagcgctgctatgcgccgggccacaaaatttcacggggagccaaccaatga

SEQ ID NO: 211106 - DNA, 669 bp, Klebsiella pneumoniae
atgaccagcaaattaaccagagcgcagcttcacgaacgcgctcgtgaaaacgtcaaagcgctgaaaatggcatcacgacagaaagcattcgaaagcgcacgcgaagaaatattggctgacctgcagcttgctgaactggcgctggccgcgatggacagcgagccggtggcgtggcgttggcgcagtgggccagataaacggtggcatctcgccagtagaggtgacctggcgggagaggttgagccgctctatcgccacgcgcagccagcgccggtagtgccggaagaagccactccggacagtatcgaaattcttgccagtgccaggcgtcgtgaccgcgctgtattccagtgggatgaagaccagcgaaatgcggccgctgattcctggaacgcctgccgcgccgccatgctcgcagccgcccctcagtcacccggcagtgaacccgctaccgtgccgggtaaatggattccggtaagcgagcagatgccgatagattttgaggcagttatcgctttcgatggagatcaggtttatggcgaggctatgtatagttctgatgatggatttaccattgatggctatgagccatgcgacagattgaagttgcaaaacgtaacccactggatgccgctgccagccgcccctcaggaggtgaaaggtgaataa

SEQ ID NO: 211107 - DNA, 240 bp, Klebsiella pneumoniae
gtgaataaggtcgaactgcttgagaagatatcggcactcgctactgaatgccacacgctggcctgtgagcttgatattggtgatgagcggaccgaaatgttcgaaatttacagcgtgctgcacaacctctgtcgccgcggctacgccagccaggtagggcggcggatgaatcctctgctcgcatcctgcgatgatgaagaggatgaggaaggtgacgattgggatgaggatgacgactga

SEQ ID NO: 211108 - DNA, 339 bp, Klebsiella pneumoniae
atgcctaaatccccagcagaacgcaaagccgcgcagcgcgcgcggcagtccgccgccggtgagcgcaaaattgaactggtgctcgacgagcaggaagtagagatgctggcgcggaactgcgccgcccggcgccctggtcgcgatccatacgaaatggccgagtacatcgcgctgctgatccgccaggatgatgcccgggtgcgcggccggattaacgccatcagcaaacggcgctgcggcaagtgcggagatcaactgccagtggcatcatgcccgcactcaggggaagccgcatgctgggttatgtacggctggcacgaaacaaaactaccgctgtga

SEQ ID NO: 211109 - DNA, 258 bp, Klebsiella pneumoniae
atgggtggcaaagaccgtaattatactgtcgtttaccgcggggattttatcgacgctgtacctgatggccgatggatgatgatccagcgtggtaaggagttcggcggcgggtactggtttggtcgagcttatgccgactgcttctggcttgagtttgagcggccaatgcccctatcaagctgcgttgagtacgtcgtgctatacgaccatgtcgccgcccgatctcatgagttagaggatgaatttaaactggaatga

SEQ ID NO: 211110 - DNA, 585 bp, Klebsiella pneumoniae
atgccaaaggatccgaagcgcaaatcaactcaatacaaaccgttgacggtgatgcaggaagcctacgcccaggagtatgtgaaatgccctgaaaatcagacgcaggcggccatcaatgccgggttctccccaaagtctgcccacgtcaaagccagcactatgatgcgtgatgagcgtatccaaaaacgaatcgctgagctgatggaggagcgcaacaagcgcctgcgcgtcagcgccgattacgtgctgctgcgcctggtggaaatagaccagatggacgtgctggatatcctgaatgatgacggcggcctgaagcctatccgcgagtggccgaaaatctggcgcaccacgctcagcggtttcgatctgtcctcaaccatcatgaacatggatgagaccacgatcgagactatcctcaaaaaaataaaatggccagacaaggtgaagaacctcgagctgattggtaagcacgttgatgtgatggcattcaaagagcgcatggaagttaacgtgaatgtcaccattgctgaccgcatggccgccgcccggcgccgcctgaaagagcgccagggtggtgaccagtga

SEQ ID NO: 211111 - DNA, 1476 bp, Klebsiella pneumoniae
gtgacagacgccgctttatccccggaagaacagctgatcgacgatatcgccagcttcacccatgacccgctgggctatgcgctgtatgcgtttccgtggggcgaggatggcacagaactggcgcacgccactggtccgcgccagtggcaggctgacgcattccgcgaaataggcgagcacctgcagaatcccgcgacacgtcaccagccgctgatgctgtcccgcgcatccggccacggcatcggaaaatctgcgtttatctccatgctgattaactgggccatgtccacctgtgaagattgcaaggtggtggtgaccgctaacaccgataaccagctgcgcacgaagacctggccggaaatcatcaaatggtcgaacctggctatcacgaaagagtggttcacctgcaccgccaccgcgatgtacagcaacgatccgggccacgacaaacgctggcgcgccgatgctattccctggtctgagcacaacaccgaggcgtttgcaggcctgcacaacgagcgtaagcgcatcgttgtggtgttcgacgaagcatccaacatcgcggatctggtctgggaggttgccgagggcgcgctgacggacgaggacaccgaaattatctgggtggcgttcggtaacccgacgcgtaacaccgggcgattccgagagtgcttccgcaaatacaagcaccgctggaaatgcgcgcaaatcgacagccgcaccgtcgaaggcaccaacaagcagcagctgcaaaagtgggtcgatgactacggcgaggacagcgatttcgtgaaggtccgcgtgcgcgggatcttccctgatgcgtcagagctgcagttcatccctaccggtctgacagacgaggcgatgaagcgcgttgtgaccgctgcgcaggtggcgcacgccccgcggataatcggcgtcgacccggcatattccggcgtggatgacgcggtgatttatctccgccaggggctgcacagcaaagtgctgtggaccggcaacaagaccactgacgatctgattatggctaagcgtatcgctgactttgaggaccagtaccaggctgacgcggtgtttatcgacttcggctacggcaccgggctgaagtccatcggtgacggctggggccgcacctggcagcttgtgccgttcggcggcgcatcgtcagacccgcagatgctgaataagcgcggagagatgttcaacgcctgtaagacgtggctcaagctcggcggcgcgctggatgaccaggagacggcggacgacctttccgcggcagagtacaaggttagggtggacggtaagatcgtcatggagccgaaagaggatatcaaagagcgtttgggccggtcgcctggcaagggcgatgcgctgcttctgacattcgcatacccggtgacgaagcgttcagatttccctgctgccggtggcaagcagcccaacgtgatcagcgagtacgacccgtgggcgtaa

SEQ ID NO: 211112 - DNA, 312 bp, Klebsiella pneumoniae
atgagtgacaaagacattgaatctgaaattcaggctaaaggcttaaccgcgccgcgcgttacgcgagacgacatgatcgcaaacattgctcacgctgaaatcgttaagcacgtttctgttaccgggcaggttcttcgctgggcgatcattacgacaaagaatggcttcgcggtaaccggaaagccatcatgtgcagtctcatctgaaaacgacgatgaggcgatcggaaaacagattgctctgaagaacgcagagaacgagctgtggccactgatgggttacgctttgaaagaaaagctgagccaacagtga

SEQ ID NO: 211113 - DNA, 207 bp, Klebsiella pneumoniae
atgtgcattggcagcaagccttcagtacctgcagcaccagaagttcaggcggctccgcaggaacaggatcaggctgtagtcgattcccgcgatgaagaaaccaggcgtcgccgtgcggccgccgggcgtagttctacgctgctgaccggggcgcagggtgatacctccgccgcaaataccagcggcaaaacgctgctcggtcagtaa

SEQ ID NO: 211114 - DNA, 1680 bp, Klebsiella pneumoniae
atggcagcggaaaccctgaaagagcaactgcaaaagcagcaggcacagctcactaatgatcgctcatcgttcgatccgcactggcgcgaactgagcgatttcatcaatccgcgtggctcccgcttcctggtcaccgatgtaaaccgggatgaccgccgcaatacgaaaattgttgaccccaccgccaccctggcagcacgcacgctatcgagcggcatgatgtcggggatcacttctcctgcgcgcccgtggttcaagctggcaacgcctgaccctgacatgatggactacggcccagtgaaactgtggcttgaagtcgttcagcgccgcatgaacgaagtgttcaacaaatccaatatctaccagtcgctgccgctgctttacgccagcctggggaattacagtaccggcgctatggctgtgctggaagatgacagcgacgttatccgcacgatgatgtttccgatcggcagttactacatggctaactctgcgcgcggcagcgttgacacctgtttccgcaaattctccatgactgtgcgccagctggttatggagtttggcctcaataacgtcagcgattcagtgaagggcatgtgggattccggtaactacgaaagctggatcgaagttatacatgccgtttatccgaacatcgaccgcgatactgccaagctcaacagcaaaaataagccggtcaaatcggtttattacgaggttggaggcgacagcgataagttgctgcgtgagtctggtttcgatgaattcccgattatggcgccgcgctgggaagtgaacggcgaggatgtatacggctcatcctgcccgggcatgattgccctcggccaggttaaagctctgcaactggagcagaagcgcaaaagccagctgatcgacaaggccaccaacccgccgatggttggtccgtcatcactccgcaaccagcgtgtttcccttttgcctggcgatataacctatatcgatcaggtcaccgggcaggatggtttcaagcctgcctatctggttaacccgaataccgccgacctgctggcagacattcaggacactcggcagatcatcaacagcgcctactttgtcgacctcttcatgatgttgcagaacatcaatacccgctcgatgccggttgaagcagtgatcgagatgaaagaagagaagttgctgatgcttgggcctgttcttgagcgtctgaacgacgaatgcctgaacccgcttatcgatcgcaccttctccatcatggcgagaaaaaaccttctcccgcccccgccggacgtcctgcagggtatgccgctgcgcattgagtacatctcggtgatggcgcaggcgcagaaatctattgggctatcaagcctgtcatccaccgtcggcttcattggccagctggcacaggccaaaccggaagcgctggacaaactcaacgtggatcaagccattgatgcattcgctgagatgtccggtgtctcgccgacagtcatcgttccacaggaacaggttgagcaggttcgcgagcagcgcgctcagcagcaacagcagcaaatggtggctatgggcatggctgccgctcagggtgccaagactctcagtgaagcgcagacggaggatcccagcgtactgacagcgctttctaacgcagcaggtgctcctgcaggtggccagcaatga

SEQ ID NO: 211115 - DNA, 297 bp, Klebsiella pneumoniae
atgacagattttgatgatgaccagttggctgctgaatcggcacgcgagaaggaactccttcaacagcgtgacattgaagatatccgtttcgtcatgggtagcgagcagggccgccgggtgatctggggggtactggagcagggcaaggtgttttctgcctgctttgccggtgatccgcaagtgactgctttcaacgaggggcagcgcaacctggcgctggcattgttccagcgcgtcatggcgcactgccctgaacagtatctgaagatggccgcagaggccagtgaacaggagtaa

SEQ ID NO: 211116 - DNA, 681 bp, Klebsiella pneumoniae
atgaatttatttgaacgtttgctgcatcgccgtctttgcaatgagcaacctgctgatggtggcactgcaccggcaccgtctgagccacccgcacctgctgctgacccggcaaaaccagaaggcgataagccacagcatggcgctgaaggtgacaagcctcaggacgataagcccgctgatggtgataagccagcagacaagcctgatgacaaagagcagaagcaggaaggcgcgccggagaaatacgaattccaggcaggtgagggcgtcgagctggacgctgaagcgctgaaggacttcgagccggttgcccgtgaactgaacctgaccaatgagcaggcacagaagctggtggatgcatacccgaaaattctggccggtgtgcagcagcgtcaggcagatgcatggcaggcacaaactgaagaatgggcagcaaccgtcaaggccgataaagagatcggcggcgataagttgacggccaacctcggtgttgctcagcgagccctggacaccttcggcacgccggcgctgaaagagtatcttaacggcacaggtctgggtaatcacccggagctggttaaggcgttcgtcaaagtaggaaaagccatgtcagaagatggcgtggtgacaggaaaagaaagcggtcagcgtagtgcggccgaagtgctttatggcaaataa

SEQ ID NO: 211117 - DNA, 987 bp, Klebsiella pneumoniae
atggctgttaaaggcattactgcgctgacgctggcagactggggtaagcgcatcgacccgaacgggaaagtcgataaaattatcgaactcctttcccaaaccaacccgatactgcaggacatgctgatcgttgaaggcaacctgccgaccggtcatcgtacgaccattcgctctggcctgccgtcggcgacctggcgtctgctcaactacggcgtacagccgagcaaatcgaccactgtgcaggttaccgatggcattggcatgctggaaacctatgcggagattgataaatctctggcagatctgaacggaaataccgctgaatttcggctgtcagaagatcgcgctttcctcgaggcgatgaatcagcagatggctcaaacgcttttttatggcgactccagcgttaacccgcagcagttcatgggcctgtcttctcgctactccgacctgacggctaccaacgcgcaaaacattatcgacgccggcggtactggcaccgataacacttcaatctggctcattgtatggggcgaaaacaccgttcacggtatcttcccgaaaggccagaaagcaggtctgcagatggaagataaaggccagcagactctgaaagatgccaacggcggccagtatgaaggctaccgcacccactataagtgggataacggcctgtgcctgcgcgactggcgctacgttgtgcgcatcgcgaacatcgatatcagcgacttgtccgaccctgctgcggcggcgaacatcgccaagctcatggtgaaagcgctgcatcgcatccctaaccgtggcatggggcgcccggtgttctacatgaaccgcaccgttgcccaggctcttgacctgcaatctctggagaaatcctctctggcgattagcgtcaaagagactgaaggcgaatggtggaccagtttccgtggcgttccgattcgcgaaaccgatgcgcttctggaaactgaagctcgcgtggtttaa

SEQ ID NO: 211118 - DNA, 438 bp, Klebsiella pneumoniae
atgatcctcgacaaactgttgatgttctccgaagcgcaggcggttacggctactgctgcttctaccgatgtgattgacctggcgcctgtcgacggcacccgccgtgatatcggcgttggttatccgctggagttctgggctctcgttaacaccacggctaccgctgctggcgccgctaccgtcaacgtgcagttgcagaccagtcctgacaacagcacctggacgaccatttatgacagcggcgccctggctctggcagcgcttaaagctggtaagcgcgttgtgtcggcgaaggtaccggcgggcgttcagcgctatctgcgtgtgaactactccgtagccaccggcccgctgactgctggcgcgttcacctccggtatcaacctggacgttgatacgaataccccgtacccaacccgctctaaagtgaccggctaa

SEQ ID NO: 211119 - DNA, 342 bp, Klebsiella pneumoniae
atgtcagctgaaaaagcaaaataccgcgtgctgcgtctgtcccatatccataacaacctctggccggagggttcagagattgagtatgacggggtgcctggctcggcgctggagccgctgaatgaagcggcgaaggaagcaaaggcgaaggcaacgcaaaaggttgtggctcccgccgtcgttaaacctgagccgctgaacgaaggcggtggtggcgatgacgagctggataagctccgcgaagagtacgaactgctctttaacgagaaacctcatcacaacaccaaagccgaaacgctgcgcgagaagatcgccgaaaagcgaaaagatttaggcgtctga

SEQ ID NO: 211120 - DNA, 324 bp, Klebsiella pneumoniae
atggaaatggtcaatctcaaaaccggcaccgacagctaccaggatgaaagcggcgagaccaaaacccgcgacgaatatccgtgggggctgtgcatcacgctgaacaatgacaccctgaacaagctgaaagcgcagccgcagaatgtaggcactgaggtgatgatcaccgcaaaagcagtgattaagggtatttcggcgcgtgaaggcgacgatggcactttccgcagcgcggatctgcaaatcaccgatatggcgctggcgcctgtttcaggtgaggcgccgaagacggcggcgcagacgctttacggtgaagggggcgagtaa

SEQ ID NO: 211121 - DNA, 606 bp, Klebsiella pneumoniae
atggcctctgtcattgagatctgcaaccgggcgctaagcaacatcggtaataaccggagcatcaatagtctggaagaagccagcaaagaagccgggcaatgctccctgtattacgagtcgattcgcgatgctgtgctggccgactttgactggaattttgcgaccaagaatatcgcgctggctgacaccaacaatccgccgcaggactgggattatgcgtatacctatcccactgactgcctccgtattattgagatcccgcttcctggcgtacggtatccgacggctgctatgcgcgtgcagtatgtggtcggcgcggatagcgccggcactgggcgactgatttacaccgatctgccgcaggcctggcttcggtatgttgcccgcatcaccgacgtgaacatgttcgattccatcttccaggaggctctatcctggcgcctggccgcggctattaacatggttctcacgggtaatgccgacctcggcaataacgccctgagcatgtatagccggatcatcctcagtgctggctctcacagcatgaacgaatcgcaggaaccgcaaatgtctgacgatccgtttaccgtagcgaggatgtgctga

SEQ ID NO: 211122 - DNA, 2499 bp, Klebsiella pneumoniae
atggccagaccgcattacccagcatctattagctggatacaaccgagcttctcaggtggcgaaattgctccatcgctctatggccgcatcgatatggcaaagtaccaggtggcgctgcgcaagtgcgataactttattgtgcggcagtatggcggggtagagaaccgcccgggcacgcagttcatcgccgcggcaaaatacccggatcgcaaatgtcgcctgatacctttccagttttcgacggtgcagacctatgcgctggagtttggccacaattacatgcgcgtcatcaaagacggcggcctggtgctgaccaccggcgatgtgatttacgagctggcgacgccttatacagaaaatgatgttttcggcctgaaattcacccaaagcgccgacgtgatgacgatcgtgcatccttcctatccgcctaaagaattgcgccgttacgcgcatgacaactggcagatcgtcgatgtgcagacaactaacggcccgtttgaagatatcaacgtcgacgagtccaaaactgtctgggccagcgccaccactggcacaatcacgcttacctcgagctctgcaatattcagcgccgagcaggtcggaaagctgttctaccttgagcagccagccgttgactctgtaccggtatgggaaacaagcaagagcacatcgatcgaggatatccggcgcgccgacagcaactactatcgcgccaataccgaaggaaaaaccgggacgttacgcccatcacacactgaaggtatggcgtgggacggctggggaggaaccggcgatgatgatacaggcgtgcaatgggaatacctgcatagtggctttggcattgtgcggatcactgctgtagccggtgacgggatgactgcaaccgctgatgttgtttctcgtgtccctgagaacgttgtcggggctgacaaggccagctacaagtgggcgcgctatgcatggaacagcgtcaatggctatccggcgacggtcgtctactaccagcagaggctgtacttcgctgcatcccctgcgtatccgcaaaccatctgggccagccgtaccggtgactataaagacttcggcaagagcaacccgacgcaggatgatgacaggatcgtttatacctacgctggccggcaggttaacgaaattcgtcaccttatcgatgtcggatcgctggttgttctgacctccggcggtgagtttgttgtgaccggtgaccagaataaagtgcttacgccttctgcattctccctgagttctcagggctcaaacggctgcagcgatgtgcctcctatcgcggtttcgaatattgcgctctttatccaggagaagggcagcgtcgtgcgggatctggcctactcgtttgatgttgatggattccagggcaacgacctgacaatcctcgctaatcaccttttccagaagcgcagcattgtcgactgggcgttttgtattgtcccgttctccagcgcgttctgcgtgcgcgacgatgggaaattgctggtgctgacctatctgcgtgatcaacaggtattcgcctggtctccgcaatccagtgccgggaaatatgagagcacttgcggtatcagtgaaggcagcgaggatgcgatctatttcgtggttaaccgcaccatcaacggccagacaaaacgctatatcgagaggctggcaagccgacagtttaccgatgaccttgacgctttctttgtcgacagcggactgacctatgacggacgcaatgccagcagccgggaggccactatcagcggtggaagcggggactggagttatcaggtgccgtataccctgacgatgagcggggccagctattttaccgcgggagacgtcggcgcacagatccagttcccctacataggaaccgatcctgaagatggtagcgccgttgccatgcagctgcgctgcgacattatttcggttgaaagcggcaactcggtaaccgtcacagccaacaggaatattcctcctgtcctgcgcaataccgccaccactaactggtatatggcccgccagacattcgccggactcgatcaccttgaaggacagaccgtcaatgtactgtccgacgccagtgtagagccgcagaaagtcgtcaccggcggcgccgttacgctggagaaacccggcgcagtggtccacatcggcctgccgattaacgcccagtttgaaaccctggacatcaatattaacgggcaggagacgctgctcgataagaaacagctgatcaattccgtgacgctggtggtcaacgccagccgaggcatctgggcatcaactccaggcggccagtggtacgaataccctcagcgcgagtttgagttttacgacgatccggttgatgacgccacaggcaaagtagaggtcaaactcgacagcaactgggataaaaatgggcgggtaaaaatccgtcagactgacccgctgccgctttctgtgctggcggtgatccctcgcattaccgtgggaggcttttaa

SEQ ID NO: 211123 - DNA, 465 bp, Klebsiella pneumoniae
atgattaacgctcagatagtcccggccaccgcagagcacatcgctgaaattatcccccgcgtgcgcctggcagacatcgaagagtttgccgccacgaatggctggagtgctgcccgtgttctggaatgtggccttcgcacatcaaccttctgttgtgccggcttgataaacggccgcgttgtcactgtctttggcgtggcgcccgcttcaatgattggcggcagcgggatcccctggcttgtcggcacggatgatctggagcgctatcagcgaacatttctgcgccgctgccggaaggtggttgctgcaatgctgtccgtctatccgtatctcgaaaattatgtcgatgcccgtaaccacgtcgcaaaggcgtggctgcactggctcggttttaccctggaagacccggcgccgtatggtgtgctcggcctgccgttccaccgcttttacatggagaaaaactga

SEQ ID NO: 211124 - DNA, 540 bp, Klebsiella pneumoniae
atgtgtgatccgactattgccgccggcgcgactttagcgctcagcggcctgtctgcatataaccagtatcagcagggtaaatatactgccgcggttgctcagcagaatgctgatgttgcaactgcccaggctaatgacgccataaatcgcggtaacgcggaggctgatcagcgccgtcgtgagacccggcagcggcagggcacgcaggcggcaataatgggcgcaactggtgctgatatgagctcaggatctgcgctggatattttcggggatacggcgcagtttggcgcactggatgctctgactaccgtcaataatgctcagcgagaagcatacggatatcagacgcaggcggctaactatgaagcgcaggcaagcgcggctaaaagctcaggaactatcggcgcggcgacaacgctgcttactgcgccactgaaagcctatggcgcttatcagtcattcggcggaacctggaacccgttcacgcagagcaaggccgcaccaatttctgctgccgtcggcacacctaccggtcgataa

SEQ ID NO: 211125 - DNA, 2832 bp, Klebsiella pneumoniae
atgccagttgtaccaacagtcgccgggcgtcaggttgaaagccgcggcgtttccactcagggatttcaggcattcgatcaaccaaacgccggcgatgcgctactgagcgcaggaagccaggcgcttgacgtattcggccaggctaaacagcgcgctgatgtcgctatggcacaggatgcttcgctgcaactgacgcagaccgcaagcgatctgatgaccaacccgcagaatggcctccttaacctgcagggtaaaaacgctcttggcaaggggcaggaatacacccagctctttgacgcaaaggctcaggagctggcgatgcagttgccggagtcggcgcgtcagggattcctgcagcaggctcagcagcagcgcatccagtttacgtctcaggctggccggcatgagatagggcagctcaatgcgtatgaagaggggcagttccaggcaacgctgaccaccggcgccaaaaccgcttcggcaatgtatggcgataacgccaactatgtgctggctaatcagcaggcgtttcagcaaatagaaagcttcggcgctgcacatgggtggagccctgagcagatccaggccaaaaaggtggaattcaaagagaaggtagctgatggcgcgctttctcagtggtcagcaaataacgcgatcggattcattcagagcaacggtgagctgagcgatacggccgccggttcacggcgggctactgttaacccttatggtggtgagccatcatctacgaaaggaatggttacccaggggaacattaacttattcaaccgaccatctgtaaaaaacgaagatggtactatcagcacggtaagaactatttccataggcactgatgcaggtgaagtcctgataccaacggtcagtgatgacggtaaattactttcagatgatgaagcaatcgcgctatatgaaaaaacaggaaagcaccttggaatatttgataatcctgatgatgcgactgcatatgctgaaaagttgcatgagcagcaagatcagtattatgtgaaaggtgatagcggcgataccaggggtatccgcaacaacaacccggggaacctcgaagccagctcatcaaacccatgggtagggcagactggtagtgatggccggtttgcaaaattcgagactccagagcatgggatccgcgcgctgggccgcaacctcatatcctaccagcggcaggggattgataccgttggcgagatcattaaccgttgggcgccgccgtctgacaataacgacacggccgcatacatcaaagcggtttgcgcgcagttaggcgtaacggcaaaccagccgcttgatgcatcaaaccctgatacgctgcaggcgctctgtgccgccatcatcaaacatgaaaatggcacgcaaccatacagtcctgaccagctatcaaccggcgtcagcgccgcgctgggactctctcagttgccaaccagcaataaacgctacaccggcaatgcagcattcgacgccgcaacgccggaagcgcaggccacttttctgcgccaggctgaccagatccgtcggcagcagcaggccgaatacagaacggctatcgatagccaggttcgcgacgccaccgcggcttacatgcgaggtgttgagttcccaaacccgccaggggaagctgattttattgctgcctacggcgtgcgggagggaaaccagcgttacaccgaattcaggaatacgcagattgccgggcagtacattggctcattccgcaacatgcctaccagcagcatcacggcatacgtcaaccagttgaagccgacgccggaacagaccggggagggctatgcatcgcgagctgaattattcgaccaggtatcagccgccgctacgaaggtgatcagccagcgccagaataatccgttcaatgccgcggtggatatcggcgcctataagcctatctcaagtaacaatccaaacgatatcactgctgaagtagccaaccgcttttcatctcaggatcggctgcgtgagcttggaatcaatgccccgatactaagcagtgaagaggctaatgctctggctcagcaggtacgcggaacgcaaaatgtcgaccagacgataaagctcctgcagaacatgggcgagacacttccggcgcccgcgatgcgacaggttgcgtcagccattgcaccgagcagcgcggcaaccgcctactctgcgctgttgctcggtactccggataatcagtacgacaacacgaagccatcgatcgcgtacagccagtttattggctacaagccgaccatgaataaatatgatgtctctaaagttatcctggccggtgatcaactgcttaaccccacgaagggcatgaaagatgccgggatcacaccggttcaactacccagcgaggataagctgaagcgtgcgtttgatgatcaggttggcaatgcatttgccaataacccgcaggccagacagctgagttatagcctgttcaaatccgcttacgccgggatcgcttaccagtctggcgataccgcgatgacccgcaccgatgcggctaattctgatgtggtcgagaaggccgcgcaatacgccaccggcggggtttacaaaggcttcaatggtggtgatgtggtaatgccgttcggcatggataaatctactttcaaggatcgctacacagtggcggcacagcaggcgctgaaagacgccgggctgaatgaaaatgccgcttcaaactttacgccggtgaacattggtaataaccagtatcgcctggtgagcggcagcgggcgctgggcgacagacccaaaaacaaatcaggcaatagtcgtgagggttgaataa

SEQ ID NO: 211126 - DNA, 1911 bp, Klebsiella pneumoniae
atggctgatgtattttctctggctcctgaaggccaggcatggacggacgataaaacgacggctaatccggcgcggccagaagactacgatccgacgttttttcagggggcagcctccgcacctgtacgcgggttgattggtggaacaattggtcttgctcaatcagctgtgggattcagcaagcgcctaatcagcgatcccgcatttacagcagatgtggcgccgacggttaacattttccgcgttatgttccctgatgctgataaaacccttaatgacacctacgacacgatcggtaagcagttgcaggaaatgcttggttatgtgaaaccagacgccggcagtcagggtacggccgcagaggtgctttatgggctcggccagtttgcgccagcgattggtgcctcaatcatcggcggccctacggtcggcgccgccacggcttttggctctacctatgaacagtcatatcaggacttcagagccaaaggtgtagacgagtcaacggcgcgtaatctggctgcacaacagagctccttcaatgccgcaggcatggcgcttcccgctgctatcggtacgacgctggccacgcgcatcgcgtcaggcgtcgcaatcaacacaggatttggtggccttaaccgttattcagttggcgaaacactggaggagaaaggctattccgatatggcgaagcagtaccgggtatttgatgggcaggcgatgctggttgacgctgtgcttggcggtgcctttggtggtgctcatcacctggcctcgcgaaatgctgatacaccacctccggcagataccgaagcgccgatccccgcggcagaggttcagagcgttcctgaagaaacttcttcaccgtcaccgggaaatgaggcagcaccgcaaccttccccgttaggtgatggccctactgcgccagaggtgccgcaggttacctacgaatcgcgaatgaatgaattgcagcagaacgcagatcaacttttatcccgtggtgacaggaaggtgtggcagtcagaaattgctaatggtgagcgtacagtagcgaaacttgaggctcaggataaagccatccgagatgcagcaccaaccggaagcggtggcgctaatcgccgttattatgctgaaaacagggcgaagcttgatgacatagccaaccagctcgctactgccagagagcgccttcagaatgcccgcgacactcttgcgccacatcagcagggcggtcagttttatgaggcccgcgctgatctgtcccgtattcagcaggggatcatccctgaaagtatgcgtggcctggtgcgtgagacagaaattaaacctagcgacatcgatgcggcccacactctgaacgaggggctttattacgacatcgagtcggcccctgttctgcatgccagcaacgaaagtatcaacagccatgtgtcggccatggatgaagcgtatcgccagctttctgacgggcaaccggtgaacatcggaatgatggcccgtgggctggatggtccgacgcggcccggcatgctggaatcagcaaacgagcagtaccatgcaatgcagcaggttttcgaagagaatggtgtcaggtatgaaacgccgtcagaactggctggagaagctccggcgccgcgcgcagaaagtgcatttacggcagccgacgaaactggcgggcaggtcagtgttgatcctgacaccggccaggcgatttcatcaaacagttacgacctgatggccgcacgtgatatggcaactgcgaatccagaattaacgatcgcgcaccctgacaccggacagccagcaaaactttctgatgttctgtctgaatttgacgaccagatccagaccgtacaggcagagtcgaaagtttattccgttgcagcagcgtgcttcctgaggaacccataa

SEQ ID NO: 211127 - DNA, 2766 bp, Klebsiella pneumoniae
atgaaacaggcatgtgttgaagccattgcccagacgctgggtcgccagcccaaggctgatgagctgaaaaatattgaagaccggataaaagaggccgtgcgcgacgttcaccggaaaaacgccagggaaggaaagactggtatccctgatgcacagacgtacatggaggccgctgagcttgtgcgtcagcgcgttgtgcatgatgtctataagaagcgccagcgcgtcgcacagaacgcgctggcaatcagcagggtaacagacaccctcgatgcgaatatcccgccagaacagcagacacccgccaatttgcagcagtttatatttgccgggcgccgcacgaagattttcggcaaggatcctgacatcaatgtcacttctgctgaggaattggcgacaggcgcctatcaggactggtcacgccagctcagcgctgaaatgctcaaagccggcgatgacgttcgaaaattcttcgagcaaagcaaggcccttggtgagcagcgttttcgcagctttttcgatcagcaggcggctaagtctgcacaactgcagatcctgaaagagctgtatggtgaagataccggtaacccgcaggcgaagaagatcgcaaaagtctggagcgacgtaaccagccgagcccggcaggagatgaacgacaacggttttgatatcgggttgcgcgacgactggcatttgccgtatgtagatgacgccgattttatccgcaacgccgggcgcgatgagtggctggcatctttgccgctggcagaacaggctaaggcgaggctttctggccgccagccgccgattgagtttgcgcggcaggcatgggtggacgacgtttacaacacccaggatcgcagcaattacgttaatcctgacggcagcccgatgaatgacatagagtatcgccaggcgctggaagcgatctttgaaacgaaggccaccgacggtgccaacaaaatcgacccgggcgcattcatggggaccggcgggataaagaaccgcggatcccagagcagggtgatggcgtttaaagacgcccaatcccattttgcctacatggagcgctacactcagcagccggttgctggcgtgatgatgtcgcacctgcagtcttcttcgcgcgatcttggggtggtgaaagcattcggacctgatgctgcaagaaacttttccctggtgctggaccgtgtatatcagcgtgcggtgactggcgggaaggaagtcggcaagatgaacgatgagcgcaagatggtcgagcgcatgtttaactcaatggccggccttaatggcgcggccacatcgagcgtattcacgtcggctgttggcggtctccgcaaccttatgaccagcgccatgctcggtaccagcgttctgaccgcaaccagcgatcaggctatcatgcgcgcgaatgcgcaggctctgggctttgaccgtaatggtatgcggctctctgcaaatacgctgaggaacctgtttaacggcgatgcgaagcgcgcgaatgcagagcttggcctgcttgtagattcgcatgctgctgtcgtatcgaagatgggcgggtttgatctgtctcgcggcattaccggctggtttgctgagaaaaccctgaagtggtcagggctgattgcaatggaccgggcaaacaaggcgtcattcggcctgctgatgtataaaaacattggcgagctaacccgcaaatttaagaccctggatgaagttaagggctcagataaaaccatcctggcaaataagggatggagtaatgaggactgggctatcatggcagcagcagagttgcggccaatgactacagccggacatatgggcatgacgccggacgctatttacgccgttccggatgaggtgatcaccaatattatggctgacaggatcgcccaggtgcgcgccggtagtgatacggcactggcagcgcttggcgatatgtcacctgaacgcctgaagcggatgaaggaagcattcgacgcagaggcagagcagacgattacgcgcatggtgcgtaacgcccgggcggaagctgctcagaaattgctggggatcactcacggtgagatgaccagcgcagtgacaacggccaccgggcttgatacctacgcccgcgatgatgccggccagctgcttaaaagcttcatgctctttaaaaccacgccgttcgctggttttcgccagttggttaaccgctccaaggatcttgatacggtgccagctatcaaattcctggcgtcctatattgcgggtacgacgctggccgggatgtttgctaaccagatgaacagcctgctgacaggcaatgacccgctggacatgacaaagccgactacctgggtgcaggcgctgctgaaaggcggttcgttcggtatctatggtgatttcctgttccaggatcacacgcaatatgggtcaagcatcgcggccacaattggcggtccggtattgagtttcgccgaacagctgacaaagttgctgatcaccaacccacagaaagcgcttcagggagaagatacttctttcggcgccgatgcgctaaagaccgctcgtatgatcaccccgtttgccaacctctggtatgctaaggcgatcaccaatcacctgatcctgcagcagcttcaggagatggcaaacccagggtacaacgaccgggttagggaccgcgctcagcgggaattcaacacaacgagttggtgggagcctggcgatactgcgccacgcagagcgccagatttagggaaggcggtgggcaactag

SEQ ID NO: 211128 - DNA, 816 bp, Klebsiella pneumoniae
atggtgggctgggcgggggtccgaaaggacgccggtatccgtttaggccggtacgccaactccgttcagttcaccaccagtaattggcgttgcggtggtgataactctactaagcggggtatcacaatgaacaccaaaccttctattttcaatttcgaatccgactcagctattcgcgccattatgatcgatggaaatccttggttttttgcatccgatgtttgccgcgcgattggcatcgcaaaccatcgtgatgcagttcgcaaacttgatgatgatgagaagggcgtcggctcaaccgacacccttggtggtgagcaggaatcagttatcatctctgagtctggcctctacactcttatcctccgctgccgcgatgcggtgacgccgggcaccatcccctaccgcttccgcaagtgggtaaccagcgaggtgctgccgcagatccgaaagactggccgctacgttcgggaagaactctcccaggctgataaagcccgcatgctggcgcaggagatgaccagcagcatgttgccggcgatcatggatgcactgcaggtcgagcagaagcattacaccttccctcttaaccgacgttatcaggatcacatccattcacctgatggcctgcgtgaactggcgaaaagctcaatggtgatgaagctgctccgcgaactcgatgctgatgggcatgacgtatccggcgcggcggcggaggtcacggccatgctcagctacattgttggtatcggcaccgtactgcgcgacatagagacgcatgctcagtacgtgatggctaaggccaagggttactga

SEQ ID NO: 211129 - DNA, 261 bp, Klebsiella pneumoniae
atgccagagcggtaccagtatcctgtcgacgaaggttttgcggatcgtattcacaccccggaaggggtcagatccctggttgtaaaatcacagctgatggagttgctcagggagatggagcgagacggccacgatgtcagcggtgcggcggcggaactggtggcactggttaactatgtgacgagctcgcagttgtcgatgcgggagcttcaaacacacctggacttctgcgcaatgcagatcaggcagcaactcagatag

SEQ ID NO: 211130 - DNA, 2367 bp, Klebsiella pneumoniae
atgacggtctcaaccgaagtcgaccataacgactacacagggaacggcgttaccacatctttcccgtacacgttccgcatcttcaagaagtcagatctcaccgtccaggtcgctgaccttaacgaaaatattacggtgctgactctggataccgattattccgttaccggtgcgggtacctattctggcgggaatgtcgtgctgatgtcaccgctggccaacggatggcagatttctatctcacgtgacctgccagttacccaggagactgaccttcgtaaccaggggaagttcttcgcagaagttcatgaggatgcgttcgacaagctgaccatgcttatccagcaatgcttcagctttctccgactggcgctgtgcaagccgtcgttcatcgctaactattacgacgcgctcaataaccgcattcgtaacctgcgtgacccgtcacaggcgcaggatgcggccacgaaaaattatactgaccagaaatatgaatcttcaatttctcattctgatactctctttgagagaacagtaagaattccagaatctaggatatcaacgttaccaggggttgaaataaggaaaaataaattaattgcctttaacgatcagggtgatccaatagtcgttttgcctgaatcaggatctgcatctgatgttcttattcaattggcttctggtagtggcttgctttatataggcagcacgccaacaatatcaacacttcaaactatagttccaaatataataggaacaagagtacaggttaaagagtttgattatggatacatcgttggtggtggaacatttattgttcaggatgctgcaaacttcatcgctgatggaggaaaggttgtaacatcaggtaattcaggattggtgttcgtaagggatgagtattactcaagtagaatagtaaggcctgaatggtatgggtgccgtggtcttggttcttcacatccagatacagttccttttgcaaaaatgctttcatcgcttagtgatggtgattacgtagagttaagggcaaacgcaaaatattacaatgatttccctgcaaatagtcaggccacaaacggatgggttataactgccagtaacattaccatgcatggtgaggattcaacattatcaagagcgaccccattatctgcaagctattctggatttacaaccttaaaagttacaggcaacgagttcactttggatgggaagttacttataacttctgatgatccaactaacaggccattgtacgcataccaaagtgcaactaaaatagattctagagaaatattcacatctccattagcgaacaccctttctttttgggctagtggtgttgatggtttgtacataggctcatccgtaacattaagtaattcagtttttccgttcttcgccaataatggctgtaagaacatgaaaatattttgtactgctaaaaaatctggtcagatttacccacagccaacgtctgcaagttcagatttggcgctgggaagcacttttaaacttgatgcgtgttccgatttcattatggatgttatagctaacgattcagcatacgcaggtattgagtctgaaagtaacaacgtcaatggcagcgtaacactggtaaccaataaggcataccatgccggtttgcatctatggaacagatgcaagaacatcacttacaaagtttcagcaacggatatcgttgagggtggtggcgttattacagggtatggttgcgaggcatgtagtggctatgtaacagcgtataacgcccaatatatagtagcgtatattggaaactcagcgacaacacccgtaatctcctgcgatgccaaaggctctggctttaatgtaacggacggggttgtattcttcgctaccgcagcaaacaatgcatatatccaacactgcaacgtagatgttaccgttgtgcatgctgatgtgttttccatcggcactgggagacaatcggctgttaagtttaatggaggtcagtattgcgacataaaagtaaatgcaaaagattttgattatattttttctttgggaatgggcgccaacaacaaatttaatgtcgcgtacaacaaattcaacacagcgttttcatactcggaccagcgctcgtttgataacgagtataaatatactgatccgggtggtaacgtataccatctccaggcaaaggcgagttctcatgagtacagatcggatgcggtgacaaaccctgtgcttgggtttaaacctcttctccgcaaacaaataaactctgatggttttgttaatgcaaacttgccaataacaacaacgtcagttggtgggttctattacgacccggatactaaatatgtaagagtaaatttatag

SEQ ID NO: 211131 - DNA, 153 bp, Klebsiella pneumoniae
atggatgagttagaaaatatttttacaaatcgtccaattgttgcgcagttaatttctgatgcacaagagatggttatccaaacagatgatggcgatggtaatcatttaacacatgatgaacagatagagatagcaagagaaagtagtcagtga

SEQ ID NO: 211132 - DNA, 405 bp, Klebsiella pneumoniae
atgtctgcatcgctaaccgctgatacaataaatcaggggcttagctacggtgcgctggcggcggttatcgccggcgtccctccagaagtggcgctggggtcgctggccggtgcggtaatttttgttacctctgctgttgagtatccggtcaagcgccgcgttctcctggcgctgctcagctttctctgcggtcttctcttctacaaacccacagcatcaatccttatcggcgtggccagcatgatccccaccatcacacaggactcgttcgagcggggtattgtctactccgccggcgcgttcgttgcggcaattgtcgcggtgcgggtcgggatatggctgtatcaccgctctgacaatccgcgcgatttaatcccgggaggaaaagacgatgacaggccatga

SEQ ID NO: 211133 - DNA, 306 bp, Klebsiella pneumoniae
atgacaggccatgatctgctgcttatcgctaatgccctcatctgcggcgggatagcgctgagggtgatgttcttccagcgcaacggatcgcgccaccgccgctggggcgggtggatagcctatttcctcatcgtggcggcggccagtatcccgcttcgcaccgcgtactcatacctgtaccacttccccatgaccgcagatctttctgaggtcgttatcaatgctgtgatgttcgccgcggtgctgaagacgcgcggcaacgtcgtgcaaatcttcaagatatcgaggtcgcaacatggacattaa

SEQ ID NO: 211134 - DNA, 630 bp, Klebsiella pneumoniae
atggacattaacgagtttcagaaagctgccggcgttagcctggcgctggccacacgctggcatccgcacattgtggcggccatgaaagagtttggcattatcaagccgttggatcaggcgatgtttattgcccaggccgggcatgaaagcactggctttacccagctcgttgagagcttcaattacagcgtggcggggctggctggtttcgtccgtgccgggagactgacgcagggccaggctaattccctcgggcgccggcagggtgaaccatcgttgccactggagaggcagcgggccattgccaatctggtgtacagcaaacgcatggggaataacgggccgaccgacggctggttttaccgcgggcgcggtctcatccagaccaccggactgaacaactaccgcgattgcggggctgccctgaaggtggatatggttaagcagccggagctgctggcgcaggacgactatgcagcgcggagcgcggcttggtacttcgttaaatatggatgcctgaagtacaccgacgacctgatgcgcgtcacgcagatcatcaatggcggccagaatggtatcgacgatcgccgtgtacggtatctttcggccaagaaggtgctggcatcatga

SEQ ID NO: 211135 - DNA, 483 bp, Klebsiella pneumoniae
atgatcacggcattcgtgaaagcatactggaaacagttgcttatcgtgtcgatgcttgctgcactggtggccggcggcgttgtagcctggaatattcacggtgacagacagtacgacgccgggtatgcgcaggcgaaggctgaccgcaaagcagaagatgagaaagcccgtaaacatgatgaacaggagaaagcaaccaatgaacgtgaggcgcagcagaggatcgaccaggcgcgcaatgatgctcttgatgctgccgctcgcgctggccggctgcagcagcagctcgttgccatccgtgagcagctcaggcagtataacgccactgtcggcgctgggtcgtcagccgcagacaccggagttttgcttgccgacgtgctcgaaaaatctctcgaacgaaaccggcaactggcagaatacgctgaccgggcagctgaagccggaagggtctgcgaaagacagtacgataaactaaccaggtag

SEQ ID NO: 211136 - DNA, 1869 bp, Klebsiella pneumoniae
atgaaagaaccaaataaaatagatggaaatcgccgccatctcctcaaaggtctggggattgccgctgtcgtgagcctgttaccagagacgggaaacgccgcgcaaaataatgccgccccgaaagcggcatgggatattcctttcaccggcgaaatccctgacacactgcccgaaggctacaatattttactaataacctgcgatcaggaacgttatttcgagcggtatccctttccggtgccgggccgggaacgcctgatgaaaacgggtatcacttttaccaatcatcagaacacggccaacgtttgtacgccatcgcgctctgtcatgtacaccgggctccatatgccgcacacccggatgtttgataatcttggcttcccctggatgaattacgatctggacccggaattacgtaccgtgggccatatgatgcgtgaactgggttattacacggcgtataaaggtaaatggcatcttacccgggagatcgatcagccggtcgctggtaaatcggtagaagaaatggacctgggcgagatcccgacgccgcgactgcatgaaattatggaaaagtatggtttctctgattatcacggcattggcgatgtcatcgggaaaagtaagggcggctatttctttgattcagtcaccacggggcagaccattagttggctacgtaacaccggccgcccgctgaatgatgaaaataagccctggttcgcggcagtaaacctggttaacccccacgatgtcatgtttatcgacaccgatgagcatggtgagcaggtgcagtggaaagggccaatggataaagaaaaccacaccctgctgccaacccaacccccgcacaaccaaatctatcagcaaagctggccagactatccgctgcctgcaaaccgccaccagccgctcgatgagcctggcagacctgccgcccataaagagtaccagaatgccagggcggtgatggagggacagttccccgatgaagaccggcgctggcgcaaattactggattattatttcaactgtattcgcgataatgaccagcatcttgaggcgattctcaatgagctggataacctgcagctgacgcaaaatacgattatcgtctttaccgccgaccatggggaactcggaggctcccaccagatgcatggtaaaggttcctcggtgtacaaagagcagatccatgtgccgatgatcattcgccatccggcgtatccgggaaacatccgctgcaacagtttgactaatcatctggatttagtaccgaccctgattggtctgactggacgcgatcgctcgctgcgagagaaagtcctggagggcagaaaaggccgggatatgagcccattactggcgcatcctgagcaagcgggcttaaatgcgctgcgtccgggttcgctttattgttacggcatgatcctgtatatggatgcgcaatacacggcaaaattcagaaagctggctggagaaaaactcccgcacgatcaatttaaaaaagcgatcgcgtcactccatcctgatttttcccatcgctcagggatccgtatgatcaacgatggacactataaatttgcccgctacttttcgctcaagcagcatcatattcctgctaccttggccgagctgctggagaataatgatgttgaacttttcgatctggttaacgaccccgaagaaaatcataacctcgcccgggagccagagaaataccgggatctgttaatgacaatgaacgataaactcaatcagctcactgccgctgagattggcgaagatgatggcagctatatgcccccgtttgaaggaagccagtgggacatgtcggcggcccagatgcatcaatatatgcgcgattag

SEQ ID NO: 211137 - DNA, 1068 bp, Klebsiella pneumoniae
atggacgacctcacgctggaagcgtacattcacaacaccatttcatcgaccccctcgcaaaacgtcgagttttgctggcagggcggtgagcctaccttatgcgggctggatttttttgcaaaggtggtcgagctccagcagcgttaccgtggtaacaaaatcatcgccaacagcctgcaaaccaacggcatcttgctgaacgataaatgggctcgttttttgcgtcgtcatggatttctggtcggattatccattgatggccctgcgtcactccacgacacctggcgtacgacgggctgcggaaaacccacctgggaaaaagttgtgcaggccatacgctgcctgcagcagcatgacgttccggtaaatgccatggtggtggtcagccgccagtctgcaagccaggggaaaagtctctatcgctgcctgagccgcgagctaaaccttcaccatctccagtttattcctctcgttgactcccctgctccctggtcagttacccctgagggctggggcaaatttttgtgcagtgttttcgacgactggctggaaaacgatgttggcagggtgtttatccagtactttgataatctgctcggcgtatgggccggccagcccgccacgctctgcaccatgcagcctgtctgtgggcagagtttactggtggagcaaaacggcgatgtctacagctgcgatcactttgtctcagcggaatataaactgggtaatctgaagcaagatgctatggcagcgatggcgagctcgccatttcagcaacagttcgggaagcaaaagggccaactctctgcccgctgtcagagctgccactggcgctttgcctgccatgggggatgccctaaacaccgttttaccatccatgacgacgaagcacagaattacctgtgcagcggctatttagcctttttcggccatatcacgccctatatgaacgtcatgcgaaggcttttattaaattgccagccgcccgcgctcattatgagtcttatcccggagattcggcaaaatatattacaattaacggagtctgaagatgaaagaaccaaataa

SEQ ID NO: 211138 - DNA, 1233 bp, Klebsiella pneumoniae
atggaaataaacgctattccccgacgccttgccttcaccgcgggcggtcagcaactcatcaactgggggatctctttttatatgcccggcacctttgccggggctatcgccgccgacaaaggatggtccttgccgcagatctatctcggcctgacgcttgcgatgctgatgatggccgctgtctccccgttcgttgccaggctgctggctcgctttggcggaagactggtggtcaccagcggtaccttactgatagccgccagctgcgccatgatggcctggcgcccttcgctggccggctggtacggcgcctggctgctgaccggcatcggcatgcggctctcactgtatgatgcgctgttcgccgcagtggtgaatctgtacggtcagcaggcgcggaaaactatctctcatatcactctcgctggcggtctggcctctgccctcttctggccgctgggcgaggcgttattaaccatcatgccctggcagaatgccctgcggatctatgcgctgtttggcctgctgagcgcatggctgagttatcaactgcctcgccagcggctcagttcagcggcgaaatcaccagcctcgccagcgacagcagagggcgaccggcgtaacggggcgcgttacgcgatctttattgcgctgatcaccttcatctctaacggtacctctacccatctgccggagtttatcagccactttggtctgccggttgccgtcggtatgctgtggggattcggccagaccggcgcccggctgggggaagtgctggccggtccccgggtcacctcactcacgctaacgcgttttactgcgctcgccatgccgctctgttttctccttggattgagcagcacgacctttgccggatgcgcagccgggtttgtgctgggctatggcgcgattaacgggctggtgacgattgtcaaagcgacgctgccgctggcgctgtttagcgcagaaagctacgccagccgcacgggtctcctgctgatccccgggcaactgatggcagctgtttcaccctttgcctacgcatggctgaaccaccggctgggcattatcggcggaatgtgggtgtccaccgggttaacgttgatcgttgccggactggcgctggcgatggtgcgcgaggcgggtaaggcgcaggatgaacgtaatgtagaatatccggcagcggccgttgaccaaccgatagccaaaaacaaccttgctgaagagtaa

SEQ ID NO: 211139 - DNA, 888 bp, Klebsiella pneumoniae
atggcaacactgaacctgggaaatctggcgaccttccggctggtcgtacagcgcggcagcttttctgccgccgccgacgcgctggggatctcccaacctgccgtcagcctgcaggtacgtcagctggagcagtttttacagaccaggctgctggagcgaaccggacgtgggatcaaggcgacggcggcaggaatggcattgctggcccacagcgagcagatcgatcgggcggtgaatagcgcggtgcagtcggtcagcgcattcagtcaggaggttaatggatcgttgacgctggggacaggcgcgacggcctgcattcatcttcttccaccgctgctgcagcatcttcgtcagcagcacccgctgctgacggtgggggtgaccaccggcaacacgctggatatcgtccgcgcggtggaagaaaaccggctcgatctcgggctggtcacgctgcccgtgcaggggcgcagtctggcggtgactgcgatgttagatgaggagttcgtgaccatctatgccagccgcgagacggagatgccggcggtttatactcccgccgagctgcaggcgcagccgctcattgccttcgaggcgggtagcggcacgcgggatctgattgaccgctggttccgctcggcgggactggcggtgacgccggtaatgcagttggggagcatcgaggcgattaagcgcatggtgcgggcagggctgggctacagcatcgtgccccgcatggcggtggagcgggtggaggatcgcgacggattacgcgtacactcgctggcgccgcggctataccgacagctggcggtagtcatgcgtcaggacaaaattgtgacaaaaggtatcgctgaaatgctgcgcctgctgcataccgtgcgcttataa

SEQ ID NO: 211140 - DNA, 174 bp, Klebsiella pneumoniae; identical to SEQ ID NO: 136676

SEQ ID NO: 211141 - DNA, 2229 bp, Klebsiella pneumoniae
atgaatttattaaaatactatcaacaatatcgcgacaagtggtgggctttaccgctcgttctgcctgcgctgttattaccggtcgccagatgggcgaatacctacaccatgctcaatggtcatatggtatttttgtattatcttcccctggcgctggtgctcagcctgatgatgttttttggctgggcggcgatccctggcattattattggcctgctgttaactctggcccacggcatgatgtttgagcagtccatcggtgtactgttccatttccttatcccctgcgtgctctgctggggcggctaccgcatttttgtcccccagcgtcagcaggtctcacacggcaacgtccgactgatgccgcatcgtctgttctggcaaatgctgctcccctcggtcatttttctgattttgtcacagattgccgaatatcttggactccatccgcgcacaacggaaatgaccggcgttacgccatttagtttacgttcattaatcacctttcaggcgctaatggtagggtgcctgaccggcatgccgctgtgttattttgtgttacgggtcattcgtaatccttttcatttacgcggctttatttctcaggttcgcttacaaattgatccaaaaataaaaaaaattgaaattatttgctgggcgacggtattaattctgctactgtggctattattgatgccgcttaatgatagcagcaccatatttagtacgaattatacgttgtcattgctgatgccggtgatgctctggggtgccatgcgttttggctatcgctttatctcactgatctggacgccggtgctgattgccgtgatccattttcattaccgttacttaccaatttacccaagctataacacccagttggcgatcacgtcatcaagctatctggtattctcgtttattgtcgcctatacggcgatgctggcgacacagcagcggctgatctacgctcgcgtccggcagatggccttcctcgacccggtggttcatatgccgaacttgcgggcgctgagccgggcgctcaacggcacgagctggtcgacgctctgttttctgcgcattcctgagcttgaattgctggggcgccactatggggtacttttgcgaatccagtataagcaaatgctggcgaaccacctgagaacgctgctgcagcccaacgaagcggtatatcatcttgccggtcacgatttagtgttccgtctcaatagcgaagggcaccaggcgcgcattcacttaattgaccgctccctgcgacagttccgtttccactgggacggggtccccctgcagccgcggatcggcatgagctattgcaacgttcgctcgccggtcaagcatctgtatttactgcttggcgagttgaacaccattgccgacatgtcgttagccagcggccatccggaaaatttacagcgccgcggcgcgggccatgttcagcaggatctgaaagataaagtcgtgatgatgaaccgcattctcaaagcgctggaacatgaccattttgtcctgatggcgcagcctatccagggcattcgcggcgatcgctatcatgaagtgctggtgaggatggaaggggagtcgggtgagctaacggggccaaacgagttcttgccggtggcgcacgagtttgggctgtccacgcgggtggaccagtgggttattgagcatacgctggcctttatggacgccaaccggcgggcgctgcctggtctgcggctggcgatcaatctttctccggtgtcgctgagccgcagccagtttcctcaggaggtcgaagcgctgctgcaggcctacaacattgagccatggcagattattttcgagctgaccgagaactacgcgctcagcaatcccgagctggtctgccagactttagaacatctgcgggcgctgggctgccgggtggcgatcgatgattttggtaccggctacgccagctacgcccggttaaaaacaatgaacgtcgacattcttaaaatcgacggcagttttattcgcaatctgcttgccagcagtcttgattaccaggtcgtggactctatttgtcgtctggcgcgtatgaagaacatgcaggtggtggccgaatatgtggagtcgccggaaatacgtcaggcggtcatcacgctggggatcgattatatgcagggctatgatatcggggtaccggtacctctgacgcagttggcggaggagatgaccggctga

SEQ ID NO: 211142 - DNA, 1533 bp, Klebsiella pneumoniae
atgccaataaacgataacacccctcggccgcaggagttcgctgcggttgaccttggttcgaacagttttcatatggtgatcgcccgtgtcgtcgacggcgccatgcagatcatcggacgcctgaaacagcgcgtacatctggccgatggcctcgatgaaaactcggtgttgagcgaagaagccatgacccgtgggctgaactgcctgtcgctgtttgccgaacgcctgcaggggttctccccctccagcgtctgtatcgtcgggacgcatacgctgcgtcaggcgaccaacgcggcggagtttcttaaacgcgcggaaaaagtgatcccctacccgatcgagatcatctccggtaatgaagaagcgcgcctgatttttatgggcgttgagcacacgcagccggagcgcggccgcaagctggtgattgatatcggcggtggttcaaccgagctggtcattggcgaagattttgagccccgcctggtggaaagccgccgcatgggctgcgtgagcttctcgcaggcctatttccctggcggcgttatcaataaagaaaacttccagcgcgcgcgcctggcggcggtgcagaagctggagacgctggcctggcagttccgtattcagggatggaccgtggcgctgggcgcctccggcaccattaaagccgcccaggaagtgctggtggcgatgggcgagaaggacggatttattacgccggagcgcctcgagatgctggtaaatgagctgttgaagcataaaaacttcgacgcgctcagtctgcccggtctctcagaagaccgtaaagcggtctttgcgcctgggctggcgatcctctgcggtgtgtttgacgcgctggccatcaaagaacttcgtctgtccgatggcgcgctgcgcgaaggtgtcctgtacgagatggaaggccgcttccgccaccaggatattcgtagccgcacggcacagagtctggcaaatcagtacaacatcgatcgcgaacaggcgcgccgggtactggaaactaccacccagatgctggagcagtggcaggagcagaatcccaagctggccaatccgcacctcgcggcgctgttgaaatgggcggtgatgctccatgaggtagggctgaatatcaaccacagcggcatgcatcgtcactcggcctacattctccaaaatagcgacctgccgggcttcaatcaggagcagcagatgctgatggccaccctcgtacgctatcatcgcaaagcgatcaagctcgacgatctgccgcgctttacgctattcaggaaaaagcagtttctgccgctaattcagctactgcgcctgggcgtactgctgaataatcagcgtcaggctaccactacgccgccgacgctgcgcctgcagacggaagctcaccactggacgctgacgtttccgcacaactggtttagccagaatgcgctggtgctgctggatctggaaaaagagcaacagtactgggaaggcgtgccggaatggatgctgaagattgctgaagaagagccagacgcctga

SEQ ID NO: 211143 - DNA, 2061 bp, Klebsiella pneumoniae
atgggccaggaaaagctatacatcgaaaaagaactcagctggttgtcttttaacgaacgcgtgctgcaggaagcggcggacaagagtaacccgctgattgagcgcatgcgcttcttagggatttactccaacaacctggatgagttttacaaagtgcgcttcgctgagctgaagcgccggattattatcagtgaagaacaaggcagtaccgcccattctcgccacctgttaggcaaaattcaggcccgcgttctgaaggccgatcaggaattcgatagtctgtataatgaactgttgctggagatggcgcgtaaccagatcttcctgatcaacgagcgccagctgtccgtcaatcagcaggcctggctgcgcaactacttcaagcagtatttacgccagcatatctcgccgatcctgatcaaccgcgaaacggacctcgtgcagttcctgaaagatgattacacctatctggcggtggagattatccgcggggaaaacatcaactatgctctgctggaaataccgtcggataaagtgccgcgcttcgtgaacctgccgccggaagcgccgcgtcgccgcaagccaatgatcctcctggataacatcctgcgctattgcctggacgatatttttaaaggcttctttgattacgatgcgctgaacgcctactcgatgaagatgacccgtgacgccgagtacgatctggtgcatgagatggagtcgagcctgatggagctgatgtcctccagcctcaagcagcgcctgaccgccgagccggttcgcttcgtctaccagcgcgatatgccggatgcgatggtcgaaatgctgcgcgataagctctccatctccaactacgactcgatgctgccgggcggccgctaccacaactttaaagactttatcggcttcccgaatgtgggtaaggccaatctggtcaataagcctatgccgcgcctgcgtcatctgtggtttgataaattccgcaacggcttcgacgccattcgcgaacgcgacgtgctgctctactatccctatcacacctttgagcacgtgctggagctgctgcgtcaggcctccttcgaccccagcgtattggcgatcaaaatcaacatttaccgcgtggccaaggattcgcgcattattgacgcgatgatccacgccgcccacaacggtaagaaagtcaccgtagtggtggagctgcaggcgcgcttcgatgaagaggctaacattcactgggcgaaacgcctgacggaagccggagtccacgttatcttctctgcgccaggtctgaagatccacgccaagctgttccttatctcgcgtaaagaaggcgatgaggtggtgcgctacgcccacatcggcaccggtaactttaacgagaagacggcgcggatctacaccgactattcgctgttaaccgccgatgcgcgcattaccaatgaagtccgccgggtgtttaactttatcgagaacccctatcgtccggttagcttcgactacctgttggtgtcgccgcagaactcgcgtcgtctgctgtatgagatgatcgatcgcgagatcgccaatgcgcaaaacgggcaaccgtccgggattacgctgaagctgaacaacctggtggataaaggtctggtggaccgactgtatgccgcctccagctccggcgtgccggttaatctgctgatccgcggcatgtgctcgctgatcccgggtctggaaggtatcagcgaaaatatccgcgtcatcagtattgtggaccgtttcctcgagcacgaccgggtctactgttttgaaaacggtggcgataaacaggtctggctctcctctgccgactggatgacgcgtaacatcgattatcgcatcgaagttgccgctccgctgctcgatccgcgtctgaagcagcgggtgctggatatttttgatatcctgttcaacgatacggtaaaagcgcgctatcttgataaagaactgagtaaccgctatgtgccgcgcggcaatcgccgtaaagtgcgcgcgcaaatggcgatttacgattatctcaaatcactcgaacaacccgactaa

SEQ ID NO: 211144 - DNA, 642 bp, Klebsiella pneumoniae
atgaaaaacatcgtggtgctgatttccggtagcggcagcaatttgcaggcgatcatcgacgcctgcggccggaaacagataaacggcaccctgcgtgcggtattcagtaacaaggctgatgcgttcggccttgagcgcgcgcgcctggccggcatcccggcccatgcgctggcgcaaagtcagtttgccgaccgggaagcgttcgatcgtcagctgatgcatgaaatcgacgcctacgccccggatctggtggtgctggcaggctatatgcgtatccttagcccggcgttcgtcagccactatcagggacgtctgctgaacatccatccctcgctactgccgaagtatcctggcctgcatactcatcgtcaggtgctggagaacggtgacgaggagcacggtacctcggtgcacttcgtcaccgatgagctggacggtgggccggttatcctgcaggccaaggtgccggtcttcgttggcgacagcgaggaggaaatcacggcgcgggttcaggcccaggaacatgccatttatccgctggtcatcagctggttcgtcgatggacgtctgcgcatggcaggcaaccacgcctggctggatgagcgacagcttcccccgcagggctatgccgccgacgaatga

SEQ ID NO: 211145 - DNA, 1038 bp, Klebsiella pneumoniae
gtgaccgataaaacctctctcagctataaagatgccggcgtggatattgatgcaggcaacgctctcgtcgaccgtattaagggcgtggtgaagaaaacccgtcgcccggaagtgatggggggactgggcggattcggcgcgctgtgcgcactgccgcagaaataccgcgagccggtactggtctccggcaccgacggcgtcggtaccaagctgcgtctggcaatggatctgaagcgtcacgacaccatcggtatcgacctggtcgccatgtgcgtgaacgacctggtggttcagggcgctgagccgctgtttttcctggattattacgccaccggtaaactggacgtcgataccgcagccagcgtcatcaacggcatcgccgaaggctgcctgcagtccggttgcgcgctggtcggtggtgaaaccgcagagatgcccgggatgtaccacggcgaagattacgacgtggcgggtttctgcgtcggggtagtggaaaaatcagaaatcatcgacggcagcaaagtgaccgatggcgacgtgctggtggcgctggcgtccagcggcccgcactctaacggctattcgctggtgcgtaagatcattgaggttagcggcgttgacccacaaactaccgaccttgacggtaaaccgctggccgaccatctgctggcgccaacccgcatctatgtgaaatcggtgcttgatctgatcgccagcgttgacgtccacgctattgcccacctgaccggcggcggcttctgggaaaacattccgcgcgtgctgccggataacacccaggcgatcatcgatgagtcctcctggcagtggccatccgtcttcaactggctgcaaaccgccggtaacgtcagccagcatgaaatgtaccgtacctttaactgcggcgtagggatgattatcgccctgccggcagcggaagcggacaaagcgattgccctgctgaatgacaaaggtgaaaacgcgtggaaaatcgggtatatcaaagcctccgattccgaacagcgtgtggtcattgcatga

SEQ ID NO: 211146 - DNA, 894 bp, Klebsiella pneumoniae
atgaagattgcggcatttgatatcggtggcaccgcgttaaagatgggcgtgatggcccgcgacggcaggctgctggaaaccgccaggcagtcaatcaatgacagcgatggcgatcggatcttacaggcaatgctgtcgtggctggcggcccatccgtcgtgtgaaggaatagccatcagcgcgccgggctatatcgatccgcacagcggtcttatcaccatgggcggcgctatccgtcgatttgataacttcgccatgaaatcgtggctcgagacgcgaaccgggctgccggtctcggtggaaaacgacgccaactgtgtgctgctggccgagcgctggcagggcaaagcggcggagatggccaattttctggtgctcactatcggtactggcatcggtggggcgattttctgccaacaccagctgatcaacggggcgcgttttcgtgccggcgaattcggctatatgcttaccgaccgtcccggcggacgcgatcctcgtcgctattcaatgaatgagaactgcactctgcgggtgctgcgccatcgctatgcgcaacatattggcgcgccgctggatagcgtgacaggcgaactgattttcgaccgctatgacgccggcgacccggtttgtcagcgtctggtcgccgagttcttcaatggcctgggccatggcctttataacctcgtccatatcttcgatccgcagaccatttttatcggtggcggcgttgtggaacgcccaggatttctgacgctactgcgccagcatctggcctggttcggcattgccgactatctcgataccgtcagtcacggtaacgatgccggcctgattggtgcggtttaccattttaatcagctgtatcgttcgccagacgacgatcgacattag

SEQ ID NO: 211147 - DNA, 1434 bp, Klebsiella pneumoniae
atgtccggatttaaagcaggttttctgtggggcggcgcggtcgcagcgcatcagttagagggcggctggcaggagggcggcaaggggatcagcgtggcggatgtgatgaccgccggcgcccacggcgtgccgcgggaaattaccgacggcgtggtggccgggaaaaactacccgaaccatgaggcgatcgatttttatcatcgttatccacaggacctggcgctgtttgccgagatgggcttcaaatgttttcgcacctcgattgcctggacgcgtattttcccgcagggcgatgagctggagcccaacgaggctggcctgcagttttatgatgatctgttcgacgaatgcctgaaacacggcattgagccagtcattacgctgtcgcattttgaaatgccttatcacctggtcaccgagtacggcggctggcgcaaccgcaagctaatcgactttttcgtgcgctttgccagggtcgtcttcacccgctatcaacataaagtgaagtactggatgacctttaacgagatcaacaaccaggccaacttccatgaggactttgcccccttcaccaactccggtttgaaatatttgccggatgaagaccgggaaccggtgatgtaccaggccgcgcactatgagctggtggccagcgccctggcggtgaaagcggcgcgcgagatcaacccggcgctgcagattggctgcatgatcgctatgtgccccatctatccgctgacctgcgccccggacgatatgatgatggcgatgaacgccatgcaccgccgttactggtttaccgacgtccacgtgcgcggtcgctatccgcagcatctgctcaactattttgcccgccgcggctttactctggatatcaccgaagccgatcgtcaggcgttaaccgagggctgtgtcgactacattggctttagctactatatgtcgttcgctaccaaagccaccgaagacaaccccttgcttgattatgatgaaaccaccagcctggtctccaacccgtacgtcaaaaagtcggactggggctggcagattgacccggtcggcctgcgctattcgctgaactggttctgggatcactaccagctgccgctgtttattgtcgaaaacggctttggcgcgattgatgtccgcgaagcggacggcagcgtcaatgaccagtatcgtatcgattatctctccgcccatatcgcggagatgaaaaaggcggtggtcgaggatggcgtcgatctgatgggctacaccccctggggctgtatcgatctggtttccgccggcacgggggaaatgaaaaaacgctacggctttatttatgtcgataaagataatgaaggcaatggcacgttggcacgcagccggaaaaagtcctttgcctggtatcagcaggtaattgccagcaacggggagaagctgtcgtag

SEQ ID NO: 211148 - DNA, 627 bp, Klebsiella pneumoniae
atgaagattgtggaagtcaaacacccactcgtcaaacacaagctgggcctgatgcgcgagcacgacatcagcaccaaacgcttccgtgaactcgcctcagaagtgggcagcttactgacttatgaagccaccgccgatctggagactgagaaagtcactattgaaggctggaacggtccggtggaagtcgagcagatcaagggcaagaaaattaccgttgtgcctatcctgcgcgctggcctcggcatgatggaaggggtgctggagcacgtgccaagcgcgcgtatcagcgtagtcggtatctatcgcaatgaagaaaccctcgagccggtgccttacttccagaaactggtgtctaacatcgatgaacgtatggcgctggtcgttgacccgatgctggccaccggtgggtcgatgatcgccactatcgatctgctgaaaaacgccggctgcaccagcatcaaggtgctggtgctggtggcggcaccggaagggattgccgcgctggagaaagcccacccggacgttgagctgtacaccgcctctgtcgataagggactgaacgagcacgggtatatcattcccggtctcggcgatgccggcgacaagatttttggaacgaaataa

SEQ ID NO: 211149 - DNA, 1287 bp, Klebsiella pneumoniae
atgacgcgccgtgccatcggggtgagtgaaagaccgccgcttttacagacaatcccgcttagtttgcaacatctgttcgccatgtttggcgcaacggtactggtgcctattctgttccacattaacccggccaccgtcctgctgttcaacggcatcggtacgctgttgtacctctttatctgtaaaggcaaaattcccgcttatctgggatcaagcttcgcttttatctccccggtgctgctgctgttgccgctgggctacgaagtggcgctgggcggctttattatgtgcggcgtgctgttctgcctcgtctcctttattgtcaaaaaagccggtaccggctggctggatgtgatgttcccgccggcggcgatgggcgccatcgtggcggttatcggcctcgaactggcgggcgtggcggctaatatggccgggctgctgccggccgacggccagtcaccggacagtaaaaccattattatctcgatggtgaccctggcggtgacggtgttcggatccgtgctgttccgcggcttcctggcgattattccgatcctgatcggcgtgctggtgggctatgcgctgtcgtttgtgatgggcgtggtcgataccaccccgatcgccgaggcgcactggttcgcgctgccgactttctacactccgcgctttgagtggtttgctatcttcaccatactgcccgccgcgctggtggtgattgccgagcacgtggggcatctggtggtgaccgccaatatcgttaagcgcgatctgatccgcgacccgggcctgcatcgttcgatgtttgccaacggcctgtcgacgatcgtttccggcttcttcggttcgacgcccaacactacctacggtgaaaatatcggcgtgatggcgattacccgggtctacagcacctgggtaatcggcggcgcggcgatcattgcgattctgctctcctgcgtcggcaaactggcggcggctatccagatcatcccggtgccggtgatgggcggcgtttccctgctgctgtacggggtgatcggcgcctcggggatccgcgtactgattgaatcgaaggtggattacagtaaagcgcagaatctgatcctcacctccgtgatcctgatcatcggcgttagcggcgctaaagtgcacattggcgccgccgagctgaaagggatggcgctggcgactatcgtgggcatcgccctcagcctgattttcaagcttatcagcgtcctgcgtccggaagaggtggtcctcgacgcggcggatagcgaagagtttaaataa

SEQ ID NO: 211150 - DNA, 678 bp, Klebsiella pneumoniae
ttgccactgtatcttcctgacgacgaaaccttcgcgagtttctggccgggtgataatccttccctacttgccgccctccagaacgtactgcgccaggaacacagcgggtacatttatatctggtcacgtgaaggggcaggtcgtagccacctgttacacgccgcctgcgcggagctttcccagcgcggggatgcggtaggctacgtgccgctggataaacggacgtggtttgtgcccgaggtgctggaggggatggaacagctggcgctggtgtgcatcgataacatcgagtgcgtcgccggcgatgagccctgggagatggccatctttaatctctataaccggatcctggaatcaggcaaaacccggctgctgatcaccggcgatcggccgccgcggcagctgaatcttggcctgccggatctggcctcacggctggactgggggcagatctataagctgcagccgctgtcggatgaagacaaactgcaggcgctgcagctgcgcgccagactgcgcggcttcgagatgcctgaagatgtgtgccgcttcctgctgaagcggctggatcgcgagatgcgttcgctgtttatgaccctcgatcagctggatcatgcctcgattaccgctcagcgcaagctgacgatccccttcgtgaaagagatccttaagctttag

SEQ ID NO: 211151 - DNA, 912 bp, Klebsiella pneumoniae
atgaaaaagccgacctccacgccccatgacgccgtgtttaagacctacctctcccatcccgataccgcccgtgatttcctgcagctgtatctgcccgagacgctgcttaaagtgtgcgatctgcgtacactgcatctcgagtccgggcattttgtcgaagacgatctgcgtcccttttacgccgacattttgtattccctgaaaaccacggcgggcgacggttatatttatgcgcttatcgaacaccagagcacgcccgaccggcatatggcctttcgtctgatgcgctacgccatcgccgccatgcagcgccatctcgatgccggccacgatcgcctgccgctggtgatccctgttctcttctaccacggtctggtgagcccctatccgttctctctgcgctggctcgatgaattcgtcgctccggagctggccggccacctttatcacggggcgtttccgctggcggacataaccgtcattccggatgacgagattgccacccaccagcgcatggcaacgctggagttactgcaaaaacatattcgacaacgcgatctggcgcagctcctcgacaagctgagcgaattattattgactggactggcgacggaatcgcaggtacaagccctgatgcactatctggtacaggcaggcaacacgcgcgagccgattaaattcattcgcgagctggcgttacgtacgccgcagcataaggagacgttgatgacgattgcggaatatctggaacaacaggggctggagcggggcctggcgcaaggccgtcaggaaggacggaaagaagaggcgcagcgcatcgctgtcgctatgctgcacagcggccttccgcgcgacctggtcgcccggttgaccgggctgacggagcaggagctgactcccctggcggactaa

SEQ ID NO: 211152 - DNA, 360 bp, Klebsiella pneumoniae
atgaccgacgcggtaaaaatttaccataacccacgctgctccaagagccgcgaaacgctgagcctgctgcagagccgcggcatcgatcctgaggtggtgctttatcttgagacgccaccggatgccgggacgctgcgccagctgctgcagctgctgggtatggagagcccccgcgagctcatgcgccagaaagaggatctgtataaatcgctcaatctggccgacccggctctcagcaacgcggcgctgatacaggcgatggtcgacaatccgaaactcatcgagcgccctatcgtcgtcagccgcggccaggcgcgtattggccgcccgccggaacaggttcttgagatcgtaagctaa

SEQ ID NO: 211153 - DNA, 1464 bp, Klebsiella pneumoniae
atgttcaggcagttgaagaaaacgctggtggcgaccgcgatcgcgtcgctgacgctgggttcgataggtcctgcttttgctgactccgcagataccctgccggacatgggaacctccgcaggaagcacgctgtcaatcggtcaggaaatgcagatgggggattactacgtccgccaactgcgcggtagcgcgccgctgatcaacgaccctctgctggtgcaatatatcaacgggctgggtatgcgtctggtggctcacgccaactcggtgcgtaccccgttccacttctatttgattaataacgaccagatcaacgccttcgccttcttcggcggcaatgtggtcctccactccgccctgttccgctactctgataacgagagcgaactggcctctgtcatggcgcacgaaatctcccacgtgacgcagcggcatctcgcccgcgcgatggaagatcagaagcgcaacgcgccgctgacctgggtcggcgcgctgggttcaattttgctggcgatggccagcccgcaggccggaatggcggccctgaccgggacgctggccggtactcagcagggtatgatcagcttcacccgccagaacgaagaagaagccgaccggattggcattcaggttctgcagcgctcgggtttcgacccgcaggctatgccgatgtttatgggtaaactgcttgacgagtcgcgctactcgacgcgaccgccggaaatgttgctcacccaccccctgccggaaagccgactggccgatgcccgtaaccgcgccaaccagatgcgcccggtggtggtacagtcctcggcggacttctatctggcgaaggcgcgtaccctcgggatgtacaccaacggcgacaacaagctgggcaccgatctgctgaacgcctgggataaaggcaatatccgccaacagcatgccgcccagtatggtcgcgctctgctggcgatggaaagcaataactttgaccaggcacgcaaaacgctgcagccgctgctcaacgccgacccgcaaaatgcctggtatctcgatctggccaccgatatcgacctcggacagaagaaaaccagcgacgccatcaatcgccttaaaaacgcccgcgagctgcgtactaatccggtgctgcagctgaacctggccaacgccctgctgcagggcgggcagcccggggaagcggcgaccattctgaaccggtatacctttacctataaagaggatggcaacggctgggacctgctggcccaggcggaaggcgcgctgggcaatcgcgatcaggagctggcggcgcgggctgaaagcatggcgctggtcggccagctggagcaggcgatttccctgctcagcagcgccagctcgcaggtgaaactcggtagcctgcagcaggcacgttacgatgcccgtatcgatcagctacgcgatctgcaggctcgcttccgtccctatcaaaaaatgtaa

SEQ ID NO: 211154 - DNA, 1062 bp, Klebsiella pneumoniae
atgcttgagatgttaatgcagtggtaccgccgtcgattcagcgaccctgaggcgatagcgctgctggttattttgcttgccggtttcggcattatgttctttttcagcggcctgctggccccgttgctggtggctatcgtgctggcctatctgctggagtggccgaccgttcgtctggagcgcatcggtctgtcgcgcacctgggccacctcgctggtgctgatcctctttgtgggcatcctgctgttgctggcctttgtggtgctgccggtagcctggcagcaagggatctacctcatccgcgatatgccgggcatgctaaataagctctctgatttcgccgccacgctgccgcggcgctatccggcgttaatggatgccggcattatcgatgcgatggcggaaaatatgcgcacccggatgctgacggtgggcgactcggtggttaagtactctctggcctcgctggtggggttactcaccctggcggtctatctggtgctggtgccgctgatggtcttcttcctgctgaaggataaagagcagatgctcaacgcggtgcgccgcgttctgccgcgcaatcgcgggcttgccgggcaggtgtggaaagagatgaaccagcagatcaccaactacattcgcggcaaggtgctggagatgattgtcgtcagcgtcgccacctggataggctttattctctttggcctcaactactcgttgctgctggcggtgctggtgggcttctcggtgctgatcccctatatcggcgcgtttgtggtgaccattccggtggtgggggtggcgctgtttcagtttggcgctggcaccgagttctggagcctgtttgcggtctatctgattattcaggggctggacggtaacctgctggttccggtgctattctcggaagcggtcaatttacacccgctggtaattatcctgtcggtggtgatctttggcggactgtggggattctggggcgtcttcttcgccattccgctggccacgctgattaaagcagtggtgcatgcctggccggatggtttggcggtcgacgactaa

SEQ ID NO: 211155 - DNA, 471 bp, Klebsiella pneumoniae
atgaccccactgaaagccggtgatatcgcaccgaaatttagcttaccggaccaggacggcgaggaagtaaatttaaccgacttccagggacaacgtgtcctggtttatttttacccgaaagccatgaccccgggctgcaccgtccaggcgtgcggcttgcgcgataatatggacgacctgaaaaaagccggcgttgaagtgctgggcatcagcactgataaaccggaaaaactctcccgtttcgccgaaaaagagctgctgaactttacgctgctgtctgatgaaaaccatcaggtttgcgagcagtttggcgtctggggcgaaaaatcctttatggggaaaacctacgacgggatccaccggattagtttcctcattgatgccgatggcaaaatcgaacacgtctttgatgattttaaaaccagcaatcaccacgacgtggtgctgaactggctgaaagaaaacgcctga

SEQ ID NO: 211156 - DNA, 567 bp, Klebsiella pneumoniae
ttgacagcctcattacaacactatctggttattaccgccctgggggctgaccgtcccggcatcgtgaatacgatcactcgccacgtcagcagctgcggttgtaatatcgaagacagccggctggccatgctcggtgatgagtttacgtttatcatgctgctttccgggtcgtggaatgcgattaacctgatcgaatcaactctgccgctgaaaggcgcggagctggagctgttgatcgtgatgaaacgcaccactgcgcgcccgccgcaggccatgccaaacaccgtttgggtccaggttgaggtgccggactcaccgcatatcatcgagcgctttactgccctgtgcgatacatggaatatgaatattgcggagctggtgtcccgcacgcagccgggagacggcgattccgcgcagctttttatccagataactgcccacagtcctgcgacgcaaaatgcagcaaatatcgaacaagcgttcaaagccctatgtacagaactgaacgcacaaggcagtattaacatcgttaattattcacagcatgatgaacaggatggagtttaa

SEQ ID NO: 211157 - DNA, 879 bp, Klebsiella pneumoniae
atgttcacgggaagtattgtagcgcttgtcacgccgatggatgaaaacggtaatgtctgccggacaagcctgaaaaaactgattgattaccatgtcgccaacggaacctcggcgatcgtttcggtagggactaccggtgaatccgcaacgctgagccatgaagagcatggcgacgtggtgatgatgacgctggagctggccgacgggcgtattccggttatcgctggaacgggagccaatgcaaccgcagaggcgattagcctgaccaaacgttttaacgatagcggtgttgttggctgcctgacggtcactccttattataaccgtccgacccaggaaggcctgttccagcactttaaagctatcgccgaacatactgacctgccgcaaattctgtataatgtgccgtcccgtaccggttgcgatatgttgccggaaaccgttggccgtctggcggaaattaaaaatattgtcggtattaaggaagcaacagggaacttaagtcgcgttcaccagatcaaagagctggtttcagacgactttattctgctgagcggtgacgatgcgaccggtatggacttcatgcagctcggcggcgtaggcgtgatttctgtcacggccaacgtggcggcgcgcgaaatggccgacatgtgccgtctggcgctggcgggtcaatttgccgaagctcgtgcgattaaccagcgtctgatgccactgcatacaaaattatttgtcgaacccaatcctatcccggtgaaatggggatgcaaggcgttgggtcttgtggcgaccgatacgctgcgcttgccgatgacgcctatcaccgatcatggtcgtgaagccgtcactgccgcgctgaagcatgccggtttgctgtaa

SEQ ID NO: 211158 - DNA, 1035 bp, Klebsiella pneumoniae
atggcttactcagtacagaagtcgcgcctggcgaaggttgcgggtgtttcgctggttctactcctcgcggcctgtagttctgactcgcgctataagcgtcaggtgagcggtgatgaggcctatttacaggcatcaccgttgagcgaacttcatgcgccggcggggatgatcctgccgattcaggtgggtgattacaatattccggtggctaacagcaccggcgcggtcggtaaagcgctggacattcgtccgccggcgcagccgctggcgctggtgagcggtgcgcggacccagtttaacggcgataccgcgacgctgatggtcgagaacggccgcagcggttcgctgtgggcacaggtcaccagtattcttcagtcgaagaactacgttatcgccaagcgcgatgatgcgagccagacgctgaacaccgactgggttgagtggaaccgtcttgatgaagatcagcagtatcgcggtcgttatcaaatctccgtcaaaccgcagggttatcagcaagcggtggtcgttaagctggtgaatctggagcaggcgggtaaaccggttgccgatccggcgtctctgcagcgctacagcaccgctatgctgaacgtcatttcggaaggccttgacatgaatgccaccagcgcccagaacgccgcccagcgcagcgcgggggccaccttcgacgtgcagagcgccgccgacgataccggcctgccgatgctcgtagttcgcgcgccgtttaacctggtgtggcagcgtctgcctggcgccctcgagaaagtggggatgaaagtgaccgacagcacgcgctctcagggcagcatggcgctgacctataagccgctgtctgacagcagctggcaggagctgggcgcacgtgacccgcagctggtctccggcgactacaaactgcaggtcggcgacctcgataaccgcagtagcctgcagtttatcgacccgaaaggccacaccctgacgcagtcgcaaaatgacgccctggtagccgtattccaggccgcatttaacaagtaa

SEQ ID NO: 211159 - DNA, 714 bp, Klebsiella pneumoniae; identical to SEQ ID NO: 135127

SEQ ID NO: 211160 - DNA, 876 bp, Klebsiella pneumoniae
atgcgctggcaagggcgtcgcgaaagcgacaatgttgaagatcgacgtggacaatcaggctcgccgtttggcggcggcgggggcggcggcttccgtctgccgagcgggaagggcggcattgtactgctgattattgtgctggtggcgggctactacggcgtggatttgaccggcatgttgaccggcgaaccgatgccgcagcagcagacctccacgcagcgctccatcagtccgaaagacgatgaagcggcgaagtttacttccgtcattctggctaccaccgaagatacctgggggccgatctttgaaaagatgggccgccagtacccgcagccaaagctggtgctctaccgcggcgcgacccgtaccggctgcggcaccggtcagtcggtgatgggccccttctattgtcctgccgacagtacggtctatattgacctgtcattctacgatgagatgaaaaataaactgggcgccgacggcgactttgcccaggggtacgtcattgctcatgaagtgggtcatcacgtacaaaaactgctgggcattgagccgaaggtccgccagcaacagcagcatgccacgcaggccgaagccaaccgcctgtcggttaagatggagctgcaggcagactgcttcgccggcgtctggggtcataatatgcagcagcaggatattctggaaactggcgatctgcaggaggcgctgaacgccgccgaggccatcggcgacgatcgtctacagcagcagagccagggacgcgtggtgccggacagttttacccacggcacctcgaaacagcgctacacctggttcaaacgcggtttcgatagcggcgatccggcgcagtgcaataccttcggcagcgcgctgtaa

SEQ ID NO: 211161 - DNA, 2004 bp, Klebsiella pneumoniae
atgatggacgcgctgcttaacctcaccgcgcaaatggcgcgggaggggatccgtcgcctgctggtgctcagcggcgatgagagctggacgctgcagcaggcgcaggcgctacgggagaggctcggcggcgatggcctgtgggttggccccgagccgggttctgcgccctgcgtggcgcccggcgcgctgaaaacgctgctggggcgggaagtgatgcacgcctttttcgatgcccggcgcgggtttgatgtggccgccatggcggccctgagcggcacgctgcgggcgggaagctggctggtgctgctgacgccccccttcgccgactggccgacccgggcggatgaggactctctgcgctggagcgatacgcctgaccctatcgttacccctaactttgttcaccgctgctgtcggcagtttatcgccgatccggaggtgttgctctggcggcagtcggaccggccacgtttcccgctggccgccccgcgtccagactggcatcccgccgatggccgcccgcaggccgagcaggcggcaatccttgagcaactgatacgcctgccgcccggtatcgcggcggtgacggcggagcgtggacgggggaagtccgcgctggcgggcatgctcttgcgccagcttgggggcgaggccatcgtcaccgccccaacgcgtagcgctgtcgaggtgctggccagctttgccggggagacgttgcgctttatggcgcccgatgcgctgctggcgtcgaaagaaaaggcggcgtggctgatagtcgatgaggccgcggctatcccggctccgcttctccggcagctggtgagccgttttccccgcacgctactcaccacgacggtgcaagggtacgagggcaccggtcgcgggttcctgctgaaattttgcgccagtctgccccatctgcaatcgttcaccctgagcgccccgatccgctgggcggcgggctgtccgctggagtcagccatcagtcagttgcttatctttaacgatgaggcatttcgcgacgcgccgatgggggagatagccctggaggcggtcaatcagtcctgctggcaaacgcagccagcgctaccggaggcgatgtaccagctattgtccggggcgcattaccgaacttccccgctcgatctgcggcgcatgatggatgctccgggccaggctttccgctgcgctcgcgccggcggcgcggtggcgggcgccctgtggctggtggccgaggggggactttctcccgaacttagccgggcggtatgggcgggttttcgccggccgcgcgggaatctggtcgcccagtcgctggcggcgcacggcggcagtcccctggcggcgacgctgcgcgggctgcgggtcagtcggatcgctgtccatcccacccgccagcgggaaggcctcgggcggaagatgatcgccgatatcgccgccgatgccgctggctatgactatctctccgtcagcttcggctataccgctgagctgtggcgcttctggcaacgctgcgggtttaccctcgtacggctgggtacccatcgcgaggccagcagcggctgctatacggcgatggccctctatccgttgaccgcggcagggcgccagctggcgcagcgggaggcgcagcggctgcagcgcgatgaatactggcttcgcccgtggcgagaggaatccgcgccgctgccggccgtcgcagacgctatgcttagtgatgaggactggctggaagcggcgagctttgccttcgcccaccgcccgctggctgcggcgctgggctgcctcaaccgcctgctgatgcaggccgacatgccgttgccggccctgcggggacgactgcagggcaaagaggaggccgcactctgcgccgtgctgcagctgacggggcgaaaagccttgcaggcgagatggcgtcgggaggccgctgacgccttgcgctcccttgatgcagcgcgcgctgatgcgctgcgtcagcaggtggcgcatctgcaatttttttaa

SEQ ID NO: 211162 - DNA, 696 bp, Klebsiella pneumoniae
atgaaacacgatcattttattgttcaaagtcctgcgacgcctgcgcaacagctgttgctgctgtttcatggcgtaggggataacccggtctccatggggcaaatcggcagctggttcgcaccgcagtttcctgatgcgctgatcgtcagcattggcggggtggaaccttgcggccccaacggtcggcagtggttttcgctgcagggggtgacggaagagaatcgtcagcagcgcatcgacgccattatgccgacctttattgaaattgtacgctactggcaggaaaagagcggcgtcagtccactggccaccgcgctgatcggtttctctcagggggcgattatgtcgctggagagtatcaaagcggcgccggatctggcttcgcgggtcatcgcctttaatggccgctatgcgacgctgccggagacggcaacgacggccactaccattcacctgatccacgggggtgaagatcgggttatcgacctggcgtgggcggtgtcggccgaggaggcgttacagcaggcgggcggcgacgtgaccttagatattgtcgacgatctcgggcatgccattgacgatcgcagtatgcagttggcgatcgagcgtctgcgttataccgtgccgaagcactattttgatgaggcgctgagcggcagtacgccaaaaggggatgatatcatcgaaatgctgtaa

SEQ ID NO: 211163 - DNA, 204 bp, Klebsiella pneumoniae
atggaatggcttattaaacactggtggattctggtgctggtctttttggtgggggtaattatcaacgtgattaaagatctgaatcgcgttgaccacaaaaaattcctcaacaacaaacccgatctgccgccgcaccgtgattttaacgataaatgggacgatgacgacgactggccgaagcacgaccagtcgaagaaaccgtaa

SEQ ID NO: 211164 - DNA, 1128 bp, Klebsiella pneumoniae
atgtcttgcccggtcattgagctggctcagcagcttattcgccgcccttcccttagccccgatgatgcgggatgccaggcgttaatgattgaacgcctgcgtgcgatcggctttaccgttgaaccgatggatttcggcgatacgcagaatttctgggcctggcgcggccacggcgagacgctggccttcgccggccacaccgacgtagtcccggcaggcgacgccgaccgctggatcaatcccccgttcgaaccgaccatccgcgacgggatgctgtttggccgcggagcggcggatatgaaaggctcgctggcggcgatggtggttgccgcagagcgttttgtcgcgcagtacccgaaccacaggggccgactggcgtttttgatcacctctgatgaagaggccagcgccaaaaacggcaccgtcaaagtggtggagacgctgatggcgcgtaacgagcgtctggactattgtctggtcggcgaaccttccagtaccgaagtggtcggcgatgtggtgaaaaacggccgccgcggctcgctgacctgcaacctgactattcacggcgtgcagggccatgtcgcctatccgcaccttgccgataaccctgtccaccgcgcggcgccgatgctggcggaactggtcaatatcgagtgggataaaggcaatgagttcttcccgccgaccagcatgcagatcgccaacgtgcagtccggcaccggcagcaataacgtgatccccggcgatatgttcgtccagttcaacttccgcttcagtacggagctgacggacgagatgatcaaatcccgggtgatcgccctgctggaaaaataccagctgcgttacagcgtggagtggtggctctccggccagccgttcctcaccggacggggcaagctggtggatgcggtcgtcaacgcgattgagcactataatgagatcaaaccgcagctgttaaccaacggcggcacctcagacggacggtttatcgcgcgcatgggggcgcaggtggttgagctgggccccgtaaatgcaacgattcacaaaattaatgaatgtgtgaacgccgccgacctgcagctgctggcgcggatgtatcaacgcgtcatggaacagctggtcgcctga

SEQ ID NO: 211165 - DNA, 354 bp, Klebsiella pneumoniae
atgctcaccatgtacggaattaaaaactgcgataccattaaaaaagcccgccgctggctggaagcgcatcagattgagtatcgcttccatgattaccgcgccgatggccttgagcgcgcgcaactggatacctttattgccgagctgggctggcaggcgctgctgaacacccgtggcaccacctggcgcaaactcgacgagtcgctgcgcaatagcatcgataatgccgacgccgctgccgcattgatgctggaaatgccggcaattatcaaacgcccattgctctgcgcgcccggtcgtcctatgctgctgggttttagtgaagcaagttatcagcagtttaacgaggtatag

SEQ ID NO: 211166 - DNA, 3114 bp, Klebsiella pneumoniae
atggcgaatttctttatcgatcgccccatttttgcatgggtgctggcaatcctgttatgcctgacgggcgcccttgccattttgtcgctgccggttgaacagtatcccgacctcgccccgccgaatgtgcggatcaccgccaactatcccggcgcttccgcgcaaaccctggagaataccgtcactcaggttatcgaacagaatatgaccggcctcgataacctgatgtatatgtcctcccagagcagcgccaccggccaggcgacgatcaccctcagctttaccgccggtaccgacccggatgaagccgtgcagcaggttcagaaccagctacagtcggcgatgcgtaagctgccgcaggcggtgcaaaaccagggggtgacggtgcgcaagaccggtgataccaatatcctgacgctcgccttcgtctccactgacggcagtatggataaacaagatatcgccgactacgtcgccagtaacatccaggacccgctcagccgcgtcaacggcgtgggggatatcgacgcctacggttcgcaatactcaatgcgcatctggctcgacccggcgaagctcaacagctaccagatgaccaccaaggatgttaccgacgccatcagttcgcagaacgcccagattgccgtcggccagcttggcgggacgccttcggtcgataagcaagcgctgaacgccaccatcaactcgcaatctctgctgcaaaccccggagcagttccgcaatatcactctgcgcgtcaatcaggatggttcagaggtgacgctgggcgatgtcgccaccgtcgagatgggggcggagaagtacgactatcttagccgctacaaccgccagccggcctcaggcctcgggatcaagctggcttccggcgccaacgaaatggccaccgcggagcgcgtgatcaatcgcctcaatgagctggcgcagtttttcccccacggtctggaatataaggtcgcctacgagaccacctccttcgtgaaggcttccatcaccgacgtggtgaaaaccctgctggaggcgatcctgctggtcttcctcgtgatgtatctgttcctgcagaacttccgcgccaccctgatcccgaccatcgccgtgccggtggtgctgatgggcactttcgcggtgctgtatgcctgtggctacagcatcaacaccctgacgatgttcgcgatggtgttggcgatcggcctgctggtggatgacgccatcgtggtggtggagaacgtcgagcgcatcatgagcgaggagggcctgtcgccacgcgaggcgacccgcaaatcgatgggacaaattcagggcgcgctggtggggatcgcgatggtgctgtcggcggtatttgtgccgatggccttcttcggcggcaccaccggcgccatctatcgccagttctcaatcactatcgtcgcggcgatggtcctctcggtgctggtggccatgatcctcacccctgccctttgcgccacgctgcttaagcctgttaagccaggtgaatcccatgaaagaacaggcttcttcggctggttcaaccgcaccttcaaccgcagcgccagccgctacgaaaccttcgtcggcaaaatactgcaccgctcgctgcgctggatgctgatctacgtcctcctgctcggcgggatggtgttcctgtttctgcatttgccgacctcgttcctgccgctggaggatcgcgggatgttcaccacctcggtccagttgccgagcggcagcacccagcagcagacgctgaaggtggtgcagaaggcggaagattacttcctcaataacgagaagcagaacgtcgagtcggtgttcgctaccgttggctccggccccggcggcaatgggcagaacgtggcccgcatgttcgttcgtctcaaagactgggaccagcgcgacccgcaaaccggcacctcctttgccattattgaacgcgccaccaaagcgtttaatcagattaacgaagcgcgggttatcgccagcagcccgccggcgatcagcggcctcggcagttcggcaggcttcgatatggagctggaggatcatgccgggaaggggcacgatgcgctgatggcggcgcgcgatacgctacttgagctggccgggaaaaatccgctgttgacccgcgtccggcataacgggctcgatgacagtccgcagctgcaggtcgatatcgatcagcgtaaagcgcaggcgctgggcgtctccattgacgacatcaacgatacgctgcaaaccgcgtgggggtcgagctacgtcaacgactttatggatcgcggccgggtaaagaaagtctacgtccaggcggcggcgaaataccggatgctgcctgacgatatcaatctttggtacgtgcgcaacagcagcggcacgatggtgccattctcggccttcgccacctcgcgctgggagaccggctcgccgcggctggagcgctacaatggctactcagcggtggagatcgtcggtgaggcggcgccgggtatcagtaccggtaccgcgatggacatgatggagaagctggccgcgcagttacccaccggctttggcctcgaatggaccgccatgtcctaccaggaacgcctctctggcgctcaggcgccggccctgtacgcgatttctctgctggtggtgttcctgtgcctggcggcgctgtacgagagctggtcagtgccgttctcggtgatgctggtggtgccgctgggggtgattggcgccctgctggcgacctggatgcgcgggctggagaatgacgtgtacttccaggtgggtctgttgacggtgatcggcctgtcggcgaaaaacgccattctgatcgtcgagttcgccaatgagctcaacgagaagggccaggatctgctcagcgccacgctgtcggcttgccgtcagcgcctgcgccccatcctgatgacctcgctggcgttcatcttcggcgtgctgccgatggcgaccagcaccggcgccggttccggcagccagcatgcggtcggcaccggagtgatgggcgggatgatctccgccaccgtgctggcgatctttttcgtgccgctgttctttgtgctggtgcgtcgccgttttccgctaaaggagcgtccgcaataa

SEQ ID NO: 211167 - DNA, 1983 bp, Klebsiella pneumoniae
atgaaccactttattttgagcgatagccgaaagtgcatcggctgccaggcctgcgaagtggcctgcgtgatggcgcataacgaggagcaacacgtgctgaccccgcagcgctttttgccacgtatcaccgtgatcaaagcggagggccagcgtaacgccatcacctgccgccactgcgaggacgccccctgcgtccgcagttgtcccaacgacgccatcgcccagtccggcgacagcgttcaggtccgtcaggagaaatgcattggctgtaaatcctgcatggtggcctgcccgttcggggtgatgcaggtggtggtgacgccgcaggccgcaggcctggtgaaagccagcgcgcacaagtgcgatctatgccagggccgcgaggcggggccggcctgtgtggaaaactgtcccgcgcaggcgctgactctcgccgacgatgagacgttgatcaccctggcgaagcagcggcgactgcgctcggcatgccaggaggtgcagccgtggcagcgcgctacgccgctctgcagccagcccaatgctggcgcgaaggtcaggcaaatggcgatgacgcccccgcgcggggagccggataagctggcggcggaggtgcgtaagagccactttgaggagatctatcagccgttcaccccgcagcaggcgcagcagcaggccgcccgctgtctcacgtgtggggagcacagtatttgcgaatggacctgcccgctgcataaccatatcccgcagtggatcgagctggttaaagcggggaatatcgccgccgcggtcgcgctttcccatcagaccaactgcctgccggagatcaccggccgcgtctgtccccaggaccggctgtgtgaaggcgcctgcaccctgcgcgatgaaagcggggcagtcaccatcggcaatattgagcgctatatttccgaccaggcgctggccagcggctggcgtccggacctttcgcaggttaagccgagcggcaagcgggtggcgattatcggcgccgggccggccgggctggcctgcgccgatatgctggtgcgccacggcgtccagccggtggtcttcgaccgtcatccggagattggcggtctgctgaccttcggcattccggcgttcaagctggataaatcgctattggcccggcggcgggcgatcttcagcgagatgggtatccgctttgagctcaattgcgaggtggggaaagatatctccatggcgacactgctggccgagtatgacgcggtgttcgtcggcgccggaacctatcgctccatgaaggcggggctgccgaacgaagaggcccccggggtctacgatgcgctgccgttcctcatcgccaacaccaaacaggtgatggggctggcggcatcggcgcaagagccttatgtcaacaccgccgggctgaacgtggtggtgctgggcggcggcgatacggcgatggactgcgtgcgcaccgcgctgcgccacggcgcccgccaggtgacctgcgcctatcggcgagatgaagccaacatgccgggctcgaaaaaagaggtcaaaaacgcccgcgaagagggggcgctctttgagtttaacgtccagccggtgacgcttgagctggacgagaacgggcgggttaacggggtacgctttttgcgcaccgagctgggcgctccggacgccgggggaagacgccgtccgacgccgatccccggcagcgagtttgttatgccggcagatgcggtgatcatggcctttggcttccacccgcaccgcatgccctggctggaagcggcgggggtggcgctggacagtcaggggcgtattaaagccggagtggagagtcgttaccgttatcagaccagtcaggagaagatctttgccggcggcgatgccgtgcgcggcgcagaccttgtagtgacggcgatggcggaaggccgtcacgcggcgcaggggatcctggactatctggcgcggaaaacgacgccgcttcactga

SEQ ID NO: 211168 - DNA, 597 bp, Klebsiella pneumoniae; identical to SEQ ID NO: 135137

SEQ ID NO: 211169 - DNA, 1047 bp, Klebsiella pneumoniae
atgctttttcgcgtcatctttttcctttttctggcggtgctgccttgctcgcaggcatggtcggcaccgacgcagcagcgcttcaacgactggctggtcacctgtaacaaccaaaatttctgcgtcacccgtaacgtggggctgcatcatggcctggtgatgaccctcagccgcagcgctggggcagtcactgacgccagtctgcgtatcgagctgggcggcaccggcaatccagtggcgacgctcgcgccgatagcgccgcgcctgctgctggatggtaaaccgctgtccctgaccgacaagcgctggcacattgaagataaactcattaaaaccgccgacagcgtgacgatcgatgcgtttctccagcaggttcaggagggtaaagcgctctcgctggccaatggcctgcagaccatctccctgcaggggttgaaagcggctctgttttttatcgacgatcggcaaaagcgggtaggtagcgaaacggcctgggtcggcaaaggggaagagccgccgctcagcgtaccgccggcgccggcgctgcgcgcggtggcgagcgcggaaacggcgcagtcgccgctggggcgtgaggagctcaacgatctgatggactatggtaatgagcggatgaccaacagccactgctccctcgatcccttccgccgcgaaattcgcgttacagcgctgacggatgacaaagtgctgctgatgaccagctgcgaatccggcgcctacaacaccgtctggctggcctggctggtctcccgccagcgcccctatgtcgcccatcaggtgcggctaacgttgccatttcagccgccgggcgaggcgccgcgggagattgagctgatcaacgccagctatgatgaccgccgccatgagctggtgaccctggataaaggccgcggggccggcgattgcgggatccaaacccgctggcgttttgacggccagcggttcagcctctcccgctacgcgcagcagccgacgtgcgacaactggcaggggccagatgcctggcccacgctgtggatcacccgttaa

SEQ ID NO: 211170 - DNA, 1995 bp, Klebsiella pneumoniae
atgtcccgaagagagcttgccaacgccatccgcgccctgagtatggacgccgtgcagaaagccaactccggccatcccggtgcgccgatggggatggctgatattgccgaagtgctgtggaacgattttctcaagcacaatccgcagaaccctgactgggtggaccgcgaccgtttcatcttgtccaacggccacgcgtcgatgctgctctacagtctgctgcacctgaccggctacgatctgccgctgtctgaactgaagcagttccgtcagctgcactctaaaacgcccggccacccggagcatggctatacccctggggtggaaaccaccaccggtccgctgggccaggggctggcgaacgccgtcgggatggccatcgccgaacggacgctggcggcgcaatttaatcgccccggccatgagatcattgaccatcacacctgggtgttcatgggcgatggctgtttgatggaggggatctcccatgaggcctgttcgctggccggcacgctcggactgggcaagctgatcggtttttacgatcacaacggcatctccatcgacggcaaaaccgaaggctggttttccgatgatacggcggaacgcttccgcgcctatcactggcacgtcataggcgatatcgacggccacgatccgcaggctatcaaacaggcgataacggaagcgcaggcggtgaaagataaaccgtcactgattatctgccggaccatcatcggtttcggttcgcccaacaaagccggctcagaggagtctcacggggcggcgcttggcgaaaaagaggtagcgctggcccgccagcagcttggctggaaatatcctccgttcgagatcccgaaagagatctacgcgggctgggatgcgcgtccgcgcggggaaaaagcggagcacgcctggaacgagaaattcgccgcctaccagcagcagttcccggagctggccgctgagctgacccgacgtatgaatggcgccctgccggaagactttgccgcgatcgcccgcgactacgtggcgaaactgcaggccgagccggcgaaaatcgccagccgcaaggcttcgcaaaacgcgctgaacgcctacggcccgcacctcccggaactgctgggcggttctgcggatcttgcgccgagtaacctgaccatctggtctggatcgacatcgattaaagaagatcctgcgggcaattatatccactacggcgtgcgcgagtttggcatgaccgcggtggccaacggcattgccctgcacgggggctttattccttatacctcgaccttcctgatgtttgtggagtacgcccgcaacgccgcgcgcatggcagccctgatgaaggcccggcagatcatggtctatacccatgactcgatcggtcttggggaagacgggccgacgcaccaggcggtggaacagctggccagtctgcggctgacgcccaacttcagcacctggcgcccctgcgaccaggtggagaccgccgtcgcctggcaggcggctatcgcgcgacagggcgggccgacggcgctgatcctgtcgcgacaaaacctggcgcagatgccgcgtaccccggaacaggtgcaggatatcgcccggggtggctacgtgcttaaggatgccggcggcaagcccgacctgatcctcatcgccaccggctcggaagtggagatcaccgtcctggccgcggaaaaactgttggccaaaggggtaaatgtgcgggtcgtctcgctcccttccactgatgtgtttgacgcccaggatgaggcctggcgcgaatccgtgctgccgtcggacgtcagcgcccgggtggcggtcgaagccgggatagcggactactggtataaatatgtcggcttaaaaggcaagatcgtcggcatgaccggctatggcgaatccgccccggcagagcagttgttcccgttctttggctttacggtcgaccatatcgtcgccaccgccgaacaggtgcttaacgggtga

SEQ ID NO: 211171 - DNA, 957 bp, Klebsiella pneumoniae
atgaatcagttagacagcatcaagcagttcaccacggtggtcgccgacagcggagacatcgaatccatccgccactaccatccggaagacgccaccaccaacccctctctgctgctgaaggccgccggcctggcgtcctatagcggcctcatcgacgacgctatcgcctgggccaaaaaacagggtggcggccgcgaagcgcaggtgactcacgcctgcgataagctggcggtcaattttggcgcggagatcctcaaaagcattcccggacgggtctccaccgaggtggacgcccggctctccttcaaccgcgagaaaagtatcgagaaggctcgccatctggtggcgctgtatcaggagatgggcattgataagtcgcggatcctgatcaagctggcatccacctgggaggggatccgcgccgcggaggtgctggagaaagaggggatccactgcaacctgacgctgctgttttccttcgcccaggcccgggcctgcgccgaggccggggtttatctcatctccccgttcgttgggcgtatttatgactggtatcaggcgcgcaaaccgctggagccttacgtggtggaggaagatccgggggtgaaatcggtgcgcaatatctatgactatttcaaacagcataaatacaacaccatcgtgatgggcgccagcttccgccgcaccgagcagatcctggcgctggtcggttgcgaccggttgaccatcgccccgcctttattaaaagagctgcaggccagcgataccccggtggtgcgcaaactgatccctgccagccagatcctgccgcgtccggtgccgctcagtgaagcggagttccgctgggaacataatcaggatccgatggcggtcgaaaagctagcggaggggatccgcctgttcgccgtcgatcagcgcaaactggaagatctgcttgccgccaaactgtcactttag

SEQ ID NO: 211172 - DNA, 2280 bp, Klebsiella pneumoniae
atggatgagcagttaaaacagagcgccctcgatttccacgaatttccggttcccggaaaaatccaggtctcgccgaccaaacctctcgccacccagcgcgatctggcgctggcctactcgccgggcgtcgcagccccctgcctggaaatcgaaaaagatccgctggccgcctacaaatacactgcccgcggcaacctggtggcggtcgtctccaacggcaccgcggtgctggggctcggcaacatcggcgcgctggccggtaagccggtaatggagggcaaaggcgtcctgtttaagaaatttgccggtatcgatgtgtttgatatcgaagtcgatgagctggatccggacaaattcattaacgtcgtcgccgccctcgaaccaaccttcggcggtatcaacctggaagatattaaagcgccggagtgtttctacatcgagcagcagctgcgcgagcggatgaatatcccggtcttccatgacgatcagcacggcacggcgatcatcagcaccgcggcgatcctcaacggtctgcgcgtcgtcgagaagaatctgtccgacgtgcggatggtggtctctggcgcgggcgcggcggcgatcgcctgtatgaatctgctggtggcgctggggatgcaaaagcacaacatcgtggtctgcgattcgaaaggcgttatctataaagaccgtgagccgaacatggcggaaaccaaagccgcctatgcggtggaagacgatggcaaacgcaccctcgatgacgtgatcgacggcgccgacattttcctcggctgctctggcccgaaagtgctgactcaggagatggtgaagaagatggcgcgcgcgccgctgatcctcgccctggccaacccggagccggaaattctgccgccgctggcgaagcaggtccgcgatgacgccatcatctgtaccggccgctccgactaccctaaccaggtcaacaacgtactttgcttcccgttcatcttccgcggcgcgctggacgtcggcgcgacggcgatcaacgaagagatgaagctggcggcggtgcatgcgattgccgagctggcccatgccgagcagagcgaagtggtggcctccgcctacggcgatcaggatttaagctttggtccggagtacatcattccgaaaccattcgacccgcggctgatcgtcaagatcgcccccgcggtggcgaaggcggcgatggactccggtgtggcgacgcgcccgatcgctgattttgacgcctatatcgagaaactgagcgagttcgtctataaaaccaacctgtttatgaagcctatcttctctcaggcgcgcaaagagccgaagcgcgtggtgctggcggaaggggaggagactcgggtgctgcacgccacccaggagctggtgtctctgggactggccaaaccgattctggtggggcgcccgagcgtgattgaaatgcgcatccagaagctgggcctgcagatcaaggccggcgttgactttgagatcgtcaataatgaatccgacccgcggtttaaagagtactggagcgagtactaccagctgatgaagcgccgcggcattacccaggagcaggcgcagcgggcggtgattagcaacaccacggtgattggcgccatcatggtgcatcgcggtgaagcggatgcgatgatctgcgggactattggcgagtaccacgatcactaccgcgtggtgcagccgctgtttggctatcgcgacggcgtcagcaccgccggggcgatgaatgcgctgctgctgccgagcggcaacacctttatcgccgatacctatgtcaatcacgatccgtcgccggaagagctggcggagatcaccctgatggcggcggaaagcgtgcgacgctttggtattgaaccgcgcgtggcgttgctgtcgcactccaactttggctctgccgactgtccgtcagccagcaaaatgcgtaaaaccctggagctggtgaaggcccgcgccccggagctgatgatcgatggcgaaatgcatggcgacgccgcgctggtggaaagcatccgcaacgatcgcatgccggacagcccgctgaagggggcggccaatattctggtgatgccgaatatggaagccgcccggatcagctataacctgctgcgcgtctccagttcggaaggggtgaccgtcgggccggtgctgatgggggtggcgaagccggtgcatatcctgacgccgatcgcctccgtacgtcggatcgttaatatggtggcgctggcggttgttgaagcgcaaaccgaaccgctgtaa

SEQ ID NO: 211173 - DNA, 336 bp, Klebsiella pneumoniae
atggataaagaacgcattattcaggaattcgtaccaggcaaacaggtcacgctggcgcatctgattgcccacccgggagcggagctggcgaaaaagatcggcgtacccgaatccggcgcgatcggcattatgacgctgacgccgggagaaacggcgatgatcgccggcgatctggcgatgaaggccgccgacgtgcacatcggttttctcgaccggtttagcggcgcgctggtgatctacggctcggtcggcgcggtggaggaggcgcttctgcagaccatcggcggattaggccgcttattaaattataccttgtgcgaattaacgaaaagttaa

SEQ ID NO: 211174 - DNA, 480 bp, Klebsiella pneumoniae
atgaagcgtattgcgattgtcggcgccgtcggtgcaggaaaaaccacgttatttaatgccctgcaagggaattattccctcgccagaaaaacgcaggcgctggaatttaacgatcgtggcgacatcgatacacccggggaatatttcagccatccgcgctggtatcacgccttaattaccaccttgcaggatgtggacaccctgatttatgtccatgcggccaatgataccgaaagtcgcctgccacccgggttgctggatattggcagccgaaagcaccttatcgtggcgatcagcaaaacggatctgccggatgccaatgtcgccgcggtgcggcagctgctggacgggatggggtttcaggcgccggttttcgccctcaacggttgcgatccgcaaagcgttgcgccgctggaaaattacttgagtgagctcagccaaaaggaggaagggccaggtgaagaaactcattaccgctaa

SEQ ID NO: 211175 - DNA, 690 bp, Klebsiella pneumoniae
gtgaagaaactcattaccgctaacgatattcgtgccgcccacgcgcgcggcgaacaggcgatgtcagtagttctgcgcgccagcattatcaccccggaagcgcgcgaagtcgccgagctgctgggattcactatcaccgaagacgatggcgccgcgccggcggcgacagcggcggacagcgacaaaacggaaagccagcggatccgggaaaccatcctggcgcagctgccggaaggccagtttaccgaaagcctggtggcgcagctgatggaaaaggtgatgaaggagaagcagtccctggagcaggaggcgatgcagccgggatttgactccgtgaccggcaaaggcggcatcaaagtgatcgacggcagcagcgtgaagtttggccgcttcgacggcgcccagccgcactgcgttggcttaacggacctggtgactgaccaggatggcagcagcatggcggccggatttatgcagtgggagaacgccttcttcccgtggacgctgaactacgacgaaatcgatatggtgctggagggcgagctgcatgtgcgccatcagggggaaacgctggtcgccaaagcgggggacgtcatgttcatcccgaaaggctccagcatcgaattcggtaccccgtcgacggtgcgcttcctgtacgtcgcctggccggcaaactggcaatcgctatga

SEQ ID NO: 211176 - DNA, 807 bp, Klebsiella pneumoniae
atgaacgatttcattaccgaagcgtggctcagagcgaatcatacgctcagcgaaggcggtgaaatccatcttcctgccgatgcccgcctgacgccctcggcgagggaactgctggaaagtcggcatctgcgggtcaaatttctcgaccgccaggggcgcctgtttgtcgaggatgacgaacagacgccgcagccggtgcatgtcctgaccagcagcgaccatccgccccaggcctgctgcgagctttgtcaccagccggtgggcaaaaagccggacaccttaactcatctgacggccgataccctggtggcgaaaaacgatccgcggctggccttccgcgcggtgctggacagcaccatcgccctgacggtgtggctgcaaattgaactggcggagccctggcagccgtggctgacggatatccgttcgcggctgggcaacatcatgcgcgccgatgcgctggaggaaccgctggcggcgcagtcgatagccggattcagcgaggcgcagctgcatcgtctgtcccatcagccgctgcgttacctgggtcacgatcacctggtgccggaggcccgccatgggcgcgatgtcgcgctgcttaatttgctgcgcggcaaagtgcgcgaggcggaggtgaccgcggcgcaggtgtttattacgccgcaatttgcggtccagcgtgccgatattctacaggcgctcaaccgcctctccagcgcggtctacgtgatgatgatcctgggcgtgacggacgcgccgccggcgctcagccaactgcagcagctgggaggtgaagatgatcattga

SEQ ID NO: 211177 - DNA, 1017 bp, Klebsiella pneumoniae
atgatcattgaccagtgtcgcaaactggcgctgcgcgcccccgccagggtggtgttcccggatgcgctggacgtccgcgtgttgaaggcggcgcattatctgcagcagcagggcctggcgcatccgatcctcgtcgccagccccttcgcgctgcggcagttcgcccttggcgaacgtctgccgctgaccggggtgcaggtcatcgatccgcacagcaacctggcgatgcgcgagacgtttgccgccgcctggcaggcgcgcgccggcgataaagcgcccgctgacgcggtcgacaagctggccgacccgctgatgttcgccgcggcgatggtcagcgccgggcaggccgaggtgtgtatcgccggaaatctctcgtcaaccgccagcgtgctgcgcgctggtctgcgccttatcggcctgcagccggggtgtaaaacgctctcttcgctgtttctgatgctgccgcagtataccggacagccgctggggtttgccgactgcagcgtggtgccgcagccgaccgcggcgcagctggcggatatcgcgattgccagcgctgagacctggcaagcgatcgctggcgaagcgccgcgggtggcaatgctgtccttctcgacacacggcagcgcccggcatccctgtgtggctaacgtccagcaggccacggagatcgtgcgtcagcgggcgccgcagctgatggtcgatggcgagctgcagtttgacgccgcctttgtaccggacgtcgctgcgcacaaagcgcccggcagcccgctgcagggccgggccaatgtgctggtcttcccgtcgctggaggcgggcaacatcggctacaaaatcgcccagcggctgggcggatatcgcgccatcgggccgctgatccagggcctggccgccccgcttcacgacctctcgcgaggctgtagcgtagaggaaattatcgaactggcgctggtggcgtcggtaccgcgccagacggacgcaagccggatccccgactcgtccacgctggttgaatga

SEQ ID NO: 211178 - DNA, 291 bp, Klebsiella pneumoniae
atggaagcattaggaatgattgaaacccggggcctggttgcactgattgaggcctccgacgccatggtcaaagcggcccgcgtcaagctggtgggagtgaaacagatcggcgggggcctggtgaccgccatggtgcgcggcgatgtcgcggcgtgcaaagccgcgacggatgccggggcggcggcggctcagcgtatcggtgagctggtctctgtacatgtcatcccgcgcccgcatggcgatctggaagaggtcttcccgattagcttcaagggcgacagtaacatctaa

SEQ ID NO: 211179 - DNA, 288 bp, Klebsiella pneumoniae
atgaagctggctgtggtaaccggatatgtggtctgcaccgtacgccatgaaggtctggcccacgacaaactgctgatggtggagatgctcaatgcccgcggcgagcccgacgggcaatgcgcggtcgccatcgacagcatcggcgcgggatgcggagagtgggtactgctggtcagcggcagctcggcgcgacaggcgcacgcacacggcgcctctccggtcgatctgtgcgtgattggtatcgtggatgaggccgcggccgatggtcaggtgctcttccataagtag

SEQ ID NO: 211180 - DNA, 1404 bp, Klebsiella pneumoniae
atgaatcaacaggacattgaacaggtagtgaaagcggtactgctgaaaatgaaagacagcagccagcctgccggcaccgttcatgatatgggcgtttttgcctcactggatgacgctgtcgcggcggcaacggtggcccagcagggattaaagcgggtggcgatgcgtcagcaggtgattcaggccattcgtgaggcgggtgaaaagtatgcccgtgaactggcggagcttgcggtgacggagaccggcatgggacgcgttgaagataagtttgccaaaaacgtggcgcaggcgcgcggcacgccgggcgtggagtgtctgactccgcaggtgctcaccggcgataacggcctgacgctgattgaaaatgcgccctggggcgtggtggcctcggtgacgccgtccaccaatccggcggcgacggtgatcaacaacgccattagcctgatagccgccggcaacagcgtggtcttcgccccccatccggcggcgaaaaaggtctcgcaaagggcaattaccctgcttaaccaggcggtagtggccgccggcggcccggccaacctgctggtgaccgtggcgaacccggatatcgacaccgcccagcggctgtttaagtaccctggcatcggcctgctggtggtgaccggcggcgaagcggtggtcgaggcggcgcgcaaacataccaacaaacgcctgatcgccgccggggccggcaacccgccggtggtggtggatgagaccgccgatctgccgcgcgccgcgcaggcgatcgtcaaaggcgcctcgtttgataacaacattatctgcgccgacgagaaggtgctgatcgtggtcgatagcgtcgccgacgaactgatgcgcctgatggaaggccagcaggcggtgaaactcacggcggcgcaggccgaacagctccagccgctgctgctgaaaaatatcgacgagcgcggcaaaggcacggtcagccgcgactgggtcggccgcgatgcgggcaaaatcgccgcggcgattggcctgcaggtgccggcgcaaacccgtctgctgttcgtggaaacccccgccagccatccgtttgcggtgactgaactgatgatgccggtgctgccggtggtgcgggtggcgaacgtcgaggaggccatcgccctggcggtgcaactggaaggcggctgccaccatacggcggcgatgcactcgcgcaatatcgacaacatgaaccagatggcgaacgccatcgacaccagcatcttcgtcaaaaacgggccgtgcatcgccgggcttgggctgggtggcgagggctggaccaccatgaccatcaccaccccaaccggggaaggggtgaccagcgcgcggaccttcgttcgtctgcgccgctgcgtgctggtggatgcgtttcgaatcgtataa

SEQ ID NO: 211181 - DNA, 840 bp, Klebsiella pneumoniae
atggcgcacgacgaacaacgctggctttcgccgagactgcaaaaagccgctgccctgtgtaaccaggagcccgccgccagcgagtcgccgctgtggctgggcatcgatttgggcacctgcgacgtggtgtcgatggtggttgaccgtgacggccagccggttgcggtatgccttgactgggccgacgtggtgcgcgacggcatcgtctgggatttctttggcgccgtcaccctcgtgcgccgacatcttgcgactctcgagcagcagctgggctgccgcttcacccatgcggcgacctcgtttccgcccggaaccgatccgcgcatttcgatcaatgtcctggagtccgccgggctggagatcagtcatgtgctggatgagcctaccgcggtggccgatctgctgcagctcgataacgccggggtggtggatatcggcggcggcaccaccgggatcgccatcgttaaacagggcagggtgacgtattcggcggatgaagccaccggcggccaccatatctccctgactctggccgggaatcgcggcatcgggcttgaggaggcggagcagtacaagcgcagccacgccggggagatctggccggtggttaagccggtgtacgagaagatggccgaaattgtcgcccgacatattgccggacaagggattgtcgatttgtggctggcaggcggcgcctgtatgcagccgggtgtgcatgagctgtttcgtcagcgcttcccggcattaccggtgcatttgccgcagcacagcctgtttatgaccccgctggcaatcgccaacagcgggagggaaaaagcggaggggatgtatgcaagctga

SEQ ID NO: 211182 - DNA, 1188 bp, Klebsiella pneumoniae
atgcaagctgaactgcagacggcgctgttccatgcctttgatacgctgaatcttcagcaaatgaaaagcttcaacgttccgccggtgacgctgcacggcgtcggcgcgctggcggcctgcggtccgcaagcgcagtcccgaggccttaggcatctgtttgtcatggttgacagttttctccatcaggcgggaatgaccgccgggctggagcgtagcctggcgatgaaagggattgctatgactctctggccctgtcccgccggcgaaccctgcgtcaccgatgtctgcgccgccgtcgcccagctgcgggacgcgcgctgcgacggcgtggtggcctttggcggtggatcggtactggatgcggcgaaggcggtggcgctgctggtcgccaatcctgagcagacgctgggggagatgacggagcacagcgagttgcgtccacgtctgccgctaatcgcggtgccgaccaccgctggtaccgggtctgaaaccaccaatgtgacggtgattatcgatgcggtgagtggacgcaaacaggtgctggcgcatgcctcgctgatgccggatgtggcgatcctcgacgccgcgctgaccgagggcgtcccgccgcatatcacggcaatgaccgggattgatgcgctgacccacgccgtcgaggcctacagcgcccgccacgccacgccgtttaccgacagtctggcgatgggggcgatagccatgatcggcgaggcgctgccgaaagcggtgggctgcggtcaggatctggcggcgcgggagaatatgctgctggcttcctgcatggcggggatggcgttttccagcgccgggctggggctatgccatgccatggcgcatcagccgggggcggcgctgcatattccgcacggtctggccaacgccatgctgctgccaacggtgatggagtttaaccgcatggtacgccgggcgcgcttcagccagatcggccgggcgttaaccggcaagaaaaccgatgaccgcgaggctatcgccgccgtgcgcgagctgatcgccgaggtcggtctgacgatgcggctgacggaggctggcgcgacgtccgcgcactacgacgcctgggcgcaagcggcgcaggaggacatctgtttgcgcaccaatccacgcaccgccagccgggagcagattatcgagctgtacgcggcggcgcgataa

SEQ ID NO: 211183 - DNA, 1233 bp, Klebsiella pneumoniae
atgggaattaacgaaatcatcatgtacatcatgatgttctttatgctgattgccgccgtggacaggatcctgtcgcagttcggcggctcggcgcgctttctcggcaaactggggaaaagcattgagggatccggcggtcagtttgaagaagggtttatggcgatgggcgcgctgggcctggcgatggtcgggatgaccgccctggcgccagtgctggctcatctgcttggtccggtgattattccgctgtatgagatgctcggcgccaacccgtcgatgttcgccggcacgctgctggcgtgcgacatgggcggtttcttcctcgctaaagaactcgcgggcggcgacgtggcggcctggatgtactcaggcctgatcctcggctctatgatgggtccgaccattgtgttctccattccggtggcgctcggcattatcgaacctgccgatcgccgctggctggcgctcggcgtgctggcgggcattgtcaccattcccatcggctgtatcgccggcggtctggtggcgatgtattccggggtggagatcaacggccagccggtagagtttaccttcgcgctgatcctgatgaatatgatcccggtgatcatcgtcgccgtgctggtggcgctggggctgaagtttattccggaaaaaatgatcaacggcttccagatcttcgccaaattcctcgtggcgctgatcaccatcggcctggcggcggcggtgatcaagttcctgctcggctgggagctgatcccggggctcgatccgatctttatggcgcctggcgaccagcccggcgaggtgatgcgcgccatcgaagtcattggctctatctcctgcgtgctgctcggcgcttacccgatggtgctcctgctgacccgctggtttgaaaagccgctgatgcgcgttggtaatctgttaaaaatcaacaatatggctgccggcggcatggtcgctaccctggcgaacaatatcccgatgttcggcatgatgaagcagatggatacccgcggaaaagtgatcaactgcgccttctcggtgtcagcggcgttcgccctcggcgaccatctcggttttgcggcggccaatatgaacgccatgatctttccgatgattgtcggcaagctggtcggcggcgttaccgcgattggcgtggcgatgctgctggtgccaaaagatgaaaacgtaccggcgcctgccaacaacgaagcggaggcgcactcgtga

SEQ ID NO: 211184 - DNA, 1404 bp, Klebsiella pneumoniae
gtgaacacgcgccagctgttgagcgtcggtattgatatcggcaccaccaccacgcaagtgatcttctcgcgcctcgagctggtgaaccgcgcggcggtttcccaggtgccgcgctacgaattcatcaaacgcgacattagctggcaaagcccggtcttctttacgccggttgataaacagggagaactgaaagaggccgagcttgaggcgctgattctggctcagtaccgggccgcagggatcgctccacaagcggtggattccggggcgatcatcatcaccggcgaaagcgcgaaaacccgcaatgcccgcccggcggtgatggcgctctcgcagtcgctaggcgattttgtcgtcgccagcgccgggccgcatctggagtcggtcattgccggacacggcgccggggcgcagaccctgtcccggcagcggatgtgccgggtgctcaatatcgatattggcggcggtacctcgaactatgccctgtttgacgccggaaacgtcagcgccaccgcctgcctcaacgtcggcggccgcctgctggaaaccgacgctcaggggcgcgtggtccacgcgcatccgccggggcagcggattgtcgatgcgctgtttggcgccggcactaacgcccaggcgctgaccgccgggcagctggcgcaggtggcgcgccggatggcggcgctgatcgtcgaggtgatcgagggcaccctctcaccgctggcgcaggggctgatgcaaaccgaagtactgcctgcgggtgttcagccggaggtgattaccctttccggcggagtgggggagtgctaccgccatcagcccgccgatcctttctgcttttccgatatcgggccgctgctggccacggccctgcacgagcatccgcgcctgcgtgagatgaacgtgcagttcccggcgcaaaccgtgcgcgccacggtgattggcgccggggcgcatacgctgtccctgtccgggagcaccatctggctggagggggttccattgccgctgcgcaatctgccggtggctatcccgcaggatgccgccgatctgccgaacgcctggctccaggcgctaacgcagctcgatctggcccccgaggcggacgcttacgtgctggcgcttcccgcttcacttccggtgcgctacgccaccttactgaccgtaattgacgccctgctggcgtttgtcgcccgctttcccaatccccgtccgctgctgctggtggccgagcaggattttggcaaagcgctgggcatgctgctgcggccacagcttccacaccttccgctggcggtcatcgatgaggtgagcatccgggcgggagactatatcgacattggtacgcctctttttggcggatcggttgtgccggtgacggtgaaatcactcgcatttccttcctga

SEQ ID NO: 211185 - DNA, 1362 bp, Klebsiella pneumoniae
atgaaactaaagaccacattgttcggcaatgtttatcagtttaaggatgtaaaagaggtgctggcgaaagccaacgaactgcgttcgggggatgtgctggcgggggtagcggcggagagttcgcagcagcgcgtggccgccaagcaggtgctctccgatatgacggtggccgatatccgtaataacccggtgatcccgtatgaggaggactgcgttacgcgcctgatccaggatgacgtgaacgaaaccgcctatcagcggattaaacactggaccatcagcgacctgcgggaatacgtgctcaacgacgaggtcaccagcgacgatatcgcctttgtccgcaaagggctgacctccgaggtggtggctgcggtggccaagatctgctccaacgccgatctgatctacggcggtaaaaaaatgccggtgatcaaaaaagccaataccaccatcggtctgccggggacctttagctgccgcctgcagccgaacgatacccgcgacgatgtgcagagtattgccgcgcaaatctatgaagggctctccttcggcgcgggcgacgcggtgattggcgtcaacccggtcactgacgacgtggagaacctgagccgggtgctggatacggtgtacggggtgatcgacaagtttaacatcccgacccagggctgcgtgctggcgcacgtcaccacccagattgaagccatccgccgcggcgcgccgggggggcttatcttccagagcatctgcggcagtgaaaaagggcttaaagagttcggcgtcgagctggcgatgctcgatgaagcgcgggcggtgggggcggagtttaaccgcatcgccggggagaactgtctttactttgaaaccgggcagggctcggcgctttccgctggcgctaacttcggcgccgaccaggtgaccatggaagcgcgtaactatggcctggcgcggcactacgatccgttcctcgtcaacaccgtggtgggctttatcgggccggagtatctctataacgaccggcaaatcattcgcgccggactggaagaccactttatgggcaagctgagcggcatctcaatgggctgcgactgctgctataccaaccatgccgatgccgaccagaacctcaacgaaaacctgatgatcctgctggcgaccgcaggctgcaactacatcatgggcatgccgctcggcgacgacatcatgctcaactaccagaccaccgccttccacgataccgcgaccgtgcgccagctgctgggcctgcggccgtcgccggagtttgaacgctggctggaaacgatgggcattatggcaaatggtcgcctgaccaaacgggcgggcgatccgtcactgttcttctga

SEQ ID NO: 211186 - DNA, 900 bp, Klebsiella pneumoniae
atggatcaaaaacagattgaagacattgtacgcagcgtaatggcatcaatgggacaaccacagtcgcagccgcaggcccccgcagcgtcgactccggcctgccatgccgcctgcgccagcgaagcggtggtggaaagctgcacgctggacctgggctcagcggaagcgaaagcctggattggggtacaacatccgcaccgcgccgaagtactgactgaactgaaacgcagtaccgcggcgcgcgtttgcaccggccgcgccggcccgcgtccgcgcactcaggcgctgctgcgcttcctggccgatcactcgcgctcgaaagacacggtgctcaaagaggtgccggaagcgtgggtgaaagcgcaggggctgctggaagtgcgttccgagattagcgataagaacctctacctgacgcgtccggatatgggccgtcgcctcagtccggaagcgattgatgcgctgaaggcgcagtgcgtgatggatccggatgtgcaggtggtggtgtccgatggcctgtcgacggatgccatcaccgccaactacgaagagatcctgccgccgctgcttaccggcctgaaacaggcgggtctgaaggtcgggacgccgttcttcgtgcgctatggccgcgtcaagattgaagatcagatcggcgagatcctcggcgcgaaggtggtgatcctgctggttggcgagcgcccggggctcggccagtcggagagcctctcctgctacgcggtgtactccccgcgggtggcgaccaccgtcgaggccgaccgaacctgtatctccaatatccaccagggcggcaccccgccggtagaagccgccgcggtgatcgtggatttagccaaacgcatgctggagcagaaagcctccggcatcaacatgagccgttaa

SEQ ID NO: 211187 - DNA, 660 bp, Klebsiella pneumoniae
atgccagcattagatttgattcgcccctcggtcaccgcgatgcgcgtgattgcctcggtgaatgacggtttcgcgcgcgagcttaaattaccgtcgcatatacgtagcctcggactcatcacggcagattctgacgatgtgacgtatattgccgccgacgaagcgacaaagcaggcgatggtggaggtggtctatggccgctccctctacgccggtgcggcccatggtccgtcgcctaccgccggcgaagtactgatcatgcttggcggcccgaacccggcggaagttcgcgccgggctggatgccatgatggcgcatattgaaggtggggcggcattccagtgggctaacgacgcgcaagataccgcgtttctggcgcacgtggtgtcgcgtaccggctcttatctttcatcggccgctggcatcgcgttgggcgatccgatcgcttatctggtggcgccgccgctggaggcgacgtttggtatcgatgcggcgatgaagtcggccgacgttcagctggtgacctacgtcccgccgccatcggaaaccaactattcggccgcctttttgacgggaagccaggccgcctgtaaagccgcctgcaatgcctttaccgatgccgttctcgatattgcccgtcatcctgtacagcgtgtgtaa

SEQ ID NO: 211188 - DNA, 486 bp, Klebsiella pneumoniae
atgatcaatgcgctgggattgctcgaagtggagggcatggtcgcggctgtagacgctgcggatgccatgcttaaggcggccaatgtgcgcctgctcagtcatgaagtgctcgacccgggcaggttaacgctggtggtggagggcgacctggcggcctgccgcgccgcgctggatgctggggccgccgctgcccggcggaccggctgcgtgatcagccgtcgggaaattggccgcccggaagaggatacccagcggctgatcggcggttttcagccaccgccgccagcgcccatgccgccagctgacccggcttcatcggaagccttactgacgctgctggcttcagttcgtcagggcatgacggccggcgaggtcgccgcgcattttgcctggccgctggataaggcccgccaggcgctggagcagctcttttccgcagggacgctacgaaaacgcagtagccgctatcgtctcaaaaatccataa

SEQ ID NO: 211189 - DNA, 1053 bp, Klebsiella pneumoniae
atgaaaaagcgtcgttctgcaaatttgcaccatctctgttgcgaggcgttgccggaagacaccaggctgacgcctcaggttgaaattgacaatattcatcaacgacacacaaccgatgtgtatgagcacgccctgaccattaccgcctggcaacagatctacgatcagctgcatccggggcagtttcgcggcgagtttaccgaaatcctgctcgatgagatccaggtcttccgcgaatataccgggctggcgctgcgccagtcctgcctggtctggccgaactccttctggtttggcattccggcgacccggggtgaacaggggtttatcggctcgcagtgtctgggccgggcagaaatcgccacccgtcccggcggtacggagttcgagctcagcacgccggatgattacaccattctcggggtagtgatttcgcaggaggtgattgcgcgtcacgccagtttcctgcaccacccggagcgagtgctacatatgctacgcaaccagtcagcgctggcggtccgcgagccgcataaggccgcgctgtgggggtttgtccagcaggcgctggccacctttagcgagcatccggatacccttcatcagccggccgtgcgtaaggtcctgcgggataatctgttgctggcgatgggcacgatgctggaagaagcgcagccgatggtaagtgcagagagcgtcagccaccagagctaccgccgcctgctggcgcaggcgcgcgaatatgtgctggaaaacagcgcggagccgttaaccgttctcgatctgtgccagcagctgtacgtcagccgtcgcaccttgcagaacgccttccatgcgatactggggattggtcctaacgcctggctcaaacggatccgcctgaacgctgtgcgtcgggagctgataagcccctggtcagagcgcgagacggtcaaggaggcggccatgcagtggggattctggcatttggggcagttcgccaccgactatcagcagctgtttgctgagaaaccgtcgatgacgctgcaccatcgcctgcgccagtgggtgtga

SEQ ID NO: 211190 - DNA, 900 bp, Klebsiella pneumoniae
atgaaacccgatgccgcgcaggtaaaaacttttctgctccagctccaggacaacctctgtcagcagctgagcgccgtggatggcgcgccgtttattgaagatgcctggcagcgggaaggcggtggcggcggacgcagccgggtgctgcgcgaaggccgggtgttcgagcaggcgggggtcaacttttcccacgtccatggcgacgccatgcctgcctccgccaccgcgcaccgcccggagctggccggacgcagttttgaagccatgggcgtctcgctggtggttcatccgctgaacccctacgtgcccaccagccatgccaacgtgcggttctttattgccgaaaagcctggcgccgacccggtgtggtggttcggcggcggctttgatttaaccccttactacggctttgaagaggatgccgtccactggcatcgtaccgcccgcgatctgtgtctgccgttcggcgaggaagtctatccgcgctataaaaaatggtgcgatgattacttctatctcaagcaccgccaggagcagcgcggcatcggcggtctgttctttgacgacctgaacaccccggattttgaccactgcttcgcctttatgcaggcggtcgggaacggctatgctgacgcctatttacctatcgtcgaacgccggaaagccacgccgtacggcgaacgcgagcgccactttcaactctaccgtcgcggccgctatgtcgagttcaatctggtctgggaccgcggcaccctgttcggcctgcagaccggcgggcgtacggagtcgattctgatgtcgatgccgccgctggtgcgctgggaatatgattatcagcccgagcccggcagccccgaggcggcgctgagcgagtttattcaggtgcgcgactggctgtaa

SEQ ID NO: 211191 - DNA, 873 bp, Klebsiella pneumoniae
atgagcacttttaaacctttaaaaatacttgcttcgcgccgtcaggtgctgaaagccgggctggctgcgatgacgctgagcggcgtcgcctcacaggtcagcgcaaaagaacagccactgaaaacgtcaaatggacatagcaaacccgccgccaaaaaggccgggggtcgccggattgtaatgttagatccgggccacggcggcatcgataccggcgctatcggccataacggctcgaaagagaagcatgtggtgttggcgatcgctaagaacgtgcgcagcattttgcgcagcaacggcatcgacgcccgcctgacccgcaccggggatacctttatcccgctgtacgaccgcgtggagatcgcccatcagcacggcgccgatctgtttatgtcaatccacgccgatggttttaccaacccgagcgccgccggcgcctcggtgttcgccctgtcaaaccgcggcgccagtagcgccatggcgaaatacctctccgatcgcgaaaaccgcgccgatgaggtcgccggtaagaaagcgacggataaagaccatctgctgcagcaggtactgttcgatctggtgcagaccgacaccatcaaaaacagcctgacgctgggctcgcatatcctgaaaaagatcaagccggtacataagctacacagccgcaataccgagcaggcggcgttcgtggtgctgaagtcaccatccataccgtctgtgctggtggaaacctcgtttatcaccaacccgaacgaggagaaactgctcggcaccaccgccttccggcagaaaatcgccaccgcgattgccaacggcattatcagctatttccactggttcgataaccagaaagcccattcgaagagacgttaa

SEQ ID NO: 211192 - DNA, 426 bp, Klebsiella pneumoniae; identical to SEQ ID NO: 135161

SEQ ID NO: 211193 - DNA, 450 bp, Klebsiella pneumoniae; identical to SEQ ID NO: 135162

SEQ ID NO: 211194 - DNA, 576 bp, Klebsiella pneumoniae
atgaaatcgctacgtgtaatgctctgtgcgcttccgctggcgctgaccggctgctccacgatgagcgcagtcaactggtcggcggcctatccgtggaactggtttggcgcttccaccgaggtgaccgagcagggagtgggtaaactgacggcttccacgccgctcaatgaacaggcgattagcgatgcgctgggcagcgactaccgtttacgcagcggaatgaagaccgataagggcaatatcgtccactactttgaagcgctgaaaaacaacagcgtggcgctgaccatcaatggcgacaacggtgctatcagccggattgacgtgcgtgatgcggatatcaaaaccgccagcggcgtgaaaatcggcacaccgtttagcgacctgtacagcaaagccttcggcaactgccagaaaggcagccatgacaacggggcggtcgtcgagtgtcaggccgaggggagccagcatatcagctatgccttcactggccactggagcggtccggacgagctgatgccctccgacgatacgctgaaaaactggaaggtcagcaagattatctggcgtcgctaa

SEQ ID NO: 211195 - DNA, 900 bp, Klebsiella pneumoniae
atgtctcaggttcagagcggcattttgccggaacattgccgcgcggcgatttggattgaagccaatctcaaaggggacgttaacgccctgcgcgaagcgagcaaaatttttgtcgataacgtggccaccttccaggctaaattccctgacgccaaactcggtgcggtggtggcgttcggcaataacgtctggcgtcagctgagcggcggcgaaggggcggatgagttaaaagatttcccggtctatggcaaagggctggcgccgtccacccagtatgacctgctgattcatattttatccgcccgtcatgaagttaacttctcggtggcgcaggccgcgctggccgcctttggcgacgctatcgacgtgaaagaagagatccacggcttccgctgggtggaagagcgtgacctcagcggcttcgtcgatggcaccgaaaacccggcgggggaagaaacccgccgcgaagtggcggtcattaaagacggcgtggatgcgggcggcagctacgtgttcgtccagcgctgggagcataatctcaaacagctgaaccgcatgagcgtgccggatcaggagatgatgatcggccgtacaaaagacgctaacgaagagatcgatggcgatgaacgtccggtcacgtcgcacctgagccgcgtggacttaaaagaagatggcaaagggttgaaaatcgtccgtcagagcctgccgtacggcaccgccagcggcacccatggcctctatttctgcgcctactgcgcgcgcctgtataacatcgagcagcagctgctgagcatgtttggcgataccgacggtaaacgcgacgcgatgctgcgcttcaccaaaccggtgaccggcgggtattacttcgcgccgtcgctggagcgtatccaggcgctgtaa

SEQ ID NO: 211196 - DNA, 1017 bp, Klebsiella pneumoniae
atggccgttaaatcactgaaaaaaggatatctggcgctggcggcttccatgctgctggtggcgcaggcgcaggcgacggagctgctgaacagctcctatgatgtctcccgcgagctgtttgccgcccttaacccgccttttgagcagcagtgggcgaaagacaatggcggggacaagctgaccatcaagcagtcgcatgccggttcatccaagcaggcgctggctattttgcagggcctgaaggcggacgtggtcacctacaaccaggtgacggacgtgcagatcctgcatgacaaaggcaacctgatcccggccgactggcaaagccgtctgccgaacaacagctcaccgttctattcgacgatgggtttcctggtgcgtaaaggcaatccgaaaaacattcatgactggaacgacctggttcgctctgacgttaagctgatcttcccgaatccgaaaacctcgggtaacgcccgatacacctacctggcggcatggggcgcggcggataaagctgatggcggcgataaagctaaaaccgaacagtttatgactcagtttctcaagaacgtcgaagtctttgacaccggcgggcgcggagcgaccaccaccttcgccgagcgcggcctcggcgatgtgctgattagcttcgaatcggaagtgaacaataatcgcaagcagtatgaggcgcagggatttgaagtggttatcccgaaaaccaacattctggcggagttcccggtagcctgggtcgataaaaacgtcaaagccaatggcacggaaaaggcggcgaaagcctacctgaactggctctatacgccacaggcgcaaactatcattaccgactactactatcgggtaaacaacccgaaagtgatggatgctctgaaggataaattcccacagaccgagctgttccgcgtggaagataagtttggctcctggcctgaggtgatgaaaacccacttcgccagcggcggcgaactggacaaactgctggcggcggggcgtaagtaa

SEQ ID NO: 211197 - DNA, 834 bp, Klebsiella pneumoniae
atgtttgctgtgtcgtccaagcgcgtgctgccgggttttaccctgagccttggcaccagcctgctgtttgtctgtctgattttgttattaccgctcagcgcgttggtgatgcagctggcgcagatgagttgggcgcagtactgggatgtgatcaccaacccgcaggtggtggctgcctataaggtgacgctgctgtcggcgtttgtggcctcgatttttaacggcgtctttggtctgctgatggcctggatcctgacccgctatcgttttccgggccgcacgctgctggatgccttaatggacctgccgtttgcgctgccgacggcggtagccggtctgaccctggcctcgctgttttcggtgaacggtatttacggggaatggctggcgaagttcgatattaaagtcacctatacctggctcggcatcgccgtggcgatggccttcaccagcatcccgtttgtggtacgcaccgtgcagccggtgctggaagagttggggcccgagtatgaggaagcggcggaaacgctgggcgctacgcgctggcagagtttccgcaaggtggtgctgccggagctgtcgccggcgctgctggcgggcattgctctgtcgtttacccgcagcctcggcgaattcggcgcggtgatttttatcgccggcaacatcgcgtggaagacggaagtgacgtcgctgatgatctttattcgtctgcaggagtttgactatccggcggcgagcgccatcgcctcggtgatcctggccgcctcactgctgctgctgttttccatcaataccctgcagagtcgctttggtcgacgcgtggtaggtcactaa

SEQ ID NO: 211198 - DNA, 876 bp, Klebsiella pneumoniae
atggcggaagttactcaattgaaacgctacgacgcgccccgtatcaactggggaaaatggtttctgattggcgtcgggatgctggtctccgccttcatccttgtggtgccgatgctctacatctttatccaggccttcagcaaaggattgatgccggtgctggaaaacctggcgaacccggacatgctgcatgccatctggctgacggtgatgattgcattgattaccgtaccggtgaacctggtgttcggtaccttgctggcctggctggtgacacgttttacctttccggggcgccagctgctgctgacgttgctggatatcccgttcgccgtctcgccggtggtggccggtctggtgtatctgctgttttacggctctaacggtccgctgggcggctggcttgacgcgcataatctgcaaatcatgttcgcctggccaggcatggtgctggcgaccatctttgttacctgtccgtttgtggtgcgtgagctggtgccggtgatgatgagtcagggcagtcatgaagatgaggccgcggtgctgctgggcgcgtccggttggcagatgttccgccgggtgacgttgcccaatattcgctgggcgctgctgtacggcgtggtgctgaccaacgcccgcgccatcggcgaatttggcgcggtgtcggtggtttccggctcgatccgcggcgaaacgctgtcgctgccgctgcaaattgaactactggagcaggattacaacaccgtcggctcgtttaccgccgccgccctgctgacgttaatggctattctgaccctgtttttaaagagtatgttgcaatggcgtctggccaatcagaaagaacgcgcgcaacaggagggaaatcatgagcattga

SEQ ID NO: 211199 - DNA, 1095 bp, Klebsiella pneumoniae
atgagcattgagattgccaatattaagaaatcgtttggtcgcacccaggtgctgaatgatatctcgttggatatcccttccggacaaatggttgcgctgctggggccctcgggctccggaaaaaccaccctgctgcgaattatcgccggtctggagcatcagaccagcggtcatatccgcttccacggtaccgacgtcagtcggatgcacgctcgcgaccgtaaagtgggcttcgttttccagcactatgcgctgttccgccatatgacggtgttcgataacatcgcctttggcctgaccgtgctgccgcgccgcgaacgccccaatgcggcggcgattaaagccaaggtgaccaaactgctggagatggtgcagctggcccatctggcggatcgctatccggcgcagctgtccggaggccagaagcagcgcgtggcgctggcgcgcgccctggcggtggagccgcaaattttgctgctggatgaacctttcggtgcgctggatgcgcaggtgcgtaaagagctgcgccgctggctgcgtcagctgcatgaagagctgaaattcaccagcgtgttcgtcacccacgatcaggaagaggcgatggaagttgccgaccgggtggtggtcatgagccagggcaacatcgaacaggccgatgccccggagcgcgtatggcgtgagccgtctacccgtttcgtgctggagtttatgggggaagtgaaccgcctgcagggggtcatccgcggtggacagttccacgtcggcgcccaccgctggccgttaggctataccccggcataccaggggccagtggacctgttcctgcgcccgtgggaagtggacatcagccggcggaccagcctggattcgccgctgccggtgcaggtcctggaggccagtccgaaagggcactacacccaattagtcgtccagcctctggggtggtatgacgaaccgctgagcgtggtgttaacgggcgacgaggcgccgtcccgcggcgaacggctgttcgtcgggctgcaaaacgcgcgtttgtacaacggtaccgagcgtatcgagccgcgcggcgagcttgctctggcggagtcggcctga

SEQ ID NO: 211200 - DNA, 912 bp, Klebsiella pneumoniae
gtgaatacactcgaacaaaccatcggcaatacccctctggtcaaacttcagcgtctgggaccggacaacggcagcgaagtctgggtcaaactcgaaggcaataatccggccggctcggtgaaagatcgcgccgcgctgtcaatgatcgttgaagcggaaaagcgcggcgaaattcagcccggagacgtgctgatcgaagcgaccagcggcaacaccggtattgcgctggcgatgatcgccgcgctgaaaggctaccggatgaagctgctgatgcccgacaacatgagccaggagcgtcgggccgcgatgcgcgcttacggcgccgagcttatcctggtcagcaaagagcaagggatggagggtgcccgcgacctggctctggagatggcccagcgcggcgaaggcaaactgctcgatcagtttaacaacccggataacccctacgcccactacaccaccaccggcccggaaatctggcagcagaccgcggggcgtatcacccactttgtctccagtatggggaccactggcaccattaccggcgtgtcacgttttctgcgtgaacagagtagaccggtgaccattgttggcctgcagccggaggaggggagcagtattcccgggatccgccgctggccggcagagtatatgccggggatctttaacgcttcgctggtggatacggtgctggatattcatcagcaggatgctgagaacaccatgcgtcagctggcggtgcgggaaggcattttctgcggcgtcagttcgggcggcgcggtagcgggcgcgttacgcatagcccgcgaaaatcctggcgcggtggtggtggcgattgtctgcgatcgcggcgatcgttacctttccaccggcgtcttcggcgaagaacactttagccagggggcgggcatttaa

SEQ ID NO: 211201 - DNA, 396 bp, Klebsiella pneumoniae
atgcgtcaccctgacctggcactgaaagcagtcattgaagcctgcgatcgcgctatctcgcaggaagattacgataccctgatgagttattacgcagaagacgccgcgctggtcgtcaaaccgggcatggtggtcagagggaaagagaatatccgcaaagcctttatcgccattgccgactatttccagcaccgactggtggtgactcaggggaaaatggaggttattgaaggcggcggcaatgcgctggtgattatggagacccggctggatatcccgacggcggacgggatatcccaggttacgcgacgcgccacctatgtctttcagaagcagggcgaacgctggctgtgcaccgtcgataactcctacggcaccgacctgcttgatgattaa

SEQ ID NO: 211202 - DNA, 1299 bp, Klebsiella pneumoniae
atgttagccggaaaaaccgccagcgaaatcttcgataacatccgccatctggtgcagagcggcgggttgcagcccggagaggttctgccgccggtacgtgaactcgccagccagcttgcagtgaatcgcaacactgtcgccgccgcctataaacggctggtgacctccgggctggccgtcagtcagggacgcaacggtacagccattaaagcgcgggacacactgccggcgctggagggaggtgacccaacgaccccgctgaacgatatctccagcggcaatccggatccggccagactgcctgatttaccccgctatctgggccagattgcccgcacgccccgcctgtatggcgatgcgcccatcgagccgcggcttggccaatgggccgaggcgtggtttgccagagagatagccgttccctttgcggtgaatctcgccagcggggcgatagacgccctggagcgcctgctgtgcgctctgctgctccccggcgacggcgttgtggtggaagatccctgttttctcagcagcatcaatatggtgcgttacgccggttttaccccctgcccggtggcggtggatgccgaagggatggatcctgacggcctggaggaggcgttacgcaacggcgcacgggcggtgatcttaaccccgcgcgcgcataatcctaccggctgtagcctgacggaaacccgggcgcatgccctgcgggaggtgctagcccgctatccgcaggtactggcgattgttgatgaccattttgccctgctgtcggccacgccatggcactcccctcttcctgcaagcacccaacgctgggcgctggtgcgctcgatgtcaaaaaccctcggaccagacctgcggctggcctttatcgccagcgatgccgctacttcagcggcgctgcgcctgcggcttaacgccggcagccagtgggtcagccatctgctgcaggacctgacgctggcctgcctgaccgacgaggcgtttatcgcctcgatgacggagactcgtcgtcactatcgccagcagaatgagaaactggcggcggcgctggcccggcacggcttcagccatgctacgccaggggatggcctcaatttctggctgccgctgccagcggcgagccagccctacgccttacgcctggcccgcgccggctggctggtccgggagggagaggtgtttggcatccgtacgccctcccacgggctacgcctgtcgctgggccgtctgagtgacgctgagatttcccgcctggcggccgatattgcgcaggccttagacgccccctga

SEQ ID NO: 211203 - DNA, 867 bp, Klebsiella pneumoniae
atgggccagcaggatgatatacaatcagtgctctttcacgacaaaagccgggcgtcggaagtggatatcgtcgccgtgcagtcgcaggtagtctatggcagcgtcggcaacggcatcgcggttccggcgattaaacagcatggtctgcgcgtgctggcggtgccgacggtgctgttcagtaatacgccccattatgagacgttctatggcggcattattccggaagagtggtttgtcgggtatctgcaggcgctggaggagcgcgacgcgctgcgcgaactgcgtgcggtcaccaccggctatatgggcagcgcagtgcaaatcgaacgcctggcgcagtggctgacgcgcgtacgggcccgccatcccgggttgtgcattctggtggatccggtcatcggcgatgtcgacagcggcatctatgtcaaggctgagatcccggacgcctatcgtcagcacctgctgccgctggcgcaagggatcacccccaatctgttcgaactggagacgctgagcggccagcgctgtcgcgatcggcaggaggcggtcgccgcggcgcgaagcctgctgtcggacaccctcaaatgggtggtgatcaccagcgcgccgggagaggccgattcgacgatcaatgtgctggtggtgacggccgatgcagtggaagtggtggttcacccgcgggtggagacagacttaaaaggaaccggcgatctgttctgcgcggagctggtgagcgggttgctttccggactggcgctgggggcagcgacgcaggctgctgcccagcgcgtgctggaggtgatgaactggactgccgcccaggggtgtgacgaattgatcctaccgccgctggagcaaagcagatga

SEQ ID NO: 211204 - DNA, 240 bp, Klebsiella pneumoniae
atgaaaagctatcggttagtgatccgccagcagggacgcattgttggtcattttgatacgacaggtgaggcggcgctggaggatgcctgcgtggcgcggtcgctgttcggcctggccggtggatatcagtgcgaactgctggtcgctgacagcgagcggcgaattctggagagcaccccggagggattgcgcgtcttgtcccgcgagaagtgctatcgaccggtaacttgcgcggtataa

SEQ ID NO: 211205 - DNA, 510 bp, Klebsiella pneumoniae
atgggtttgtttgataaattgaaatctctggtttctgatgacaagaaagacaccggaactattgagattgttgctcccctctccggtgagatcgtcaacattgaagacgtgccggatgtggtttttgcggaaaaaattgtgggcgatgggattgccatcaaaccgactggcaacaaaatggtcgcgccggtagacggtaccattggtaaaattttcgaaaccaaccacgcgttctctattgaatctgatagcggcatcgagctgttcgttcacttcggtattgataccgttgaactgaaaggcgaaggcttcaagcgtatcgcggaagaaggtcagcgcgtgaaagtcggcgatccggttatcgaatttgatctgccgctgctggaagagaaagccaagtcgactctgacgccggtggttatctccaacatggacgagatcaaagagctgatcaaactgtccggtagcgtgaccgtgggtgaaaccccggtaatccgcatcaagaagtaa

SEQ ID NO: 211206 - DNA, 1728 bp, Klebsiella pneumoniae
atgatttcaggcattttagcatccccgggtatcgccttcggcaaagcattgctgctgaaggaagatgaaattgtcatcgaccggaagaaaatttctgccgataaggttgatcaggaagtcgaacgtttcctgagcggccgcgccaaggcctccgcccagctggaggtcatcaaaaccaaagctggtgaaactttcggtgaagaaaaagaagccatcttcgaagggcatattatgctgctggaagatgaggagcttgagcaggaaatcatagccctgattaaagataagcacatgactgccgacgcggcagccaatgaagttatcgacggtcaggccactgccctggaagagctggatgatgaatacctgaaagaacgtgcggctgacgtacgtgatatcggtaagcgcctgctgcgcaacatccttggtctggcaatcatcgatctgagtgcgattcaggatgaagtcatcctcgtcgccgccgatctgaccccgtctgaaaccgcacagctgaacctgaaaaaagtgctgggtttcatcaccgatgcgggcggtcgtacctcccacacctctatcatggcgcgttccctggaattgccggccatcgtgggcaccggcagcatcacggcgcaggtgaagaacggcgactatctgattctcgacgcggtgaacaaccaggttcttatcaacccgtctaacgagcaaattgaagcgctgcgtagtctgcaggctcaggttgcggaagaaaaagccgaactggcgaaactgaaagatctgccggcgattaccctcgacggccatcaggttgaagtctgcgccaacattggtaccgttcgcgatgtcgaaggtgctgagcgcaacggcgccgaaggcgtaggcctgtatcgtaccgaattcctgttcatggaccgtgacgcgctgccaactgaagaagaacagtttgcggcttataaagcggtggctgaggcctgtggctctcaggccgttatcgtccgtaccatggatatcggcggcgacaaagagctgccgtacatgaacttcccgaaagaagagaacccgttcctcggctggcgtgccgtgcgtattgcgatggatcgtaaagagatcctgcgcgaccaggttcgcgccatcctgcgtgcctccgctttcggtaagctgcgcattatgttcccgatgatcatctctgttgaagaagtgcgtgcgctgaagaaagagatcgaaatctacaaacaggaactgcgtgacgaaggtaaagcatttgacgaatccattgagatcggcgtgatggtggaaacaccggctgcggcgactattgctcgtcatctggccaaagaagttgatttctttagtatcggcaccaatgatttaacgcaatatactctggcagttgaccgtggtaatgatatgatttcacatctttaccagccgatgtcaccgtctgtactgaatctgattaagcaagttattgatgcttctcacgctgaaggtaaatggactggcatgtgcggtgagcttgcgggcgatgaacgtgctacacttctgttgctgggtatggggctggacgaattctctatgagcgccatttccatcccgcgcatcaagaagattattcgtaatacgaacttcgaagatgcgaaagtattagcagagcaggctcttgctcaaccgacaacggacgagttaatgacgctggttaacaagttcattgaagaaaaaacaatctgctaa

SEQ ID NO: 211207 - DNA, 258 bp, Klebsiella pneumoniae
atgttccagcaagaagttaccattaccgctccgaacggtctgcacacccgccctgctgctcagtttgttaaagaagctaaaggcttcacttctgagatcactgtaacctccaacggcaaaagcgccagcgccaaaagcctgttcaaactgcagactctgggcctgacccagggcaccgtagtgaccctctccgctgaaggcgaagatgagcagaaagctgttgagcatctggttaaactgatggctgaactcgagtaa

SEQ ID NO: 211208 - DNA, 972 bp, Klebsiella pneumoniae
atgagtaagatttttgaagacaactccctgactatcggtcatacgccgctggtacgactgaaccgcatcggtaatggccgtatcctggcaaaggtagaatctcgtaacccgagctttagcgtaaaatgccgtatcggcgccaatatgatctgggatgctgaaaagcgcggcgttctgaaacctggcgtggaactggtcgagccgaccagcggcaacaccggtatcgccctcgcctacgtggcggcggcccgcggctacaaactgacgctaaccatgccggaaaccatgagcatcgagcgtcgtaagctgctgaaagccctgggcgccaacctggtgctgaccgaaggcgccaaaggcatgaaaggcgctatccagaaagcggaagagattgtcgccagcaacccggaacaattcctgctgctgcagcagttcagcaacccggctaacccggaaatccacgagaagactaccggcccggaaatctgggaagataccgatggtcaggtggatgtgtttatctccggcgtaggtaccggcggaacgctgaccggcgtcagccgctatatcaaaaacaccaaaggtaaaaaagatctgatcaccgtcgccgttgaaccgaccgattccccggtgatcgcccaggcgctggcgggggaagaactcaagccgggtccgcacaaaattcagggtatcggcgccggcttcattcctggcaacctggatctgaagctggtcgacaaagtgatcggcattaccaacgaggaagctatctccacggcgcgccgcctgatggaagaagaaggcatcctggcgggtatctcttccggggccgccgttgccgccgcgctgaagctgcaggaagatgaggcctttaccaataagaatattgtggttatcctgccttcctcaggtgagcgttatttaagcaccgcgctgttcgccgatctcttcactgagaaagagctgcaacagtag

SEQ ID NO: 211209 - DNA, 762 bp, Klebsiella pneumoniae
atggtttcatcatccgcaccgaccccgcgcagcggcgtttattatttttcgcagggctggaaactcatcgggctgccgggcatacggcgttatgtcttcctgcctttactggttaacgtgctgctgatgggcgctgccttctggtggctgtttacccgtctcggcagctggatcccctcgctgatgagccatgtgccggactggctgcagtggctaaactacctgctgtggccggtggtagtgctctcaatcctgctggtgtttggctacttcttttcgacgatcgccaactggatagccgcgccgttcagcggcctgctggcggaacagctggaagcgcgcctgaccggcgctaccccgccggacgtcggcgtctttggcatcatgaaagatattccgcggattatgaagcgtgagtggcagaagctggcctggtatctgccgcgcgccatcgtgctgttgctgctctactttattcccggcgttgggcagacggtagccccggtactctggttcctgttcagcgcatggatgctggcgattcaatactgtgattatccctttgataatcacaaggttcccttcaaaaccatgcgcgaatcgctgcgcagtcgcaaagtgatgaatatgcagtttggggcgctcaccagcctgttcacaatgatcccggtgttaaacctggtgatccttccggtggctatctgcggcgccaccgccatgtgggtcgattgctatcgcgatagacacgccagctggaaatag

SEQ ID NO: 211210 - DNA, 1062 bp, Klebsiella pneumoniae
atgatgcaggatttgcgtctgatattaatcattgttggcgcgatcgccataatcgctttactggtacatggtttctggaccagccgtaaagaacgttcttcgatgtttcgcgatcgcccactgaaacgtatgaagtcgcgcgacgatgagtcggaaaacgacgactttgatgataatgttgaaggcgtaggagaagtccgcgttcatccggtgactcacgccccgcacggcgcgcatggggagcatgaagcccctcgtcagtcgccgcagcaccagtaccagccgccttacgagcgccagatgcagcagcctgcgcgtcctgaagaaccggttcgccagccgccgcagccgccgcgccaggccccggttccaccgcagcaacagcctgcgccgcatgcggctccgcagcctggctggcaacagccgcaacctgcgcagccgcccgtacaaccgcaacaccagccgcagcctgttgtgcagcagcctgtcgcgccgcaaccggtgacgccgaccgtcgctcagccgcagccagccgccccgcagcagcctgcgccacagcctgttgccgcgtcgcagcccgccgtcgcggaaccgcagccggtagagccgcagcagcccgccgcgccgcagccgaaagagcgcaaagagacggtcattgtgatgaacgtcgccgcgcatcatggcgcccagcttaacggtgaagtgctgatcaacagtatccagcaggccggctttaagtttggtgaaatgaatattttccaccgccacctaagtccggacggcagcggtccggtgttgttcagtctggccaacatggtgaaaccgggaaccttcaatccggacagcatggcggatatgatgacccctggggtgactatctttatgcaggtcccttcctacggcgatgaactgcagaacttcaagctgatgctgcagtctgcgcagtatatcgctgacgaagtgggcggcgtggtgcttgacgatcagcgtcgcatgatgacgccgcaaaaactgcgtgaataccaggatcgtattcgcgaagtgaaagacgcgaacgcctga

SEQ ID NO: 211211 - DNA, 2016 bp, Klebsiella pneumoniae
atggaaccaatcgaacaacaactgactgaactgcgaaccacgcttcgccatcatgaatatctgtaccacgttatggacgcgccggaagtgccggatgcggaatatgaccgcctgatgcgcaagctgcgcgagctggagagccagcacccggagctgattaccccggattcgccaactcagagggtgggggcggcgccactcaccgcctttagccagatccgccatgaagtgccgatgctgtcgctggataacgtgtttgacgaagagagctttctcgccttcaacaagcgggtacaggatcgcctgaaaagcacagatcatcttacctactgctgcgagcttaagctcgacggcctcgcggtgagcattctctacgaaaacggcgtgttggtgcaggcggcaacccgcggcgacggcaccactggcgaagatattacctctaacgtgcgaactattcgcgccatccccctcaagctgcatggcgagaatattcctgcacgccttgaggtacgtggggaagtgttcctcccgcaggccgggtttgaaaaaatcaatgaggaagctcgccgcaccggcgggaaagtgtttgctaacccgcgtaatgcggcagcgggttcgctgcgccagctcgatccgcgcatcactgcgaagcgaccgcttactttcttctgctacggcgtgggcgtgctggagggcggcgagctgccggccagccactcggctcggttgctgcagttcaaagcatgggggctgccggtgagcgatcgcgtcaccctgtgccacacccccgaggaagtgcttacttactatcgtaaagtcgaggaagagcgtccccacctgggctttgacattgatggcgtggtgatcaaagtcgattcgctggcgctgcaggaacagctgggtttcgtcgcccgcgcgccgcgctgggccgtggcctttaagttcccggcacaggagcagatgaccttcgtccgggacgtggagttccaggtgggccgcaccggggcgattacgccggtggcgcgtctggagccggtccatgttgccggcgtgttggtgagcaatgccaccctgcataatgccgatgaaattgaacgcttaggcttgaaaatcggcgacaaggtggtgattcgccgggcaggcgatgtgatcccgcaggtggttaacgtggtgctttccgagcgtccggcggatgcccgggatgtcgtcttcccgacccactgtcctgtatgtcagtcagacgttgaacgggtggaaggcgaggcggtagcccgctgtacgggcggcctgatctgcggcgcgcagcgcaaagagtcgctcaagcacttcgtctcccgtcgcgcgctcgacgttgacggcatgggcgacaagatcatcgaccagctggtggagaaagagtacgtccataccccggcggatctgttccggctgacggcggggaaactgaccgggctggatcggatggggccgaagtccgcgcaaaacgtagtcaacgccctcgagaaagccaaagagacgaccttcgcacgtttcctctacgccttaggtattcgcgaggtaggagaagcgacggcggcgggcctggcggcgcatttcggcactctcgaagcccttgagcaggctaccattgaggagctacagaaagtccctgatgtcggcatcgtcgtcgctacccgtaccttcaacttctttgccgaagagagcaaccgcgatgtcattgcgcaactgctggcggagggggttcgctggcctgcgccggtggtggtgaaggcggaagagattgatagcccgtttgcaggcaaaaccgtggtccttaccggcagcctcagccagctgtcgcgcgatgacgccaaagcgcgtctggtggcgctgggggcgaaggtggcaggcagcgtgtcgaagaaaaccgacctggtgattgccggcgaagcggcggggtctaagctggcgaaagcgcaggagctgggcatcgaggtgattgacgaggccgaaatgatgcgtctgctgggagaataa

SEQ ID NO: 211212 - DNA, 219 bp, Klebsiella pneumoniae; identical to SEQ ID NO: 139320

SEQ ID NO: 211213 - DNA, 999 bp, Klebsiella pneumoniae
atgaaacttttccgtattctcgatccgtttacggccacgctaatcaccgttgtcctgctggcctcattcttcccggcccgtggcgctttcgtccccttctttgaacatctgaccaccgccgccatcgcgctactgttctttatgcatggcgctaaactctcccgggaggcgattatcgccggcggcagccactggcgtttgcatctctgggtgatgtgcagcacctttattctcttcccgctactcggggttctgtttgcctggtgggcgccggtgaatgtcgatccgatgctctacagcggctttatctatctgtgcattctgccggccaccgtgcaatccgctatcgcctttacttcgctggccgggggcaacgtcgcggctgcggtttgctcagcctcggcctccagcctgctggggatctttgtttccccgctactggtgggggtcctgatgaaccttcacggcgcaggcggcagtctggagcaggtcggtaaaattatgctgcagctgctgctgcctttcgtgctcggtcacttatcgcggccgtggattggcgactgggtggcgaagcataagaagtggattggtaagaccgaccagacctcgattctgctggtggtttactccgcctttagcgaggcggtggtgaatggcatctggcataaagtcggtctgggatcgctgctgtttatcgtggtggtcagcctggtgctgctggccatcgtcatcgcggtcaacgtctttgtcgcccgccgctgcggctttaacaaagccgatgagattaccatcgtcttctgcggttcgaaaaagagcctggccaacggcattccgatggccaatattctcttcccgacctccatcctcggcatcatggtgctgccgttgatgatcttccaccaaatccagctgatggtctgcgcggtgctggcgcggcgctacaagcagcaaaccgatgcgcgtctcgctgaggaaaaggccaacgcggccaaagcctaa

SEQ ID NO: 211214 - DNA, 927 bp, Klebsiella pneumoniae
atgaattactctctgcgtcagttaaaagtatttgtcaccgtcgcccgggccagaagcttcagccgggcaggggagatgattggcttaagtcagtcggccgtcagccatagcgtcaaggagctggagcatcagaccggcgtccgtctgctcgaccgtactactcgcgaagtggtgctcaccgaggcgggtcagcagctggcgggcaggctggaacgtttgctcgatgagttgacgattaccctgcgcgacgccgggcgggtaggccagcagctgagcggcaccgtcaaggtcgccgccagtcagacgatttccgcccaccttattccgcagtgtattgctcacagcaatcgtcgttatcccgatatcgattttgtgctgcacgatcggccccagcagtgggtgctggagagtatccgccagggggaagtggattttggcatcgtgattgatccgggcccggcggcagaccttcagtgtgaagtggttctggcggaaccatttttgctgctctgtcgggaggatcatccttttgccagcctgacagaagttccgtggcaggcgctgcaggatgaaaggctaatcctgcaggattatgcgtccggcagccgcccgctgatcgatgcggccctcagcaggctggctatccgggcgaacatcgtccaggagattggccacccggcaacgctgtttccgatggtagaatcgggaattggcatcagcgttctgccggcgctggcgctaccgttaccgcaggggagccatctgacggtgaaacggctgactccggtgatggagcggcagctgatgctggcatgcaggaaaaatcgctcgctgtcgaccgccgctcaggcgttatgggaaattgtgcgtgaagaaggggagaatttaaccgccgccagggttgaagatccgctatatcagcgctga

SEQ ID NO: 211215 - DNA, 795 bp, Klebsiella pneumoniae
atgagcagtaacttcagacatcatttattgagtctgtcgttactggttggcatagcggccccctgggccgcttttgctcaggcgccaatcagtagtgtcggctcaggctcggtcgaagaccgcgtcactcaactcgagcgtatttccaatgctcacagccagcttttaacccaactccagcaacaactctctgataaccagactgacattgattctctccgcgggcagatccaggagaaccagtaccagctgaatcagatcgttgagcgccagaaacagattctgctgcagatagatagtttgagcagcggtggcggcgcagcatcaggtgcgcaggctccgtcgtcttctggcgatcagagcgcggctgccaccagcgcagcgccagcggccacctcaggcgccccggcgatgaccggcgatgcgaacaccgattataatgccgctattgccctggtgaaggatgcctcacgccaggatgacgcgatggtggcgtttcaaaacttcgtcaaaaagtacccggattcaacctaccagccaaacgctaactactggctcgggcagttgaactacaataaggggagaaaagacgacgcggcgttttacttcgcttcggtggtgaagaactacccgaaatcgccaaaagcgcctgacgcgatgtttaaagtcggcgtgatcatgcaggacaaaggtgataccgcgaaagcgaaagcggtttaccagcaggtgatcaataaattccccggcaccgacggtgcgaaacaagcgcaaaaacgacttaatgctcttggttga

SEQ ID NO: 211216 - DNA, 525 bp, Klebsiella pneumoniae
atgcaactgaacaaagtgctgaaagggctgatgatcgctctgccggttatggcaatcgcggcatgttcttctaacaagaacgccagcaacgaccagagcggtgaaggcatgctgggtgccggcactggtatggacgctaacggtaacggcggcaacatgtcttctgaagagcaagctcgtctgcagatgcagcagctgcagcagaacaacatcgtttacttcgatctcgacaagtacgatatccgttctgacttcgctgctatgctggacgcgcacgctaacttcctgcgcagcaacccgtcctacaaagtgactgtagaaggtcacgcggatgagcgcggtacgccggaatacaacatcgctctgggtgagcgtcgtgctaacgccgttaagatgtatctgcagggcaaaggtgtttctgccgatcagatctccatcgtttcttacggtaaagaaaaaccagcagtactgggtcatgacgaagcggcatatgccaaaaaccgtcgcgccgtactggtttactaa

SEQ ID NO: 211217 - DNA, 1293 bp, Klebsiella pneumoniae
atgaagcaggcattacgagtagcatttggttttttaatgctgtgggcggcggtgctgcacgcagaagtacgtatcgagatcacccagggggtggactcggcgcgccctatcggcgtggtaccgttccagtgggccggccagggcgctgcgccggaagatgtcggtggtatcgtggcagctgacctgcgcaacagcggtaaattcaatccgctggatcgctctcgtctgccgcagcagccgactagtgcccaggaagtgcagcctgctgcctggtctgcgctgggtattgacgccgtagtcgtcggccaggtcacgcaaaatccggatggttcttatcaggttgcgtatcaactggtggacaccggcggagcgccgggcacaacgctggcgcaaggttcttttaaagtcactaagcagtacctgcgctatgcggcgcacgcggccagcgacgcggtatttgagaagctgaccggcatcaagggcgccttccgtacccgtatcgcctacgtggtgcagaaaaacggcggccagtacccttacgaactgcgcgtgtccgactacgatggttacaaccagttcctggttcaccgttcctcccagccgctgatgtccccggcctggtctccggacggttctaaactggcctacgttacctttgaaagcggtcgttctgcgctggtggttcagaccctggcgaacgcctctgtgcgtcagatcgcctccttcccgcagcacaacggcgccccggcgttctcaccggatggttctaaactggcgttcgcgctgtcgaaaaccggtagcctgaacctgtacgtaatggatctgggatcgggtcagattcgtcaggtgaccaacggtcgcagcaacaacaccgaaccaagctggttcccggacagccagaatctggccttcacttctgaccaggcaggtcgtccgcaggtatataaagtcaacattaatggcggcacgccgcagcgtatcacctgggaaggttctcagaaccaggacgccgacgtgagcgcggatggtaaaaccatggtaatggtcagctcggccggcggtcagcagcacattgccaaacaagatctggaaacgggtggtgtacaggttctgtcatcaacgtttttagacgaaacgccaagtctggcacctaacggcactatggtaatctacagctcttctcaggggatgggatccgtgctgaatctggtttctacagatgggcgtttcaaagcgcgtcttccggcaactgatggacaggtaaaatcgcctgcctggtcgccgtatctgtga

SEQ ID NO: 211218 - DNA, 1323 bp, Klebsiella pneumoniae
gtgtcaaaggcaaccgaacaaaacgacaagcttaaacgagcgatcatcatttcagtcgcgctgcacatcattctgatcgcgctgctgatctggagttcgtttgacgagcatctggatgcctctgccggcggcggcggatcgtcgattgatgccgtcatggtcgatccgggggcggtggtaaataactataaccgtcagcaacagcagcaggccagcgcacgtcgcgccgctgaacagcgtgaaaaacaggcgcagcagcaggcggaagagttacgtgagaaacaggcggcggaacaggaacggctgaaacagctcgaacaggagcggctgcaggcgcaggaagcggcgaaagaagcgaaggagcagcagaagcaggctgaagaagcggctgccaaggccgccgcggcggcaaaagccaaagcggacgcacaggcaaaagaagcgcaggaagccgctgccaaagcggccgccgaggcgaaagcgaaggcggatgcccaggcgaaagcggcagaacaggcggcggccaaggcggctgctgacgcgaagaagcaggccgaagccgctgcagcgaaagccgctgccgaggcgaagaaacaggcggaagctgaagcggcgaaagctgcggccgaggcgcagaagaaagcggaagcggcggctgcgaagaaagcgcaacaggaagcggagaaaaaagcccagcaggaagcggctaagcaggcggcagctgaaaaagcggctgccgaaaaagccgctgagaaagcagccgcgcaaaaagcggccgctgagaaggccgccgccgagaaagccgcagccgctgaaaaagcggcggcagcgaaagcggctgcagcagagaaggctgcagctgataaagcggccaaggcggcagcagcaaaagccgcggcggcgaagaaagcggcggctgcgaaagaagcggacggcgttgacaacctgctcggcgatctgagttctggtaagaatgcgcctaaaacaggcggtggggccaaaggaaacaatgcctccgctgccgggagtggtaatactaaaaacagtgcctcaggggctgatatcaacaactatgccggacagataaaatcggcgattgaaagtaagttttatgacgcatcgtcctatgcgggcaaaacatgtaccttgcgtatcaaacttgctcctgacggtctgttgttaaatatacagtccgaaggtggtgatcctgctctgtgccaggccgctcttgccgcagcccgacaggctaagtttccgaaaccacctagccaggcagtatatgaagtcttcaaaaatgcgccactggacttcaaacctcagtga

SEQ ID NO: 211219 - DNA, 429 bp, Klebsiella pneumoniae
atggccagagcacgtggacgcggacgtcgcgaactgaagtccgagatcaacatcgttccgctgctggatgtcctgctggtgctgctgctgatctttatggcaacggcgccgatcattacgcagagcgtggaagtcgatctgccggacgccacggaatcgcaagcggtgaaaagcaatgacgatccgccggtgattgtggaagtctccggggtagggcagtacagcgtgaaggtggggcaggagacgctgtcccagctgccgccggagcaggtaattgccgaagcgaagcgtcgtcttgaagccaatgaaaaaacggtattcctgatcggcggtgcgaaagacgtcccttacgatgaaattattaaagcgctgaacctgttgcatagtgcaggggttaaatcggtcggcttgatgaccaaacctatttaa

SEQ ID NO: 211220 - DNA, 693 bp, Klebsiella pneumoniae
gtgactgacatgaatatccttgatttgttcctgaaggcgagccttctggtaaaacttatcatgttgattttgattggtttttctatcgcttcctgggctatcattattcagagaacgcgtatccttaactcggccgcgcgtgaagctgaagcgttcgaggacaaattctggtccgggatcgagctctctcgtctgtaccaggagagccaggggcgtcgcgataacctgaccggttcggaacaaatcttctacagcggtttcaaagagtttgcacgcctgcatcgggctaacagccatgcgccggaagcgattgtcgaaggggcatcgcgcgcgatgcgtatttcgatgaaccgcgaactggaaacgctggagacccatattccgttcctcggcaccgtaggctcgatcagcccgtatatcggtctgttcggtaccgtctgggggattatgcacgcctttatcgcccttggcgcggtgaagcaggccaccctgcagatggtggcgccaggtatcgccgaagcgctgatcgccaccgcgattggtctgttcgccgcaatcccggcggtcatggcgtataaccgcctgaaccagcgcgtgaacaagcttgaactgaattacgacaactttatggaagagttcaccgctattctgcaccgtcaggcctttaccaccagcgaaagcaataaggggtaa

SEQ ID NO: 211221 - DNA, 405 bp, Klebsiella pneumoniae; identical to SEQ ID NO: 138735

SEQ ID NO: 211222 - DNA, 291 bp, Klebsiella pneumoniae; identical to SEQ ID NO: 138734

SEQ ID NO: 211223 - DNA, 1140 bp, Klebsiella pneumoniae
atgatcgattatgaagtattgcgttttatctggtggctgctgattggcattctgctgattggttttgccgtcgccgacgggttcgacatgggggtgggcatgctcacccgcttcctcggccgcaacgacaccgagcgtcggattatgatcaacgccatcgccccgcactgggacggtaaccaggtgtggctgatcaccgccggcggcgcgctgttcgctgcctggccgatggtttacgccgcggcgttctctggcttctatgtggcgatgattctggtgctggcctcgctgttcttccgtccggtcggttttgactaccgttccaagatcgaggacacccgctggcgcaacatgtgggactggggcatcttcatcggtagcttcgtgccgccgctggtgattggcgtggcctttggcaacctgctgcagggcgtgccgttccacgtcgatgaatacctgcgtctgttctataccggtaacttcttccagttgctgaacccgtttggtctgctggccggtatcgtcagcgtggcgatgatcctgactcagggcgccacctatctgcagatgcgtaccgtaggcgaactgcacctgcgtactcgcaccgtttccatggtggcggcgctggtgacgctggtctgcttcgcgctggcgggcgtgtgggtctactacggcatcgacggctatgtggtgaaatcggtgattgaccataccggcccgtctaacccgctgaccaaggaagtggtgcgggaagctggcgcgtggatggtgaactttaacaatatgccagcgctgtgggcggtgcctgccctgggcgtggtgttgccgctgctgaccgtcgtttcgaccaaagcggataaaggtgcctgggcattcctgttctcctcgctgaccctggcctgcatcattctgactgccggtatcgcgatgttcccgttcatcatgccgtccagcaccatgctgaacgccagcctgacaatgtgggacgcgacctccagtcagcggacgctgaacctgatgacctacgtggcgattgttttcgtgccgatcattctggcctacaccagctggtgttactggaagatgtttggccgcataacgcgcgaagacatcgaaaagaatacccactcgctgtactaa

SEQ ID NO: 211224 - DNA, 1569 bp, Klebsiella pneumoniae
atgttagatatagtcgaactgtcgcgcttacagtttgccttgaccgcgatgtaccacttcctgtttgtgccgctaacgctcggtatggcgttcctgctggccatcatggaaacggtctacgtcctttccggcaaacagatttataaagatatgaccaaattctggggcaagttgtttggtatcaacttcgcgctgggtgtggcgaccggtctgaccatggagttccagttcgggactaactggtcgtattactcacactacgtgggcgatatctttggtgcgccgctggccattgaaggtctgatggccttcttcctcgaatccacctttgtaggtctgttcttcttcggttgggatcgtctgggcaaagttcagcacatggccgtcacctggctggttgcgctgggttccaacctctccgcgctgtggatccttgtcgccaacggctggatgcagaaccctatcgcatcggacttcaacttcgaaaccatgcgtatggagatggtcagcttctctgaactggtgctcaacccggtcgcccaggtgaaattcgttcacactgtggcgtcgggctatgtcaccggcgcgatgttcatcctggcgattagctcctggtacatgctgaaaggtcgcgacttcgcctttgccaagcgctcctttgccatcgcagccagcttcggtatggcggcgatcctctccgttattgtgctgggtgacgaatccggttacgaaatgggtgacgtgcagaaaaccaaactggcggctatcgaagcagagtgggaaacccagcctgcgccggcggccttcaccctgtttggtattcccgatcagaatgcgcagaccaaccactttgcgatccagatcccctacgcgctgggcatcattgctacccgctcggtggacaagccggttatcggcctcaaggatctgatggttcagcacgaagagcgtatccgtaacggcatgaaagcctacgcgctgctggaacagctgcgcgccggttcaaccgatcaggccgtgcgcgaccagttcaataacgtgaagaaggacctcggttatggcctgctgttgaagcgctataccccgaacgtcgctgacgccacggaagagcagatcgccaaagcgaccaaagattccattccaagcgtcgcaccgctgtacttcgccttccgtatcatggtggcgtgcggcatcctgatgctgctgattataggcgcctccttctggagcgtgatccgtaaccgcatcggcgagaaaaaatggctgctgcgcgccgcattctacggcctgccgctgccgtggattgccgtggagtcgggctggtttgttgccgaatacggccgtcagccgtgggcgattggtgaggtcctgccgacggcggtggctaactcatcattgaccgcgggcgacctgatcttctcaatgttgctgatctgtggtctgtacacgctgttcctggtggctgaactgttcctgatgttcaagtttgcccgcaaaggacctagcagcctgaaaaccggccgctatcactttgaacagtcctctgcggctattcagtcggcacgctaa

SEQ ID NO: 211225 - DNA, 870 bp, Klebsiella pneumoniae
atgtcagttttaatcaataaagataccaaggttatctgccagggcttcaccggtagccaggggaccttccactctgaacaagcgatcgcttacggtacgcaaatggttggcggcgtgacgccaggcaaaggcggcaccactcacctgggcctgccggtgttcaacaccgtgcgcgaagccgttgaagcgaccggcgcgaccgcgaccgtgatctacgttccggcgccgttctgcaaagattccatcctggaagcgatcgacgcgggcattaagcttatcatcaccatcaccgaaggtatcccaacgctggatatgctgaccgtgaaggtgaagctggacgaagcgggcgtgcgtatgatcggcccgaactgcccgggcgttatcactccgggcgagtgcaaaatcggcatcatgccgggtcacattcacaagccgggtaaagtgggcatcgtttcccgttccggcaccctgacctatgaagcggttaagcagaccaccgactacggcttcggccagtctacctgcgtcggtatcggcggcgacccgatcccgggctccaacttcatcgatatcctgaagatgttcgaggaagatccgcagaccgaagcgatcgtcatgatcggtgagatcggcggcagcgcggaagaagaagcggctgcttatattaaagatcatgtcactaagccggttgtcggctacatcgcgggcgttaccgcgccgaaaggcaagcgtatgggccacgcgggcgctatcatcgccggcggtaaaggtacagcggatgagaaattcgcagcgctggaagcggcgggtgtgaaaactgttcgcagcctggccgacatcggcgaagcgctgaaagctattatcaagtaa

SEQ ID NO: 211226 - DNA, 1167 bp, Klebsiella pneumoniae
atgaacttacatgaatatcaggcaaaacaactttttgcccgctatggcttaccggcgccggtgggttatgcctgtactactccgcgtgaagcagaagaagccgcttcaaaaatcggcgcgggtccgtgggtagtgaaatgtcaggttcacgctggtggccgcggcaaagcgggcggtgtgaaagtagttaagagcaaagaagagatccgcgcatttgccgagcactggctgggcaaacgtctggtgacctatcaaacagatgcgaacggccagccggttaaccagatcctggttgaagcggcgaccgatattgacaaagagctgtacctgggcgcggttgttgaccgtagctcccgtcgcgtggtgttcatggcgtctaccgaaggcggcgtggaaatcgagaaagtggcggaagagaccccgcacctgatccacaagatcgccatcgatccgctggcgggcccgatgccttaccagggtcgtgaactggcgttcaaactgggtctggaaggtaaacaggttcagcagttcaccaagattttcatgggtctggcgaccattttccttgagcgcgacctggcgctgatcgagatcaacccgctggtgatcaccaagcagggcgacctgatctgcctcgacggcaaactgggcgctgacggcaacgcgctgttccgccagccggatctgcgcgaaatgcgcgatcagtctcaggaagacccacgtgaagcgcaggcggcgcagtgggaactgaactacgtcgcgctggacggcaacatcggctgcatggttaacggcgcaggcctggcgatgggtaccatggacatcgttaagctgcacggcggcgaaccggctaacttcctcgacgtaggcggcggcgcgaccaaagagcgcgtgaccgaagcgttcaaaatcatcctctctgacgacaacgttaaagcggtgctggttaacatcttcggcggcatcgtgcgttgcgacctgatcgctgacggcatcatcggcgcggtagcggaagtaggggttaacgttccggttgttgtacgtctggaaggtaacaacgccgaactgggcgcgaaaaaactggctgacagcggcctgaatattattgcagcgaaaagtctgacggacgcagcacagcaggttgttgccgcagtggaggggaaataa

SEQ ID NO: 211227 - DNA, 1227 bp, Klebsiella pneumoniae
atgagtagcgtagatattctggttcccgacctgcctgagtccgtagctgacgcaaccgtcgccacctggcacaaaaaaccgggcgacgcggtcgtccgtgacgaagttctggtcgaaatcgaaactgacaaagtggtactggaagtaccggcatcagcggacggcattctggatgcagtgctggaagacgagggcgccaccgtcctgtctcgccagatccttggccgcctgcgcgaaggcaacagcgcaggtaaagaaagcagcgagaaagccgatgcgaaagcgtccactccggcgcagcgtcagcaggcctctctggaagagcagaacaacgacgcgctgagcccggcgatccgtcgtctgctggctgaacacaaccttgacccagcggccatcaaaggcactggcgtcggcggtcgtctgacccgcgaagacgttgagaaacatctggcgaaagccccggcgccggcagaagccaaagcgccagccgccgccccggcagccgcgccggcgccgcagctgggccaccgttcggaaaaacgcgtcccgatgacccgtctgcgtaaacgcgtagccgaacgtctgctggaagcgaaaaactctaccgccatgctgacgacctttaacgaagtcaacatgaagcccatcatggatctgcgtaagcagtacggtgaggcgttcgaaaaacgtcatggcatccgcctgggctttatgtccttctacgtgaaagcggtagtggaagcgctgaaacgctatccggaagtgaacgcttccatcgatggcgacgacgtggtgtaccacaactacttcgacgtcagcatggccgtatccactccgcgcggtctggtcaccccggtgctgcgtgacgtcgacctgctgggcatggcggatatcgaaaagaatatcaaagagctggcagtgaaaggccgcgacggcaagctgaccgtagacgacctgaccggcggtaacttcactattaccaacggcggcgtcttcggctccctgatgtccacgccgatcatcaacccaccgcagagcgctattctgggtatgcatgccattaaagaccgtccgatggcggtcaatggcaaggtagagatcctgccgatgatgtacctggcgctctcctatgaccaccgtctgatagacggacgtgaatcggtaggcttcctggtggcgattaaagagctgctggaagatccgacccgtctgctgctggacgtgtag

SEQ ID NO: 211228 - DNA, 2808 bp, Klebsiella pneumoniae
atgcagaacggcgcaatgaaagcctggctggactcttcttacctctctggttcgaaccagagctggatagaacagctctatgaagacttcttaaccgatcctgactctgttgacgccaactggcgttcaatgttccagcagttacctggcaccggagttaaaccggatcaatttcattccaaaacgcgtgattatttccgtcgactggcgaaggatgcctcacgttacacttcttcgatttccgacccagacactaatgtgaagcaggttaaagtcctgcagctcatcaacgcataccgtttccgtggccaccagcatgcgaatctcgatccgctggggctgtggaagcaagagagagtggcggatctcgatccggcctaccacgatctgaccgaggccgatttccaggaaagctataacgtaggttcatttgccatcggtaaagacacgatgaagctgggcgagctgattgtcgccctcaagcaaacctactgcggctccatcggcgcggaatacatgcatatcacctctaccgaagaaaaacgctggatccagcagcgcattgaatcggtagctggcaaagcgagctttaccccggaagagaaaaaacgcttcctcagcgaactgaccgccgcggaaggtctggagcgctacctcggcgccaaattcccgggggcgaagcgcttctcgctggagggtggcgacgccctgatcccgatgctcaaagagatgatccgccatgcaggcaaaagcggcacccgcgaagtggtgctgggcatggcgcaccgcggccgtctgaacgtgctggtcaacgtgctgggtaaaaaaccgcaggacctgttcgacgagttcgcgggcaaacataaagaacacctcggcaccggcgacgtgaagtaccacatgggcttctcttccgatatggaaaccgaaggcggtctggtgcacctggcgctggcgtttaacccgtcgcacctcgagatcgtcagcccggtggttatcggttccgtacgcgcccgtctggatcgtctggacgagccaagcagcaacaaagttctgcctattaccatccacggcgacgccgccgtcaccggccagggcgtggttcaggaaactctgaacatgtccaaagcccgcggttacgaagtgggcggtaccgtgcgcatcgttatcaacaaccaagtgggcttcacgacctctaacccgctggatgcgcgctcgacgccgtactgcaccgacatcggtaaaatggtgcaggcgccgattttccacgtcaatgcggacgatccggaagcggtcgccttcgtcacccgtctggcgcttgatttccgcaatacctttaaacgcgatgtcttcattgatctggtgtgctaccgccgtcacggccacaacgaagccgatgagccgagcgcaacccagccgctgatgtatcagaagatcaaaaagcatccgactccgcgcaaaatctatgctgacaagctggagcaggagaaggtggcgactctggaagatgcgaccgagcaggttaacctctatcgcgatgcgctggatgccggcgaatgcgtggtgcaggaatggcgtccgatgaatatgcattcctttacctggtcgccgtacctcaaccacgagtgggacgagagctatccggataaagttgagccgaaacgtctgcaggagttggccaaacgcatcagcacggtaccggaaggtatcgaaatgcagtcccgcgtggcgaaaatttacgccgaccgccaggcgatggcggcaggcgagaagctgtttgactggggcggcgccgaaaacctggcctacgccacgctggttgacgaaggtattccggttcgtctgtccggcgaagactccggccgcggcaccttcttccaccgtcatgcggtgatccataaccagaccaatggttcaacctacacgccgctgcagcatgtccataacggccagggccagttccgcgtttgggactcggtactgtctgaagaagcggtgctggcgttcgaatatggctacgccaccgccgagccgcgcactctgaccatctgggaagcgcagtttggcgacttcgccaacggcgcgcaggtggtgatcgaccagttcatctcctccggtgagcagaaatggggaaggatgtgcggcctggtgatgctcctgccgcacggttacgaaggccagggcccggagcactcctccgcgcgtctggagcgttatctgcagctgtgcgctgaacaaaacatgcaggtctgcgtgccgtccacgccggcacaggtttatcacatgctgcgtcgccaggcgctgcgcggtatgcgtcgtccgctggtggtgatgtcgccgaagtcgctgctgcgtcatccgctggcggtctccagcatggatgagctggcgaacggcactttcctgccggctattggtgaaatcgatcaacttgatccgcaggctgtgaagcgcgttgtgctgtgctctggtaaggtttactacgacctgctggaacagcgccgcaaaaacgagcaaaaagatgtcgctatcgttcgtatcgagcagctctatccgttcccgcatcaggcggtgcaggaagcgctgaaagcgtatgcgcacgtgcatgattttgtctggtgccaggaagagccgctcaaccagggcgcatggtactgcagccagcatcacttccgtgaagtgattccgtttggggcctctctgcgttatgcaggccgcccggcctccgcctctccggcggtagggtatatgtccgttcaccagaaacagcaacaagatctggtcaatgacgcgctgaacgtcgattaa

SEQ ID NO: 211229 - DNA, 717 bp, Klebsiella pneumoniae
atgaaactcgagttttcaatttatcgctataacccggatgttgacgacgctccgcacatgcaggattacacccttgaagcggaagaaggtcgcgacatgatgctgctggatgcgctgatccagctgaaagaaaaagatccgtcgctgtcgttccgccgctcctgccgtgaaggggtctgcgggtccgatggtctgaacatgaacgggaaaaacggtttggcgtgcatcacgccaatctccgcgctgaatcagccgggcaagaagattgttatccgtccgctgccaggattaccggttatccgtgatttggtggtggacatggggcaattctatgcacaatatgagaagattaagccttacttgttgaataatgggcaaaatcctccggctcgcgagcatctgcagatgcctgagcagcgtgagaaactcgacgggctgtacgagtgtattctgtgcgcctgctgttcgacctcgtgcccgtcgttctggtggaacccggacaagttcatcggcccggctggcctgctggccgcgtatcgcttcctgatcgacagtcgcgataccgaaaccagcgagcgcctggacggcctgagcgatgctttcagcgtattccgctgtcacagcattatgaactgcgtcagtgtgtgtccgaaggggctgaacccgacgcgcgccatcggccatattaagtcgatgctgctgcagcgcagcgcgtaa

SEQ ID NO: 211230 - DNA, 1767 bp, Klebsiella pneumoniae
atgaaattgccagtcagagagtttgatgctgttgtcatcggtgccggcggcgcaggtatgcgcgcggcgctgcaaatttcccagagcggacagacttgtgcactgctctccaaagtgttccctacccgttcccataccgtatccgcgcagggtggcatcaccgtcgcgctcggtaactcccatgaagataactgggaatggcatatgtacgacaccgtaaaagggtcggactatatcggcgaccaggacgccatcgaatacatgtgtaagaccggcccggaagcgattcttgagctggagcacatgggactgccgttctctcgtcttgacgatggccgtatttatcagcgcccgtttggcggccagtcgaagaacttcggcggcgaacaggcggcgcgtaccgcggcggcggctgaccgtaccggtcacgccctgctgcacactctgtatcagcagaacctgaaaaaccacaccactatcttctccgaatggtacgccctcgatctggtgaaaaaccaggacggcgcggtagtcggttgtaccgccctgtgcatcgagaccggcgaagtggtctactttaaagcccgcgccaccgtgctggcgaccggcggcgcaggccgtatctatcagtccaccaccaacgcccacatcaatacgggtgacggcgtcgggatggccatccgcgccggcgtgccggtgcaggatatggaaatgtggcagttccacccgaccggtatcgccggggctggggttctggttaccgaaggttgccgcggcgaaggcggttacctgctgaacaaacacggcgaacgctttatggagcgttatgccccgaacgctaaagacctggcgggccgtgacgtggtggcgcgttccatcatgatcgaaatccgcgaaggccgcggttgcgacggtccgtggggcccgcacgcgaaactgaaactggatcacctcggtaaagaggttctggaatctcgtctgccgggtatccttgaactttcccgtacctttgcccacgtcgatccggtgaaagagccgatcccggttatcccaacctgtcactacatgatgggcggtatcccgaccaaagtcaccggccaggcgttgaccgtgaatgagaagggcgaagacgtggtgatcccgggcctgttcgcggtaggcgaaatcgcctgcgtatcggtccacggcgccaaccgtctgggcggcaactcgctgctcgacctggtggtcttcggccgcgcggcgggcctgcatctgcaggaatccattgccgagcagggcacgctgcgcgacgccagcgaatccgatatcgaaggctcgctggatcgcctcaaccgctggaacaacacccgctctggtgaagatccggtggcgattcgtaaagcgctgcaggaatgtatgcagcataacttctcggtgttccgcgaaggcgatgcgatgcacaaaggtctggagcaactgaaagtgatccgcgagcgcctgaaaaacgcccgtatcgacgatacctccagcgagttcaacacccagcgcgttgagtgcctggagctggataacctgatggaaaccgcctacgcgaccgccgtatccgctaacttccgtaccgagagccgtggcgcccacagccgcttcgacttcccggatcgtgatgatgaaaactggctgtgccattccctgtacctgccagagtcggaatccatgacgcgtcgtagcgtcaatatggaaccgaaactgcgtccggcattcccgccgaagattcgtacttactaa

SEQ ID NO: 211231 - DNA, 348 bp, Klebsiella pneumoniae; identical to SEQ ID NO: 139281

SEQ ID NO: 211232 - DNA, 405 bp, Klebsiella pneumoniae
atgtgggcgttattcatggtaagaaatgtgaaaaaacaaagacctgtcaatctggatctacaaacgatacggttcccaatcacggcgatagcgtccattctccatcgcgtttccggtgtcatcaccttcgtggcggtcggaattctgctttggctgctgggcaccagcctttcctccccagaaggttttctgacggcggcctccatcatggatagcttctttgtgaagttcatcatgtggggcattctcaccgcgctggcctatcacgtcgttgtcggtattcgccatctgatgatggactttggctaccttgacgaaaccctcgaagcagggaaacgttccgccaaaatttcttttgttattactgtcgtgctttcacttctcgcaggagtcctcgtatggtaa

SEQ ID NO: 211233 - DNA, 1284 bp, Klebsiella pneumoniae
atgtctgatgctaaagcaaaaatcaccctgggtggtgacactgctattgaactggatgtgctaaaaggcacgctcggtcaggatgttattgatattcgtagtcttggttcaaaaggcgtatttacctttgacccaggtttcacatcaacggcttcttgtgaatctaaaattacgtttatcgatggtgacgaggggatcctgctgcaccgcggcttcccgatcgaccagttagcgaccgaatctaattatcttgaagtctgttatatcctgctgtacggcgaaaagccgacccaggccgaatatgacgaattcaaaactaccgtcacccgccacaccatgattcatgagcagatcacccgtctgttccacgcgttccgtcgcgattcccacccgatggcggtgatgtgcgggatcaccggcgcgctggcggcgttctatcatgattccctcgacgtgaataacccgcgtcaccgcgagattgccgcctaccgtctgctgtccaaaatgccaaccatggcagccatgtgttacaagtattctatcggccagccgtttgtttatccgcgcaacgacctctcctacgccggcaacttcctgcgcatgatgtttgcgacaccgtgcgaagagtatgaagtcaatccggtgctggagcgcgcgatggatcgtattctgatcctgcacgccgatcacgagcagaacgcgtcgacctccacggtacgtaccgcaggctcctccggcgctaacccgttcgcctgtatcgctgcgggcatcgcctccctgtggggaccggcacacggtggcgccaacgaagcggcgctgaaaatgctggaagagatcagctccgttgagcacattccggaatttgttcgtcgtgcgaaagacaagaatgactctttccgcctgatgggcttcggccatcgtgtttacaaaaactacgatccgcgcgccaccgtgatgcgtgaaacctgccatgaagtgctgaaagagctgggcaccaaagacgacctgctgcaggtggccatggagctggagcatatcgcgctgaacgacccgtacttcatcgagaagaaactgtatccgaacgtcgacttctactccggtatcatcctgaaagcgatgggtattccgtcctccatgtttaccgttatcttcgccatggcgcgtaccgtgggctggattgcgcactggaacgaaatgcacagcgatggcatgaagatcgcccgtccgcgtcagctgtataccggctacgccaaacgcgatttccagtccgacattaagcgttaa

SEQ ID NO: 211234 - DNA, 792 bp, Klebsiella pneumoniae
atgccggaaggtccggagatccgccgtgcggcggataaactggaggcggcaataaaaggcgaacccttaaccaacgtttggttcgcctttcctcagttgcaaccctatcaaactcagctaattggtcagcgggtgacccatatcgccacccgcggcaaggccctgttaacccacttctccggcggattgaccctgtatagccataaccagctgtacggcgtctggcgggtggtggatgccggcgttgagccgcaatcgaaccgcgtactgcgtgtcaggctgcagaccgccagcaaggcgattttgctctacagcgcgtcggacattgatatcctcacggcggagcaggttgccaaccatccgttcttgctgcgcgtcggaccggacgtgctggacatgacgttaaccgcggagcaggtgaaagcgcggctgctgtcggccaaattccgcaatcgtcagttttccggcctgcttctggatcaggcttttcttgccgggctcggaaactatctgcgggtggaaattctctggcaggtgggattaagcggtaagcgtaaagccgctgaactgagcgacagtcagctggatgcgctggcgcacgcgctgctcgatatcccgcggctgtcctatcgtactcgcggtctggtggatgacaacaagcatcatggcgcgctgtttcgctttaaggtcttccatcgcgatggggaaaggtgcgaacgctgtgggggaatcattgagaagacgacgctctcctcgcggccattttactggtgtccaggatgccagcattaa

SEQ ID NO: 211235 - DNA, 645 bp, Klebsiella pneumoniae
atggctggcgtattgattaccggttttgagccgttcggcggcgaaacggttaacccttcatgggaagtggttaagcagctggatggcatgattattcgcggacagcaggtggtggctaaacagttaccctgcgtattcggcgaagcgctgacggtgctgaaggcggcgctggaaacctatcaaccgcggctgacgattgccgtcggacaggccggcggccgtgtcgatattaccgtcgaacgtgtagcgatcaatgtcgatgatgcgcggatccccgacaataaaggccagcaaccgatcgatgagccgatcgtcgctaatggccctgcggcctgcttcagtacgctgccgatcaaagcgatcgttagcgcgttgcgccagcaggggatcccggcctcggtgtcgcaaaccgcgggcaccttcgtctgcaatcacgtgatgtatggtttgctgcatcagttgcagggaaaaagcgggcagaagggaggttttatccatattccttatctgcctgaacaggcggcggcccacccggggcaggcgagtatgtcggtcgcgacggtacgcgcggcgctggaaacggcgattgccgtcgcccttgaacagaatgacgatgtcaaaattggcggcggcgccacccattaa

SEQ ID NO: 211236 - DNA, 996 bp, Klebsiella pneumoniae
atgaatttccagcaaacctatttatactggctggccggcgcggtactgctggtcgtggctatcatgtcctggcgcgacaaaagcaatccgcgacgtctgacaaccggtctgttctggggcctgtacgggctggtgttcttgctcggcgactggacatatcaactggtgggcgataagcgtaaggtgaatatcgctgtcggcggggtggtggtcgtcctggcgctgatcgccggttttggcggcgtgcgcctcggcagctaccatcagcgtagccaggaagagaaaaccgccagcgcgaaacgcctcggcaacaaacttttctttccggcgctggcgattccggtcgtcaccgtcattggcgtactgctgtttaacaatctgccctcatggcaggtggcgctcttcgggccgggcaaccacgcgacgctgattactctgttctcgatgactgtcggtacgctgattggcctggcgatggcgattcgtatgacgcatgaaacggtggcgcagccaatgcaggaagcgcgccgtttgcttgattccgtcggctgggcctttatcctgccgcaaatcctcgcggtgctggggctgctgtttaccgcagcgggcgtcggaaccagcatttcatggctgaccgagcactatctggcggtcgataaccgctttatcgccgtggctgtgtatgccatcggcatggcggtgctgacaatggtgatgggcaacgcctttgccgctttcccgattgtgaccgccggagttggcattccgattttagtcctgcagcacggcggcaatccggcggtaatggcggcgattggtatgttttccggctactgcggcacgctgatgacgccgatggcggcgaacttcaatattgtcccggcggcgctgctggaactgccggataaaaatgcggtgattaaagcccagataccgaccggtatcctgctgcttatcgtcaatgtattcttactctatttcctgatgttcctgtaa

SEQ ID NO: 211237 - DNA, 726 bp, Klebsiella pneumoniae
atgcaagaggcgatatccctctggccgctaatcggcattgccgtgattgtggtcggttttgtattacgctttaacccggtgctggtggtgattatctccgggatcgtcaccggcgtggcggcgcatatgccaatagccactattctggagaaactgggcgagggcttcctgaatacccgtaatctgccgtttattctgctgctgccgctggcggtgatcgggctgctggagcgccatggtctgaaagagcgggcgcaggcgtggatcgcgaagatccatagcgcgaccgccggacgtctgctgatcgtctatctgtttgtgcgcgaagccaccgccgctctggggttgaccagcctcggcggacatccgcaaatggtgcgcccgctgctggcgccgatggcggagggggcggcggaaaagcgctttggcccgctgccgggcaatgtacgctaccgcctgcgcgcgatgtcggcggcgaccgataacgtcgggctgttcttcggcgaagatatttttgtcgccttcggcgcgatcatcttcatgcacaactttatgctggagtcgggtgggatccagacagaaccgttgcatattgccctgtgggggatcccgacggcgatctgcgcctttctgatccacgccgcgcgcctgtggcgactcgatcgccatctccagcgcgagctggaccggataaacgccggacaggcgaaaggcggtgcggcatga

SEQ ID NO: 211238 - DNA, 744 bp, Klebsiella pneumoniae
atgaaaattgatttaaatgccgacctcggcgaaggctgcgccagcgatagcgcgctgctgcagctggtctcttccgccaatatcgcctgcggctttcacgccggcgatgcggttctcatgcagcaatgcgtgcgcgaggcgctgaaaaacggcgtcgctatcggcgcacacccgagcttcccggaccgggaaaatttcggtcgaaccgcgatgcagttaccgccagagacggtctacgcccaggtgctgtaccaaattggcgcgctggcggcaatcgtacacgcccaggggggcgagctgcggcacgtcaaaccgcatggcatgttgtacaaccaggcggcgaaagagccgcctttggccgacgctatcgcccgtgcggtgcgcgatgccgacgccgacctggtgctggttgggctggcgggcagcgagcttatccgcgccggacagcattatcagttgacgacgcgccaggaagtcttcgccgatcgcggctatctggccgacggcagcctggtgccgcgtagccaaccgggcgcgctgattgagagcgaagagcaggcgctggcgcaaacgctggaaatggtgcagcacaaccgggtgcgcagcctgagcggcgaatgggcgcatgtaaaggcggaaacggtctgcctgcatggcgatggcgctcacgcgctcgatttcgcccgacgcttgcgcgccgcgtttgccgggcggaatatcgacgtcagcgcggacctcgagtaa

SEQ ID NO: 211239 - DNA, 933 bp, Klebsiella pneumoniae
atgttgaaatttatccgcgccggcatgtatacctcggtacaggatggcggccgggaaggccagcgccagtgggggattagccgctgcggcgcgctggataaaccggcgatgaccattgccaatctgctggtgggcaatgcgccggaggcggcggcgctggaaattacgctgggtcaggtcgatgtgcagtttacccgccactgctggttcgcgttgaccggcgccgcctgtgaagcgacgctcgacggcgcgccggtctggttgggctggcgaatggaggcgaaggccgggcagcggctggtgctgaaaaatcctcagcatgggatccgcagctatctggcggtcgcgggcggtattgatgtccctgaagttttaggttcccgctctaccgatctgaaagtcggtatcggcggaatcgaagggcgccggttgcaggatggcgatcaagtgaagattgggaaatcgtcccgccgctttagcgcctcgcgcggcgttaaacagctgccgataggcaatattattcgcgcgctgccggggccggagtatcacgaattcgacagcgtgtcgcaggagtctttctggcgctcgccgtggaagctgagtccgcaaagcaaccgtatgggctaccgcctgcaggggcagccgctcaggcgcacaaccgaccgggaaatgctctctcatggcctgctgcccggcgtggtacaggtaccgcataacggccagccgattgtgttgatgaacgatgcgcaaaccaccggcggctatccgcgtatagcctgcattattgaagccgatatgtaccaactggcgcaaattccgctaggtcagccgatccatttcgtcccctgttcgctggaggaagcgctaaaagcgcgcgccgaccagcagcgctaccttgaacaactggcctggagattaagcgatgaaaattga

SEQ ID NO: 211240 - DNA, 657 bp, Klebsiella pneumoniae
gtgcagcgagcgcgttgttatctgttaggtgaaacggcggtggtcctggagcttgagcctccggtgaccctggagagccaaaaacgtatctggggactgacgcagcggttgaccgatcgcgaagaggtggttgaagtgatcccggggatgaacaacatcaccgttgtgctgcgtcgtccgcaggagatggcgtgggaggcgattgacaagctgcagcgctggtgggaagagagcgatgcgctggagccggaataccgtgagataagtatcccggttatctacggcggcgaggcgggaccagatcttggcgacgtcgcgcgccatagcgggttgagcgaaaagcaggtggttgaactgcactcttcggtggagtacatggtgtggtttctgggtttccagccggggtttccgtactttggcggcctgccggagcagctggcgatgccgcgtcgcgccgagccgcgcgtactggtaccggcgggatccgtcggcatcggcggatcgcaaaccggtatttatccgctggcgacgccgggcggctggcagctgctggggcgcacgccgctggcattattcgatccaaaacgtgaagagccggtgctgctgcgttccggcgatcgcgtgcgctttgtgccgcagaaggagggggtatgttga

SEQ ID NO: 211241 - DNA, 744 bp, Klebsiella pneumoniae; identical to SEQ ID NO: 138424

SEQ ID NO: 211242 - DNA, 1479 bp, Klebsiella pneumoniae
atgcagacaacatcatcgcagccgcgggcgatctactacgtcgtggcgctgcaaatctgggagtactttagcttttacggcatgcgcgccctgctgatcctctatctcaccaatcagctcaaatatgacgataaccatgcctacgccctgttcagcgcctactgttcgctggtctatgtgacgccgatcctcggcggctatctggccgataagctgttaggcaaccggatggcggtcatgctcggcgcgctgctgatggccattggccatctggtgctcggggccagcgaaaccgctccgcttttcctgtacctgtcgctggcgatcatcgtctgcggctacgggttgtttaaatccaacgtcagctgtctgctgggcgagctgtacgaacccgccgatccgcgtcgcgatggcggcttttcgctggtgtatgccgccggcaatatcggctcgattatcgcgccgatcgcctgcggctacgtacaggaggagtatagctgggcgatgggctttgccctggcggccatcggcatggtcgcggggctggtgattttcctctgcggcaaccgtcatttccagcataccgctggcgtcaaccgccaggcgctgtgcgcgcgccgcttcctgctgccaaactggggctggctgctggtgttgctggttaccgccccgctgctgattgcggtactgttctggcaggagtggtcggtgtatgccctgatcgtggccacggccattggcctcgcggtactggcgcggatctacctgcgcgccgaaaccgataaacagcgcaaggatctgcgcctgatcgtcgtcctgaccgccttcagcctgctgttctgggccttcgcccaacagggcgggagctccatcagcctgtatattgaccgcttcgttaaccgccatatcatgagctacgaagtccctaccgctatgttccagtcaatcaacgccttcgcggtgatgctctgcgggatggtgctggcgtggctggtgaaagagagcgtgaacggcaatcgcaccgtgcgcatctgggggaaatttgccctcggtctgggcctgatgagcgccgggttctgcattttgaccctcagcgcccgctggtcggcggcctatggtcagtcgtccatgccgctgatggtgctgggtctggcggtgatgggctttgccgaactgtttatcgacccggtcgcgatgtcgcagatcacccgcattgagatcccgggtgtcactggggtgctgaccggtatttatatgctgctctcaggggccatcgccaactatctggccggcgttatcgccgaccagacctcgcaggcgtcattcgacgccgccggagcggtgaactactccattgacgcctacattaccgtcttcagccagatcacctggggcgcgctggcctgcgtcggcgtggtgctggtcatctggctgtatcattcgctgaaagtcaggacccgccgtctggcggtggagtaa

SEQ ID NO: 211243 - DNA, 1443 bp, Klebsiella pneumoniae
atggccacccatctggtctggttacgcacggatttacgcattcacgataacctggcgctggctgccgcctgccgcgatccgcaggcgcaggtgctggcgctgtatatcgccaccccggggcagtggcgtgaacatcacctggcgccacggcaggccgcttttatcgccagccatttacagagtctgcatgccgcgctggcggaacggggcataccgctgtgggtagaagaggcggacgattttaccgccagcgtcgaacggctggccgatttttgccagcagcatcaggtcagtcacctgttctacaactatcagtacgaattcaatgaacgccagcgcgatgccgccgttgagaacaccttgtgcgacgtgatttgccagggctttgacgacagcgtcctgttgccccccggcagcgtactgaccggtggcggcgaaatgtataaagtcttcaccccgtttaaaaatgcgtttattcgccgtctgcgggacgggctgccggcgtgcgtggcggccccgaagccgcgccaggcgcctgcccgccaggcgccgccgctgcctgagcttaactacccgcaaacgccgtttgacgggctgctgtttgccgcggatgaaaaaacggcgctggcgcgtctgcgcgcgttttgtcagcaagcggcggcggattacgaggggcagcgcgacttcccggccgtggaagggaccagtcgcctgtcgccctgcctggccatcggcgtgctgtccccccgccagtgcctgcatcgtctgctgacggaacatcccgccgcgctggacggcggagccggcgccacctggcttaacgagctgatctggcgcgagttttaccgccatctgatggtctactatccgaagctctgtaaagggcggccatttactgcctggacagataaggtcgcctggcgcgcagaggaggcctccctacaggcctggcagcgcggggagaccggttttccgattgttgatgccgccatgcgccagcttaacgccaccggctggatgcataaccggttgcgcatgattgtagccagcttcctgaccaaagatttgcgcctcgactggcgggcgggcgagcgctatttcatgagccagctgattgatggcgacctggcggcgaataacggcggctggcagtgggcggcttcaacgggcaccgacgccgcgccctatttccgcatatttaatcccaccacccagggcgaaaagtttgataaacagggggtgtttatacgtcgctggctgccggagctggcaaaggtgccggagaaggccctgcatcagccgtgggcgtgggcggataaacaagggatcacgctggattattcgcgcccgatagttgatcacaagcaggcgcggcaggagacgctggcggcctgggaggccgccagaaaaggaattactccaccgccagacggcgggtcctga

SEQ ID NO: 211244 - DNA, 207 bp, Klebsiella pneumoniae
atggcgttgtacaaagcttatcctgctcatattattttgctgcgtcgtgctttcgccgtcgtggctggtgtcgcagcgctgccggtgatgctgttctggaaagatcgcgcccgctactacagctggctgcaccgggtgtggtcgaaaaccagcgagcagccggtgtggatggcgcaggcggagaaagccgctcacgatttctattaa

SEQ ID NO: 211245 - DNA, 1680 bp, Klebsiella pneumoniae
atggctgcccagggatttttattattagccagctatctgctggtattgctggtgctggcgcgcccgctggggatgtgtctggcgagaatggtgaacgatatcccgcttcccggcctggccggcgtcgagcgcgtcctgtggcgcgtggccgggatccgcgccgaggagatgggctggctgcagtatttgctggcgatcctgctgtttaacgccctcggcggcctggcgctgtttgccctgctgatgctccagggcgtgctgccgtttaacccgcagcacctgccggggctgtcatgggatctggcgctcaataccgcgatcagctttgtcagcaataccaactggcaggcttacgccggcgaaagcaccatgagttatctcagccagatggtcggcctgacggtgcagaatttcctctccgccgccaccggcatcgccgtggtcttcgccctgacccgcgccttcgcccggcagaaaatgtcgaccctcggcaatgcctgggtcgatctgacgcgcattaccctgtggctgctgctgccgctctctctgctggtggccctgttctttattcagcagggcgtgccgcagaatctgcaggcctaccagccctttaccaccctcgaaggggtgcaccagctgctgccgatggggcctgtcgcctcacaggaagcgattaagctgctgggcactaacggcggcggtttcttcaatgccaactccgcccatccgtttgaaaacccgaccgcgctgaccaatctcgtgcagatgctggcgatcttcctgatcccggcggcgctgtgcttcgccttcggcgaggtggtaagcgatcggcgtcagggacgcgccatcctgtgggcaatgacgctgatctttatcctctgcgtcgccgtggtgatgtgggcggagacccgcggcaatccgcatctgctgacgctgggtgccgacagcagcctgaatatggaaggaaaagagagtcgcttcggtattctcgccagcagtctgttcgcggtgatcaccaccgccgcctcctgcggcgcggtcaatgccatgcatgactccttcaccgcgctgggcggcatggtgccgatgtggctgatgcagattggcgaagtggtattcggcggcgtcggctcgggcctgtacggcatgctgctgttcgttatgctggcggtatttatcgccgggctgatggtcggccgcaccccggagtacctcgggaagaaaatcgatgtccgggaaatgaaaatgatcgccctcgccattctggtcaccccgacgctggtgttgctcggcacggcgctggcgatgatgaccgacgccggccgcgccgggatgttcaaccctggaccgcacggctttagcgaagtgctgtacgccgtcacctcggcggccaataacaacggtagcgccttcgctggcctgggtgcggcgacgccgttctggaacctgctgctggcgttctgcatgctggtcggccgcttcgccgtcatcattccggtgatggccatcgccggctcgctggtggcgaagaaaattcaaccggccagccccggcaccctggccacccacgacgccctgtttatcggtttactgatcggcaccgtgctgctggtgggcgccctgacctttattcctgcgctggcgcttggcccgctggctgaacacttttccttactttga

SEQ ID NO: 211246 - DNA, 2049 bp, Klebsiella pneumoniae
atgagtcgcaaacaattagccctgctggagccgacgctggtgcgccaggcgctgctggatgccgtgaaaaaactcagcccgatggtgcaatggcgcaatccggtgatgtttatcgtctgggtgggcagtctgttaaccaccctgctggcgatcgccatggctggcggcgccctgaccggtagcgccacctttaccgccgccgtcagtatctggctgtggtttaccgtgctgttcgccaactttgccgaagcgatggcggaaggccgcagcaaagcccaggccaacagcctgaaaggggtgaaaaaaacggccttcgcccgcaaactgcgcaccccgcagcatgacgcgccggtcgatcacgtgccggcggaagacctgcgcaaaggcgacgtggtactggtggaagccggggatattatcccctgcgatggcgaagtcatcgaaggcggcgcctcggtggacgaaagcgccattaccggcgagtctgccccggtgatccgtgaatccggtggcgattttgcctcggtgaccggcgggacacgcattctctccgactggctggtgatccgctgcagcgtgaacccgggagaaaccttcctcgaccggatgatcgccatggtggaaggcgcccagcgccgtaaaacgccgaacgagatcgccctgacgatcctgctgatcgccctgacgctggtgttcctgctggccaccgccaccatttggcccttctcggcgtggagcggcaatgcggtcagcgttaccgtactggtcgccctgctggtgtgcctgatcccgaccaccatcggagggctgctgtcggccatcggcgtcgccgggatgagtcgtatgctcggcgccaacgtgatcgccaccagcggccgcgcggtggaagccgctggcgacgtcgatgttctgctgctggataaaaccgggactattactctcggcaaccgccaggcctccgccttcctgccggctcgcggcgtggaagagcgaaccctcgccgacgccgcccagctctcctcgctggcggatgaaacccctgaggggcgcagcatcgtggtgctggcgaaacagcgctttaacctgcgcgaacgcgatctgcagtcgctgcacgccacctttgtcccctttaccgcgcaaacgaggatgagcggcatcaatatcgatcagcgcatgatccgcaaagggtcggtggacgccattcgccgccacgtggagtccaacggcggccacttccctgccgatgtcgataaacaggtggaagaggtcgctcgccagggggccacgccgctggtggtcgccgaaggcgaaaaggtgctggggattattgcgctcaaagatatcgtcaaaggcggcatcaaagaacgtttcgcccagctgcgcaaaatgggcattaaaacggtgatgatcaccggcgataaccgcctgaccgccgcggcgatcgccgccgaggccggcgtcgatgatttcctcgccgaagcgacgccggaagccaagctggcgctgatccgccagtaccagtcggaaggtcggctggtggcgatgaccggcgacggcaccaacgacgcgcccgcgctggctcaggccgacgtggcggtggccatgaactccggcacccaggcggcgaaggaagcgggcaacatggtcgacctggattccaaccccaccaagctgattgaggtggtccatatcggcaaacagatgttaatgacgcgcggttcgctgaccaccttcagtattgccaacgacgtggcgaaatatttcgccattattccggcggcgtttgccgcggtctatcctcagctggccatgctgaacgtgatgggcctgcattcgccctcatcggcgatcctcagcgccgttatcttcaacgcgctgatcatcgtctttctgatcccgctggccctgaaaggcgtcagctatcgcccgctctccgcctcggcgatgctgcgccgcaacctgtggatctacggcctcggcggtctgctggtgccctttatcggtattaaagccatcgacctgctgctgaccctgagcggtctggtgtga

SEQ ID NO: 211247 - DNA, 576 bp, Klebsiella pneumoniae
atgtcattgattcgtccggcacttgtgctatttattctgttaacgctgctcaccggcggcgtctatcctctgcttaccaccagcctgggacaatggtggtttaactcacaggccaacggctcgctgatccgcctgaacggtgaagtgcgcggctcggcgctgattggccagaacttcaccgccgcaggctattttcagggccgcccgtcggccaccgcggagacggcggataatcccatggcctctggcggcagcaacctcgccgccagcaacccggcgctggataaagcggtgagcgagcgcgtgcaggccctgcgcgccgccaacccggacgccgacccgcgggtgccggtcgaactggtcaccacctcggcgagcggtctcgataacaacctgactccggccgccgcgctgtggcaggtgccccgggtggctcaagcgcgccagctgagcgttgagcaggtaacccagttggtgaatcaggccacacaaaccccgctgctgagcttccttggccagccggtggtcaatatactgcaactcaatatggcgctggatgccctgaaggataagtaa

SEQ ID NO: 211248 - DNA, 2688 bp, Klebsiella pneumoniae
atgagtgacgagccgctgcgcccggaccctgaccgcctgctgcagcacaccgccgccccgcatcgcggcaaactgaaagtgttctttggcgcctgcgccggggtggggaaaacctgggcgatgctggcggaagcgcagcggctgcgcgcccaggggctggatattctgattggcgtggcggagacccacggccgtaaagagaccgccgcgatgctgcagggcctgagcactctgccgccgcggcggcttgcccatcgcgggcggtacgtctatgagttcgatctcgacgccgccctcgcccgccgtccggcgttgattctggtggatgagctggcgcacagcaatgcgccaggctcccgccatccaaagcgctggcaggatgtggatgaactgctggaggccgggatagatgttttcactaccgttaacgtccagcatctggaaagtctgaatgacgtcgtcagcgggatcaccggcgtgcaggtgcgggaaacggttcccgatcccttctttgacgccgcggacgacgtggtgctggtggacctcccccctgacgatctgcgccagcggctcaatgagggcaaagtctacatcggcggccaggccgagcgcgctatcgaaaactttttccgcaagggcaatctgattgcgctgcgcgagctggccctgcgccgcaccgccgaccgcgtcgatgagcagatgcgcgcctggcgcgaccgccagggccaggagaaagtctggcacacccgcgatgcgatcctgctctgtatcgggcacaataccggcagcgaaaagctggtgcgcgccgccgcccggctcgccgcccgcctgggcagcgtctggcatgcggtgtatgtcgagaccccttccctgcaccggctaccggaaggccggcggcgggctattctcgccgcgctgcgtctggcccaggagctgggggccgaaaccgccaccctctccgacccgtcggaagagaaagcggtcctccattacgcccgcgaacataacctcggcaaaatcgtcattggccgccaaagcaagcgccgctggtgggatcgcagcggcttcgccgatcgtctggctcgccatgcgccggacctcgatctggtggtgatcgccctcgatgagaaacccttcccccttgccgcacgcgccagcgacagccgtccggcgctggagaaatggcgcctgcagctgcagggctgcgcggtggcggtggcgctatgcgccatcattaccctggtggccatgcagtggttgatggctttcgaagccgccaacctggtgatgctctatctgctgggggtggtgatcatcgccctggtctatggccgctggccgtcggtgctggcgacggtgatcaacgtcatcagcttcgatctcttttttgtcgccccgcgcgggacgctggcggtgtcggatgtccagtatctgctcaccttcggcgtgatgctcaccgtgggcctgcttatcggcaacctcaccgccggcgtgcgctaccaggcgcgggtggcgcgctaccgtgaacgccgtacccgccatctgtatgagatgtctaaagcactggcggtgggtcgcagccagcaggatatcgccaccaccagcgagcgatttatcgcctccacctttcaggcccgcagccagctgctgctcccggacgcccagggaaaactgctgcccttaacccaccagccagggctgaccccgtgggatgatgccatcgcccgctggagctttgataagggccaacctgccggcgccggcaccgataccctgcccggcgtgccgtatcagatcttgcccctgaagagcgccgcccgcacctggggactactggtggtggaaccggagaatctgcgccaattgatgatcccggagcagcagcggctgctggagacctttactctgctggtggccagcgccctggagcgcctcaccctgaccgccagcgaagagcaggcccggctgaccagcgagcgggaaagcctgcgtaactcgctgctcgccgccctgtcgcacgatctgcgtactccgctgaccgtgctgtttggccaggcggaaattctgaccctcgatctggccagcgaaggttcaaaacatgccccgcaggccaacgaaatccgccagcatgtgctcaacaccacccggctggtgaacaacctgttggatatggcgcggatccagtccggcggctttaatctgcataaggagtggctgacgctggaggaagtggtcggcagcgcgctgcgcatgctcgagccaagcctcggcggccagcatattcagctggatttacccgatcccctccagctggtgcatgtcgacggaccgctgttcgagcgggtgctgatcaacctgctggaaaatgcccataagtatgccggcgcccgggcgagcatcggcatccgcgccgaggcggacgcccggcagctgtcgctggaggtatgggataacggtcctgggatcccggcaggccaggagcagactatctttgataaattcgcccgcggcaacaaagagtcggcgatccttggcgtcgggctgggccttgccatctgtcaggccatcgtcgacgtccacggcgggaccatctccgccagcaaccggcccgagggcggcgcctcattccgtgttacactgccgggagaaacgccccctgaactggaagagctacctgaggaattgtga

SEQ ID NO: 211249 - DNA, 678 bp, Klebsiella pneumoniae
gtgattaacgttctgattatcgaagacgaacacgctatccgacgctttctccgcaccgcgctggaagccgacggcatgcgcgtatttgaagcggaaaccctgcagcgtgggctgattgaagccgccacccgtaagcccgacctcgcgatcctcgatctcggcctgccggatggtgacggcattgattttattcgcgacctgcgtcagtggagccagatgccgattatcgtcctgtcagcgcgtagcgaagagcatgacaaaattgccgccctggatgccggcgccgatgactacttaagtaaaccctttggcatcggcgagctgcaggcccgcctgcgcgtcgcgctgcgtcgccacggcgcggcgcaggccgatgagccggtggtgcgcttcgctgacctggaggtcaatatccccgcccgccgcatcctgcgcggcagcgaagagatccacctgacgcctatcgagtttcgcctgctggcggcgctgttgaataatcccggcaaagtgcttacccagcgccagctgctgaatcaggtgtgggggcctaacgccgtggagcacagccactatctgcggatctatatgggtcatctgcgacaaaagctggaggccgatccggcacggccgcagcatttgctgaccgaaaccgggattggctatcgctttatgccctga

SEQ ID NO: 211250 - DNA, 438 bp, Klebsiella pneumoniae
atgaaaatacaacggaagtctctgtttttgttctgggcgtggatggatctctttttcgtcctgcaattcttatggtggaatattgcccaccgccgcctccctttttacgacgatctgctggcttatctccagctgctgcacacctggggctccgcggcggtctggctgtacccgctgaatgttctgctgattatcagcatcccgctatcgatgatcttttttttccgccagagccgctatgcgctgtggctggcctgggggcaggcgccgctcaggctgctgttcatgcagccttcgctattgctgggcctgtggctgattcaggctgccggcgtccggcatgtagcgatcctggcaggctttctgctgctctctgaagggctgaaaatcgccagcctctggtactgcagaggcgggattcagggcataaagcgatag

SEQ ID NO: 211251 - DNA, 1641 bp, Klebsiella pneumoniae
atggcaatcgataaacgtgcggggcagcctgcgcaacagagtgatttgattaacgtcgcccaactgactgctcagtactacgtgctgaagcctgaagtcggtaatgcggagcatgcggtaaaattcggcacctctggccatcgcggtagcgcggcgcgccacaacttcaacgaaccgcatatcctggccatcgcccaggccattgcggaagatcgtgcgaaaaacgggatcaccggtccgtgctatgtcggcaaagatacccacgccctctccgagccggcgtttatttcggtgctggaagtgttaaccgccaacggcgtcgacgtgatcgtgcaggaaaacaacggcttcaccccgacgccggcggtctccaacgcgattctggtgcataacaaaaaaggcggtccgctggcggacggcattgtgatcaccccgtcacacaacccgccggaagatggtggtatcaagtacaatccgccaaacggcggcccggctgataccaacgtcaccaaagtggtggaaaaccgcgccaacgaactgctggccgcgggcctgcagggcgtgaaacgcatttctctggacgcggcgctggcttctggccacgttaaagaacaggatctggtgcagccgttcattgaggggctggcggatatcgtcgatatggccgcaatccagaaagccggcctgacgctgggcgtcgatccgctgggcgggtccggtatcgaatactggaagcgcattggcgagcactacaagctcaatctgaccattgttaacgatcaggtggatcagaccttccgctttatgcacctcgataaagacggcgccatccgcatggattgctcctcagagtgtgcgatggccggcctgctggcgctgcgcgataagttcgatctggcgtttgctaacgacccggattacgaccgccacgggattgtcaccccggcggggttgatgaacccgaaccactacctggcggtagcgatcaactacctgttccagcatcgtccgcagtggggcaaagaggtggcggtgggtaaaacgctggtctcctccgcgatgattgaccgcgtggtgaacgatctgggccgcaagctggtggaagtgccggtgggctttaagtggtttgtcgacggcctgttcgatggcagcttcggcttcggcggcgaagagagcgccggggcctccttcctgcgcttcgacggcacgccgtggtccaccgataaagacggcatcatcatgtgcctgctggcggcggaaatcaccgcggtgaccgggaaaaacccgcaggagcattacaacgaactggcggaacgcttcggtgcgccgagctataaccgtctgcaggcttccgcgacctccgcgcagaaagcggcgctgtccaagctctctccggaaatggtcagcgctgacaccctggcgggggatccgatcactgcccgtctgaccgcggcgccgggcaacggggcggcgattggcggcctcaaggtgatgaccgacaacggctggttcgcggcgcgtccgtcaggcaccgaagacgcctacaagatctactgcgaaagcttcctcggcgaagagcatcgcaagctgattgaaaaagaagcggtagagattgtcagcgaagtgctgaagaacgcttaa

SEQ ID NO: 211252 - DNA, 693 bp, Klebsiella pneumoniae; identical to SEQ ID NO: 136588

SEQ ID NO: 211253 - DNA, 774 bp, Klebsiella pneumoniae; identical to SEQ ID NO: 136587

SEQ ID NO: 211254 - DNA, 294 bp, Klebsiella pneumoniae; identical to SEQ ID NO: 136586

SEQ ID NO: 211255 - DNA, 531 bp, Klebsiella pneumoniae
atggcaatcatcggcatcttttttggcagcgacaccggcaacaccgaaaatattgcaaaaatgattcaaaagcagcttggtaaagatgttgctgatgttcacgacattgccaaaagcagcaaagaagacctggaagcccacgacatcctgctgctcggtatcccgacctggtactacggtgaagcgcagtgtgactgggatgacttcttcccgacgctggaagagatcgacttcaatggcaaactggtggcgctgttcggctgcggcgaccaggaagattacgcagaatacttctgcgacgcgctgggcaccatccgcgacatcattgagccgcgcggcgcgaccatcgtcggtcactggccaacggcggggtatcattttgaggcttccaaaggcctggcggatgacgaccacttcgtcggcctcgccatcgatgaagaccgccagccggagctgaccaacgagcgcgttgagaaatgggtgaagcaggttgccgaagagctgcacctcgaagaaatcaaaaacgcctga

SEQ ID NO: 211256 - DNA, 453 bp, Klebsiella pneumoniae; identical to SEQ ID NO: 136584

SEQ ID NO: 211257 - DNA, 333 bp, Klebsiella pneumoniae
atgaaaaaaatgctgcttattgccatgatggcagcgggcctggtggcctgcaccacgtcgccggcgccgaaagaagacaccaaactgaaagatgcctatagcgcctgtattaatacggcggaagggaatccggacaagattgaagcctgccagagcgtactgaatgtgctgaaaaaggataaacagcaccagcagttcgccaaccaggagagcgttcgcgtcctggattaccaacagtgtattcaggccacccgcaccggcaacgatcaggcggtgaaagcgcgctgcgatcagatctggaaagagatccgcagcaataatacgacccattaa

SEQ ID NO: 211258 - DNA, 1404 bp, Klebsiella pneumoniae
atgcgtacgtttagtggcaaacgtagtacgctggcgctggctattgccgccgtcaccgcgatgtcgggctgggttgtggctccacaggccagcgcagcaggctttatcgatgattcaaccttaaccggcggtatctattactggcagcgtgagcgtgaccgtaaagatgtgaccgacggcgacaaatacaaaaccaacctttcccactccacctggaacgccaacctggacttccagtccggctatgccgccgatatgtttggccttgatattgccgcgtttaccgcgattgaaatggcggagaacggtgatagcggtcacccgaacgaaattgccttctcgtcacgtaacaaagcctatgacgaagactattccggcgataagagcggcatcagcctgtataaagccgcagcgaaattcaaatatggtccggcgtgggcacgtgcgggctatatccagccaaccggccagactctgctggccccgcactggagttttatgccaggtacctatcagggggcggaggccggggctaacttcgactatggcacggcgggcgcgttaagtttctcctatatgtggacgaacgagtataaagcgccatggcatatcgagatggacgatttctatcagaacgataagaagaccaaagtcgattatctccactccgtcggcgctaaatatgatttcaaaaatgacctggtgctggaggcggcatttggtcaggctcagggctatatcgatcagtactttgctaaagccagctacaagtttgatgtcgccggcgcgccgctgagcaccagctaccagttctacggcacccgcgataaggtcagcaacggcggggtcaacgacatctatgatggcaccgcatggctgcaggcgttaacctttggttataaggtggcggatgtcctggatctgcgtctcgagggaacctgggtgaaggctgatggccagcagggctacttcctgcagcgtatgaccccgacctacgcctcttccaatggtcgtctcgatatctggtgggataaccgctccgactttaacgccaacggcgaaaaagcggtcttctttggcgcgatgtatgacatgaaaaactgggatatgccgggctgggcgttcggcgcgtcttatgtctacgcctgggatgcgaagccgggccgaatgtcctctccggatgcgtactatgaccctgactatcgcctgaaagagtcggcctatagcctggatgcaatgtataccgtacaggaagggcgggcgaagggcaccctgttcaaactgcactttacccaatacgacaaccattccgatattccgagctggagcggcggctacggcaacatcttccaggatgagcgcgacgtgaagttcatggttatcgccccgttcactattttctga

SEQ ID NO: 211259 - DNA, 309 bp, Klebsiella pneumoniae
atgtggggcggtaaaaaagaccgcgaaaccactatagatagactatttttcgtgacgcgaattatcaatgtttttcgtgaggcaaagcttaagattatgacaaagcgcacatattttatgtcgttttgttacagtcttatctctgatgattttgttatggaagtcattgcaaaatcagggaaaaacgcaatcattgaaagcgattacattggttttttgtatgtgacaggaaacatcagaagcgctatttattaccgcgcagaaacagaattaattcgcatcgcgaaaatgaaaagtttaattagctga

SEQ ID NO: 211260 - DNA, 1668 bp, Klebsiella pneumoniae
atgagtgaggcagaagcccgcccgactaactttatccgtcagattattgatgaagatctggctaccggtaaacataccaccgttcacactcgcttcccgccggagccgaacggttatctgcacattggccatgcaaaatccatctgcctgaacttcggcatcgcccaggattatcagggccaatgcaacctgcgtttcgatgacaccaacccggtgaaagaagatatcgaatacgttgagtcgattaaaaacgacgtgcagtggttaggtttccactggtccggggacgtatgctactcgtctgattatttcgatcagctgcatcagtatgcggttgagctgatcaacaaaggtctggcctatgttgatgaactctctcctgatgaaattcgcgaataccgcggcaccctgaaagcgccgggtaaaaacagcccgtatcgcgaccgcagcgtggaagagaacctggcgctgtttgaaaaaatgcgtagcggcggcttcgaagagggcaaagcctgcctgcgcgcgaagatcgatatggcgtcgccgtttatcgtgatgcgcgatccggtgctgtaccgcattaagttcgctgagcatcatcagactggcaacaagtggtgcatctacccgatgtacgacttcacccactgcatcagcgatgcgctggaaggcattacccactcgctgtgtaccctggagttccaggacaaccgccgcctgtacgattgggtgctggacaacatcagcatcccggtgcatccgcgtcagtacgaattctcgcgcctgaatctcgaatacaccgtgatgtccaagcgtaagctgaaccagctcgtgactgagaagcacgtggaaggctgggacgacccgcgtatgccgaccatctccggtctgcgtcgtcgcggctacaccgccgaatccatccgtgagttctgcaagcgcatcggcgtgaccaagcaggacaataccatcgagatggcgtcgctggagtcctgcattcgtgaagatctgaacgaaaacgccccgcgcgcgatggcggtgatcgatccggtgaaactggttatcgagaactatccgcagggcgaaagcgaaatggtggtgatgccgaaccatccgaacaagccggaaatgggcagtcgtgaagtgccgttcagcgccgaaatctggatcgatcgcgcggacttccgcgaagaagccaacaaacagtacaagcgtctggtgctgggtaaagaagtgcgtctgcgcaacgcctacgtcatcaaagcggaacgcgtggagaaagatgccgaaggcaatattaccaccatcttctgcacctacgatgccgacaccctgagcaaagacccggccgacggccgcaaggtcaaaggcgtgatccattgggtaagcgcggcgcatgcgctgccggtagagatccgtctctacgatcgtctgttcagcgtgccaaacccgggcgcggcggacgatttcctcgcggtaatcaacccggaatcgctggtgatcaaacaggggtacgcggagccgagcctggcgcaggccgaagccggtaaagcttaccagtttgagcgtgaaggctatttctgcctcgacagccgctatgcaaccgcaaccaatctggtgttcaaccgcaccgtcgggctgcgtgatacctgggcgaaagcgggcgaataa

SEQ ID NO: 211261 - DNA, 1956 bp, Klebsiella pneumoniae
atgaatattttaggtttctttcagcgactgggtagggcgttgcagctccctatcgcagtgctgccggtcgcggcattgctgctgcgtttcgggcaaccagacctgttgaatgtacccttcatcgcgcaagcgggtggggcgatcttcgataatctggcgctgatcttcgcaattggtgtggcatcaagctggtccaaggataacgccggttctgcggcgctggccggtgcggtagggtatttcgtgatgaccaaagcgatggtcaccatcaacccggaaatcaatatgggcgtgctggccggtatcattaccggtctggtggcaggggcggtatacaaccgctgggccggcatcaagctgccggacttcctgagcttcttcggcggcaaacgcttcgtgccgatcgccaccggcttcttctgtctgatcctcgcggcgatcttcggctacgtctggccgccggtgcagcacgctatccactctggcggcgaatggatcgtctccgcaggggcgctgggttccggtatctttggtttcatcaaccgtctgctgatcccaaccggtctgcatcaggtgctgaacactatcgcctggttccagattggtgagttcactaacgccgctggcgctgtgttccacggcgacatcaaccgcttctacgccggcgacggcaccgcggggatgttcatgtccggcttcttcccaatcatgatgtttggtctgccgggtgcggcgctggcgatgtatctggcggcgccgaaagcgcgtcgtccgatggtaggcggtatgctgctgtccgtggccatcaccgcgttcctgaccggggtaaccgagccgctggaattcctgttcatgttcctggctccgctgctgtacctcctgcatgcggtgctgaccggtatcagcctgttcatcgcaacggcgctcgggatccatgcgggcttctccttctccgcaggtgcaattgactacgtgctgatgtacagcctgccggccgccagcaaaaacgtctggatgctgctggtgatgggcgtggtgttcttcttcgtctacttcctgctgttcagcgcggtgatccgcatgttcaacctgaaaacgccgggtcgtgaagacaaagccgctgacgtggtaacggaagaagccaacagcaacactgaagaggggctgacccagctggcgaccagctatatcgccgcggtgggcggaacggacaacctgaaagccattgacgcctgtatcacccgtctgcgtctgaccgtgggcgattcggcgaaggtgaacgacgccgcctgtaaacgtctcggcgcgtccggggtggtgaaactgaataagcaaaccattcaggttatcgtcggtgcgaaagcagagtctatcggcgatgagatgaaaaaagtggttacccgcggcccggtagcggcagcggcagccgcaccggctggcaacgtcgccaccgcagcgcccgcggctaaaccgcaggcggtagcgaacgcgaagaccgttgagtcgctggtttcgccgattaccggtgacgtggtggccctcgagcaggtgccggacgaagccttcgccagcaaagccgttggcgacgggatcgcggtgaaaccgaccagcaacatcgtggtggccccggccgccggtaccgtggtgaaaattttcaacactaaccacgcgttctgcctcgaaaccaacaacggtgcggaaatcgtcgttcacatgggtatcgacaccgtggcgctggaaggcaagggcttcaaacgtctggttgaagagggcacggacgtgaaggcgggtgagccgattctggaaatggatctggacttcctcaacgccaacgcgcgctcaatgatcagtccggtcgtctgcagcaacagcgatgactacagcgcgctggtgatactggcgagcggtaaggtcgttgctggccagacgccgctgtatgagattaaaggcaagtaa

SEQ ID NO: 211262 - DNA, 801 bp, Klebsiella pneumoniae; identical to SEQ ID NO: 136577

SEQ ID NO: 211263 - DNA, 1149 bp, Klebsiella pneumoniae
atgtatgcattaacccagggccgggtttataccggtcatgaaattctcgatgaccatgcggttgttatcgctaatggctttatcgaacgtctttgtccgctggcagatttgccgtctgacatcgagcagcgctcagtcaacggcgcaataatcgcccccggttttatcgacgtccagctcaacggctgcggcggcgtgcagtttaacgacagcccagaggcggtcactgtcgaaacgctggagatcatgcagaaggccaacgaacgctcaggctgcaccagcttcctgccgacgctgattacctccagcgacgatctgatgaagcaaggcgtgcgcgtgatgcgcgaatatctgcaaaaacatccgaaccaggcgctgggcctgcatctcgaagggccgtggctgaatatcgttaagaaaggcacccacaatccggactacgtgcgtaaaccggacgcggcgctggtcgatttcctgtgcgacaacgccgatgtgatcaccaaagtgaccctcgcccctgagcgcgttgagccagaagtgatccgcaaactggtcgccgccgggatcgttgtctccgcgggccactccaacgctacgctgaaagaggcgaaagtcggcttccgtgcgggcattaccttcgccacccacctgtataatgcgatgccgtacattaccggccgcgaaccgggtcttgccggggcgatttttgacgagccggatgtctactgcggtatcatcgtcgacgggatgcacgtcgattacgccaacgtgcgcaacgccaagcgcctgaaaggcgacaagctgtgcctggtcaccgacgccaccgcgccggcgggggcgaatattgaccagttcatttttgccgggaaaacaatatactaccgcaatgggctgtgcgtagatgaaaacggcaccctcagcggatcttccctgaccatgattgaaggggtgcgtaatctggttgagcattgcggcgtggcactggacgaagtattgcgcatggcgacgctctatcctgcgcgcgctatcggcgtggacaagcagctcggcagcattgcgccgggcatggtcgctaacctgaccgcctttacacgcgattataaaatcaccaagaccatcgttaatggtaacgaggtcgtcactgagtaa

SEQ ID NO: 211264 - DNA, 1221 bp, Klebsiella pneumoniae
atgacagcaggcggacaagctcaaattggtaacgttgacctcgtaaaacaactgaacagcgcggccgtgtaccgcctgattgaccagcatgggcccatctcgcgcattcagatagccgaacaaagccagcttgcccctgccagcgtgaccaaaatcacgcgtcagcttattgagcgcggcctgatcaaagaagtcgatcagcaggcctccaccggtggccgccgcgctatctctatcatcgcagaaactcgcaacttcaacgccatcggcgtgcggcttggccgctatgacgccactctgaccctgtatgatttaagcagcaagaccctggaagaggagcacttcccgctgcccgagcgcacccaggaaacgctggaacacgccctgctgaatatcatcgccacctttatcgaaaactgtcagcgcaaaattcgcgagctgatcgctatctcagtgatcctgccgggcctcgtcgacccggaaagcggcgtgatccgctatatgccgcatattgcggtggaaaactggggcctggtcggggcgctggagaaacgcttcaacgttacctgctttgttggccacgatatccgcagcctggcgctggccgagcactattttggcgcaagccaggattgcgaagactccattctggtgcgcgtgcaccgcggtaccggggcggggattatctccaacgggcgcatttttatcggccgcaacggcaacgttggcgaaattggccatattcaggtcgacccgctgggcgaacgctgccactgcggcaacttcggctgtctggagaccgtcgcggccaatgccgccattgaacagcgggttcgccacctgctggagcagggctaccagagccgtctgacgccggatgactgcacgatcaaaactatctgcaaagcggccaacaagggcgatgccctggcctgcgaggtgattgagtacgtggggcgccacctcgggaaaacgatcgccatcgccattaacctgttcaacccacaaaaaatcgtcgtcgccggcgaaatagtggaagctgaaaaggtccttcttccggccatcgaaggctgcattaacgcccaggcgcttaaggcgtttcgtaagaacctgccggtggtgcgctccaccctcgatcaccgctctgcaatcggcgccttcgcgctggtcaaacgcgccatgcttaatggcacgctgctgcagcgtttgcttgagagctaa

SEQ ID NO: 211265 - DNA, 753 bp, Klebsiella pneumoniae
atgaccattcaaaacataatttgtgatattgacggcgtactgatgcacgataacgtcgccgttcccggcgcagccgagtttatcaagcgcatcctcgataaaggcatgccgctggtaatgctgaccaactacccgtcgcaaaccggccaggatctggcgaaccgtttcgccaccgctggaattgatgttccggatagcgccttttacacctcagcgatggccaccgccgattttctgcgtcgccaggaaggcaaaaaagcctacgtggtgggagaaggggcgctgatccacgagctgtacaaagccggctttaccattaccgatgtgaacccggattttgtcatcgtcggagaaactcgctcctttaactgggaaatgatgcataaggccgccttcttcgtcgccaacggcgcccgcttcattgccactaacccggatacgcacggtcgcggcttctaccctgcctgcggcgcgctgtgcgccgggatcgagaagatctccggccgtaagccgttttacgtcggcaaacccagcccgtggatcatccgttcagcgctgaataaaatgcaggctcactccgagcagacggtgattgtcggcgataacctgcgcaccgatatactggccggtttccaggcggggctggagactattctggtgctctccggcgtctccaccctcgacgatatcgacagcatgccgttccgcccgtcgtggatttacccttccgtcgcggaaatcgatattttctga

SEQ ID NO: 211266 - DNA, 1665 bp, Klebsiella pneumoniae
atgtgttctatttttggcgtactggatattaaaactgacgcaggcgagctgcgtaaaaaggcgctggagctttcccgcctgatgcgccaccgcggtccggactggtctggcgtatatgccagcgacaaagcgattctggcgcacgagcgcctgtcgattgtcgacgtcaacgccggggcccagccgctgtacaacgccgaaaaaacccatgcgctggccgttaacggcgagatctacaaccaccaggcgctgcgcgcggagtatggcgatcgctaccagttccagaccggttccgactgcgaagtgatcctcgcgctgtatcaggaaaaaggcccggagttcctcgacgatctgcagggaatgttcgccttcgccctgtacgacagcgaaaaagacgcgtacttaattggccgcgaccatatcggcattatcccgctgtatatgggccatgacgaacacggcaacttctatgtcgcctccgaaatgaaagcgctggtgccggtatgccgcaccattaaagagttcccggcgggcagctacctgtggagcaaagacggcgaaattcgccagtactatcagcgcgactggtttgattacgacgcggtgaaagacaacgttaccgataagaacgagctgcgccaggcgctggaagagtcggtgaaaagccacctgatgtccgacgtgccttacggcgtgctgctctccggcggtcttgattcatcggtcatctcggctatcaccaagaaattcgccgcccgtcgcgtcgaagatcaggagcgtagcgaagcctggtggccgcagctgcactctttcgcggtcggtctggaaggctctcctgacctgaaagcggcgcaggaggtggccaaccacctcggcaccgtgcaccacgaaattcactttaccgtccaggaagggctggatgccatccgcgacgttatctatcacatcgaaacctacgatgtgaccactattcgcgcctcgacgccgatgtacctgatgtcgcggaaaattaaagccatgggcatcaaaatggtgctttccggcgaaggttcggacgaagtgttcggcggctacctctacttccataaggcgccgaacgccaaagaactgcacgaagagacggtgcgtaagctgcaggcgctgcatatgtttgactgcgcccgcgccaacaaagcgatgtccgcctggggcgtggaggcccgcgtgccgttcctcgacaagaagttcctcgacgtcgcgatgcgcattaacccgcaggataagatgtgcggcaacggcaaaatggaaaaacacattctgcgcgaatgctttgaatcctacctgccggccagcgtcgcctggcgccagaaggagcagttctctgacggcgtcggctacagctggatcgataccctgaaagaagtggccgccaaacagatcagcgaccagcaactggaaaccgcaagcttccgcttcccgtacaacacgccgacctccaaagaaggctatctgtaccgcgagatcttcgaagagctgttcccgttgccgagcgcggcggagtgcgtccctggcggtccgtcggtggcctgctcttcagcgaaagccattgagtgggatgaagcgttcaaaaccatgaacgatccatcaggccgcgcggtcggtgtccaccagtcggcctacaaataa

SEQ ID NO: 211267 - DNA, 1176 bp, Klebsiella pneumoniae
atgacaattcacgtaacagatgtcgccatcgtgggcggcggcatggtcggcggcgccctggcgttagggctggcgcaacagggatttaccgtgacggtgcttgagaaagcggcgccaccggcgttcgatccggcatccgccccggatgtgcggatctcggcgatcagcgcggcttcggtcggcctgctgaagagtctcggcgtctgggatgccatacgggcgatgcgcgtccacgcgtatcgccgtctggagacctgggagtgggagagcgcgcacgtcgccttcgacgccgcggagctcaagctgccggagctgggctatatggtcgagaacaaggttctgcaatggggcctgtggcaagcgctggcggcgcatgaggcggttaccctgtgcgtcggtagcgaactgaaaacgatgcagcgcggcgagacgcagacggcgttgcatttgcgcgagggggagacgatccacgcccggctggttatcggcgccgacggcgctaactcccaggtgcgggagatggccggcatcggcgtgcacgcctggcaatatcagcagtcctgtatgctgatcagcgtcgaatgcgccgacgatcccggcgacagcacctggcagcagtttactcccagcggcccacgcgccttcctgccgctgttcgaccactgggcttcgctggtctggtacgacgccccggcgcggatccgtcagctgcagagcatgaccatggcgcagctccagcaggagatcgccagtcactttccggcgcggctgggacgggtgacgccgcaggcggccggcgccttcccgctcacccggcgtcatgcgctgcagtatgttcagcccggcctggcgctggtgggcgatgcggcgcacaccattcatccactggcggggcagggggttaaccttggctatcgtgatgtcgatgccctgctggagattctggcggaagcgcgcggccgcggcgaagactgggccagcctgccggtgctgaagcgctaccaggcgcggcggcgagcggataattttatcatgcagtcggggatggatctgttttatgccggtttcagcaatgacctggcgccggtgcggatgctgcgtaatattggcctgatggcggctgaacgcgccggggtgctgaagcgtcaggcgctgaagtatgccttaggcttgtaa

SEQ ID NO: 211268 - DNA, 1425 bp, Klebsiella pneumoniae
atgacaaaaaaactccatattaaaacctggggctgtcagatgaacgagtatgattcatcaaagatggccgatctgctggatgcgacacatgggtatcaactgaccgaagtggcggaagaagcagatgtgctgttgctcaatacctgctcaattcgtgagaaggcccaggaaaaagttttccatcagcttggccgctggaagctgctgaaagagaagaacccggacctgattattggcgtcggcggctgcgtggcttcccaggaaggcgaccatattcgccagcgcgcgcactatgtcgatattattttcgggccgcaaaccctgcaccgcctgccggagatgattaactccgtgcgcggcaaccgcagtccggtagttgatatcagcttcccggaaattgaaaaattcgatcgcctgccagagccgcgcgccgaagggccgaccgcctttgtctcgattatggaaggttgcaataaatactgcacctactgcgtggtgccgtatacccgcggagaagaagttagccgtccgtgcgacgatatcctgtttgaaatcgcccagctggcggcgcagggtgtgcgtgaggtcaatctgctggggcagaacgttaacgcctggcgcggtgagaattacgacggcaccaccggcagctttgccgacctgctgcgcctggtcgccgccatcgacggcatcgaccgcattcgcttcaccaccagccacccgatcgaatttaccgacgatatcatcgacgtttatcgcgatacgccggagctggtgagcttcctgcacctgccggtgcagagtggctccgaccgtgtgctgaacctgatgggacgcacccataccgcgctggagtataaagcgattattcgcaagctgcgtgaagcgcgcccggatattcagataagctccgactttatcgtcggcttcccgggcgaaaccacggaagatttcgaaaagaccatgaagcttatcgccgacgtcaatttcgatatgagctacagctttatcttctccgctcgcccgggcaccccggcggccgatatggtcgacgacgtgccggaggcggacaaaaaacagcgtctgtatatcctgcaggaacgcattaaccagcaggcgatggcctggagccgtcgcatgctcggcacggtacagcgcatcctggtggaaggcacctcgcgtaagaacatcatggagctctccggacgtacggagaataaccgggtggtcaacttcgaaggtaccccggacctcgtcggtaagtttgtcgatgtcgaaatcgtcgatgtatataccaactcgctgcgcggtaaaatcgtgcgcaccgaagcggagatgggtctgcgtatcgctgaatcacccgaatcagtgattgcccgcacccgtaaagagaacgatcttggcgtgggaatttaccagccatga

SEQ ID NO: 211269 - DNA, 1047 bp, Klebsiella pneumoniae
ttgaacatagacactcgtgagattaccctggagccagcggataacgcacgcctgttagccctgtgcggcccgtttgacgacaacattaaacagctggagcgtcggttaggcattgagatcaaccgccgtgacaatcactttaagctgaccggtcgcgccctgtgcgtgcacgctgccgccgatattctgcgcagcctgtatgtcgacacagcgccaatgcgcggtcagattcaggatattgaaccagagcagatccacctggcgatcaaggaagcgcgcgtactggagcagagcgccgaaagcgtgcctgagtacggtaaagccgtcaatatcaagaccaagcgcggggtaatcaaaccgcgtacgccgaaccaggcgcagtacatcgccaatatcctcgatcacgacatcactttcggcgtgggtccggcgggtacgggtaaaacctatctggcggtggcggcggcggtcgatgcgctggagcgccaggagatccgccgtattctgctgacccgtccggccgtcgaggcaggcgaaaagctcggcttcctgcccggcgatctgagccagaaggtcgacccgtatctgcgcccgctgtatgacgcgctgtttgagatgttcggctttgagaaagtggagaagctgattgagcgtaacgtcatcgaagtggccccgctggcctatatgcgcggacggacgctgaatgacgcctttatcattcttgatgaaagccagaacaccaccatcgaacagatgaagatgttcctgacccgcatcggctttaactccaaggcggtgatcaccggcgacatcacgcagattgacctgccacgcagcaccaaatccggtctgcgccatgccatcgaagtactggcggaagtcgatgagatcagctttaacttcttccatagcgaagacgtggtgcgccatccggtggtcgcccgcatcgtgaacgcctatgaggcatgggaagccgcagaccagaaacgtaaagcagagctggccgccgagcgcaaacgcgaagcccaggaacaggagcaaaaatga

SEQ ID NO: 211270 - DNA, 474 bp, Klebsiella pneumoniae
atgagtcaggtgatcctcgatttacagctggcctgcgaagagaccagcggcctgccggacgaagcccttttccaacgctgggtcgacgccgtcattccgccgtttcaggaggagtcagagttaacgattcgtctggtcgacgttgcagaaagccatgagctgaacctgacctatcgcggcaaggataagccgaccaacgtcctctccttcccgtttgaagcgccgccgggaattgaaatgccgctgctcggcgatctgatcatctgccgtcaggtggtagagcaagaagccagcgagcaaggtaagccgctggaggcgcactgggcgcatatggtggtgcacggtagcctgcatctgctgggctacgatcatatcgaagacgacgaagcggaagagatggaaggccttgaaacagagataatgcttgctctgggctatgaggacccgtacatttccgagaagattgcggaatag

SEQ ID NO: 211271 - DNA, 948 bp, Klebsiella pneumoniae
atgccgtctggcgctgagtttacgcgcgacgagcgacagttaaatcaacatgagaacccaaacgacgccatgagcgacgacaattcacacagtagtgacacagtaaacagcaaaaagggatttttctccctgttactcagccagctttttcacggggaaccgaaaaaccgcgatgaactgctggcgctgatccgtgattccgggcaaaacgaccttatcgatgaagatacgcgtgacatgctcgaaggggtaatggatatcgccgaccagcgggtccgcgacattatgatcccccgttcacaaatgataaccctgaaacgcaaccagacgctggacgagtgcctggatgtcatcatcgaatccgcccactcgcgtttcccggtcatcagtgaagataaagatcacatcgaagggattctgatggccaaggatctgctgccgtttatgcgcagcgacgccgaagccttcagcatggaaaaagtgttacggccggcggttgtcgtcccggaaagcaagcgggtcgaccgcatgctgaaagagtttcgctcacagcgctatcatatggcgatcgttattgacgaattcggcggcgtctctggtctggtgaccatcgaggatatccttgagctcatcgtcggggaaattgaagacgagtacgacgaagaagaagatatcgatttccgccagctgagccgccacacctggacggtgcgcgccctggcctccatcgaagacttcaacgaggccttcgacacgcactttagcgatgaagaagtggataccattggcgggctggtgatgcaggccttcggccatctgccggcccgcggcgaatctatcgacattgatggttaccaattcaaggtagcaatggcagatagtcgtcgtatcattcaggtgcatgtaaagctgcccgatgacgctccccagccgaagctggaagagtaa

SEQ ID NO: 211272 - DNA, 1539 bp, Klebsiella pneumoniae
atggtatttgcctctcttcttgaacgccagcgcatacgtctgttgctggcgctgttgtttggagccagcggaacgctggctttttcaccttatgacttctggccagcggctatcgtttcgctgatcggtctgcaggcgttaaccctcaaccgacgcccgctgcaaagcgccgggatcggctatttctggggactcgggttgttcggcacgggtatcaactgggtctatgtcagcatcgcgcagtttggcggaatgcccggcccggttaacgtcttcctcgtcgttctgctggcggcctatctctcgctctacaccggcctgtttgccggcctgctcgcccgtctgtggcctaaaactaactggatacggatggctatcgctgcccctgtcgtctggcaaatcaccgagttcctgcgcggctgggtgctgaccggctttccgtggctacagttcggctacagccagattgacggcccgctgaaaggcctcgcgccggtgatgggcgtcgaggcgattaacttcctgctgatggtagtcagcggcctgctggccctggccctcgtccagcgcaactggaagccgctggcgattgccgcgctgctgttcgccctgccgttcccgctgcgctatatccagtggtatcagctgctgccggcgcgcgcgacccaggtctcgctggtgcaaggcgatatcccacaggccatgaaatgggacgaaaagcagctggtcaataccctgaaaacctacctggcgctgacccagccgcatatcggccactcgcagctgattatctggcctgaatcggcgatcccggatctggagatcaaccagcagcagttcctcagcatgatggacgatctgctgcgcgcaaaagacagctcgctgatcaccggcattgtcgatgcgcgtctcaacaagcagaaccgttacgatacctacaacaccatcattactctcggcaaagataacccgtaccgctacgactcgaccaaccgctacaacaagaaccatctggtgccgttcggcgagtttgtaccgctggagtcgattctgcgtccgctggcgccgttctttgacctgccgatgtcctccttcagccgcggcccctacgtgcagccgcagctgatggcgcataacctgaagctgaccgcggccatctgctacgagataatcctcggtgaacaggtgcgggataacttccggccggacaccgacttcctgctgaccatctccaacgacgcctggttcggcaagtccatcggcccgtggcaacacttccagatggcgcgaatgcgcgccctggagctggcccgcccgctgctgcgcagcaccaacaacggcattactgcggtgatcggcccgcgcggcgagatccagaagatgatcccgcagtttacccgcgaggtgttgaccaccaccgtgacccccgccagcggcttaaccccttacgcccgcaccggcaactggccgctatgggcgctgacggcgctgtttggtttcgccgcgctgctgatgagcctgcgccagcgtcgccgataa

SEQ ID NO: 211273 - DNA, 912 bp, Klebsiella pneumoniae
atgcaattacgtaaactggccacggcaatgctggtaatgggaatgaccgctggtctggcgcaggcggaagatgctgccccggcggctggccagaacaccctggataagatcgccaaaaacggggttatcgttgtcggccatcgtgaatcttcggtcccgttctcttactacgataaccagcagaaggttgtgggctactctcaggattattccaacgccatcgtcgatgccatcaagaaaaaactgaacaaacccgatctgcaggtcaaactgatcccggtcacctcgcagaaccgtatcccgttgctgcagaatggcacctttgatttcgagtgcggctcaaccaccaacaaccttgagcgccagaaacaggcggccttctccgataccatcttcgtggtcggtacccgtctgctggtgaagaaaggcggtccgatcaaagatttcccggacctgaaggataaagcggtcgtcgtcacctccggaaccacctcggagatcctgctgcataagctgaacgatgagaaaaaaatgaatatgcgcattatcagcgccaaagatcatggcgactctttccgcaccctggagagcggacgcgccgtggcctttatgatggatgatgccctgctggctggcgaacgcgccaaggcgaagaaaccggataattgggaaatcgtcggcaccccgcagtcgaaggaagcctatggctgcatgctgcggaaggatgatccgacgttcaaggcgctggttgatgaaaccgtcgcccaggctcagacctctggcgaagcggagaagtggtttgacaaatggttcaaaaacccgattccgccaaaaaatcttaacctcaacttcgagctgtcggacgacatgaaagcgctgttcaaatcacctaacgacaaagcactgaactaa

SEQ ID NO: 211274 - DNA, 741 bp, Klebsiella pneumoniae
atgtcaatagactggaactgggggatattcctgcaacaggcccccttcggcaacactacctacctgggctggctgtggagcggttttcaaattaccgtcgccctctccatctcggcctggatcatcgcttttctcgtcggctcactgttcggcattttacgcacggtccccaatcgcttcctctcgggcattggcacctgctatgtcgaactgtttcgcaacgtgccgctgatcgtgcagttctttacctggtacctggtggtgccggagttcctgccggaaaatatcggcatgtggtttaaatcggagctggacccaaacattcaattctttgtctcctccatgctgtgcctggggctgtttaccgccgctcgcgtctgcgagcaggtacgcgccgccatccagtcgctgccgcgcgggcagaagaacgccggcctggcgatgggcctgaccctgccgcaaacctaccgctacgtgctgctgccgaacgcctaccgcgttattgtgccgccgatgacctcggagatgatgaacctggtgaaaaactcggccatcgcctccaccatcggtctggccgatatggccgcacaggcgggcaaactgctggactactccgctcatgcctgggagtcttttaccgccatcaccctggcctatgttttcatcaacgcggtgattatgctgattatgtatgtggtcgagcgtaaggttcgcctgcctggcaatatgggaggcaaataa

SEQ ID NO: 211275 - DNA, 675 bp, Klebsiella pneumoniae
atgtacgattttgactggagttcgatcgttccctccatgccctatctgctggcagggctggtgatcaccctgaagattacggtgatcgccatcgtggtcggcattgtctggggcactctgctggcggttatgcgcctgtccagctttctgccgctggcctggtttgctaaatcctacgtcaacgtattccgctcaatcccactggtgatggtcctgctgtggttctacctgattgtcccgggcttcctgcagaacgtgctgggactgtcgccgaaaacggatattcgcctgatctcggcgatggtggcgttttcgatgttcgaagccgcctactattcagagattatccgcgccggcattcagagcatctcccgcggccagtccagcgccgcgctggcgttggggatgacccactggcagtcaatgcggctggtgatcctgccgcaggccttccgcgccatggtgccgctgctgctaacccaggggatcgtcctgttccaggatacctcgctggtgtatgtattgagtctcgccgacttcttccgtaccgcctccaccattggcgagcgtgacggaacccaggtcgaaatgatcctgttcgcaggcggcgtctattttgtgattagcctcagcgcctcgctgttggtcagctggttgaagaaaaggactgtgtaa

SEQ ID NO: 211276 - DNA, 726 bp, Klebsiella pneumoniae
atgattaccctgaaaaacgtttcaaaatggtatggtcactttcaggtgctgaccgattgctccacggaagtgaaaaaaggcgaagtcgtggtggtctgcgggccgtcaggctccggtaaatccacgctgattaagactgtgaacggccttgagccggtacagcaggggcagattattgtcgatggcaccgtggttaacgataaaaagaccaacctggctaaactgcgctcgcacgtcggcatggtgtttcagcattttgaactgttcccgcatctgtcgattatcgacaacctgacgctggcgcaggtcaaagtgcttaaccgcgataaagcctcagcgcgcaagaaaggcctcaagttgctggagcgcgttggcctggcggcgcatgcggaaaaatacccggcgcaactctccggcggccagcagcagcgcgtggccattgcccgagccctgtgtatggacccgatcgccatgctgtttgatgagcccacctcagcgcttgacccggagatgattaacgaggtgctggacgttatggtcgaactggccaacgaggggatgaccatgatggtcgtgacccatgagatgggctttgcccgcaaggtggcgaaccgggtgatctttatggatgaagggaagattgtcgaggatgccgataaagaggccttctttgccaatccgcaatccgagcgtgccaaagatttcctcgccaaaatacttcattaa

SEQ ID NO: 211277 - DNA, 1671 bp, Klebsiella pneumoniae
atgttaattcgatctcgcacgctcaccgggctgctgtttatcacgctggcgggcacctcagccgccggggccgcgccattggcctcttctactcaccagacggagcaggataaagcccgccaggaggcgctggcgccgcagcaacaggattttcagtcttcacaacagcgcgtggcgccgcaggggatcccttttcctgaggaaacgcattgcaaattgatcaaccgggtcgatatcgactccgataaccaggcgctcacccggaaattactggcgaaaaccgcacggcaggcgcagggacgctgtctgggtagcgaaggcattcgcctgctggcctataccttgcaaaatgagctgatcgcgcaaggctacatcacctcgctgattgatgtgccctcccagtcgctggagcacggcatactcaggttcacgctgcactatggcaaagtgggcgctatcgactatgccgacggctcggacaccacccgcctgtggaattccctacccacctcttccggtactatcctgcgcttaagcgaccttgagcaagggatggccaacctgcagcgtctgcccggcgccaccgcgcacatgaaactgttgccgggccaacacgagggagaaagcgatatccagatcgcccgcagcctggcgaaaaaatggcagcttggcgcctggcttgacgacgccggcagcaaagccagcggacgctaccaggccggcggggccctctatctctatgacctgaccaccctcaacgatatcctgtacctttccggcgggggcgatattgaattcaatcagcataacgacggcaaccacaacggcagcctgtattactccattccctttggctactggacactaagcgcctacggggcatacagccagtatcgtcagcagtttaacggcaactggtcgacgatggattataagagtaaaaatcgctactacagcgccacgctgagtcgtctgctctcccacacccggcagcaaaaaaccaccgccgacctgcggatcgccaagagcacctcgcattattacttcggcggcagtgagctactggtgatgcgcaagcagaacccctcatgggaattcaccctcaaccaccagcactactttaacaacaagattgttgatgccagcatcggcatccagcgcagcctgccgtggctcagctcgacagcaacgccggaagagcaggccgggctgtatagcccgctgtcgcggattgtgcatggtaatctgcaggcaatgatgaaatttgacgccaccggcgacaaatttacctgggctccccgcctcagcgcccagttcagcccggacaaactcgcttccgataataaattcaatattggtagtcgctggagcgtgcgcggttttgacggtgaaaacagcctgtccggcaatcagggatggtactggcgcaacgattttatctgggatctggccacccacgagcggcaattctatttgggcgcggatataggccgtcttatcggcgccgatctatatcaaaaaggcaaagtgctctccggcgccgtcagcgggctgcgcggtcagctatggtcaacgcagtacgatctgtttattagtaccccgctgagtaaaccggataagtttcatagcgacgccctgaatatgggcttttcattacagtggaggtattaa

SEQ ID NO: 211278 - DNA, 1794 bp, Klebsiella pneumoniae
atgtttaagtttaaggcttcttatgtcgcactggcggcagtattaacctcgtcggtagtttatgccgaccccacaagctatacgcactcttccggcgccacggttatcgatattgaaaagccgaatgccgccggtgtctcccataacctgtaccgcgacttcaacgtcggcaccaatggcaccatccttaataacagcggcgatgatgtcagccacagcacatttggcaatatcgcccgcaacaataatctgaccgccggcagcgcttcggtgattttgaacgaggtgacctccaaaaacgccagtagcctgaagggctttatcgaagtcaacggtcagaaagcggatgtggtaatcgccaacccgaacggcatcacctgttccggctgtagctttgttaataccaacaaggctatcctgaccaccggcaaggttaatatgaccgacgatggcgccatcggcagctataccgtaacgggcggcaccctcaccatcggcgaaaatggcatgaacgccgccaacggctacgcggttctgctcgccgacgcgattaagattaacggtaaagtgcaggccaacaacgccctggtcagcgcgggcaacttcaccatggataacagctctggctcggtgacctccgccggtaaaaaggccaccctgatccagatgacggttaacccgcagtacagcatcgacgtcagcagccttggcggcattgaggccaacagcatcagcatggtcggcaataatatcggctttggcgtacgtaataagggttctattatctccaacggcacgctgatgctcaccagcaacggtaatttgctgaacaaagggtcaataacgggcaaaggtttgctgagccaggtttccaccgtcacgggcatcaccaatgacggtagcatcgccggcgcctattatttaatgctctccagtggcgattatatcgttaacaccggttctctctccggcggccagctgattgccaccgctaacggcaacatcaccaacggcgactcaggcacgatgaccggcaccagtggattaagcctgaccagcggcgggaaaatccgcaacgaagaaaaagcctccctgctgtcaaataaccagattgccgccacggcaatcggtgatttcctcaatgaaggcaaaatcagcgccaaacacaccagcctgacgtttgtcggcgacagctttaaaaacaccggcaatattaactctactggccaaaccaccattcagtcgcttacacaggacggcagcgccaatacgggcgagatctataacctcggcaatatcaccggcgaaaatatcaatctgcagaccaatggcacgctggcgcaaagcagcagtggtcgtattgaggcaaccaacgccattaccgcccacagctactggctgaaccaaaatggttatatgaatgccgccgatatcaccaccgatcacggcgtagtgaataattatggcaatattactgccaaaaatatttcaatcacgacctactcagatatcaccaacgaagggcagatcagcagcaccggcgacctgaccttaaataccaaaaataaaggcgcgatctacaattattcaaccctcagcgcgggcggcaacatgacgttaaccgccaccaaagtggtcaatggtggtaaaagttgcggcatactgggcctggcgaaatgcggagtcgggacgttaactgctgacaagctggtactgaactcatcgcagaaatatgttagcgacatgggtggaaaacagtatttcaagagcaccgaagtcaacacggtgaaataa

SEQ ID NO: 211279 - DNA, 486 bp, Klebsiella pneumoniae
atgatgaacaaggttgctcaatattaccgtgaactggtctcctcgctcagcgaacggctccgccatggagagcgcgatatcgacgcgctggtgacgcaggcgcgggaaaaaatcgtccgcgccggcgatctgacgcagagcgagatcgagtcggtgattgcggcggtcaagcgcgacctagaggagtttgcccgcagctacgaagagagtcacgaagacgagagcgacagcgtgtttatgcgggtgatcaaagagagcctgtggcaggagctggctgatatcaccgacaaaacccagctcgagtggcgggaagtctttcaggatctgaatcaccacggcgtgtaccacagcggcgaagtggtcggtctgggcaacctggtctgcgagaagtgccactatcacctggcggtatacaccccggacgtgctgccgcgctgtccaaaatgtggccacgatcagttccagcgtcggcccttcgagccctaa

SEQ ID NO: 211280 - DNA, 2583 bp, Klebsiella pneumoniae
atgcaagagcaataccgcccggaagagatagaatcgaaagtccagcttcactgggacgaaaatcgtacatttgaagtaactgaagacgagagcaaagagaagtattactgcctgtcgatgcttccttatccttctggtcgactacacatgggtcacgtgcgtaactacaccatcggcgacgtgattgcccgctaccagcgcatgctgggcaaaaacgtcctgcagccgatcggctgggatgcgttcggtctgccggcagaaggggcggcggtgaaaaacaacaccgcgccagcgccgtggacctacgacaacatcgcctacatgaaaaaccagctaaaaatgctgggcttcggctatgactggagccgcgagctggcgacctgcaccccggaatactaccgctgggagcagaagttcttcaccgagctgtacaaaaaaggcctggtgtacaaaaaaacctccgcagtgaactggtgcccgaatgaccagaccgtgcttgccaacgaacaggttatcgacggctgctgctggcgctgcgataccaaggtcgagcgtaaagagatcccgcagtggtttattaaaatcaccgcctacgccgatgaactgctgaacgatctggataagctggaccactggccggacaccgtgaagaccatgcagcgcaactggatcggccgttcggtaggggtagaaatctcctttgacgtcaacgactacgctgacaaactgactgtctacaccacccgtccggacacctttatgggttgtacctacctggccgtcgcggcgggtcacccgctggcgcagcaggctgcggcgaacaatccggcgctggccgcctttatcgacgagtgccgcaataccaaagtggccgaagccgacatggcgacgatggagaaaaaaggcgtcgataccggctttaaagccattcatccgctgaccggtgaacaaattccggtctgggcggcaaactttgtgctgatggaatacggcaccggcgcggtaatggccgttccgggtcacgaccagcgcgactacgagttcgccagcaagtacggtctgaacattaagccggttatcctcgctgccgacggctccgagccggatctctccgagcaggcgctgaccgagaaaggcgtcctgtttaactccggcgagttcagcggtcttgattatgaagcgggcttcaacgccattgccgacaaactggctgccatgggcgtgggcgagcgtaaagttaactaccgtctgcgcgactggggcgtatcccgtcagcgctactggggcgcgccgatcccgatggtgaccctggaagatggcaccgtgctgccgaccccggaagatcagctgccggtgatcctgccggaagacgtggtcatggacggcatcaccagcccgatcaaagccgatcctgaatgggccaagaccaccgtcaacggccagccggcgctgcgcgaaaccgacacctttgacacctttatggaatcctcctggtactatgcgcgctacacctgcccgcagtatcaggaaggaatgctggattcgaaagcggccaactactggctgccggtagatatctacatcggcggtatcgaacacgccatcatgcacctgctctacttccgcttcttccataagctgatgcgcgacgcgggcatggtgaactccgatgagccggcgaaacagctgctgtgccagggcatggtgctggctgacgcgttctactatgtgggcgaaaacggcgaacgtaactgggtttccccggttgacgccatcgttgagcgcgacgaaaaaggccgcatcgtgaaggccaaagacgcggcgggccacgagctggtgtacaccggcatgagcaagatgtccaagtcgaaaaacaacggcatcgacccgcaggtgatggttgagcgctacggcgcggataccgtgcgtctgttcatgatgtttgcgtccccggcggatatgaccctcgagtggcaggaatctggcgttgaaggggcgaaccgcttcctgaaacgcgtctggaaactggtctacgagcacaccactaaaggagaggttgcggcactgaacgtggcggctctgagcgaagatcagaaagcgctgcgtcgcgatatccacaaaaccatcgccaaagtgaccgatgacatcggccgtcgtcagaccttcaacaccgccatcgcggcaatcatggagctgatgaacaagctggcgaaagcgccgcaggaagatgagcaggatcgtgcgctgatgcaggaagctctgctggcggtggtgcgtatgctcaacccgttcacgccgcacgccagcttcaccctgtggcgtgagctgaacggcgaaggcgatatcgacaacgcgccgtggccggtagcggatgagagcgcgatggtggaagacagcaccctcgtcgtcgtccaggtcaatggcaaagttcgtggtaaaattaccgttgcggtagatgcaactgaagagcaggttcgcgagcgcgccggccaggaacatctggtggcgaaatatctcgacggtaaaaccgtgcgtaaagtgatttacgttcccggtaaactgctcaatctggtcgttggctaa

SEQ ID NO: 211281 - DNA, 591 bp, Klebsiella pneumoniae; identical to SEQ ID NO: 137100

SEQ ID NO: 211282 - DNA, 1035 bp, Klebsiella pneumoniae
atgatgattcggttgtacccggaacagctccgcgcgcagctcactgaagggctgcgcgcggcctatctgctgcttggcaacgatcccctgctgttgcaggaaagccaggacgccattcgcgaagctgctgccgcgcagggctttaccgagcaccatactttttcaatcgacaacagcaccgactggcaggcgattttcgccttaagccaggcgatgagcctgtttgccagccggcaaaccctgctgttgatcctaccggaaaacggccccaacgcggcgatcaatgaacagctcgccacgctggttggcctgctgcacgacgacctgctgctgatagttcgcggaaataagctgaccaaagcccaggagaatgccgcatggctcaccgccctggctcagcgcgccgtccaggtcagttgccagacgccggaatacgcgcagctgccgcgctggctggccgcccgggccaaacagcatcagctgcagctcgacgacgcggccagtcagctgctgtgctactgttacgaaggcaatctgctggcgctggcgcaggcgctggagcgtctggcgctgctctggccggacggtaagctaaccctcccccgcgttgagcaagcggtaaacgatgccgcgcactttacgccttaccattgggtcgatgccctactggcaggcaaaagtaagcgcgtgctgcacgtcctgcagcagttacgccttgaaggctgcgagccggcgatcctgctgcgtactctgcagcgggagctgctgctgctggttaccctcaagcgccaggcgacgcacacgccgctgcgctcgctgtttgataaacatcgggtctggcaaaaccgccgtcagctgctcagcgacgccctcacgcgcctgagcggggaacagctgcgccaggcggtgacccttctgacccgcgcggagctcacctttaaacaggattacgggcacgacgtctggcccgaactggaaagtctttcgttgttgctctgccacaaagccctggcggacgtttttattgatggttga

SEQ ID NO: 211283 - DNA, 651 bp, Klebsiella pneumoniae
atggttgatatgactcagttacaggcaatctatggcggcaccttcgatccggtgcattacggtcacctcaagccggttgagatcctggcgaatcagattggcctgagcaaggtcatcatcatgcctaacaacgtcccgccgcaccggccgcagccggaagccaccagcgcccagcgcgtgcacatgctgaagctggcgattgccgataaaccgctgttcacgctcgatgaacgcgaactacggcgcgataccccctcctggacggcgcaaacgctgcaggagtggcgccaggagcaggggccgcgcaaaccgctggcgtttatcattggccaggattcgctactgacctttcccacctggcacaactatgaaaccattctcgacaatgtccacctgattgtttgccgccgcccgggttacccgctgaccatggcgcaggaagcggatcagcgctggctggatcgccatttaacccacgacgtggagtctctgcataaccgcccttccggcgtgatctacctggctgagacgccgtggttcgatatttccgcgacgatcatccgccagcgccttgagcgcggcgagtcctgcgccgagatgctgcccgccgccgtgctggattacatccgcgagcagggactctattgctga

SEQ ID NO: 211284 - DNA, 630 bp, Klebsiella pneumoniae
atgaaattgtggttagttcgccatggcgaaaccgaagccaacgttgccgggttatacagcggccatgccccaacgcccctgacgccgcgcggcgtcgctcaggcgcgcgcgctcggcgaacggctgcgcctggcgcctttcgataaagtattctgtagcgagctggcgcggaccgggacaacggccgatctgctgcttggcgaccgcgctattccgcgtgagcgccatcccgcgctcaatgagatgtttttcggcgactgggagatgcgtcatcatcgcgacctccagcgagaagatgcggaaaactatgccgcctggtgtgccgactggcagcatgcggcccccaccaacggcgaaagctttcagaattttgcccgccgcgtcagcgagtttatcccaacgctgaccgactgccgccatcttgaccatctgctgatcgtcggccatcagggcgtcctgagcctgctgaccgccctgctgttgcagatgcctgcggcggcgatgtggcactttcccattgcccatggcgcctggagcctcctcgaaatccgcgacgatttcaccaccctgcgggtattaaatagccaggccgtctggcggccgcaagaagaattcccgccagaccattga

SEQ ID NO: 211285 - DNA, 318 bp, Klebsiella pneumoniae; identical to SEQ ID NO: 137104

SEQ ID NO: 211286 - DNA, 468 bp, Klebsiella pneumoniae
gtgaagttgcagctggtggccgttggcaccaaaatgccggactgggtacagaccggctttagcgagtatctgcgccgttttcccaaagatatgccgttcgagctggtggagatccctgccggtaagcgcggtaagaacgctgatatcaaacgcatcctcgaaaaagagggcgagatgatgttagccgctgccggtaagaaccgcatcgtgaccctggatattccgggtaaaccatgggatacaccgcagctggcgcgcgaactggaacgctggaaacaggacgggcgcgacgtcagtttactggtaggcggtccggaaggtctctctcccgcctgtaaagcagcggcggaacagagttggtcgctctccaccctcaccttacctcacccgctggtgcgcgtactggtggccgagagtctgtaccgggcgtggagcatcaccaccaaccacccgtaccaccgtgagtaa

SEQ ID NO: 211287 - DNA, 1902 bp, Klebsiella pneumoniae
atgaaattacagaattctttccgcgactatacggctgaatcctcgctgttcgtgcgccgggcgctggtcgcttttttggggattttgctgcttaccggcgttctgatcgccaacctgtacaatgtgcaaatcgttcgcttcgacgactatcagacgcgctcgaacgaaaaccgcatcaagctggtgccgatcccgccgagccgcggcattatttacgatcgcaacggcaccccgctggcgcttaaccgcaccatttaccagctggagatgatgccggagaaagtcgataacgtacagcagacgctggatgcgctacgcgacgtcgtcgatttaaccgacgatgacatcgccggtttcaaaaaggagcgcgcccgctcccatcgttttacctcgattccggtaaaggtcaacctcagcgaagtgcaggtggcccgctttgccgtcaaccagtaccgctttcccggcgtggaagtcaaaggctacaagcgtcgttattacccctataattcggcgctgactcacgtcattggctatgtctcaaaaattaacgataaagacgtcgaccgcctggataaagagggcaagctggccaactacgcctcgacgcacgacattgggaagctgggtatagagcgttattacgaggacgttctgcacggtcagaccggctacgaagaggttgaagtgaacaaccgcggccgcgtcattcgtcagctgaaagaggtgcctccgcaggccggacgcgacatctacctcaccctcgacctcaagctgcagcagtatattgaaacgctgctggccggcagccgcgccgccgtggtggtgaccgacccgcgtaccggcgctattctggcgctggtttcaaccccgagctatgacccgaacctgttcgtcgacggcatctccagcaaagattactccgcgctgctcaacgacccgaacacaccgctggtcaaccgagcaacgcagggggtctatccgccggcgtcgacggtcaaaccgtacgtcgccgtctcggcgctgagcgccggggtgatcacccgcaacaccagcctcttcgaccccggctggtggcagttgcctggctcagagaaacgctatcgtgactggaaaaagtggggccacggccatctgaacgtcaccaaagcgctcgaggagtctgcagatacctatttctaccaggtcgcctatgacatgggcatcgaccgtctctcagagtggatgagcaagtttggctacggccactacaccggtatcgacctctccgaggagcgctctggcaacatgccgacccgcgaatggaagctcaagcgctttaagaaaccctggtaccagggggacaccattccggtgggcatcggccagggttactggaccgccacgccgatccagatgaacaaagcgctgatgatcctgattaacgacggcgtggtgaaggtgcctcatctgctgcagagcaccgtggaagacggcaagcccgtaccctgggtccagccccatgagccgccggtaggcgatatccattccggctattgggaaatcgccaaagacggcatgtacggcgtggccaaccgcggcaacggcaccgcgcacaaatacttcgccagcgcgccgtataaaatcgcggccaagtcaggtaccgctcaggtgttcggcctgaaggccaacgaaacctataacgcgcaccggatctccgagcgcttgcgcgaccataaactgatgacggcgtttgcgccttataacaacccgcaggttgccgtggcgatgattctggaaaacggcggcgccggcccggcggtcggtacgattatgcgccagatcctcgatcacatcatgctgggcgataacaacactacgctgccaagcgaaaacccggcggtaaccgcaggggaggatcaataa

SEQ ID NO: 211288 - DNA, 1113 bp, Klebsiella pneumoniae
atgacggataatccgaacaaaaaatcgctatgggataaaatccatcttgaccccaccatgctgcttatcctgctggcgctgctgacctacagcgcgctggttatctggagcgccagcggtcaggatgtcggcatgatggagcgtaaaatcggccagatcgccatgggcgtggtgatcatgatcgtcatggcgcagatcccgccgcgggtctatgaaggctgggcgccctacctctatattttctgtatcatcctgctggtagccgttgacgccttcggtgccatctccaaaggggcgcagcgctggctggatctcggtattgtgcgctttcagccgtcggagatcgccaaaatagccgtgccgctgatggtggcgcggtttattaaccgcgatgtctgtccaccgtcgctgaagaacaccggcattgccctggtgctaatcttcctgccgacgctgctggtggcggcgcagcctgacctcgggacctcgatcctgatcgccctatccgggctgtttgtgctgttcctatccggcctcagctggcgcctgattggtatcgccgtggtgctggtcgccgcctttattccgatcctgtggttcttcctgatgcacgactatcagcgtcagcgcgtgatgatgctcctcgatccggaaactgacccgctgggcgccggctatcacattattcagtctaaaattgccattggctccggcggtctgcgcggcaaaggctggctgcacggcacccagtcgcaactggagtttctgccggaacgccacaccgactttatcttcgccgtcctcgccgaagagctgggcctgattggcgtactgatcctgctagcgctttatattctgctgattatgcgcggactgtggatcgccgcccaggcgcaaaccacctttggccgggtcatggccggtggtttaatgttgattttattcgtttatgtcttcgtaaatattggtatggtgagtggtattttaccggtggtgggcgtaccgttgccgctggtgagctacgggggctccgccctgatcgtactgatggccgggtttggtatcgtaatgtcgatccatacccacagaaaaatgttgtcgaaaagcgtttaa

SEQ ID NO: 211289 - DNA, 1149 bp, Klebsiella pneumoniae
atgcgtaagcaatggctggggatctgcatagcagcggggctgctggcggcatgttcgagtgatgacgtgcaacaaaaaacggtcagtactccacagccggccgtctgtaatggcccgacggttgagatcagcggcgccgatccgcaatatgaaacgccgaacgccacggcgaatcaggattatgagcgcgacggtaaaagctacaaaatcgttcaggatccggccaactttactcaggccggtttcgcggcgatctatgacgctgaacccaacagcaacctgaccgccagcggcgaagccttcgatccgactcagttgaccgcagcgcacccgacgctgccgatcccgagctacgcgcggatcactaaccttgccaacggacggatgatcgtcgtgcggattaacgatcgcggtccctatggcaacgatcgggtcatctcgctttcccgcgcatccgctgaccgcctgaacacctctaacaacaccaaagtgcgcatcgaccccatcatcgtcgcgcctgacggttcgctttccggcccggggatggcctgtaccaccgtcgccaaacagacttacgccctgcccgcccgtccgaatctggacggtggggacgccgctggcatgagccaacccgcacccactgacgttcgcccgatcagcaacagcacgctgacgccggcagacagcgtgggcgcgccggtgaacagcggcggtttcctcggcgcgccgacgcccctgaacaacggcgtgctggagagtagcgaaccagcggcagccgccgcgacggctcctgccgccggcgccacgccaacagcgccagtgaccgcgcctggctccattcagggtaatgtggcgcccgctgcggccaccgccgcagccgctggcgccgtggcggcctcgtcctcggcgacctccagcgccagcggtaattttgttgtccaggtgggcgcagtaagcgaccagacgcgggcgcagcagtatcagcagcgcctgagccagcagttttctgtgccaggccgggtcatgcaaaacggcgcggtctggcgtattcagctgggtccctttgctgataaagcacaggccagcgccgtgcagcagcgcctgcaaagcgaagcgcagctgcagtcctttattactcgcgccaactaa

SEQ ID NO: 211290 - DNA, 1272 bp, Klebsiella pneumoniae
atgctggcccgcagagcatttgctatagtaaggcacttttttaactccatcacggatgccgttgttctgaccatgaagacctctttcaccgctcgtttactcattacggcgctctccgttgcagcgctctcctccgctgcccgcgccgatgacctgaatatcaaaacgatgatcccaggcgccccgcagattgacgccgaatcctggatccttatcgattacaactctggcaaggtactggctgaaaacaatgccgactcccgccgcgacccggccagtctgaccaaaatgatgaccagctatgttatcggtcaggcgatgaaagcgggcaaattcaaagagtccgatctggtcaccgtcggcaacgatgcctgggccaccggcaacccggttttcaaaggctcttctctgatgttcctcaagccgggcatgcaggtgccggtttctcagctgatccgtggtattaacctgcagtccggtaacgatgcctgcgtggcgatggccgactacgtcgccggcagccaggacgccttcgtcagcctgatgaacaactacgtcaacgctctgggcctgaaaaacacccatttccagaccgttcacggtcttgatgctgacggacagtacagctccgcgcgcgacatggcgctgattggccaggcgctgatccgcgacgtaccgaacgagtactccatctatcgtgagaaagagttcaccttcaacggcatccgccagctgaaccgtaacggcctgctgtgggataacagcctgaacgtcgacggcatcaaaaccggccataccgacaaagcgggttacaacctcgtcgcttccgccaccgaaggccagatgcgcctgatctccgcggtaatgggcggccggacgttcaaaggccgtgagtcagaaagcaaaaaactgcttacctggggcttccgcttcttcgaaaccgtcaacccgattaaagctggcaaagagtttgcctccgaaccggcctggttcggcgacagcgatcgcgcttcgctgggggtggataaagacgtctacctgaccattccgcgcggccgaatgaaagatctgaaagccagctacgtgctgaataacactgagctgcacgccccgctgcagaaaaaccaggttgtcggcaccattaacttccagttggatggtaaaaccattgaccagcgtccgctggtggtcctgcaggaaattccggaaggtaatttcttcggcaaaattattgattacattaaattaatgttccaccactggtttggttaa

SEQ ID NO: 211291 - DNA, 264 bp, Klebsiella pneumoniae; identical to SEQ ID NO: 137110

SEQ ID NO: 211292 - DNA, 645 bp, Klebsiella pneumoniae
ttgcagcacaataaaattcttatccggcagcttggcctgcaaccttacgaacccgtctcgcaggcgatgcatgaatttaccgacgcccgtgatgaagataccctcgacgagatctggctggtggaacatcaccccgtattcacccagggtcaggccggcaaagcggaacacgtgctggtgcccggcgatattccggtgatccagagcgatcgcggcggccaggtcacctatcacggtccgggacagcaggtgatgtacgtcctgttggacctcaagcgccgtaagctgggcgtgcgggagctggtgacgctactggagcaaacggtcgtcaataccctggctgaatatagtatcgagtcgcacccccgcgccgatgcccctggcgtctatgtcggcgaacgcaaaatctgctctctgggattgcggatccgtaaaggttgttctttccacggtctggcgcttaatatcgccatggatctcacaccgtttctgcgtatcaacccctgcggctatgccggtatggagatgacgcaaatgcgccagtggcagccggcagcctccccggagacggtcgctccgcggctggtcgccaatctgctggcgctgctaaatcatccaccgcacgaatatcttccccgggattaa

SEQ ID NO: 211293 - DNA, 897 bp, Klebsiella pneumoniae
atgtttcgcatcctgcgtaatattgacctcaatctgttgaccatctttgaagcggtatacgtgcataaaggtatcgtcaacgccgcgaaaatactcaatatcacaccgtcggcgattagccagtcaattaacaaactgcgggcgctgttccccgatccgctatttatccgcaaaggacagggcgttacccccaccgcctatgccacccatcttcatcaatacatcagccgcggcatggaagctttcctcagcgcgctggatatcaccggtagcccgcaccagcagcgggtgatcactatcgccactacgccagcgatgggagcgctgctgatgcctggcctggccagcgcgctgaagccgacctttccgcagatcctgttgcacaatatcgccatcgtcgacgccgcgcggcagcttgaccagcgccaggtggatctgctcattgatacccacctgcacagcggccaggcgataagccatcatgtgctgtatcaggatcgggtacagatgtactgccgcgcagggcatcccgcgctggacggtccgcaggatgaaacgaccctcgcggagtacgaatttgcgctgctgctgccggaaggccagcgctaccccaccctccatcgccgactacaggaagagatgggcgagcgccgctgcggctttagcacctttaacctgatgacccaggcggcgatgatcgccgggagcgatatgctgggtctgaccaccgaacgcctgttcgccatggtgtcccgtctctggccgctgcagaccctggatttcccttccctcggtgaagagcagattgacgttgcgctgcactttaataagctgagcgggaaagagccattgctgaaagagatcatcgagacggtgatccgctcgtttaaggcgtag

SEQ ID NO: 211294 - DNA, 966 bp, Klebsiella pneumoniae
atgagtaaacccattgtgatggaacgcggtgttaagtaccgcgacgccgataaaatggcccttatcccggtgaaaaacgtggcaactgagcgtgaagctctgctcagaaaaccggaatggatgaaaatcaaacttccggcagactcgtcccgtatccagggaatcaaagcagcgatgcgtaagaacggcctgcactctgtgtgcgaagaggcctcctgcccgaaccttgcagaatgcttcaaccacggtaccgcgacctttatgatcctcggcgcgatctgtacccgccgttgcccgttctgcgacgtcgcgcatggacgcccggtcgcgccagatgcaaacgagccacaaaagctggcgcaaactatcgccgatatgggtctgcgctatgtcgtagtcacctcggtagaccgtgacgacctgcgtgatggcggcgcacagcattttgccgactgcatcagcgccattcgcgagaaaaacccgtcgattaagatcgaaacgctggttccggatttccgcggccgcatggatcgcgcacttgatattctgacggtgaccccgccggatgtcttcaaccataacctcgaaaacgtgccccgtctttatcgtcaggtacgtccgggcgcggattacaactggtcgctgaagctgctggagcgttttaaagaagcgcacccggagatcccgacgaaatccggcctgatggtaggtctgggcgaaaccaacgacgagatcatcgaagtaatgcgcgacctgcgtcgccatggcgtcaccatgctgacgttaggccagtatctgcagccgagccgtcaccacctgccggtgcagcgctacgtcagcccggaagagtttgaagagatgaaagcggaagcgatggcgatgggcttcacccacgccgcctgcggtcccttcgtccgctcttcctatcatgccgacctgcaggctaaagggatggaagttaaataa

SEQ ID NO: 211295 - DNA, 207 bp, Klebsiella pneumoniae; identical to SEQ ID NO: 137114

SEQ ID NO: 211296 - DNA, 789 bp, Klebsiella pneumoniae; identical to SEQ ID NO: 137115

SEQ ID NO: 211297 - DNA, 384 bp, Klebsiella pneumoniae
gtgtttcaacttctttgcgccgtttttattggcggcggcaccggcagcgtattgcgctggtggctcggcatgaagctcaatcctgtgcaccatgctatcccgattgggactctaacggccaacctgttaggcgcctttgtgattggcgccgggctggcgtggtttaatcgtctgaccgggattgacccgatgtggaaactgctgattaccaccggtttctgcggcggcctgaccacgttctccaccttttctgcggaagtggtgtttctcctgcagcagggccgggtaagctgggcgctgctcaacgtcgcggtgaatttgctgggttcgtttgcgatgacggcggtcgccttctggcttttctcgcaggcggccagccgctaa

SEQ ID NO: 211298 - DNA, 210 bp, Klebsiella pneumoniae; identical to SEQ ID NO: 137117

SEQ ID NO: 211299 - DNA, 519 bp, Klebsiella pneumoniae
gtgtccggaaacgccagcgcgtcgttttcatcgacccttagcgaaggttaccataccttaagtaataacgtagcgcagacctggaatgagccggagcactatgatttgtacgttccagccatcacctggcatgcgcgctttgcctatgacaaggaaaaaaccgataagtataacgaacgtccgtggggggcaggtttcggcgtctcgcgctgggatgagaaagggaactggcatggcctgtacctgatggcgtttaaagactcttttaataagtgggagcccatcggcggctacggctgggagaaaacctggcgcccgctgacggaccagaatttccacctcggccttggctataccctcggcgtcacggcgcgcgataactggaactacatcccgatcccggtgatcttgccattggcgtcaataggttacggtccggcaactttccagatgacctatattcccggcacctacaataacggtaacgtttacttcgcctgggcgcgcatccagttttaa

SEQ ID NO: 211300 - DNA, 1374 bp, Klebsiella pneumoniae
atgctgacgtttattgagatcctgatagggatcgtggtcattgtgggcgtagcccgctatatcattaaaggctactcggccaccggggtgctgttcgtcggaggcttaatcttactgatcgtcagcgccctgctgggacataaagtgttaccgggtaataccgcgagcaccggctattccgctaccgatattattgaatacattaagattctactcatgagccgcggcggcgatctgggcatgatgatcatgatgctgtgcggcttcgccacctatatgacccatattggcgccaatgatatggtggtcaaattagcgtcgaagccgttgcgctatattaattcgccctatctgctgatgattgccgcctattttgtcgcctgcctgatgtcgctggccgtctcctccgcgaccggccttggcgtactactggtggcgacgctgttcccggtaatggtgaatgtcggtatcagccgcggggccgccgccgccatctgcgcctcaccggcggcgattatcctctcgccaacctcgggtgacgtcgtcctggcggccaaagccgctgaaatgccgctgatcgactttgcttttaaaaccacgctgccgatctccatcgcggctattatctgcatggcgatcgcccactttttctggcagcgctatctggataaaaaagagcacatttctcacgagatgctcgatgtcaacgacatcaccaccaccgccccggcgctgtatgccattctgccgtttaccccgatcatcggcgtgctgatctttgacggtaaatgggggccggagctgcacattatcaccatcctcgttggctgcatgctgctggcggcgatcctcgagttcctgcgcggtttcaacaccaaaaacgtctttagcgggctggaagtcgcctaccgtggaatggccgacgccttcgccggcgtagtgatgctgttggttgccgccggcgtctttgcccaggggttaagcactatcggctttatcaacggtctgatctcaatcgccacctccttcggctcggccagcattattctgatgctggtgctggtgatcctgaccatgctggcggcgatgaccaccggttccggtaatgccccgttctacgccttcgttgagatgatccccaagctggcgcactcctccggcatcaatccggcctacctgtcgattccgatgctgcaggcttctaacctcggccgcacgatatcgcccgtctccggggtggtggtcgccgttgccgggatggcgaagatttccccattcgaagtggtcaagcgcacctcagtgccggtgctcgttggcctgctggtggtgatcgttgctactgaaatcctggtgcccggcagcgcgctccactaa

SEQ ID NO: 211301 - DNA, 798 bp, Klebsiella pneumoniae
atgttcaggaaggatttcgccgcgattgcccttgtgcttaccgccactcaggccggtgctgaaccgctcaccgcgatgcgatacgctgattttgaccgctacgtccttgccctctcctggcaaaccggattctgtcagagcatgtatgaccgcaatcgcaacgaaccggaagagtgtcgcctgcagcaggacaccgcgaataaagccgactttctgaccgtgcatggcctgtggcccgggctgccaaagtccattgccgcgcgcggagtggatgaacgtcgctggatgcgctacggctgcgccacgcgtccggtgcccaacatgccggaggtaaaagcgaaccgcaaatgccaggcggcggagaccggactgtcgctggagatggccaataaacttaataatgtgatgccgggatcgggcggcacctcctgcctggaacgctacgaatatgccaaacatggcgtctgcttcggcttcgatcccgacagctactttggcgccatggtgcgactaaacggtgaaattaagcgcagcccggtgggggattttctcgcgaagcactatggccaaacggtcagccgcgccgacttcgacgccgccgtggcccgcgcctggggtccgcagagcgtaaaggcgtttaagctaacctgcaacggtaatccggcctatctgacggagatgcaaatctcgctcaacgccgcgaccatcaacgccccgctggccacttccgcttttctgccccagcctcacccgggtaactgcggcgcacagtttatcctcgataaggttggccactag

SEQ ID NO: 211302 - DNA, 411 bp, Klebsiella pneumoniae; identical to SEQ ID NO: 137847

SEQ ID NO: 211303 - DNA, 429 bp, Klebsiella pneumoniae
atgtataagactatcattatgccggttgatgtctttgagatggcgctgagcgataaagccgtccggcacgcggagtttctggcccagcaggacggggtgatccatctgctccacgtcttaccgggttccgcgagctttaccatgagccgttttaccgccgacctgcggcggtttgaggaacatctgcagcatgaggcggagactcgcctgcagacgatggtcagccacttcagcattgacccgtctcgtatcaagctacatgtccgttttggcagcgtgcgcgatatggtcaacgagctggccagcgaaattaacgccgacgtggtagttattggctcacgcaatccctccatcagtacccacctgctcggctccaatgcctcgagcgtgatccgccatgcccatatcccggtaatggtcgtcaggtaa

SEQ ID NO: 211304 - DNA, 1566 bp, Klebsiella pneumoniae
atgctcgacaccaacatgaaaacccagctcaaggcctaccttgagaagctgaccaagcctgttgagctgattgccacgctggatgacagcgctaaatcggcagaaatcaaggaactgttggctgaaatcgctgaactgtcagacaaagtcacctttaaagaagacaacacgctcgcggtacgtaagccctcgttcctgattactaacccaggttccgaccaggggccgcgttttgcgggctcgccgctgggccacgagtttacctcgctggtgctggcgctgctgtggaccggcggtcatccgtcgaaagaggcccagtcgctgctggagcagatccgcgatattgatggcgatttcgaattcgaaacctactattcgctctcctgtcataactgcccggacgtggtccaggccctgaacctgatggcggtgctcaacccgcgcatcaaacacacggcgattgacggcgggaccttccagaatgagatcaccgagcgtaacgtcatgggcgtgccagcggtgttcatgaacggtcaggagtttggtcagggacggatgacgctgactgaaatcgtcgccaaagtggataccggtgcggaaaaacgcgcagcggaagagctgaatcagcgtgacgcttacgatgtactgatcgttggctccggcccgtccggcgcggcggcggcggtctactctgcacgtaaagggattcgtaccggcctgatgggcgaacgcttcggcggtcaggtgctggataccgtggatatcgaaaactatatttcggtgccgaaaaccgaaggccagaagctggcaggcgcgctgaaagcgcacgtcaatgactataacgtcgacgtgatcgactcccagagtgcgaccaaactgacgccggcggcgacagagggcggcctgcatcagatcgaaaccgcctccggcgcggtgctcaaggcgcgtagcgtcatcatcgccaccggggcgaaatggcgcaatatgaacgtgccgggcgaagatcagtatcgcaccaagggcgtgacctactgccctcactgcgatggtccgctgtttaagggcaaacgcgtagcggtaatcggcggcgggaactccggcgtggaagccgccattgacctggcgggcgtcgtagagcacgtaaccctgctggagtttgccccagagatgaaagccgaccaggtgttgcaggataaagtccgcagcctgaagaatgtcgacatcattcttaatgcgcagaccacggaagtgaaaggcgatggcagcaaagtcaccggcctgcagtatcgtgaccgggtgagcggcgatgagcatcatatcgcgctggcggggatcttcgtccagattggcctgctgcctaacaccacctggctggaaggcgccgttgagcgcaaccgcatgggtgagatcatcatcgatgcgaagtgcgaaaccaacgtcaaaggcgtgttcgccgcgggcgattgcaccaccgtgccgtacaaacagattattatcgcggcaggggaaggggcaaaagcgtcgctgagcgctttcgactacctgatccgcacgaaaaccgcataa

SEQ ID NO: 211305 - DNA, 564 bp, Klebsiella pneumoniae; identical to SEQ ID NO: 137844

SEQ ID NO: 211306 - DNA, 750 bp, Klebsiella pneumoniae
atgttaaagcgtctgctgttactcagccttttgccgttatgcagccatgcggaggaactccccgctccggtaaaagcgattgaaaaacagggcattaccattataaaaccctttgaggcgccggggggaatgaaaggctggctgggcaaataccaggacatgggggtcgccatctacctaacgccggatggtaaacacgcgatctccggctatatgtatgatgagaacggcagcaacctcagcgagcagctgtttcagaaagaactctataccccggcgggacaagagatgtggaagaagatggccagcgcacactggctgcaggatggtcgcaaggacgcccctatcgtgctgtatgtctttgccgatcccttctgtccctactgcaagcagttctggcagcaatcccgcccctgggtagaggccggtaaagtgcagatccgcactctgctggtgggggtgattaagccggagagcccggccaccgccgcggcgattctcgccagcagcgatccggcgaaaacctggcatgattacgagcaatcgaatgggaaaatggctctgacgatcccgaaagcaattccgccggagaaaatgaaaatgctcaacgtcaaccagcagctgatggacgatctgggagccaacgtgacgccggcgatttattatatgaataaagataatatgctgcagcaggtggtcggcctaccggataaagagaaactgcatattatgatgggtgaaaaagagtaa

SEQ ID NO: 211307 - DNA, 933 bp, Klebsiella pneumoniae
atggcaaatctttacgatctgaaaaagttcgatttgaatttattggttattttcgaatgtatctatcaacatttgagcatcagcaaagcggcggcgatgttatttatcaccccctcagcggtgagtcagtcgttgcagcgtctgcgccagcagttaaacgatccgctatttgttcgtgttggcaaaggaatgacgcccaccaccgcctgcgtcaatcttcattatcatctacagcaaaatctggagcagctggaaaaaaccatcaatcttaataatcgctcagaactgcgtaaacgtattgtgatatatggccccccgctgttctgttcagtcaatagccacgttatgattaaccagctctgtcatcaggcgaacttgcaaattgagcaccataacctgaccaccaccgaatcggctgaggagctgctggcgtatcgccaggcggacctggtgttcacccgcatgcccattaccaaccgcgccacgatctgtcagccctatcagacggtgcagacgctggcggtttgccgggcgggccatccgcgacgcgaaacgcttacctcggtagagtcactggcgcaggagtttttcactcactatattaccaacgatcccgttattcagcgcgtgcagcaaagcagcatcgcctggctgaatccgcgcaatattgcctttcgcagcgactcttttatgaccattcttaacatgattaataaaaccgacttaattggctttttgccttcctatttatatgactttatctcacccactatgcagcttcacgccatcaacatagataatctttttccggatatcacgatctacattaattaccaccatgcatcttcgcaaaatcattttttaactgaattaatcaccatattaatgaatgatcgagaggcatcacggcccaaatttaatcacagcgaataa

SEQ ID NO: 211308 - DNA, 1224 bp, Klebsiella pneumoniae
atgtcgtttattaaatatcccttaccggaatcggtgctgcaagcaactgagcagcggatccagtgggtcatggataatttttcgcgcatctgtgtctctttttccgggggaaaagactccaccgttatgctgcatttaaccgcccaggcggcgcggttacaggggaaaaaaatctgcgtgttgtttattgactgggaagcgcagttctcctgcaccatcgcccactgtgaaaaactgcgtgcgctgtatgcggatgtcatcgaaaccttttactgggtcgccctgccgctcaccacccaaaatgccctgacgcagtataagccgcaatggcaatgctgggagcccggaaccgagtgggtacgccagccgccgccctgggccattacccacccgggctatttttcattttatcaacccggaatgagctttgaagccttcgtcagccacttcgccgagtggttttcgcagcgtcgtcccgccgccgtgctggtgggcattcgcgccgacgaatcgctaaatcgctttatgacgatttcttcacagcgtaaacagcgcttcgccgacgataaaccatggaccacttcagcgccgggcggccatgcctggtacatctacccgctctatgactggaaaaccgccgatatctggacctggtttgccaaaagcggcgagccctataacccgttgtacgatctgatgtatcaggccggggtgccgctgcgctatatgcgcatttgcgaaccgtttggtcccgagcagcgccaggggctgtggctgtatcacgtgctggaacctgagcgctgggccgcgatgtgccagcgagtgagcggcgcgcacagcggcggggtctatgccgggcatgataaccagttctacggtcatcggaaaatcgacaagcccgaccacctgacgtggaaaagctacgccctgttcctgctcgacagcatgccggaaaccaccgccgagcactaccgcaataaaatcgccgtctacctgcgctggtaccagaaaaaaggtatggaggatattccggatacccaacctgcggacattggcaccaaagatatcccatcctggcggcgagtctgcaaagtactgctcaataacgattactggtgccgtcagctttcgtttagcccaaccaaaagcagccactatcagcgctaccgtaaacgcatggaaaaacatcgccaacaatgggggatattatgcaacaacaactga

SEQ ID NO: 211309 - DNA, 627 bp, Klebsiella pneumoniae
atgcaacaacaactgacgcaggcgctggaagcttacctgcaaaagctggatgacgaggcgcgcattgaggctatcaacgcgtttcgccaggtgctccaccactacagccccttccgctcgcagcccgtcgactgcgtgctgtgggtcaaacaggagctggtcgcccccaacgattacaacccgaataacgtggcgccgccggagaagcgtctgctgcaaacgtcgctggaggccgacggctttacccagccggtcgtcgtcatccagcaacgcccacaggcgtatacgattgtcgatggttttcaccgccatgagctggcctgcagcaaagccgcgctgaaaaaaacgctaaaaggctatttgccggtgacctgcctgacgagtgaagctgcctcgcgtgacgggctgatggcagcgaccatacgccataaccgggcgcgcggtcgccaccaaatccacgccatgtcagagatcgtccgcgagctgacccagctcggctggacgccgcagaaaatcggcaaagagctggggatggatgccgatgaagtgctgcgtctgaagcaaattagcggcctgacagagatgttcgccggccgccagttctcccaggcgtggacgattaagtaa

SEQ ID NO: 211310 - DNA, 1161 bp, Klebsiella pneumoniae
atgaacaataaccccttgattccagagagtaaacttcctgcgctcggcaccacgatttttacccagatgagcgccctggcccagcagcatcaggccataaacctgtcccagggctttcccgattttgacggcccgcgctatctgcaggagcgtctggcgtaccacgtggcgcagggggcgaatcagtacgccccaatgaccggcgtgccggcgctgcgcgaggcgatcgccgggaagacggcggagctgtatggttaccagcccgacgttaacagcgagatcacggtcaccgccggcgcgacggaggccctgtatgcggcgatcaccgccctggtgcgccgcggcgacgaggtgatctgtttcgatcccagctatgacagctacgcccctgcggtggcgctggccggcggcgagttacgtcgtattgcgctgcagccgccgcattttcgcgtcgactggcggcaatttgccgccgccctgagcgagaaaacccggctggtgatcctcaacaccccgcacaacccttcggccaccgtctggcagcgcgaggattttgccgccctgtggcaggcgatcgccgaacgcgagatctatgtcctgagcgatgaagtctatgagcatatctgctttgccgatggcggccacgccagcgtactggcgcatccgcagctgcgcgagcgggcggtggcggtctcttcgtttggcaaaacctttcatatgaccggctggaaggtcggctactgcgtggccccggcggccatcagcgccgaactgcgcaaggtgcaccagtatctgaccttctcggtgaataccccggcgcagctggcgatcgccgacatgctgcgcgaagcgccggagcattatcgtgagctgccggcgttttatcgggaacgtcgcgatctgtttattgaagcgctgcgcccaagccggctggaaatcctgccctgtgaagggacctatttcctgctggcggactacagcgccatctccgatcttgacgatgtcagcttctgccgctggttgaccactgagatcggcgtggcggcgatcccgctctccgtcttctgcgccgatccgttcccgcacaagctgatccgcttgtgcttcgccaaacagccggcgactctgctggctgcggcggcgcgtttgtgccagctgtag

SEQ ID NO: 211311 - DNA, 690 bp, Klebsiella pneumoniae
atgatccgcgccatcgtgaccgacatagaaggcaccaccagcgatatccgctttgtgcataacgtgctgttcccctacgcccgcgaacgactggccggctttgtgaccgctcagcagcacgctgaaccggtcaaaaccattctcgacaacctgcgccgcgaaacagacgcccccgccgccagcaccgccgaccttatcactaccctcttcacctttatggatgaagaccgtaaatccacggcgctgaaggcgctgcaggggatcatctggcgcgacggctatctcaacggcgactttaccggccatctctacccggacgtactgccggcgctggagcaatggaaagcgcagggtattgatctgtatgtatattcctcaggttccgtggctgcgcagaaattgttatttggctacagcgatgaaggtgatattactcatctgttcacgggctatttcgataccctggtaggcgccaaacgtgaggtgcagtcctaccgtaacattgctgaacacctgggccatgcccctggcaccatcctgttcctgtcggatatccatcaggaacttgatgccgccgaggccgcgggtttgcgcactgtgcagctggttcgcggcgaccgcgacccggcgagccaccatcctcaggttcagcgttttgacgacattcatccggagcagatcccagcatga

SEQ ID NO: 211312 - DNA, 543 bp, Klebsiella pneumoniae
atgagcgcattaactcttttttccgtgaccgatccgcaaacgccggtctggcacagcaccgacgccaaagcgattcaggatcaacttaacgccaaaggcgtccgcttcgagcgctggcaggccgaccgcgacctcggcgcaaatcccagcccagaaacggtgattgccgcctatcagcatgcgattgataaactggtcgccgaaaagggctaccagagctgggacgtcatcagcctgcgcgccgataacccgcaaaaagaggcgctgcgggaaaagttcctgaacgagcacacccatggcgaagacgaggtgcggttttttgtcgagggcgctggcctgttttgcctgcacattggcgacgaggtgttccaggtgctgtgcgaaaagaacgatctgatttcggttcccgcccacactccgcactggtttgatatgggatcagaaccgaacttcaccgccattcgcatttttgataacccggaaggctggatcgctcagtttaccggtgacgatatcgccagcgcctacccgcggctggcgtaa

SEQ ID NO: 211313 - DNA, 2310 bp, Klebsiella pneumoniae
atgaagaaacagcataattatacggtgatgcactggggaacctggcaggtggagagcagtgagggcgagatcgtggcggttaagccggtgccctgggataaaaatccctcacgcatcggccagtcgcttcccgacgcggtgaccagccaaacgcgcattcgccgtccggcggtgcgcgccggctatctccagcacgggccggcgtcacgagaagggcgaggtaaagagccctttgtcgaagtcagctgggaggtggccctggacctgctggcgcgcgagctgcgctcggtcaaggcgcgctgcggcaatgaggcgatctacggcggctcctacggctgggccagcgctggacgctttcaccatgcgcagagccagctgcaccggtttctcaagggctttggcgggtacaccgccagcaccaatacctatagcagcgccgcgggcgagcgtattctgccgcatattctcgggccgctgagcccgctgcaccggcagcatacccatttttccgagctggcccgggagtgtcagctgtttgtcgccattggtggtctgccgctgcgcaatgcccaggtcaacggcggcggcgccaatgaccatatgctccagtactggctggataagatgcaggccaacggcacgcggtttatcaatatcagtccggtgcgcaatgacctcagcgcggtgcccgacgccgagtggctggccattcggccgggcaccgataccgcactgctgctggccctgagctatgtgctgatcgctgagtccctttacgaccaggcgtttgttgccagccataccgtcgggtttgccccctatcgcgcttatctgttgggcgagcacgatggcgtggcgaaaaccccggcgtgggcggcggcgattaccggcctggacgcccagcgcatcgccgacctggcgcgggagatggcccgccaccggacgatggtgaatatctcatggtctatccagcgcgcccgtcaaggggagcaggcctactgggcgacggtggccctgactgcgctgctgggacagatcggcacgccgggcggcggtctcgggtttggctacgcctgcactaacctggcgggcgcggtacgaaaagcgttttccggcccgcgcttacccgccggggagaatgcggtggacagcgttatcccggtggcgcggctgtccgatatgctgctgcacccgggagaaacctatgagttcgacggtcagcggcggcgctatcccgatatccgtttagtctactgggcgggaggcaatgcgtttcatcatcatcaggatctcaaccgactgtgcgaggcctggcgccgcccggagacggtggtggtgcatgagcagtactggaccgcgcaggccaaattctccgatatcgttctgccggccaccacctcgctggagcgagaggatatcggcagcggcggtcacgacgggtttatgatcgccatgagcgcgcagatcccgccggtgggcgaagcgcgtgacgattacgccattttctgcgatctcgccgatcggctgggattcggagaagcgttcagcgaagggcgggacgccgggcagtggctgcgtcatctctatgaggagtcaagaccgcgggcgcaggaggagggtattgcgctgccctcgttcgatgacttctggcagcaaggggtgctggagtacagcgcgccggagcggccgcaaatttttctcgccgattttcgcgccgatcctgagcgcaatccgctctccaccccctccggcaaaattgaactcttttccgccaccgtcgccgggtttggctatcgcgaatgtcctggccatccgtggtgggatgaacaggaggccgcccggcagcggcaggaggcggcgcgctggccgcttcatctgctctccagccagccgcgcgcccgcctgcacagtcagtacgaccacggcagcgtcagccgggcgacgaaaattcagggacgcgagccgctgtggatgcatccgagcgatgcgcaggcaagagacatccgcgaaggcagcgtggtgaaggtctataacgaccgcggggcgattctggcgggcgtgcacctgagcgagcagattttgcccggcgtggtacagatgtccaccggcgcctggtatgacccgctggatcccaatgaaaaaggaacgctcgataagcacggtaatcccaatgtgttaaccgaggatcgcggcagttcgcgcctggggcagggctgtagcgcccagagctgctgggtggagatcgccccgtggcgagaggagctgccgccgatcactgcctttgatccgccgaaatttattgaagtttag

SEQ ID NO: 211314 - DNA, 981 bp, Klebsiella pneumoniae
atgtcgcagaaaagaaaattattgcctgccgcgctgggactgctttcccttgcctcgctgagcgtcgctgccgcagacgccctctccttacagggaaaaaccattggcgttgccgtggtcggcactcagcatttctgggatcgcgaggcctttaaaggcgcgacagaggaggtggagaagctggggggcaaagtcattggcgtcgatggcggccgcgataatcaggtgcatgccaataaccacgatattttactgtcacgcaaggtggacgcggtaattagtattctcggcgatagcgccgtcgaaccaaaatttaaagcattgcgtgatgccggtatcccggtatttaccgtagatcatgtttctcaatattcggtcaacaatactacttccgataactacaccttaggctcaaccatcggccgctacatggcggatgaattaggcggcaaaggcaacgtcgccgtatttaacgcgttctccagcgcgctgcgtatttgcggaattcgctacgatcagtggaaatatgtccttaaggattatccggatattcatattatccagcccgagctcgcggaacagttcgccaactcgccggaagacgcgcgcaagaaaaccctcgaattactcagccagtatccgaaaggcaaactggacgccatccatgtcgcctgctgggatcaaccggccatcggcatcgtccaggcgctggaagagacaggtcgcgataaagacgtgaaagtgacggccatcgacgccggtccggagaccctggagatcatggcggagcccggcagcccgttcgtggctaacgtcgcgcagcagccgcatctgatcggccagacctcggctgacaatgtggcccgctactttgccggccagaaactaccggtgcaaacctttattccggtggttccggtgaaaggtccgcaggaagcgaaagcggtgtataaacagttgggatacggcgagctgcagtga

SEQ ID NO: 211315 - DNA, 1551 bp, Klebsiella pneumoniae
gtgattaatcaacatccaggcggggaacgccccgccgctggtctggtcatggagcagatcggtaaacgttttgccagcgtcaccgcgcttaatgcggttaccctgcgcctcaatccgggggagattcatggcctgattggcgagaacggcgccggtaaatcgacgctgatcaagatcctcgccggtgtctatcaggccgacagcggcagcgccaccctcgacggtcacccgctgcccctcggcaatccggcagccatcgaagccgccggcatccgcgttatccaccaggagctgaacctgatcccgcactttaccgtcgcggaatcggtgtttctgggccaggagtatcgcacccgctggggggcgctggatcaccgacggatgaaggccgccacggcgcaatttttccagcaaaactggcagctggcgatcgaccccgaacggctggtgcgcgacctgagcctggccgagcgcaagctggtgcagattgcccgcgcgctgatcgacggcgcggcgcggctggtagtgttcgacgagcccaccgcccccctggaggcgcaggaggccagtctggtctcctccgctatcctgcgcctgcgcgaccagggcattgccattctgtatatttcccactacctcaatgagatagccaccctctgcgaccgcggcaccgtgctgcgcaacggggaagtggtcggctacccggaccgcgacctgctgcagaataccgaagcgctgatcgccatgatggtcggccgggaaatcgaccagctgtatactccgcgccagcgcccggcggcagacaatggggcaaccccgctgctctcggtgcgccagctgagcgacgggcggcagctgcaggatctttcttttgatattcagccgggcgaaatcgtcggcgtcgccggcctgctgggcgccggacgcgatgtgctggtcgacttactctacggcttacgcccggcggaacgcggcaccatccacctcgagggccggccgcggcgcattcgtacgccaaagcaggcgatccgcgccggcatggcgctggtgccgcgcgaccgccgccatcaggggctgatcctgcccttcaccaccgccgacaatattaatctcgcctcgctgccggaaaccgccacctttggctgggagcggcggggtatcgccgagcagaaagcgcgcgactggatagaacagctggcgatccgcccgggacgaccggggctgccggtacgctacatgagcggcggcaaccagcaaaaagcgatcctcgcccgctggctggggaccgatgcccggctgtttattctcgatgaacccacccttggggtcgatatcggcgcccgtcgcgatatttaccaacggacgcgccagctggccgatcaaggacgggcggtgctggtctcctccagcgatgcccccgaactgctcggactatgcgaccggatcctggtcctctggcgcggcgcgctggcggccaatctgcccacccgcgggctaacgctggacgccctgctggtggcgatcaacggcggacaggagccttcaccatga

SEQ ID NO: 211316 - DNA, 990 bp, Klebsiella pneumoniae
atgagtactgctatccagcgtcgcggccgtccgggcctggcgacgctgattgaaaaatttcccctgatcctgtttctggcgctgctggtatggctgagcgtacagtcgccctactttctcagctggcaaaatatcagcctgatgctggtccagagcgttccgctggcaatcctctgtttcggcctggtctgcgttatcgccgtgggcggagatgacgtggtctccggcggcatcgacctctccctgccggcgacggcggtgctcggcgtcgcgctgctcagcctcgggctggccgaatggcacacgccatatctcctgctgctggcgctgctggcggcggtttgcctgctgtgcggggcgatcaatggcttgctggtgctggcggccggcctgccgccgctgctggccaccctctcgacctcggtggcgtttaccggtctgacagatctgttgaccggccagcggcgcatcgcggtcagcgatccgctgatggtcgcctttcgcgacaacagcgtgctgggcctgccctggccgctggtctacctgctgggggtgtttatcctgttccagttcctgctccaccactcccgcttcggccagcatgtgcaggcggtgggcggcaatcgcgatatggcgcagatgagcggcctgaacgtgcgccgcttgaccctgctggtctggctgttagcgggcattgccgccgggctggctattctgccgctgctcagccagggctccggcagctcaagcgggacggccacgccgctgctgctggagaccgtgctggcgacctttatcggcgccgccttctcgcgccgtcgggtggtcaccatctggggcgcgctgctgggggcaatcctggtcaacgccctctctaacgggctcggcctgctgggggtcaatatcttctggatgggcgccattaaaggcggcctgatcctggtggtgctggcggcctcggcggtcagacacaaaggaggcgaggcatga

SEQ ID NO: 211317 - DNA, 1005 bp, Klebsiella pneumoniae
atgagtcaaatcactctgaaaacctctgcgtcggcggaacagacggccagcagcccgctggcctggctgtcgcgggccggatttggcgtcatcatcctgctggccatcgccctgtttggctgggcgaatccggtatttttaaccgtggataactgggccaacctgctgcagggcagcgcgatcctgctgattgtggcgatggcgatgaccctgatcgtcagcgccggggcgattgatctgtcggtgggcgtcgcgctcgatttcggcgccgccttcgccctcgtcgccctgaaaacctggcatctgccgtggcaggccgcggtgggctgcgctctgctcggcggcgtgctgattggcctgctcaatgcctttctgatcctcatctgccggatccgtcccttcctcgccacgctcggcacctggtttatcgccagcagcgccgagcgcatctataccgacggcggcggcgcgatagcctatcggcggatggccccggagtatcacgacctggcggtgggcaaccttggcgggatccccacgccggtagcgatcgtgctggcgctgtggctggcggcctggctggttaccgagcgcaccctgtggggcaaatatgtccgcgccatcggtcagaacagcgaagcggcgcgtatcgccgggatccgcgatcgcctgaccatgctcggcgtgctggtggccgcctcggcgctctgcgccgtcggcggggtgatcctctccgccaacctgcggcagtttaccccgctggccgggcagtcttatctgatggacgccattgcggcagtatttatcggcactgcctttacccgtctgggccgggtcagcaccctcggcaccctcggcggcgtgctgttccttgccattattgataacggcctgaacctgatggggctcaattatctggtgaaggacgcgctggtcggcgtgattctggtggtggccctcgccctatccttctggcaggcgcgcctgcgccaaacgcatcgctaa

SEQ ID NO: 211318 - DNA, 942 bp, Klebsiella pneumoniae
atggcaacctttgacgccgtatttgtcggcctgactattctggatatcgccgggcgcccggtggtggcgatcccgccgcgcggcggcgtcgcctttattgagcaaattcgtctcaaccccgccggcaccgccgccggggctaatatcaacgccgcgaagctcgggatccgcaccgcagcggtggcctgcctgggcgaagatgaaaaggccgactttatcctcgccagctatgcccggctgggcatcgactgctcgcttatccagcgcaccgcgctgaaggagacctcggcgacgatcctgccgattcgccccaacggcgaacgtccggccctgcactgccggggcgcgtctgacgccctgtttgtcagtgaagcggaatttgacgccgtccttgactgtcgtttcctgcatcacggcgggaccgggctgctggcggcaatggaccagggacagagcgcgcggctgttgcaggcggccaaagcgcgcggagtcaccaccagctttgaccttatcgccccgaatgaagagaccctcgaactactgcggcccctgttgccgtcggtggattatttcatgccttcgctggaggaagccgcctttctctccggagagacgcagccggaggccatcggccacttcttcctggcgctcggcgtgggcacctgcattctgaaagacggcgagaacggctcctggcttatcggccgcgatggcgggccgcagcatattgcgccgtggccggtcgaggcggtggataccaccggctgcggcgacagctactgcggcgggtttattgccgcactggcgcgcggactcagcgtgaaagcagcgtgtgacgtcgcctcggcggtggccgcgctggtggcgaccgggatgggatcggatgccgggggagtggactgggaacagacccaggcttttatggcggcccatcgcccctga

SEQ ID NO: 211319 - DNA, 1029 bp, Klebsiella pneumoniae
atgaaaatcgtttttaccgccgagcatgctggcgaccttagcgccttccaccagctgggcgagctgctggtggaggggtgggcgctgggcaaaccgaaactcagcgccggtcagctgattgagctggcccacgacgccgaggtgctggtgaccagctatgatgaggtgacggacgcggtgatggccgcctgtccgcgcctgcaggtgatcgcctgcacccgcgcgaatccggtgaatattgatacccaggccgcccaggcgcgcggcatccgggtgctctacaccccggggcgcaatgccgatgccgccgcggagctgacgcttggcctgatgctcagcctggcgcgccatattccgcaatcccatgcggcgctgaagcggggggaattcacgcaggctgacaatgccgccgccgccactcagcagggtctgcggcgggatgtggtctgggacgtgagcccggaaagcccctatgaagtgtttaaaggcagtgaactgcgcaataaaacgctggggctggtggggtatggcaacattggccgccgggtggcgcgtatcgcccgggcgttcggcatggcggtgttggtggtggatccgttcgtcgccgcagaggatatcaatgagccagggctacagaaaacgaccctggaggcgctgttccgcgaggcggatatcgtcagcctgcacctgagcagcgggccgcacagcgacgggctggtgaatgccgcgctgttaaacagtatgaagcccggcgcgctgctgatcaatacctctcgcgcggcggtggtcgacgaggcagcgctgattgatgccctgcgccacggcccgctgggcggcgcggcgctggatgtctatcaccgcgaaccgctgtggcgcgatcatccttttgtcatcgagttcgataacgtgattatcacgccgcatatcgccggagccacccgggagagtatcgccaaacacacggcgatgattgccgccgatcttcagcgctatgtcgccggggagccgctgctgtaccagtggcgttaa

SEQ ID NO: 211320 - DNA, 1497 bp, Klebsiella pneumoniae
atggatttttatcttggtatcgatattggcacctcgcgggtgaaagcggtgctgtttgatcagcatttcaccgcctgcgccagcgccgcggaaaatacctcaccccgcctgtcggccaatggctacgcggaacaggatatgacccagctgtggcattcggtgctggctattctgcgccagattgcccgccatccggcgctacaggcggggcggctgcgggctatcggcctcgccgggcaaggggagggggtctggctcagcgatgatcagggcgaaccggtgggcccggggatcctgtggagcgatacccgcagccacgagctgatgagcgacctgctgcgccgacccggcttcgaccgccgctatttcgccgataccggcacccacctgcagccctgcaataccagcctgcagctgtactggctgaaacagtatcagccggcgcggctggcggccgcgcgctatctttttttcgccaaggactggatccgctttcgcctgaccggcgtggcggcgctggagctgacggacgccagcagctcgttactcaatcagcagaccggcagctggtcctcggtggtgatgaacgagatggggctgaacgaactgctgccgctgtttcccccgctgctggccccggatgccccggccggcacgctgagcgacgcggtggcggcgctgaccgggctgcccgccgcgacgccggtggccgccggggcgctggatgtctgtagcgccgcgctgggctgcggcgcggtcaacgaaggggatatctacacgatcctcggcaccacctgctgcaccgggatcgtctgccgcggcccgcagacggtgaacgaggcgacgcgctttgtcacccataccgaagccggacaggtgatctccctgtttccgatgcaggccggtatgccaaacattgactggctgcagcagcatatttcgctggacgccgatctggggcgcctggagcaggcgatcgcggcggtggagccaggcagcggcggcgtcttctggcagccgtacctcaatggcgaacgtgcgccgttttacagcccggacgcgcgggccggctttttcggcattagcccgcacaccacccgcgccgaactgcagcgcgcggtgtttgaaggcctggccttcgccattgtcgatgcgctgcagggttatccgcagggcggcgagctgtatctgacgggcggcggcgcagcctcggcgacctggctgcagattatcgccgactgtaccggacgcacggtggtctccagcgcctttaacgaactgagcgcgcgcggcgcggcgatcctggcggcccgtagcgtcgcggcgctggccgagacgcctccgctggcgcagacccgctatcagccgcgccctcaagcgcatgcccgctacgcggcgctgtatcccgtttaccgcctgctgcgcgagcagatgctgccggtatggcaggccagacaggccgcccttcaacctcttcctcaggacctacaaccatga

SEQ ID NO: 211321 - DNA, 609 bp, Klebsiella pneumoniae
atgtggcaagaaagactcgcgcaactggtcaccacctgtcattggatcggcgcgaaaggctgggcgccggcgaccggcggcaatatgtcggtgcgtcaggatgatacctggtgctggctaagcgagtcgggccgcgacaaaggcagcctgacaaccgaggattttctgcaggttgagatcgccaccaaccaggcgccttccggacggaagccgtcggccgagaccggtctgcacaccctggtgtatcgcctgttcccggaagccaacgtggtgctgcatgtgcataccgtcaacgccactgtgctgtcgcgcatcgaaaaaagcgacacgctggcgctgcaggggtatgaaatgcagaaaacccttagcgggcagcatagccatctcgatactgttccgatcgccatcttcgataatgaccaggatattgacgccctggcggcgcggattgccgattatgcgcaaacgcgcccgctgcgctacggctttctgctgcgcggccacggcctgacctgctgggggaaagatattcaggaggcccgccgtcaactggaggggctggagttcctgttcgagtgcgagctgatgcgccgccgctacgagccctga

SEQ ID NO: 211322 - DNA, 1263 bp, Klebsiella pneumoniae
atgtcaaacagcaatgattttcccctcgtcgaagcgcccgccgccggacgcaaaggcgtattttccatcgccatggtgttgttcagctttacctttttcaccggcacgatgttcgccggcggtaaactcggcgtctccttttccatcgtcaatctgctgtggatagccgtcatcggcaacgccttgctggccctctatgccgcgtcgctgggctggatcgccgcgcgcagcggcctgaatacggtgctgatgggccgcttctgcttcggggagattggcagcaagctggccgattttattcttggctttgccgagctgggctggtacgcctggggcaccgccacggtcgctatctcgttggtgaagatcctcgctctgcccgaggcgctaacccagccgttgatggtgctgtttggtattctgttctgcgtcaccgcgctggtgggctacaaggggctggacgcgctgtcgcgcctgtcggtgccattgatgtttgtgctgctgatggtctccatgtatctggcgctgcaccacgccggcggctggcaggcgatgacccgtattgcgccgagcgacaccatgacctggtcggcggccatcaccatggtcttcggcactttcgccagcggcgccacccaggcgacaaactggacccggctggccaactccagccggaccgccattctcgccagcatgggcagcttcctcatcggcaacgggctgatgatcgtcgccggcgcctggtgcgctatcgtctatcaacaggccgatatcgttgaagtgctgatcctgcaggggctgtcggtggccgcggtgatcatgctctgtctcaacctgctgaccatccagggccccaccatctataacgtctccgccgccgcctgccatctgctgcgcagcgaacgtcgccggacgctgaccctcgccgccgccggggtgggcattgtgctggccattggcgggatgtacgaaatgctgatccccttcctcgtgctgctgggcagtattattccgcccatcggcggggtgatcctcgccgactactggttcgcccgcggcgggcgctatcccctgctgcagaacgcccgcctgccgcgttttaactggctgggactcggcgcctacgccgccggcgcggtggtggcctatctttcgccgtggatcgcgccgctggtggggatctccgtttccgcgctggtctatatcgccctgactctgctaagcaaacgccagcctgccgccgtcgcggagcaggagccatga

SEQ ID NO: 211323 - DNA, 1236 bp, Klebsiella pneumoniae
atgagcctgacggtcagcgaactgctggcccttgagggactctccgccctgcgtctgcgggcgggaaagcaagggctgcagcgggccgtacgctggtactatgtggcggaaaatgaacatatcgccgagtggatcatgggcggcgagctggtgtttatcaccggcatcaaccatccccgggatgaagccaacctgatccagttgctgatggagggcaaacagcgcggcatcgccgggatggtgatcctcaccggcgaggcctatatccacgccattcccgccacgctgatcgcccttgccgacgagctgggcatgccgctgatcgagcagccctacctgctgaagatggtgattgtcaccgagcgcatcggcaccgcgctggtccgcagcgaaaacgtcctgcagtcgcagcgcgacattctgatgcagctggtcaccggcgactatccggacctgcagatgctccatcagcgcgccctgcaccagcagctcgattttacccgtccgctgcggctggcggcgctgcgtctggaggggttgtcccgcctgtttcgccagttcccgcccgagcaggccgaagcctggctgctgcaggcccaccgcagcgtgcgtcagcagctgcagcagcagctcaaccagcagggcaattcctttccgctgctggagcgcagcaacatgttccttttcctgctgccggatgaggagggggaaggctttcagcagaaaaaatggctacagcagtggctgcaggcgctggcggacggagaggagagtttgtcgctgctctgcggcctctccgcgccggtcaggcagctgcagggttacccgcgggcgctgtcgcaggcgcgccaggcgctggatctgtgcgataccctgcggccaacccagcgcatcagcgactatcagcagctggggtttatcaaactgctgtccgcggtcagcgacccggcgctgctcaacgattttatgcacgacaccctcggctgcctgatcgagccgggccgtaaagcgccgtggctgctgctggagaccctcgagacgctgctgcaggagaacggcaacgtggtgcgggccgccgaccggctgggtctccatcgcaacacgttgcatcagcgcatccagcgcattgaaaaactgaccggctacccggtcagccaccctcagtttcatctcaacgcctcggtcgcgctggtgatctggcgtttatcgcaaaaccatttacaggacccaccatga

SEQ ID NO: 211324 - DNA, 1239 bp, Klebsiella pneumoniae
atgaaaattattaacgctcgcctgcgccgccaggaggcgctgtttacccttgacctgcaggacgggataattcaccgcatcaccgcccaggccgcgatgcagactgccgacgccggggctatcgacgcccagggccggctggcgatcccgcccttcgtcgagccgcatatccatcttgacgccaccctcaccgcgggtgagccggagtggaaccgcagcggcaccctgtttgaaggcatcacccgctggagccagcgcaaagcgagtattaccccggaggacacccgccagcgggcgctgaaaaccatcggcatgctgcgcgatttcggggtccagcacgtccgcacccatgtggatgtcaccgacccgtcgctggcggccctgcaggcgctgctggcggtgaaacaagaggccgccgatctcatcgatctgcagattgtcgcctttccgcaggagggaatcgaatcgtatcccaacggccgggagctgatgacgcgcgccatcgagatgggcgccgacgtggtgggcggcattccgcactatgagaacacccgcgacaaaggggtcagctcggtgatgtttttgatggacctcgcccagcgctacggccgcctggtggatgtccactgcgatgaaatcgacgatccgcagtcgcgtttcctcgaagtgctggcggaggaggcgcgggtgcgcggcatgggggcccaggtcaccgccagccacacctgcgcgatgggctcttatgataacgcctactgctcaaagctgtttcgcctgctgaaagcctcgggcatcaacttcatctcctgcccgaccgaaagcattcatctgcagggccggtttgacagctggccgaaacggcgcggcgtcacccgggtggcggagctggatcgcgccggcatcaacgtctgctttgcccaggactcgattcaggatccgtggtacccgctggggaacggcaatatcctgcgcattctggatgccgggctgcacatctgccatatgctcggctatgacgatctgcagcgctgtctcgacttcgtcaccgacaacagcgcccgggcgctgtgtctgggcgataactacggcctcgccgaaggccgcccggcgaacctgctgatcctcgatgcggaaaacgactacgaggccgtccgccgtcaggcacgggtgctgacctccattcgccacggcaaggtgattttgcagcgtgaggtggagcacatccgctacccggcatag

SEQ ID NO: 211325 - DNA, 1041 bp, Klebsiella pneumoniae
gtgaccgacgcccgcccgggcgtcggcatcctggaaaacagacggcgcgaaacgacgatgagcgataaaaaatggattaaggccgaggacgtggccagactggccggcgtctcgcgctcggcggtctcccgcaccttcacccccggcgcctcggtgtcggagaagacccggcagaaggtgctgagcgccgcggaagccctgggctatcaggtgaatatcatcgcccggacgatgatcaccggcagcagtaattttatcggcatcgtcaccgccggtttcgacaacccgtttcgcagcaaactactggcgccgctggtccatcagctggcgctcaatggctttatgccgctgctgatgaacgctgacgatccgcagcagctcgccccctcgcttaaacaactgctgagctatcacgtcgccggggtgatcatcacctccggcgcgccgccgctgtcgctggcggaagagtatctggcgcgcaagatccccgtcaccctgatcaaccgccatgcggacctcgccggctgcgaccgggtgtgcagcgataacgcccagggagcgaagctggtggcggatctgttcagccgccgaggctggcggcaggttggctttattggcgaaaatcgcgagaacttcagcacccgccagcgctatgaggcttttatcgcccggacgtcggatatggcggtgagcagccgcttctgcgacagcggcggctatcaagccggctaccaggctgccagagaattggttgctgaaaaccccgggatgcaggcgctgttttgcgccaccgatatgctggcgctgggcgcccaggacggcctgcgggacgccgccgccccgctgccggccatcgtcggctttgacgatatcccgcaggcggactggcagccctatcagctcaccaccgttcagcagaataccgccctgctggcccaccacgcggtggatttgttaatgacgcggatcgcccgcttcagcctgccctcgcgccatcgcgaagtgccggtgaaactaattgttcgtcatagtgcgaaatga

SEQ ID NO: 211326 - DNA, 810 bp, Klebsiella pneumoniae
atgcaatctcaggaatcagaagcgctacaggcccgctaccgtctggcctgcgagctggcgaaagcgggggctgagctggcgtttgaatactatcaacagcgcgaggcgttgactgtcgaccataagggcgacgacctgcaggatgtggtcagcgtggccgataagcgggtggaggcctttgtcaaacagcgcattcagagcgcgtttccggaggatggttttctcggcgaagagagcggcgctcgcctgcccgacgcgcgagtgctgtgggtggtcgaccccatcgatggcaccagctgtttcctcaacggcctgcacacctggtgcctgtcgctggcgatcgtcgccgacggcgaaccggtcatcggcgtggtctacgaccccaaccatcgggagctgtttcacgccctgcggggccatggcgcctggctcaacgacgctccgatccgtccgcacccggcgacgacggtcaaagagggcgtgatgggcgtcggcacctcgcatcgcgtcaccccggcggactttctgccgtttctgcaggcgctgctcagcgacggcggcatgtttatccgcaacggctccggggcgttgatgagcgcctgggcggcggcgggccggttgattggctactacgagccgcacatgaacccgtgggacgccctgccggggctggtgctgatgcgcgaagcgggcggcgccagcaacgattttctggcgcaggaggggatccagcgcggcaatccgctgctgctggccagcccaacgctctacccgcagctgaaaaagatgatcccacaaccattacattaa

SEQ ID NO: 211327 - DNA, 1359 bp, Klebsiella pneumoniae
atgtctggaattatcgcttttttccgggcgtcgccgccgaaagcgggcgccgcgtttgatgaacaccgttttcgccgggtgcgctggcaaacctttatcgccatgaccctggcctacgtcaccttttacgtctgccggttatccttcaccgtcgccaaaagcgcgctggtggagctggggatcaccccgacggagctcggcatgatcggctctaccctgttcttcagctacgccatcggcaaactggtcaatggttttatcgccgatcacgccaacgtggtgcgctatatgagcctcggtttattgctcagcgccgggatgaacctgatgatggggatgaccaccaacgccctgctgctggccatcttctgggggatcaacggctgggcgcagtcgatgggcgtcggcccctgcgcggtctcgctggcgcgctggtacggcgttaaggagcgcggcaccttctatggcatctggtcgacggcgcataatatcggcgaggcggtgacctatatggtgatcgccgcggtgatcgccgggtttggctggcagatgggctacctgtccaccgccgcgctcggcgccgccggcgtggtgctgctggtgctgttcatgcacgattcgccgcagagcagcggcttcccgtccatcaacgtcatccgcgatgaaccgcaggaagaggtcgaagcccgcggctcggtgtttaaaaaccagctgctggcgctgcgtaacccggcgctgtggaccctcgccctcgcctccgcctttatgtacatcgaccgctacgccgtcaactcctgggggatcttctttctggagcaggataaagcttattccaccctggaggcgtccgggattatcggcgtcaacgctatcgccggcatcgccgggaccatcatcgccggcatgctctccgaccgctttttcccgcgcaaccgcagcgtgatggccggattcatcagcctgctgaacaccgccggcttcgccctgatgctctggtcgccgcacaattactacactgatattctggcgatgattatcttcggggccaccattggcgctctgacctgcttccttggcgggctgatcgccgtcgatatctcttcgcgcaaggccgccggggccgcgctcggcaccatcggcatcgccagctacgccggcgccggcctgggcgagtttctcaccgggatcattattgataaaacggctatccttgaaaacggcaaaacgctgtatgatttcagcacgttggcgctgttctgggtgggtaccggtctgggttccgcgctactctgttttaccactgccgccatcgtcgcccggcgccatgccgtcgaacggcagacctcgttctcctcataa

SEQ ID NO: 211328 - DNA, 1269 bp, Klebsiella pneumoniae
atgatgcctgcaagacatcaggggctgttacgcctgtttatcgcctgcgcgctgccgctgctggcgctgcaatctgccgccgccgcggactggcagctggagaaagtggtcgagctcagccgccacggtattcgtccgccgacggccggcaaccgggaagccatcgaggccgccaccggccgaccgtggaccgagtggaccacccatgacggggagctcaccggccatggctatgccgccgtggtcaacaaagggcgtgcggaaggccagcattaccgccagctcggcctgctgcaggccggatgcccgacggcggagtcgatatacgtgcgcgccagcccgctgcagcgtacgcgagcgaccgcccaggcgctggtggatggcgccttccccggctgcggcgtcgctatccattatgtcagcggggatgccgatcccctgtttcagaccgacaagttcgccgccacgcaaaccgaccccgcccgccagctggcggcggtgaaagagaaggccggggatctggcgcagcgtcggcaggcgctggcgccgaccatccagctattgaaacaggcggtttgtcaggccgataagccctgcccgatcttcgataccccgtggcaggtcgagcagagcaaaagtgggaagaccaccattagcggactgagcgtgatggccaatatggtggagacgctgcgtctcggctggagtgaaaacctgcctctcagccagctggcgtggggcaagatcacccaggccaggcagatcaccgccctgctgccgctgttaacggaaaactacgatctgagtaacgatgtgttgtataccgcgcaaaaacgcgggtcggtgctgctcaacgctatgctcgatggcgtcaaaccggaggcggatccgaacgtacgctggctgctgctggtggcccatgacaccaatatcgccatggtgcgcacgctgatgaactttagctggcagctgccgggctacagccggggaaatatcccgccgggcagtagcctggtgctggagcgctggcgcaacgcgaagagcggagaacgctatctgcgggtctatttccaggcccagggcctcgacgacctgcgtcgtctgcagacgccggacgcgcagcacccgatgctgcgtcaggagtggcatcagccgggctgccgtcagaccgacgtcggtacgctgtgtcccttccaggcggccatcaccgcgctgggtcagcgtatcgaccggtcatccgccccggcggtagccatggtcctgccgtag

SEQ ID NO: 211329 - DNA, 1029 bp, Klebsiella pneumoniae
atgcagacattacagaccaccagcctgcgggtgagtgaaaatcagctttttattctcgaccagcaggccttgccgcaggaaaaacgctggctggcggcggataacgttgcgctgctggtggaccatattcataccctgcgggtgcgcggcgcgccgctgattggcctgtccgccagcctgctgctggctctgctggcccagcgcggcctgaaccgggatgcactccagcaggcgctggagacgctgcgcgcggcgcggccgacggcggtcaacctgatgaataatctggatcgcatgaagcaggcgctggccctggaggattacccgcaggcgctggaagcggaagccttgcgtctggtcgaagaagataaacagttgtgcgaccgcatcgctgaggcgggcagtgcgctggtgaagcccggcagtcgactgctgacccactgcaacaccggtggcctggcgaccgccggggtagggaccgccctgggcgttatcgcgctggcgcaccggcagggaaaagtgaccaacgtatgggttgatgaaacccggccgctgctgcagggcggtcgtttaaccgcctgggagctgggcgagctgggcgtgccctatcagctgatcgccgattcaatggccgccagcctgatggcgcaggggcaggtggatgcggtgtgggtcggcgccgaccgtatcgccgccaacggcgacgtggcgaataaaatcggcacctattctctggcggttttggcccattatcaccagatcccgttttacgtcgctgccccgcagaccaccctcgaccgccattgcccgaacggggcggcgatccccattgagcagcgcgcggcggcggaagtgaccggagtggcgggcagcttcggcgcggtacagtgggcgccgacgggggccgccgtttacaatccggcgttcgacgtcacgcctgctgggctgataagcggctgggtgctggacagcggggtggtcaccccggcgcaggtcgccgccggggcgtttgcgccggacaacggataa

SEQ ID NO: 211330 - DNA, 1200 bp, Klebsiella pneumoniae
atgtcgcaataccataccttcaccgcccacgatgccgtggcttacgcgcaacagttcgccggcatcgacaacccatctgagctggtcagcgcgcaggaagtgggcgatggcaacctcaatctggtgtttaaagtgttcgatcgtcagggcgtcagccgggcgatcgtcaaacaggccctgccctacgtgcgctgcgtcggcgaatcctggccgctgaccctcgaccgcgcccgtctcgaagcgcagaccctggtcgcccactatcagcacagcccgcagcacacggtaaaaatccatcactttgatcccgagctggcggtgatggtgatggaagatctttccgaccaccgcatctggcgcggagagcttatcgctaacgtctactatccccaggcggcccgccagcttggcgactatctggcgcaggtgttgttccacaccagcgatttctacctccatccccacgagaaaaaggcgcaggtggcgcagtttattaacccggcgatgtgcgagatcaccgaggatctgttctttaacgacccgtatcagatccacgagcgcaataactacccggcggagctggaggccgatgtcgccgccctgcgcgacgacgcccagcttaagctggcggtggcggcgctgaagcaccgtttctttgcccatgcggaagcgctgctgcacggcgatatccacagcgggtcgatcttcgttgccgaaggtagcctgaaggccatcgacgccgagttcggctacttcggccccatcggcttcgatatcggcaccgccatcggcaacctgctgctgaactactgcggcctgccgggccagctcggcattcgcgatgccgccgccgcgcgcgagcagcggctgaacgacatccaccagctgtggaccaccttcgccgagcgcttccaggcgctggcggcggagaaaacccgcgacgcggcgctggcttaccccggctacgcctccgcctttctgaagaaagtctgggcggacgcggtcggcttctgcggcagcgaactgatccgccgcagcgtcggactgtcgcacgtcgcggatatcgacactatccaggacgacgccatgcgtcatgagtgcctgcgccacgccattaccctgggcagagcgctgatcgtgctggccgagcgtatcgacagcgtcgacgagctgctggcgcgggtacgccagtacagctga

SEQ ID NO: 211331 - DNA, 1242 bp, Klebsiella pneumoniae
atgtcagcattaccttcccccgaatacagccgcaatatgcggctgattggccatagcgatcagggcggtcgtccggacggcgtgcagctgatggtgcaccgcggattcgcctatatcggccatatggtgtcgcagggtttttccgtggtcgatgttcgcgatccgacccggcccaccaccgtcaactatattgccgcgccgccgggcacctggaacgtgcatctccaggcgcatgacgatctgctgctggtgatcaacgcccgggatctgtttgctgacgcccgttttgctgatgagaaggtgtactacacccgctcggtgggtgacacggtcagcgatgtgcaggacaagggatggagcgccgggctgcgcatctttgatatttccactcccgcgcagccgcgggaaatcagtttcctgtcgcttaacggcatcggtattcaccgcatctggtacgtcggcgggcgctgggcgtatgtgtctgcgctgatcgacggttttaccgactacatcttcctgaccatcgatctggccgatccgcgtaagcccaaagtggccgggcgctggtggctgccggggatgcaccaggcgggcggtgaaacaccggactggccgcagggcaaacgctatgcgctgcatcacgccattattgccggggataccgcctacggcagctggcgcgacggcggcctgacgctgctggatgtcaaagaccgtacccagccgaggctgattagtcatcgcaactggagcccgccgttcggcggcggaacgcataccgcgctgccgctgccggatcgtgacctgctggtggtgctggatgaagcggtgctcgacaaccaggaggacggcgagaagctgatctggctgtttgatatccgcgagccaaccaacccggtgagcatcgccaccttcccgccgccggatgaagcggattatgtggcgaaaggggcgcatttcggtccgcacaacctgcatgagaatcgtcccggcagctttgtcagctcaacgctgatttttgccacgtatcagaatgccggcgtgcgggcttacgacatttccaacccgtatcgtccgctggagaccggggcgctggtgccggctgcgcctgagagaatgatggatatccgtcccggccgcccgcgggtgatccagtcctgtgacgtgtttgtcgatgcgcaaggcattatctacagcaccgattacaacggcgggctgtcggtgattgagtatctggggtga

SEQ ID NO: 211332 - DNA, 1065 bp, Klebsiella pneumoniae
atgaaaaagatcgcactctctctgatgacgctgggtctgctgcagtcgacggcggcgctggccaccgccccgacgccggtgccggcggcgattgccgaacacaacggcccgatccgcattgccgtgatccgcaacctcgggtctgacgataacaccacccagtttgtcgccggggcgctgcaggaaggcaaaaagctcggtttcaaaatcagcaccttcctgagcaacggcgatgacgccaaattccaggacttcgtcaaccaggccatcagccagaaatacgatggcattattctctcccaggggcgtgacccgtattccaccgccctggtgaagaaggcggtggacgccgggatcaaagtggcggtgttcgataccgcggtaagcggtgagatccccggggtgacggtcagccagcaggatgacgcctcactgaccgagctctcctttggccagctggtgaaagacttcaacggtaaggccaatatcgtcaagctgtgggtggcgggcttcccgccgatggagcgccgtcaggcggcttaccagacgctgctgaagcaaaacccggggattaaagagctggagtcgatcggcgccgtgtcatccgatgtgcagggcgacactgccaacaaggtgggggcgatcctcgccaagtatccgaaagggaaaattgacgcgatctggggcacctgggatgcctttagccagggagcctataaagcgctgaaagagaacggccgcaccgagatcaaactctacagcattgatatttccaaccaggatttgcagctgatgcgcgaggccggcagcccgtggaaggtgagcgtggcggtggatccgaagcttatcggcgcgaccaacgtgcggctgatcgccaataagatcgccggcgagccgacgccagccacctacgacttcaaggcggcagcgattccccaggcgctgctggcggcccagccgggagcggtaaacgtggcgtcgctggggaaaattatccctggctggggccagaccgaagactttatcgcgccgtggttcgcgacgctggaagcgaagaacaaataa

SEQ ID NO: 211333 - DNA, 999 bp, Klebsiella pneumoniae
gtgagcaaggccctggcagtgaacgcgacggtatcgggccgtcagcgattttttgattttctctataagtggggcatgttgctgaccgtggtgctgctggtggcggtctttggcctcgcctcggacaacttccttgacccgttcaacatcatcaacattctgcgctcgatcgccatcgtgacggtgattgccattggggtgtcgatttccctcaccatcggcggcttcgatctgtccgtcggatcgacggcatcgctggctaacgcgctggtgatttccctgtttgtctggcatggcctggggaccaccgaagcgattctgataaccctcgcgctctgcaccctggtggggctgtttaacgcctttctgatcgtggttctgcgcattcctgacatgctcgccaccctggccagcctgtttgtgattcagggcgtggcaatgacatacagctacggtgggtcgattaccgaaaacatggtgctgccgagcggcgagatggcggagggtactatcccggcggcctttggcgcgctggggcaggtgccgaccatcgtcattatcatgctggtggtgacgctggtcgcccagctcgcgctgtcgttcaccacccacggacggcggatgtacgccatcggcggcaacccggaggcggcgcggctctccggcctgcggatcacgcgttacaaagtcgcagcatacgtgattgcctcgctgctggccgggctcggcggcattctgctggcctcgcgcatcggctcttcgcaggtcaacgccggcggcggctatctgatggacgcggtggccgcggcctggatcggcttttcgctggcgggctccggcaaaccaaacgccctgggaacgctggtgggggcggtgatcctcggcgtgctctccaacgggctggtgatgctctcggtgccgtattacgcgatggacattattaaagggttggtgctggctggcgcgctggcactgacctattttcagcgccgtacttaa

SEQ ID NO: 211334 - DNA, 1503 bp, Klebsiella pneumoniae
atgagcacgaatcgccttgagatgcataacattagcctggccttctccggctttcaggcgctgaacaaggtggactttaccctccatggcgggtcggtgcatgccctgaccggggccaacggcgcgggtaagtcgacgctgatggccgtgctgtgcggcacccacgcccactatgagggcgaagtgacgatcaacaacctgccggtcaccattcgttcgccgcgggatgctaaacagctggggatccacctggtgcagcaggaggtggacgtggcgctggtgccgggcctgagcattgcggaaaacattatgctggacaggctggcggagccgggcatgaccttccgctggtcgcgggttcggcagctggcgcgcgaggcgctggcgcagctggacgtggcgctggacgtccggcgctccattgacagctgcacgctcgccgaaaaacagcaaatcctgctggcccgcgccctgtcgcaccattgccgctttttgatcctcgatgaacccactgcgccgttggatcagcatgaaagtgagcgtctgtttgcggtagtacgccgtctgcagcatcaggggatcggggtggtgtttatttcgcatcgtatccatgagctgaaggcgatctgcgacaccctgacggtgctgcgcgacgggcggctgattgagagcggcccgatggggccgctgagcggcgaacagatcgtcgaaaagatgctgggccacgagctgagcgatatcttcccgccgccgcgcccgccgcacggcgaagaggtgctgttgcaggttgacggtctgcatgatgaggcgttgctgcaggatatttcgctgcgcctgcggaagggggaaattctgggtatcgccgggctggccggcgcgggcaaaaccgagctgtgcaaagcgctgttcggcgccagcaaaagccgggtgcagcgtggcgagctgaacggccagccgtggcgaccgcgcgatccggccgactcggtggggcgcggcctggcgctggtcccggaggagcgacgcaaagagggcattttcattgaagagccgatcgcgatgaacctggcggtcagcgccgataacagcttttcgcgctggagcctgttcggccatcggcaggcctggcgctgggcggaggaggtgattgcccgcctcggcgtgcgcgctaccggtcccggtcagacgctgcgccgtctttctggcggcaaccagcagaaggtggccattggcaaatggctgcgcggtgatgccaacgttttgatttttgacgaaccgaccaaaggggtcgatgtgaaagcgaaaaccgatctgttcatgctgatcgatggtctggcgcgggaaggcaaaggggtgatttatgcctcgggtgaattcgccgagctggtcggtttatgcgaccgcatctgcgtactgtgggacggacggatcgtagcggagatccccggcgcggaagcccgggaagagacactgctttattattcaaccggaggagcggcagcgtga

SEQ ID NO: 211335 - DNA, 1089 bp, Klebsiella pneumoniae
atgagcaacagcgatatccgcgtcgtgcccggcccggccaactatttctcccaccccggcagccttgagcgactgagcgactttttcagtgccgaccagctctcgcgagcggtgtgggtctatggcgagcgcgccctggccggcgccgaaccttttctgccggcggccttccacctgccggaggcgaaaaagatcctctttaccggccactgcagcgaacgcgacgtggcggggctggtgcaggcctccggtgacgatcgggcggtagtgattggcgtcggcggcggcgcgctgctcgacagcgcgaaagtgctggcccgccgcctgggggtaccgctggtggccatcccgactatcgccgccacctgcgcggcgtggacgccgctgtcggtgtggtatagcgacgccggacaggccctgaattttgagatcttcgatgacgccaacttcctggtgctggtcgaaccgcgcatcattctcaacgccccggcggagtacctgctggcaggcattggcgacaccttagccaaatggtatgaggccgtggtgctggcgccgcagccgacggcgctgccgctcaccgtgcggctggggattaacggcgcgctggcgatccgcgatgtgctgctggccagcagcgaaacggcgctggcggaccagcgccgcggcgatctgacccaggcgtttcgcgatgtggtggaggcgattatcgccggtggcgggatggttggcgggctgggggaacgttacacccgggtcgccgccgcccatgcggtgcacaacggactgacggtgctgccgcagacggataaatttctccacggtaccaaagtggcctacggcattctggtacagagcgccctgcttggtcaggacgatgtgctggcgcagttagtgcaggcgtatcagcgctttaacctgccgaccaccctggcggcgctggaagtcgatatcaataaccgcgcagagctggaccgggtcattgcccataccctgcgcccgggcgagtcgattcactatttaccggtgacgttaacccctgaggttctgcgcgcggcgtttgagaaggtggaatacttcagccgttaa

SEQ ID NO: 211336 - DNA, 744 bp, Klebsiella pneumoniae
atgcagatcgatttaacaggtaagaaggcgctggttaccggcgccagccgtgggttgggtcgcgccatcgcgctgtcgctggcgcgcgccggcgccgatgtggttattacgtatgaaaaatcggtcgataaagcccaggcggtcgccgatgaaataaaggccctgggtcggtacggcgaagcggtacaggccgacagcgccagcgcgcaggcgattcaggatgccgtcacccatgcggcccggtccctcggcgggctggacattctggtcaacaacgccggaatagcccgcggcggtccactggaatccatgacgctggcggacattgacgcgcttatcaacgtcaatatccgtggggtggtcatcgccacccaggaagcgctggtgcatatggccgatggcggacgtatcatcaacatcggcagctgtctggctaaccgcgtggccatgccgggcatcgcggtttacgccatgaccaagtccgccctcaacgccctgacccgtggcctggcgcgtgatttaggccctcgcgggatcaccgttaaccttgtccatccagggccgaccaacagcgatatgaacccggaggatggggaacaggcggaagcccagcgccagatgattgcggtcggtcactacggccagccggaagacatcgccgcggcggtcaccttcctcgccagcccggccgccgggcagatctccggtacggggctggacgtggatggcggattgaacgcctga

SEQ ID NO: 211337 - DNA, 303 bp, Klebsiella pneumoniae
atgaaaattgtctggtcaaaaacggcagataagcaattttctaaaatcgatactcggtataagagccgcattaaatccaggctggagaagatggatgataaagcttcacctatctcggatatcaaaaaattgtcctctcccgaaaaccactaccggctgcgattaggtgattacagagtcatctacacctttggggatccgccgggcgatacctgctacgtcgtggcggttaaacgccgaaccaccaccacctaccttcatgaggaagataccgaatatgactattcagtacatcaaggatga

SEQ ID NO: 211338 - DNA, 405 bp, Klebsiella pneumoniae
atgactattcagtacatcaaggatgaagaaggaaaagaccagtatgtcgtcattccttacagcgattactttcgtatgcgcctggctctgctggagtacgacgacgaggatgaaaacgactgggaagatattccttatgaatcagacatctatgataacgtcatgctgcctggcgaagtatgcgacgtgatgcataaagaaaacgtcagcctgcaggccgcgtggcgtatcctgcgcgggctatcccagcaggaggtcgcggctaaactcggcatcagccagtccgcggtgtcacagctggaagcgctggactcccgtccgcagaagcgcacccgcgaaaaactggcggcgatttacggctgtacccaggagcaaatcagcctctatctgccgaaagagggttaa

SEQ ID NO: 211339 - DNA, 198 bp, Klebsiella pneumoniae
atgtttgacaccctttccaaagcaggtaagtacctgggccaggcggcgaagatgatgatcggcgtgccggattacgataactacgtcgagcacatgcgaataacccacccggatcagacgccgatgacttatgaagagttctttcgcgaacgccaggacgcgcgctacggcggcaagggcggggcgaagtgctgttaa

SEQ ID NO: 211340 - DNA, 2106 bp, Klebsiella pneumoniae
atgaataattcagggaaataccttatctgggcgctgctctccgtcatcggagccttcgccctcggctatatcgctttaaaccggggtgagcagataaacgcgctgtggattgtcgtcgccgcggtctgcgtttatttgatcgcgtatcgtttctacggcctgtatatcgctaaaaccgtgcttggcgttgacccgacgcggatgacgcccgcggtgcggcataacgatggcctcgactacgttccaaccgacaaaaaagtgctgttcggtcaccattttgccgccattgccggcgcggggccgctggtgggcccggtgctcgccgcgcagatgggctacctgccggggatgatctggatcctcgccggcgtggtgctggctggggcggtacaggactttatggtgctgtttgtttcgacccgccgcgatggccgttcgcttggcgaactggttaaagaggagatgggaccgaccgctggcgtcctggcgctggtggcctgctttatgatcatggtgatcatcctcgcggtcctggcgatgattgtggtgaaagcgctgacccacagtccgtgggggacatacaccgtcgcctttaccattccgctggcgatctttatgggcatctacatccgctatctgcgtccgggacgcatcggcgaggtgtcggtgataggcctggtgatgctggtgttcgccatcatctccggcggctgggtggcggaaagcccgacctgggcgccgtggtttgattacaccggcgtacagctgacctggatcctggtgggctacggatttgtggctgcggtactgccggtctggctgctgctggctccgcgcgattatctctccaccttcctgaaaatcggcaccatcgtggggctggcgattggcatcctgattatgcgcccgaccctgacgatgccggcgctgaccaagttcgtcgatggtaccggcccggtatggaccggcaacctgttcccgttcctgtttatcaccatcgcctgcggcgcggtctccggcttccatgcgctgatctcctccggcaccacgccgaaaatgttggccaacgaaagccaggcctgctttatcggctacggcggcatgttgatggaatccttcgtcgctattatggcgctggtggcggcctgtattatcgatccgggcgtctacttcgcgatgaacagcccgatggcggtgctggcgccggcgggtaccaccgatgtggtcgcctcggcagcgcaggtggtgagcggctggggctttagcattacgcctgatacgctgcatcaaatcgccagcgaggtcggcgaacagtcgattatctcccgcgccggcggcgcgccaacgctggcggtggggatggcctacatcctgcacggctcgctgggcggactgatggatgtctcgttctggtaccacttcgccattctgtttgaggcgctgtttatcctgacggcggttgacgccggcacccgcgcggcgcgctttatgctgcaggatctgctgggcgtgattagcccggggctgaaaaaaaccagctcgctaccggccaacctgctggcgacagcgctgtgcgtgctggcttggggctacttcctgcatcagggggtggtcgatccgctgggcgggattaacaccctatggccgctgttcggtattgccaaccagatgctggcggggatggcgctgatgctctgcgcggtggtcctgttcaagatgaaacgccagcgctatgcgtgggtggcgctgctgccgaccagctggctgctgatctgtacgttgaccgccggctggcagaagtcgtttagcccggacaccaaagtcggtttcctggccatcgccaataaattccaggcgatgatcgacagcggcaacattccgccgcaatataccgaatcacagctggcgcagctggtgtttaacaaccgtctcgatgccgggctgaccatcttctttatgattgtggtggtggtgctggcgctgttctcgattaaaaccgcgctggcggcgctgaaagaggataaaccgacggcgaaagagacgccgtatgagccaatgcctgaaaacctggacgcgattgagacccaggcgaaaggggcgcattaa

SEQ ID NO: 211341 - DNA, 414 bp, Klebsiella pneumoniae
atggcctggaagcgagagcttacgctggcggcgctgaacgccagcagcgaaaataccatggtggcgcatcttggcatcatctacacccgactggaagaggggctgctggaggcggagatgccggtggatgcgcgcacgcatcagccgtttggcctgctgcacggcggcgcttccgcggcgctggcggagacgctgggctcgatggccggttggctgatgaccgaagaagggcagtgcgtcgtcgggactgagcttaacgccagccatcaccgggccgtctccagcgggaaagtgcgcggcgagtgccgtccgctgcatcttggtcgccagagccagagctgggagattgtggtgtatgacgagaaggggcggcgctgttgcacctgtcgtctgggcaccgcggtgctgggctaa

SEQ ID NO: 211342 - DNA, 756 bp, Klebsiella pneumoniae
atggcggcgctggattttcgcggtcagaccgtgtgggtgaccggcgcaggtaaagggattggctatgccaccgcgctggctttcgtcgaggccggggccaacgtcaccgggttcgacctcgcctttgacggcgaaagctatccgtttgccaccgaaacgctggacgtcgccgatgccgaccaggtacgcgaggcatgtagccggctgttggcgaacaccgagcgtttagatgtgctggtgaacgccgccgggatcctgcgcatgggcgctaccgaccagctgagcgcggaagactggcagcagaccttcgcggtcaacgtcggcggggcgttcaacctgtttcagcagacgatggcccagttccgtcgccagcggggcggggcgatcgtcaccgtcgcctccgatgccgcgcacacgccgcgtatcggcatgagcgcctatggcgcctcgaaggcggcgctgaaaagcctggcgctgaccgtcggccttgagctagcgggcagcggggtgcgctgtaatctggtgtcgccgggctccaccgataccgatatgcagcgcaccctgtgggtcagcgacgatgcagagcagcagcggatccgcggcttcggcgagcagtttaagctcggcatcccgctgggtaaaatcgcccgcccgcaggagatcgccaataccattctgttcctcgcctcttctcacgccagccatatcaccctgcaggatatcgtggttgatggcggctcgacgctgggggcgtaa

SEQ ID NO: 211343 - DNA, 852 bp, Klebsiella pneumoniae
atggcaatccctaaattacaggcatatgcgctgccggaagccagcgatatcccggcgaacaaggtcaactgggcctttgagccgtcgcgcgccgcgctgctgatccacgacatgcaggagtatttcctcaacttctggggcgaaaacagcgcgatgatggagaaagtggtggctaatatcgccgccctgcgcgacttctgcaaacagaacggcattccggtgtactacaccgcccagccgaaagagcagagcgatgaagaccgcgccctgctgaatgatatgtgggggccgggtctgacccgctcgccggagcagcagcaggtgattgccgcgctggcgccggatgaagacgataccgtgctggtgaaatggcgctacagcgcgtttcatcgctcgccgctggaggagatgctgaaagagaccggccgcgatcagctgatcatcaccggcgtttacgcccatatcggctgcatgaccaccgccaccgatgctttcatgcgcgatatcaaaccgttctttgtcgccgacgcgctggcagatttcagccgtgaagagcacctgatggcgctgaaatacgtcgccggccgctccggacgggtggtgatgaccgaagagctgctaccgatcccagtctccaaagcggcgctgcgcgcgctgatcctgccgctgctcgacgaatccgatgaaccgctggatgatgaaaacctgatcgactacggtctggattcggtgcggatgatggccctggccgcccgctggcgcaaagtgcacggcgatatcgacttcgtgatgctggcgaaaaacccgaccatcgacgcctggtgggcgctgctcacccgcgaggtgcaataa

SEQ ID NO: 211344 - DNA, 1608 bp, Klebsiella pneumoniae
atgattgcatttacccgttggccggaagagtttgcggcccgctatcgtcaaaaaggctactggcaggatctgccgttaaccaatctgatcacccgtcacgcggacaatgacgccgtggcgattatcgatggcgagcggcagattagctaccgccagtttaaccagctggtggacaacctcgcctgctcgctgcagcgccagggactgaagcgcggggagaccgcgctggtgcagttgggcaatgtcgccgagttttacatgaccttctttgcgctgctgcgcatcggcgtcgcgccagtgaacgctttgttcagccaccagcgcagcgaacttaacgcctacgccgcgcagattaaaccggcgctgctgattgccgatcgcgagcacgctctgtttgctgacgatagctttctccacgcgtttatcgcggaacatccttccctgcgcgtcgcactgttgcgtaacgacggcggcgagcgcgatctggcgacggagattaaccgcccggcggataactttatcgccaatccaacccctgccgacgaagtggcctttttccagctctccggcggcagcaccgggacgccgaagcttatcccacgcacccataacgattacgactacagtatccgccgcagcaacgagatctgtgggattaacgctgaaacgcgctacctcaacgcgctgccggcggcgcataactatgcgatgagttccccgggttcgctcggcgtcttcctcgccggcgggcgggtgatcctcgccgctgacccgagcgccacgctctgtttcccgctgatcgaaaaacatcagatcaacgttgcctcgctggtgccgccggcagtcagcctgtggctgcaggcgattcacgaatggggcagcaacgcccagctgcaatcgctgcagctgctgcaggtcggcggcgcgcgcctgtcagcgacgctcgccgcgcgcattccggcggaaatcggctgtcagctgcagcaggtgttcggcatggcggaagggctggtgaattacacccgcctcaacgatagcccggagcggattatcaacacccagggttgcccgatgtgtccggacgacgaagtgtgggtggcggacgccgacggcaacccgctgccgcgcggcgaagttggccgtctgatgacccgcggtccttataccttccgcggctattacaacagtccgcaacataacgctgaagcctttgatgccgatggattttactgctccggtgatctgatttcgatcgatgaagatggctatatcaccgtccagggccgggaaaaagatcagatcaaccgcggcggcgagaagatcgccgctgaagagatcgaaaacctgctgctgcgccatgaggcggtgatccacgccgcgctggtcagcatcgaagacaatctgctgggcgagaaaagctgcgcttatctggtggtgacctcgccgctgcgcgccgtcgccgtgcgccgcttcctgcgcgagcagggggtggcggaatttaaactgccggaccgcgtggagtgcgttgccgcgctgccgctgacgccggtgggcaaagtcgataaaaaacaattacgtcagtggctggccgaaggcaagctgggctga

SEQ ID NO: 211345 - DNA, 1176 bp, Klebsiella pneumoniae
atggaaacgtcactggctgaggatgtaaagaaaccgacccggaccctgtcgccggacagcttcttctttatgtcgccgtaccgcagttttaccacttcaggctgcttccgtcgcttctcacagcccgccgttggcggcgatgcgctgaacggcgagttccagcagcagatggcggccgcctttgccgaggcccgggcggcggggatccgcaagccggtgatggtcggggctatcccgttcgacacctgtcagcattccgagctctatatccccgagcgctgggaagcgttctctcgcccggaaaagcagcgttccgcccgctatgccgcgccgctggaggcgatggaggtggtggagcgtcgggagatcccggagcaggacgtgtttttagccatggtggaacgcgccgccgcgctgaccgccaccccggaagtcgacaaagtggtgctatcaaggcttatcgatattaccacccgcgaccgcgtcgacagcggcgcgctgatggagcgactgatcgcccagaaccccgccagctttaacttccacgtgccgctctccgacggcggcgtgctgctgggcgccagcccggagctgctgctgcgtaaagaaggacagcacttcagctctctgccgctggccggctccgcccgtcgccagccggacgatgtgctggatcgggaagcaggcaacaggctgttggcctccggcaaagatcgccacgagcacgagctggtgacccaggcgatgaagagcgtgctgggcccgcgcagcagtcagctgtcgctaccggagtcgccgcagctgattaccaccccgacgctctggcatctggcgacgccgatcgcaggcaccgcgctggcggaagaaaacgccatgtcgctggcctgtctgctgcacccgacgccggcgctgagcggtttcccgcatcaggcggcgaagcgcctgattgctgaactggaacccttcgatcgccagctgttcggcggcatcgtcggctggtgcgatgacgaaggcaacggcgagtgggtggtgactatccgctgcgcgcgtctgcagcagcgtacgctgcgcctgtttgccggcgcgggcattgttccggcctcctcgccgctgggcgaatggcgcgaaaccggcgtcaaactgaccaccatgcttaacgtatttggcttgaactaa

SEQ ID NO: 211346 - DNA, 960 bp, Klebsiella pneumoniae
gtgaacttcttttctttctgccgccgcggtgcgctgaccggcatgctgttgcttttaggaattacctcagcccaggcggcggactggccgcgccaggtcaccgacagctacgggacgcataccctgccgagtcagccgctgcgcattgtctccaccagcgtgacgcttaccggttcgctgctggcgattgacgctccggtggtcgccagcggcgcgaccacgccgaacaaccgcgtcgccgatagccagggctttctgcgccagtggagcgaggttgccaaagcccgcaagctggcgcggctgtacatcggcgaaccaagcgccgaagcggtggccgcccagatgccggatctgatcctggtgagcgcgaccggcggcgactccgccctgccgctgtacgatcagcttaaaaccatcgccccgacgctggtcatcaactatgacgataaaagctggcaaaccctgctcacccagctggggcagatcaccggtcatgaacaacaggccagcgcgcgcattgccgacttcaataaacagctcgtttcgttaaaagaaaaaatgaaactgccgccgcagccggtgaccgccctggtctataccgccgccgcgcacagcgccaatatctggacgccggaatcggctcaggggcagatgcttcaacagctgggctttagcctggcgacgctgccgggcggcctgcccgccagccatagccagggtaaacgccacgatatcgtgcagctgggcggggagaacctcgcggccggtctgaacggccagagcctgttcctgttcgccggcgaccagaaagatgcggatgccatctacgccaacccgctgctggcgcatctcccggcggtcgcaggcaaacgcgtctacccgctgggcaccgagaccttccgccttgactactacagcgctctgctggtgctccagcgtctctccagcctgttcggctaa

SEQ ID NO: 211347 - DNA, 1242 bp, Klebsiella pneumoniae
atgaaccgacaatcctggctgctcaatctcagcctgctgaaaactcacccggcgtttcgcgccgtttttatcgctcgctttatctctattctgtcgcttggcctgctgggcgtggccattccggtgcagatccagatgatgacccattcgacctggcaggtcgggctgtcggtgacgctgaccggggcgtcgatgtttgttggtctgatggtggggggcgtgctggctgaccgctatgaacgtaaacgcctgatcctgctggcgcgcggcacctgcggcgtgggctttgtcggcctgtgtctgaacgccctgctgccggagccgtcgctggcggcgatctacctgctggggatctgggacgggttcttcgcctcgttgggggtgaccgcgctgctggcggcgaccccggcgctggtgggacgggaaaacctgatgcaggccggggccatcactatgttgacggtgcgcctgggctcggtgatttcgccgatgatcggcggcctgctgctggccaccggcggcgtggcctggaactttggcctggcggcggcggggacctttatcaccaccttaaccctgctgcgtctgccgcagctgccgccgcctccgcagccgcgcgagcatccgctgcgctccctgctggcggggctgaccttcctctgccggagcccgcttatcggcgggattgcgctgcttggcggtctgctgaccatggccagcgcggtgcgggtgctctatccggcgctggccggtagctggcagatgtcggccggacagattggcctgctgtacgccgctattccgctcggtgcggcgctgggggcgttgaccagcggccagctggcccagacggtgcggccgggcgcgctgatgctggcgacgacggtgggatcgtttgtcgccattgcgctgttcagcctgatgccgcactgggcattgggcgcgctgtgcctggcgctgtttggctggctgagcgctattagctcgctgctgcagtacaccctgattcagacccagacgccggaacatatgctcgggcggattaacggtctgtggaccgcgcaaaacgtcaccggcgacgccatcggcgcggcgctgctcggcggcttaggggcggtaatgacgccggcggcatccgccagcgccagcggctgggcgctggcgcttgtcggtgtgctgctggttgggctgctacgcgagctgcgccgtttccagcgcccggaaattgtcaacgaaagttaa

SEQ ID NO: 211348 - DNA, 1008 bp, Klebsiella pneumoniae
atgtcgttttctacgaccgcggtacgctctgtcgccgtgcccggattgttgctattactcgccttagccgccgcgcttagcctgaccatcggcgccaaatcgttgccgatcggcacggtattcaccgccttcagcggaacctgtcaaagcgctgattgcactatcgtgctggacgcgcgcctgccgcgcactctggccggtctgctggccggcgtcgccctcggcctcgccggcgcgctgatgcagacgctcacccgcaacccgctggccgaccccggcctgctgggggtcaactccggcgccagcttcgccatcgtcctcggcgcggcgctgtttgggatcacttccccgcaggagcagctgctgctggcattctgcggcgcgctctgcgcctcgctgctggtagcctttaccggcagccagggcggcggtcagctgagcccggtgcgcctcactctcgccggggtcgcccttgcggcggtactcgaggggctgtccaacggcatcgccctgctcaacccggacgtctacgatcagctacgcttctggcaggccggttcgctggatatccgcaccctgcaaacgctgaaaattgtcctgctgccggtagtggtggcggggatcgccgctctgctgctgagccgggcgctgaacagcctgagcctgggcaacgataccgccaccgccctcggcagccgcgtcgcccgcacccagctgatcggcctgatcgtcatcaccgtcctgtgcggcagcgccaccgccgtcgtcggccccatcgcctttatcggcctgatgatgccgcatatggcgcgctggctggtgggggccgatcatcgctggtcgctgccggtcaccctgctcgccaccccggccctgctgctgtttgccgacgtgattggccgcctgctggtgcccggcgaactgcgggtatcggtggtgtgcgcctttctcggcgcgccggtgctgatctggctggtgcgccgccagccgcggggaggtggcctgtga

SEQ ID NO: 211349 - DNA, 993 bp, Klebsiella pneumoniae
gtgattgccccgtcccgccgcctgatagccagctgtctgctgctaatggccgccagcctgctgatttccctgctcgggctggcgcaaggcccggtgcccctgacgattgaccaggtgttctcggcgctgttcggcgatgcgccgcgcaacgtcgcgatggtggtgaacgaatggcggctgccgcgggtgttaatggcgctgctcatcggcgccgcgctcggcgtcagcggcgccattttccagtcgctgacccgtaacccgctcggcagcccggacgtgatgggctttaacaccggcgcctggagcggcgtgctggtggcaatggtcctcttcggccagaacctgacggcgatcgccctggcggcgatggccggcggggtgctgacctcgctggtggtctggctgctggcctggcgcaacgggatcgaaaccttccgcctgatcattatcggcatcggcgtgcgcgccatgctggtggcattcaacacctggctgctgctgcgcgcctcgctggagaccgccctttctgcgggcctgtggaacgccggatcgcttaacggcctgacctggggtaaaacctggccgtcggcgccgctgatcctgttgatgctggtgggcagcgccctgctggttcgccggatgcggctgctggagatgggcgacgataccgcctgcgcgctgggggtgcaggtcgagcgttcgcgcctgctgctgatgctggtggcggtggtgctcaccgccgcctcgacggcgctggccgggccgatctcatttatcgcgctggtggcgccgcatatcgcccgccgcctgagcggcacggcccgctggggactgacccagtcggccctgtgcggcgcgctgctgctggcgctggccgattacggcgcccaacggctgtttatgccgtggcagctgccggttggcgtgttaaccgtcagcctcggcggtatttaccttattgcattgttgattcaggagtcccgcaaaaaatga

SEQ ID NO: 211350 - DNA, 795 bp, Klebsiella pneumoniae
atgagtgctgtcccctcccgtttgcgcggcgagcagttaaccctggcctacgggaacaagaccatcgccgagtcgctgaacgtgaccatccctgacggtcacttcaccgccattatcggccccaacggctgcggcaagtcgacgctattgcgcaccctcagtcgcctgatgacgcccgccagcggccacgtctggctcgacggcgcgcagatccagcagtacgccagtaaagaggttgctcgccgcatcgggctgctggcgcagaatgccaccacccctggcgatatcacggtgcaggagctggtggcccgcgggcgctatccgcaccagccgctgtttacccgctggcgcaaagaagatgaagaggcggtgaacaaggcgatgcgagcgaccgggatcagcgatctggcgctgcagagcgtcgacacgctttccggcggccagcggcagcgggcgtggattgcgatggtgctggcccaggaaacggcgattatgctgctggatgagccgaccacctggctggacatcagccatcagatcgacctgctggaactgttgagtgagctgaatcgcgagaagggctataccctggcggcggtgctgcacgatcttaaccaggcctgccgctacgccacccacctgatcgccctgcgcgacggcaggatcgtcgccgagggggcgccgaaggagatcgtcaccgccgatctgattgaacggatttacggtctgcgctgcacgatcattgaagatccggtggcgcatacgccgctggtggtcccgctgggccgccggtaa

SEQ ID NO: 211351 - DNA, 3882 bp, Klebsiella pneumoniae
atgaccactcgtttaccgttggttgccgcgcagccggggatctggatggccgagcgcctctccactctgccaggcgcctggagcgtggcccactatgttgaactgcgcggcgccctcgacccgacgctgctgggaaaagcgattgtcgccggtctgcagcaggcggacaccctcagcctgcgctttgaggaagaggagggggaagtctggcagtggctggcggccgaccgcacctttgccgaaccgtcgatcattgacctgcgtacggcgccggatccgcatcgcgccgccacggagcggatgcaggcggacctggcgcaggatctgcgtgtcgacggcggcaacccgctggtgtgccatcagctgctgcgcgtcggcgacgaccgctggtactggtatcagcgatatcaccacttgctggtggatggcttcagcttcccggcgataacccggcagatcgccgccatttaccgcgcctggcagcggggggaagccactcctgagtcgcctttcacccccttcgccgaggtggtggacgagtaccagcgctacgccggcagcgaggcctggcagcgggataaagctttctggcaggcccagcgccaggcgttaccggcgcctgcctcactctctgccgcgccgctgggcgggcgcgccgccgggagcgatatctggcggatgaagctggagatgaacgccgacgccttccgccgcctggccagccatgcgccgcagtgtcagcccgctgacctggcgctggcgctcaccacgctgtggctgggccgcctgtgcaaccggatggactacgcggcgggctttatctttatgcgtcggatgggttcagccgcgctgacctcgacagggccggtgctcaatgtcctgcctctggcggtgcatattgacgcccgggagacgctggcggacctggcgatgcgcctcgccgctcagctgaaaaagatgcgccgccatcagcgctatgacgccgagcagatcgtccgcgacagcggcaaagcggcaggggacgaaccgctgttcggcccggtgctgaacgtcaaagtctttgattaccagctggatatcgatggtgtgcaggcagtgacccacaccctcgccaccggcccggtcaacgatctcgagctggcgctgttcccggatgagaccggcgggctgtcgctggagatcctcgccaacaaggcccggtacgacgaagccgagctccgtcgccacatggcgcgactgaccgcgctgctggcgcagttcgccgccgatccgacgctgcgctgcggcgaagcagagatgctctccgccgacgagctggcccggctggcggcggtcaacgataccgctgtgccgctgcctgccaccaccctcagcgcgctggtggccgaccaggcgcggaagaccccggatgcgccggcgctggcggacgcccgctggcagttcagctatcgcgagatgcgtcagcaggtggtggcgctcgcgcagctgctgcgtcagcgcggcgtgaagcctggggacagcgtggcggtggccctgccgcgctcggtgttcctgaccctggcgctgcacggcattgtcgaagcgggggccgcctggctgccgctggacaccggctacccggacgaccgcctgcggatgatgctggaagacgcccggccgtcgctgctgatcgccacggaggatcaactggcccgcttcagcgatattccggggctggaaagcctctgctaccagcagccgctggccgccggggatgacgcgccgctggcgctgtcaaaaccagaccataccgcctacatcatctttacctccggctccaccgggcggccgaaaggggtgatggtcggccagaccgccatcgtcaaccgcctgctgtggatgcaggatcgctatccgttatctgccgacgacgtggtggcgcagaaaacgccgtgcagtttcgacgtgtcggtgtgggaattctggtggccgtttatcgccggcgcgcagctggtgatggccgagccggaggcgcaccgcgacccgcaggcgatgcagcagttcttcgcccgctacggcgtgaccaccacccactttgtgccgtcgatgctggcggcgtttgtcgcctcgctggatgccgacagcgtcgctgcctgccgcacgctgcggcgggtattctgcagcggcgaagcgctgccgacggaattgtgccgcgagtgggagcgcttgaccggcgcgccgctgcataacctgtacggcccgacggaggcggcggtggacgtcagctggtatccggcctgcggccctgagctggcggccgtgaccggcagcagcgtgccgattggctggccggtgtggaacaccgggctgcgcattctcgatgccgcgatgcgcccggtaccgccgggggtggcgggggatctttatctcaccggcatccagctggcgcagggctatctggggcgcccggatctcaccgccagccgctttatcgccgacccgtttgcccccggcgagcggatgtatcgcaccggcgacgtggcgcgctggctggcgaacggcgcggtggagtaccttggccgcagcgacgatcagctgaagatccgcgggcagcgcatcgagcttggcgagattgatcgggtgatgtcggccctgccggacgtggggcaggcggtgagtcacgcctgcgtcttcaaccaggcggcggcgaccggcggcgatgcccgacagctggtgggctatctggtctctgactccggcctgccgctggataccgcggcgctgaaagcgcggctggcggaacagctgccgccgcatatggtgccggtggtgctgatgcagctcgctgagctgccgctgagcgccaacggcaaactggaccgcaaagcgctgccgctgccgaccctcggcggcgagcgcagcggtcggccgccggagcccggcatggaaactcttgtcgccgccgtcttcagccagctgctgggctgcgaggtgaacgatatcgacgccgatttcttcgcccttggcggtcattcgctactggcgatgcgcctggcggcacagctcagccgccagctggcgcggcaggtgaccccggggcaggtgatggtggcctcgacggtgggcaaactgagcgcgctgctggccgccgatctcagcgatgagcaggcccggcgcctggggctggatacgcttctgccgctgcgcgagagcgacggtccgacgctgttctgcttccatccggcctccggcttcgcctggcagttcagcgtgctggcgcgctatctcagcccgcgctggtcaattaccggtattcagtcgccgcgcccgcaggggccgatggccagcgccgccagcctcgacgaggtctgcgagcatcatctgcaaacgctgttggcgcagcagccgcacggcccttattacctgttcgggtattcgttgggcggcaccttagcccaggggattgccgcccgcttgcgccagcgcggcgaagcggtggccttcctcggcctgctggatacctggccgccggagacgcaaaactgggcggagaaagaggccaacgggctggatcccgaggtactggcggagatcgaccgcgagcgcgaagcgttcctcgccgcccagcaggggcaagcctccggcgagctgttcagcgccatcgaaggcaactatgccgatgcggtgcggctgttaaccaccgcgcatagcgcgaagtttgacggcaaggcgacgctgttcgtggcggagaagacgcggcaggaggggatggatccgcaggtcgtatggggcccgtgggtgggggaactggaggtgttcagccagaactgcgcccacgtcgatatcatctccccgcaggcctttgaggccatcggtccggtggtcagggagattctggggtaa

SEQ ID NO: 211352 - DNA, 204 bp, Klebsiella pneumoniae
atgcaattcagtaaccccttcgacaatccgcaagggcagttttacattctgcgcaatgatcaacagcagtacagcctgtggccggcgcactgcgacctgcctgccggctggacggtggcgtgccccccgcagtcggccgaggcctgcaacgcctggctggcggccaactggtcaaccctgacccccgcccatcatgcgtcataa

SEQ ID NO: 211353 - DNA, 1209 bp, Klebsiella pneumoniae
atgttaaggacaggaagcgaggagtggtggcaaaccctgcgggggccgcagtgccgcgcagtggatggcgccatcgaggtaacgttctggtggcgggacccggcgggggatgaaacctgctctccccatcgtcgggtatggctctatatcaccggcgtgaccgaccaccatcagaatgcgcgtccgcaatcgctgcaacgtctccccgggaccgacgcctggttctggcgcactacgctgtcgccgacctggcgcggcagctactgttttattccctccgaccgtgacgatgatttttcccctgaggtgttcagcgctgatgcgcccgaccgcgcgctgctacgcgaaggctggcgcaaactgctgccgcgggcgatagccgatccgctgaacccgcacagctggcggggcggacgcggccatggcgtgtccgccctggagatgccgcaggcccccgcgcagcccggctgggacccgcttaatgaggcgcatcctgccgcccgttgccttgagtggcgcagcgcgcgtctgggcaaccatcgccgggtctggatctacaccaccggcgaggctgtcgacccgcaaacgcggccgctggcgatcctgctcgacggccagttctgggccgagagcatgccggtgtggtcgccgctggccgccctgacccgcgaggggagactgccgccggcggtctacctgctgatcgacgcgatcgacaaccagcgccgcggggttgagctgccctgtcaccgcgatttctggctggcggtgcaggaggagctcctgccgctggtccacggctatgccccgttcagcgaccgcccggatcggacggtggtggccgggcaaagcttcggcggtctggcggcgatgttcgccgctctcaactggccgcagcgctttggctgcgtgctcagccagtcaggctcctactggtggccgcaccgtgatggccgcgggacgggctttatcggcgaacagcttcgccagggtgaggtgtccgcggccgggctgcgcgtctggctggaagcgggccaacgcgaaccgatcatttttcgcgcgaaccaggcgctactggcgcaactcaccacaacacagcagacgattttctggcgtcaggttgacggcgggcatgatgcgctttgctggcgcggcgggctgacggcagggcttatccagctctggcagcctctgctgtcgcacccttag

SEQ ID NO: 211354 - DNA, 2229 bp, Klebsiella pneumoniae
atgaataacaggatcaaatccctggccttgctggtcaatctgggaatttacggggttgcttttccgttaagcgcagcggaaaccgccaccgacgataaaaacagcgccgctgaagagaccatggtggtcaccgccgccgagcagaacctgcaggcgccgggcgtctccaccatcaccgccgatgagatccgcaaacgccccccggcgcgcgacgtctcggagatcattcgcaccatgccgggagtcaacctgaccggcaactccaccagcggccagcgcggcaacaaccgccagattgatatccgcggcatgggcccggaaaataccctgatcctgatcgacggcaagccggtcaccagccgcaactccgtgcgccttggctggcgcggcgagcgcgacacccgcggcgataccagctgggtgccgccggagatgatcgaacgtatcgaagtgattcgcggcccggccgccgcccgctacggcaacggcgccgccggcggcgtggtgaatatcatcaccaaaaaaaccggcgatgagtggcacggctcatggaacacctatatgaacgccccggagcacaaggatgaaggctccaccaaacgcactaacttcagcctcagcggcccgctgggcggcgattttagcttccgcctgttcggtaacctcgacaaaacgcaggccgacgcctgggatatcaaccagggccatcagtccgaacgtaccgggatctatgccgacaccctgccggccgggcgcgaaggggtgaaaaacaaaaacatcgatggtctggtgcgctgggaattcgctccgatgcagtcgctggagtttgaggccggctacagccgccagggcaacctctacgctggcgacacccagaacaccaacaccaacgacctggtaaaagagaactacggtaaagagaccaaccggctgtaccgcaacacctactcggtcacctggaacggcgcccgggacaacggggtgaccaccagcaactgggcgcagtacgagcgcacccgcaactcgcgcaaaggcgaaggcctggccgggggcaccgaggggatctttaacagtaatcagttctcggatatcgatctgtcagatgtgatgctgcacagtgaagtcagtatcccgttcgactacctggttaatcagaacctgacgctgggcagcgagtggaatcaacagcggatgaaggataacgcgtccaacacccaggcgctgtcgggaggcgaaattccgggttacgacagcaccggccgcagcccgtactcgcaggcggaaatcttctcgctgttcgccgagaacaacatggagctgaccgacaccaccatgctgactccggcgctgcgtttcgatcatcacagcattgtcggcaataactggagcccgtccctcaacctgtcgcaggggctgtgggacgacttcacgctgaagatgggtatcgctcgcgcctataaagcgccgagcctgtatcagaccaacccgaactacattctctacagtaaaggccagggctgctatgccagtaaagacggctgctatctgcagggtaacgacgacttaaaagccgagaccagcatcaacaaagagattggcctcgagtttaaacgcgacggctggctggcgggcgtcacctggttccgcaacgactaccgcaacaagattgaagcgggctatgctccggtctatcaaaacaataaaggtaccgatctctaccagtgggaaaacgtgccgaaagcggtggtggaaggtctggaggggacgttgaacgttccggtgagcgagaccgtcaactggaccaacaacatcacctatatgctgcagagtaagaacaaaaagaccggcgatcgtctgtcgattatcccggaatacacgctgaactccaccctgagctggcaggttcgcgatgacgtttcgctgcagtcgaccttcacctggtacggcaagcaggagccgaagaagtacaactacaagggtcaaccggtcaccggcagcgagaagaacgaggttagcccctacagcatcctcggcctgagcgcgacctgggacgtcaccaaatacgtcagtctgaccggcggcgtggataacgtcttcgataagcgccactggcgcgcgggcaacgcccagaccaccgggggcgccaccggcacgatgtacggcgccggcgccgagacctacaatgaatcgggccgcacctggtacctgagcgtcaacacccacttctga

SEQ ID NO: 211355 - DNA, 624 bp, Klebsiella pneumoniae
atgcgccaccatcgcaccgttttgcctctggccggctataccatccagcagatcgacttcgacccggcgactttccagcctgaagatctgttctggctgccctatcacgccagcctgaccgggtggggccgcaagcggcaggcggagcacctggccggacgcatcgccgcggcatacgccctgcgcgaggtgggggagaaacggcttcccgccatcggcgaccagcgccagccgctgtggcccacgccctggttcggcagcataagtcattgcggccagcgcgcgctggcggtgatcgccgatcggccggtgggcgtcgatatcgagcgccggtttaccccacagctggccgcggagctggagagcagcattatcagcccggcggaaaaaacggcgctgctgcgcagcggcctgcccttcccgctggcgctgacgctggcgttttcggcaaaagagagtgggtttaaggcctgccatcccgacgtacaggcgggcgtcggttttaacgattttacgctggctgcaataaaggaaggaaatctgcgtcttcggctctccaccgtggagtatcggctgcaatggattcaggcaggggaatacatcatcacgctctgcgcgccgtaa

SEQ ID NO: 211356 - DNA, 936 bp, Klebsiella pneumoniae
atgagtaatgcagaacacctggctaacgtcatggtcgaagcctttatcgccgccgtggagcgcggcgtcgatctggtgccggtggtagccgactccacgtcaacggccaaaatcgcgccgtttattaaacagttccccggccggctggtgaacgtcggcatcgccgagcagagcatggtcggcaccgccgccggtctggcgctgggcggaaaagtggctgtgacctgtaacgccgcgccgtttcttatctcgcgggccaatgagcaaatcaaagtggatgtctgttacaacaacaccaacgtcaagctgtttggccttaacgccggagccagctacggcccgctggccagcacccaccatgccattgacgatctggcggtgatgcgcggcttcggcaatatccagattttcgccccgtcctcgccgcgcgaatgtcggcagattattgattacgccatcggttatcaggggccggtctatattcgcctcgatggcaaggcgctgccggaactgcacgatgaaagctatcgctttgtaccgggcgcgatcgtcacgctgagggaaggcgatgatatcgcgctagtggccaccggctcgacggtgcatgagatcgtcgatgcggcgcagatgctggccgacgcggggattcaggccaaagtggtgagcgtgccatctcttcgcccctgcgataccgccgcgctgctggcggcgctgaagccgtgcaaagcggtgattacggtggaggagcataacgtcaacggcgggctgggcagcctggtggcggaagtattggctgaggctggggtgggtatcccgctcaaacgtctggggatcccggatggtgagtatgcggcggcggcagatcgcggctggctgcgtaaacaccacggtttcgatgccgcttccgtcgcggagctggcgcagaaaatgcgctga

SEQ ID NO: 211357 - DNA, 831 bp, Klebsiella pneumoniae
atgaatccctacagatatgatattcagacgctggagcgtaaagcccgcgcggtgcggcgccatattgtgcgcttaaacgccaatagtccggccggcggccacaccggggctgacctttcgcaggtcgaactgttaaccgcgctctatttccgcgtccttaacgtcgcgccggaccggctcgacgacccgcagcgcgatatctacatccagtcgaaaggccacgccgtgggctgctactactgcgtcctggcggaagccggcttcttcccggtcgagtggctggagacctaccagcatgccaattcccatctccccggccacccggtgcggcaaaaaacgccgggcatcgagctcaacaccggcgcgctgggccacggtttgcctgttgcggtggggctggcgctggccgcgaagaaaagcaacagcacccgccgcatttttttgatcaccggcgacggcgaactggcggaaggcagtaactgggaagccgccctggcggctgcacattacggcctggataatctggtcattattaatgataagaacaacctccagctggccgggccgacgcgcgaaatcatgaataccgatccgctggccgataaatggcgcgccttcggtatggaagtcagcgaatgccagggtaacgacatggcctcggtggtctcggtcatcgaggggttgaagcaggaaggtaaacccaacgttattattgccaacaccacgaaaggtgccggtatttcctttatccaggggcgcccggagtggcaccaccgggtgccgaaaggcgaagaaattgcactggcactggaggaactgaaagatgagtaa

SEQ ID NO: 211358 - DNA, 951 bp, Klebsiella pneumoniae
atggctaagcaggatgaacaacggctattggttaagattgccacgctttactatctggaaggacgaaagcagtctgatatcgcccaacttctctcgctgtctcagtcatttgtctcccgcgccattacccgctgccagaaagaaggcgtcgtcaagatcagcgtcgttcagccgtccaacatctttctgaagctcgaaaaagggcttgaggaccgctacggccttaagcaggcggtggtggtggataccgaggaagaggccagcgatcataccatcaagcgggcgattggctccgccgccgcccactatctggaaacccggctgcggccaaaagatctgattggcgtctcctcgtggagctcaaccattcgcgcgatggtcgatgaagttcatgcgcaaaacctgaaagccagcggcgtgatccaactgctcggcggcgtcgggccaaacggtaacgtgcaggcgacgattcttacccagaccctcgcccagcgcctgaattgcgacgcctggctgctgccgtcacagagcatcgaaggatccatggaggagcgcaaccggctgctggccagcaaagacgtcgctgacgtggtgtcgcgctttgatgaagtggatatcgccatcgtcggcatcggcattctcgaaccctctcaactgctgaaaacctccggtaattactatcacgaagatatgctgcaggtgctggcggcgcgcggcgcggtgggtgatatctgcctgcactactacgacaaaaacggccatccggtgttacgcgatgatgaagatccggtgatcggtatggcgctggagaaggtcaaaaaatgcccgaacgtggtcgcgctggccggcggtaccgacaaagtcgcggccatcaaaggggccctcaccggcggctacattgatgttttaatcaccgattaccctaccgcccgaatgctggttagcgactaa

SEQ ID NO: 211359 - DNA, 1521 bp, Klebsiella pneumoniae
atgcaggcgacagcaaaagagttcatcattgccctggatgaaggcaccaccaacgccaaagcggtggtgctggatagccggggcaaagttatcgtcaaattctcgcagccgctggcgatccaaacgccgcgcgacggctgggtggagcaatcgggcgaagcgctggttaccgcctcactgacggtgatcgccagcgcggtggcccacgttggcgcggaaaacgtcgccgcgctggctatcagcaaccagcgggaaaccgccattggctggtatcgcgacagcggcgaaccgattaacgcggccattacctggcaatgcacccgcagcgccgcgttctgcgacacgctgcgtcacgatcgtcaggaacagcacattaagcgtgccaccggcctgccaatcgccccgctgttctcggcctccaaaatgcgctggctgctggatgcgactgtcgatggccacctgcgcgccgaacgcggtgagatttgcctcggcaccatcgacagctggctgctgtggaatctgactgctggagaagccttctgctgcgactactccaatgcctcccgcacccagctgctgaacctgcaccgcggcgagtgggacgacgagatgctggcgctgttcggcattccgcgcgcggcgttgccggaaattaaaccgtcgagcggcctcttcggccataccaaaggactggccgccattccggacggtattccgatcatgtcgatgatcggcgactcccacgccgcgctgttcggccacgcgctcggcgaggcaggctgcgtcaaagccacctacggcaccggctcttcggtcatggccccggtcaaatcggcgcagtgcgatatcgacgcgctggcgaccaccgtcgcctggcacgatggcgaccagctggtgtggggcctggaagggaatattccccacaccggcgatgctgtcgcctggatggcggacagcaccggactgagcgaactctctgccgccgagctggcccatgagctgaataccctccccgcctccgtcgactcaaccctcggggtctacttcgtgccggcgctgaccggtcttggcgcgccctggtgggatgacagcgcccgcggcgtgatttgcggcctgagtcgcggggtgaaacgcgcgcatctgatccgtgcggcgctggagtccatcacctatcagatagccgacgtggtggtggcgatgcgtcagcatgaggagttcaccctgacggcgttgatggtggacggcgggccgaccaacaatgactggctgatgcaataccaggccgatctgctcggctgcccggtgatgcgcagcgatgtgccggagctgtccgccatcggcgcggcgttgctggcgcgcaaagcgctccatccggggtcgaccgccgatctgcaggccttcttaaccgaacacagcacctttcagcccgacatggcccgccaccagcgtttacaaacgcgctggcaggagtggcgccatgcggtcgaccgaacattatggaaaccggactcgccagcctga

SEQ ID NO: 211360 - DNA, 936 bp, Klebsiella pneumoniae; identical to SEQ ID NO: 137627

SEQ ID NO: 211361 - DNA, 621 bp, Klebsiella pneumoniae; identical to SEQ ID NO: 137628

SEQ ID NO: 211362 - DNA, 1545 bp, Klebsiella pneumoniae
atggcgccgcacgatctcgtcgctccccagcccgttgagtccgaagtgattatcgaaacccgcggcctgtcgcgcgtctatcccggcgtaaccgccctggataatgtcaattaccgggtctatcgaaataaggtcaacgtgctaatcggagaaaatggtgcgggtaaatccaccatgatgaaaatgcttgccggtgtggaaacgccctcctccgggcaaattatcctcgatggtgaagcagtttcattacagtcgacgcatcaggcagaaaaactgggcatcagtattatttttcaggaactgaatttatttcccaatatgaatgtgatggacaacatcttcatggcgaatgaattctttcagaaaggacgcattaacgaaaaataccagtacgcgctggccaaatcgctgctggaacggctggagctggatgtcgatccttacgctccgctgggtgaactcggtatcggccaccagcagttagtcgagattgcccgcgccctgtcgaaagacacccgcgtgctgatcatggacgagcccacctcggcgctgagccagtctgaggtcaaagtgctgttcaaggtgatcgcgcagcttaagcggcgcggcgtgaccatcatctatatctcgcatcgcctcgaagagctgatggagattggcgacaacatcaccattttccgcgacggtcgctttatcagcgagcgtcacgtcagcgacgccagcgtaccgtggatcatcgagcagatggtcggtgataagaaaaaacactttgattatcaaccggcgccaaaaggcgacgcagtgcttgacgtcaaagggctgaccgcgctgcatcccagcggcggttacaagctcaatgacgtcaccttcaccctcagcaaaggcgaagtgatcggtatttacggcctgctgggcgccgggcgcaccgagctgtttaaaggcctggtcggcttgatgccctgccagcgcggcgaggtgcatcttaacggcgaaagcatcggcaaatctcgctttcaacagcgcctgaaaaaggggctggcgctggtgccggaggaccgtcagggcgaaggcgtggtgcagatgatgtcgattcaggccaacatgacgctctctgatttcagcctgcaggggttccgccgcgcctggcgctggttgaacccgcaaaaagaagagtcctgcgtgaaagagatgatccagcagctggcgatcaaggtcagcgacgccacattgcccatcacctcgctgagcggcggcaatcaacaaaaagtggtgctgggtaaagcgctgatgacccagccgcaggtggtgttcctcgacgaaccgacgcgcggcatcgacgtcggcgcgaaaaccgacgtctatcacctgatcggcaaaatggctcagcaggggctggcggtgatgttctcatcttcggaactggatgaggtgatggccctggccgaccgcatcctggtgatggccgatggccgcattaccgccgatttaccgcgccatgcggtgacccgcgaacagttaatcgcggcttcaacacctcaagattaa

SEQ ID NO: 211363 - DNA, 1068 bp, Klebsiella pneumoniae
atgaaccagaaatatatgatttatatgtacctgctgaaggcccgcacctttatcgccctcctgctggtgatcgcgttcttcagcgtgatggtacccaacttcctgaccgcctctaacctgctgatcatgacccagcacgtggcgatcaccggcctgctggccatcggcatgacgctggtcattctcaccggcggcattgatttgtccgtcggtgcggtagcggggatctgcggcatggtggcgggcgcgctgctgaccaacggcctgccgctgtggaacggcgatatcctcttctttaatgtcccggaggtgatcctctgcgtggcgatcttcggcgtgctggtcggcctggtcaacggcgcggtgatcacccgcttcggcgtggcgccgtttatctgcaccttaggcatgatgtacgtcgcccgcggctccgcgctgctgtttaacgacgggagcacctacccgaatctcaatggcatggaagcgctgggcaacaccggtttcgccaccctcggatccggcaccctgctcggcgtctatctgccgatctggctgatgatcggcttcctcgtgctgggctactggctgaccactaaaacgccgcttggccgctacatctacgccatcggcggcaatgagtctgccgcccgcctcgccggcgtgccgatcgtgaaagcgaaaatattcgtctatgccttctccggcctgtgcgcggcgtttgtcggcctgatcgtcgcatcacagctgcaaaccgcgcacccgatgaccggcaacatgtttgagatggacgccatcggcgccaccgtgctcggcggtaccgcgctggccggcggccgcggccgggtgaccgggtcaattatcggcgccttcgtcatcgtcttccttgccgacggcatggtgatgatgggcgtcagcgacttctggcagatggtgattaaaggcgtggtgattgtcaccgctgtggtcgtcgaccagttccagcagaagctgcagagcaaggtcatcctgatgcgccgccacgaggaaaaactggccgccatcccccccaacggcgccacctccagctaa

SEQ ID NO: 211364 - DNA, 798 bp, Klebsiella pneumoniae; identical to SEQ ID NO: 137631

SEQ ID NO: 211365 - DNA, 786 bp, Klebsiella pneumoniae
atgatcggtaaagactttgcacaacacctatttagcctgcgggatcgcgtcgccttcgtcaccggcgccggcagcggcatcggacagaccatcgcctgcagcctcgccagcgcgggtgcacgggtagtctgttttgatcttcgcgacgacggcgggctggcggaaacggtcagccatattgaatccatcggcggtcaggcttgctcttataacggcgatgtccgccagattgccgacctgcgcgccgccgtcgcgctggccaaaagccgctatggccgcctcgatatcgccgttaacgccgccgggatcgccaacgccaatccggccctggagatggagagcgagcaatggcagcgggtgatcgatatcaatctcactggcgtatggaactcctgcaaagcggaagcggaactgatgctggagtccggcggcgggtcgattatcaatatcgcctcgatgtcggggattattgttaaccgcggcctcgaccaggcgcattacaactgctccaaagccggcgtgatccatctgtcgaaaagcctggcgatggagtgggtgggcaaagggatccgcgtcaattccatcagtccgggatataccgccacgccgatgaatacccgtccggagatggtgcaccagacccgcgagtttgaaagccagacgccgatgcagcggatggcgaaggtggaagagatggccggcccggcgctgttcctcgccagcgacgccgcctcgttctgcaccggcgtagacctggtggtcgacggcgggtttgtctgctggtga

SEQ ID NO: 211366 - DNA, 606 bp, Klebsiella pneumoniae
atgaaactcattggtatgatggattcaccttatgtaagacgcgtggcggtttctctggcgctctatggcgtggaattcgagagcctgccgctatcggtctttagcggctttgacgaattttcccgcattaatccggtggtcaaggcgccgacggtggtgctcgataacgggacgcagctgatggactccacgctgatcctccactatttcgaaacgaccaatccggccgggcgccggctgcttcccgtgcatcccgaggcgctggcccgcgatctgcacctgctgggggtgatcctcgccgcctgtgaaaaagcggtccagcatgtttatgagcaccgtctgcggccggaagagaagcagcatcagccgtggatagcccgggtgaccggccagctgctggccgcctgtcgggagtgggacgcccggctggcagaccgcgccgccgccgcgcagccggatcaggtgctggtcaccagcacggtggtctggtcctttatccagttgatgatcccggcggtggtgtcggccgcggcgtttccgcatattcgcgcgctggcggagaaaggggaggcgctgccggcgtttcaacagtatccgctgggttaa

SEQ ID NO: 211367 - DNA, 894 bp, Klebsiella pneumoniae
atggcagattttccccctgtcgccagcctgcgcagctttgaagcggtggcgcgcctcggcagcgtaacgcaggccgcccacgagttgagcgtgacccattcggcggtcagccagcacatcaaacagctggaagccctggtcggcgtcacgctctttatccgccacggccgcggagtgcgcatcacggaagaaggacggctctatgccctgcaaatccgcgaggcgttacagcacatcgccgacgccacgcgcatggtgcagatcaaaccccgcaccctggaagtgaccctggcgacgctcccctcctttggctgccactggctgctgcctcggctggcgcgctttcagacgcggcatccgcagatcgcggtgcgcctgctgaccagcctggcggtggttaacctgcaacaggagggtatcgatctggccattcgcatggggcaaggcgattgggagggaatggaaagccggcatctgtttgccgatgaacagctggtggtcgccgcccccggctatcgcggcggtaacctgccgaccaccccgcaggcgatcgccgccagcgatatcattttttccatggagtcctggaacgcctggtgcagccaggcggggctggaaaagccgatcgtccccgcgggcctgcgcctgaacgactccaatctggtgctggaggcggtccgcctgggggccggcgtggcgctggagcggcgctccctggtggcgggggcgatagcccgcggcgagctggtgcagctcaccgccgtcaccgtcccctacccctggcactactggctaaccgtctccccgcaggcggagaaccggccggaagtcgcccggttcatcgcctggctggaggaggagatcgccctctggcgccagcagatcagcgtttag

SEQ ID NO: 211368 - DNA, 1257 bp, Klebsiella pneumoniae
atggcgtatgtgaatcatctactgacgtttattgagagtaatccggcgctggcggtggggtttaatcttattctgctgctgctctccggcatatttgcccatcttttatgcaagttcttgctgattaaagtggtgcgtaaggtcttctttagtagccacaaacaggatgtgccgctggagaaggatcgacgcatcgccgaaaagctgtccaatttcattccggttattatcgtctattacgttctgcagtttatgccggcgatgccggcatcgctggtgacggcgattaatactatctgcgggatcttgttttttatttttatgtcggtgtttttcaacgagatgctggatattgtcaacagctcctatctgcgaaagaccaaacgtaaaaatcattccattaagggctatatccagataggcaaaatcttagtccacatcctggcggcgattatgatcctcgccgtgatgtcgaacaaatcgccgatcattattatctccagcctgggggccgtggcggcggtactgatgatcgtgttccagcatactctgctgtcgctggtggcgaacgttcagctgtcgtccaacgacgtgctccagctgggggactggattgaaatgcctgacaagaacctcagcggtgaggtgacggatatcgcgctgcacaccattaccatccgtaactgggacaataccatctcccgtatcccgaccaagaatttcctcaccgagacctataccaactggcaggcgatgttctcctccggggcgcggcggatcatgcgcagtatcgccatcgatcaacactcggtgcgttttctcgaccaggagatgctctcctcgatgctgaccatccgcggggtgagtgagcctctggcgacgctgcttgacggccgggatcccggcggcgtggccgaccgctggtttatcgataacgggctgaccaacctgaccctgtttcgccactatctgatgcactatctcgccgagcggccggatattattaaggagatgtacattgtggcgagaacgctgaaaccttcgccgtcgggcatcccgctggagatttactgcttcaccacctcaacgctatggaaagactacgaaaacacccagtcggcgatatttgagtacattaccgcggtggccggacagttttccctgcgcctctatcagtatcccgccgggcacgatttctggcgtctctcccaggagcacgccgcccggacgggcctgccgccgtcggccgaaggctaa

SEQ ID NO: 211369 - DNA, 447 bp, Klebsiella pneumoniae
atgtttaaagctcttaccgctatcgtcgccttagccgcctccgccagcgttatggcgcaaggcgatgtcacgctgaacagtctggctcacgatgccgccacccggacgtcgtttaaccagatggtcaaaggccatcagctgcccgcctgggtgaccaccggcggcaccggttcgcccgcgcagacggtgaaactgggtagcgaatcctggcaggtgttaagcgcctgcaaaccccacgactgcggccatgaacgtatcgcggtgatctggtcggaaaaaagcaaacagatgtccggcgtttactcggtggtcgatgaaaaaaccgaccaggagaggctgacctggcttaacgtcagcgatgccctgtccatcgatggcaaaaccgtgctgtttgccgccctcagcggcagcctcgacaaccatccggacgcctttaactaccagtaa

SEQ ID NO: 211370 - DNA, 2034 bp, Klebsiella pneumoniae
atgacagatctttcgcaaagcagagaaaaggacaaaatcaatccggtggttttttatacctcggccggactgattttgttgttttccctgatgacgatcttttttcgcgatttttctgccgagtggattgggcgcaccctggactgggtgtcgaaaaccttcggctggtactatctgctggcggcgacgctgtatatcgtcttcgtcgtctgcattgcctgctcgcgcttcggctcagtgaagctcgggccggagcagtcaaagcccgagttcagcctgctgagctgggcggcgatgctgttcgccgccggcatcggcatcgacctgatgttcttctcagtcgccgagccggtgacgcaatatatgcagccgccggaaggggcggggcagaccatcgaggcggcgcgccaggcgatggtctggaccctgtttcactatggcttaaccggatggtcaatgtatgccctgatgggcatggcgctgggatactttagctatcgttataatttgccgctcaccatccgctcggcgctgtacccgatttttggcaaacggatcaatgggcccatcggccacagcgtcgatattgcggcggtgatcggcaccatcttcggcatcgccaccaccctcggtatcggcgtcgtgcagctcaactacggtctgagcgtgctgttcgatattccggactcgctggcggcgaaagcggccctgattgcgctgtcggtgatcatcgccaccatctcggtcacctccggggtggacaagggcatccgcgtgctctccgaactgaacgtcgccctcgcgctggggctgatcctgttcgtgctgttcatgggcgatacctccttcctgctcaatgcgttagtgctcaacgtcggcgactacgtcaatcgctttatgggcatgacgctgaacagcttcgccttcgaccggccggtagaatggatgaacaactggacgctctttttctgggcgtggtgggtggcctggtcgccgtttgtgggcctgttcctggcgcgcatttcgcgcgggcgcaccatccgccagtttgtgatgggcaccctgattattcccttcacctttaccctgctgtggctgtcggtgttcggcaacagcgcgctgtatgagatcatccacggcgacgcggcctttgcccaggaggcgatggcccacccggagcgcggcttctacagcctgctggcgcagtatccggcgtttacctttagcgcgtcggtggcgaccatcaccggtctgctgttttacgttacctccgccgactccggcgcgctggtgctggggaatttcacctcgaagctgaaggacatcaacagcgacgccccgaactggctgcgcatcttctggtcggtggccatcggtctgttgaccctcgggatgctgatgaccaacggcatctcggcgctgcagaacaccacggtgatcatggggctgccgttcagctttgtgattttcttcgtgatggccggactgtataaatctctgaaagtggaagattaccgccgggtcagcgccagccgcgacaccgccccgcgcccgatgggcctccaggatcgtctgagctggaagaagcgcctgtcgcggctgatgaattaccccggcacgcgctataccaaactgatgatggagacggtgtgctacccggcgatggaggaggtggcccaggagctgcggctgcgcggcgccgcggtggaactgaagagcctgccgccggaagagggtgagaaccttggccacctcgatctgctggtgcacatgggcgacgagcagaattttatctacaagatctggccgcagcagtactcggtgccgggctttacctatcgggcgcgcagcgggaaatccacctattaccggctggagaccttcctgctggagggcagtcagggtaacgacctgatggactacagcaaagagcaggtgatcaccgatattctcgaccagtacgagcggcacctgaactttatccatctgcatcgggaagcgccggggaacagcgtgatgttcccggatggctaa

SEQ ID NO: 211371 - DNA, 588 bp, Klebsiella pneumoniae; identical to SEQ ID NO: 139520

SEQ ID NO: 211372 - DNA, 1473 bp, Klebsiella pneumoniae
atgtcccgaatggcagaacagcagctttatattaatggtggttatacatcggccaccagcggtcgcaccttcgagaccatcaaccctgccactggcgaggtgctggcgaccgttcaggctgccggacgcgaggatgtcgaccgcgccgtcgagagcgcgcagcgtgggcaaaaaatctgggcggcgatgaccgccatggaacgctcgcgcatcctgcgtcgcgccgtcgaccttctgcgccagcgcaacgacgagctggcgcgactggagaccctggataccgggaaacccctcagcgaaaccgccgccgttgatatcgtcaccggcgccgacgtgctggaatattacgccggattgatcccggcgctggaaggcagccagatcccgctgcgcgacagttccttcgtctacacccgtcgcgaaccgctgggggtggtagccgggatcggcgcgtggaactacccgatccagatcgccctgtggaaatcggcgccagcgctggccgctggcaatgcgatgattttcaaaccgagcgaagtcaccccgctgaccgccctcaagctggcggaaatttacagcgaagcgggcctgccggacggggtgtttaacgtcctgccagggatcggcgcggaaaccggccagtatctgaccgagcatccggacatcgccaaaatctccttcaccggcggcgtcgccagcggcaaaaaagtgatggccaactcggccgcttcatcactgaaagaggtcaccatggagctgggcggcaaatcgccgctgattatcgccgatgatgccgacctcgacctcgccgccgatattgccatgatggccaacttctacagctccggtcaggtgtgcaccaacggcacccgggtgtttgtcccggcgaaacagaaggcggaattcgagcacaagatcctcgagcgggtggcccgcatccgccccggcgatctgtttgccgatgacaccaacttcggcccgctggtcagcttcccccatcgcgacaacgttctgcgctatatcgagagcggcaaacgcgaaggcgcgcgcctgctgtgcggcggcgaggcgctgaaaggcgacggtttcgataacggcgcgtgggtcgccccgacggtgtttaccgattgcagcgacgagatgaccatcgtgcgcgaagagatcttcggcccggtgatgtcgatcctcagctatgccgacgaagcggaggtcattcgccgcgccaacgccaccgaatacggcctcgccgccggcgtggtgacgcccaacctcaaccgcgctcaccgaattatccaccagctggaagccggcatctgctggatcaacagctggggggaatccccggcggaaatgccggttggcggctacaaacactccggcattggccgcgagaacggcgtgatgacgctgcagagttacacccaggtgaagtccatccaggttgagatgggtaaattccagtccatattttaa

SEQ ID NO: 211373 - DNA, 1665 bp, Klebsiella pneumoniae
ttgcaatttgactacatcattattggtgccggctccgccggcaacgttctggcaacacgactgactgaagatccaaacaccaccgtcctgctgctggaagccggcggccctgactaccggttcgatttccgcacccagatgcccgccgcgctggcttatccgctgcagggcaagcgctacaactgggcctacgaaaccgaaccggagccgtacatgaacaatcgccgcatggagtgcggacgcggcaaagggctcggcggctcctcgctgatcaacggcatgtgctacattcgcggtaacgcgatggatctggacaactgggccaaagagccgggtctggaacactggagctatctcgactgcctgccctactaccggaaagcggaaacccgcgatatcgggcctaacgactaccacggcggcgatggcccggtgagcgtgacgacgccgaagccgggcaataatccgctcttcgaggcgatggttgaagccggggtgcaggcgggctatccgcgtaccgacgatctcaacggctaccagcaggaaggctttggcccgatggaccgcaccgtgacgccgcagggccgtcgcgccagcaccgcccgcggctatctcgaccaggcgcgcggtcgcccgaacctgaccatccgcacccatgcgctgaccgatcacattatttttgccggcaagcgcgcggtgggcgtcgagtggctggagggagagagcacgatcccgtcaaaagcgacggccaacaaagaggtgctgctgtgcgccggggcgattgcctcgccgcagatcctgcagcgctccggcgtgggtaacccggagctgctcaggcagttcgatatcccggtggtgcacgatctccccggcgtgggtgagaacctgcaggaccatctggagatgtatctgcagtacgagtgcaaagagccggtatcgctctacccggcgctacagtggtggaaccagccgaagatcggcgccgagtggctgttcggcggcaccggcatcggcgccagcaaccagttcgaagcgggcggttttatccgcagccgcgcagaattcgcctggccgaacattcagtaccacttcctgccggtggcgattaactacaatggctccaacgcggtgaaagagcacggcttccagtgccacgtcggctcgatgcgttcgcccagccgcggccacgtgcgcctgaagtcgcgcgacccgcacgcccatccggcgatcctgtttaactatatgtcccatgagcaggactggcaggagttccgcgacgccatccgcattacccgggagatcatgaaccagccggcgctggataagtatcgcggccgcgaaatcagtccgggaatagaatgccagagcgatgccgaactggatgagtttgtgcgcaaccacgccgagaccgcgttccacccgtgcgggacctgtaagatgggttacgacgagatggcggtggtcgatggcgagggccgcgtccacggtctggaaggattgcgggtggtcgacgcctcgatcatgccgcagatcatcaccggcaacctcaacgccaccaccattatgatcggcgagaagatggccgacgccattcgcggccgccagccgctgccgcgcagcaccgcgacgtattatgtcgctggcgacgcgccggttcgccgctaa

SEQ ID NO: 211374 - DNA, 696 bp, Klebsiella pneumoniae
gtgccggaaattaatgagtatggccagcaggtgaacgacctggtccctggctggcagggggcgcaagtcctgcggcggacggcgttaaatggccgtttttgccgcctggagccgctggacgttgaccgtcatgcggcggatctgtttgccgcctatgcgctcggcgacaacagcgactggacgtggctggcgtctacgcggccggagagcgtggcggcgaccgcccactggatcgcgggcaaggtgaatgatgatgccctggtgccgtatgcggtggttgacctgcgtagcgagcaggcggtgggcatcgtcagctatatggcgatcgagcgggaaatgggcacggttgagatcggccatgtcacctggtcgcgacggatgaaaaacaccccgctgggtaccgaagcggtctggctgctgctcaaaaacggctttgaccatggctatcgtcggctggagtggaaatgcgattcgatgaatgtcgcctcgcgccgcgccgccgagcggctgggctttagctgggaaggacgtctgcggcagaggctggtgcgtaaagggcggacgcgcgacagcgatatgctgtccatcatcgacggcgagtggcctgcgcgcgatgcggcgctgcgggcgtggctggcggcggagaactttactgccgacggtcagcagattaagcgcctggaggcgtttcgctaa

SEQ ID NO: 211375 - DNA, 1569 bp, Klebsiella pneumoniae
atgaccaaaaaactgttgcctttactgctactatcggcgttctccgccgccgcgcatgccgccacgccgcccaacacgctggtggtcgcccagggtctcgacgatatcgtcagcctcgacccggcggaagctaacgaactctccagcattcagacggtccccagcctctatcagcgtctggtgcagccggaccgcaacaaccctgaaaaaatcgtaccgatcctcgccgaaagctggcaggccgatccggcggcgaaaaccctgaccattaaactgaagccggatgccaaattcgcctccggtaatccgctgcgcccggaagatgtgattttctcttacacccgcgcggtgacgctgaataaatcgccggcgtttattctcaacgtgctcggctggcagccggacaacatcgccagccagctgaaaaaggttgatgaccataccctgacgctgcactggaccgccgacgtcagcccggcggtggcgctgaatattctctccacccccatcgcctctatcgtggatgaaaaacaggtggcgccgaacgcgaaaaataacgacttcggcaacgactggctgaagatgcactcggcgggcagcggggcctataaaatgcgcgtctaccagccgcatcaggccatcgtgctggaggccaacgccagctccccaaccggcgcgccgaagatcaagagcatcattattaaaaacgtccccgacccggcttcccgccgcctgctgatccagcagggcgatgccgacgtggcgcgcgatctcggcgctgaccagattgccgctctgcaggataaacccggcgtgaaggtgctgagcatcccgtccgccgagcagaactacctggtgtttaataccgccaacagcgccaacccgctgctcaataacccggccttctgggaggcggcgcgctggctggttgattatgagggcatcaccaaaaatctgctgaaaggccagtactttattcaccaaagcttcctgccggccggcctgccgggggcgctggagactaatccgttcacctttgacccgcaaaaagctaaggctatccttgataaagcgggcattaaggatgcccacttcaccctcgatgtggagaacaaaccgccctttatcaccatcgcccaatcgctgcaggccagctttgcccagggcggggtgaaggtggatctgctacccgccgccggcagccaggtctatgcccgggtgcgcgcgaagcagcaccaggcggcgatccgcctgtggatcccagactactttgatgcccactccaatgccagcgcctttgcctggaacgatggtaaatccagcaccgtggccgggctcaacggctggcagatccctgagctgaataaagccaccctcgccgcggtggcggagccggacccggcgaaacgcctcgacctgtacaaaacgatgcaggaaaccctgctccagcattcgccgtacgtctttattgaccaggggaaaacccagatcgtggtgcgtgacaacgtgaagggctatcagcagggactgaacgccgacatggtctggtacgataacgtgaccaagtaa

SEQ ID NO: 211376 - DNA, 1023 bp, Klebsiella pneumoniae
atgccatcgttttccactcaccttacccgcctgctgcaggggctgtttacgctgctgctcacgctgttcgggctgttgctggtcaccttctcgctctccgcgctgtcgcccgtcgaccgcgtactgcagatcgtcggcgaccatgccagccagtcgacctatgaccaggttcgccatcagctgggtctcgaccagccgctgccggtgcagttctggcactacctggtcaacctggcccatggcgatcttggcatcgccagcgctaccggccagccggtgctccacgacctgctggcggtctttccggcgacccttgagctggcgaccctggcgctgatcgtcggcgcggtactgggcatcgtcgccggggtgctgtgcgcccgttacgccggttcgccgtgggatctggcggttcgcacctttaccctgttgggcaactcggtgcccattttctggctcggcctgctgatgctggccctgttttacgcccggctgcagtgggcgctgggcccgggtcgcctcgacgatatttatcagtacaccgtcgagccacgcagcggttttgcgctgatcgacacctggctctccggcgataccgcggcgtttaaaaatgcgatcggccatctggcgctgccggtgctggtgctggcctattactcgctggcgagcatcacccgcctgacccgctccgcctgcctgagcgagatgaacaaagagtacattctgctggcgcgggccaaaggggccggagagatgacgattctgctgcgccacgtcctgcccaatatccgcggcactctgctgacggtgaccgctctcgcctggacctccatgctcgaaggggcggtgctcaccgaaaccgtcttctcgtggccggggatcggccgctatctcaccacggcgctgttcgccggggataccacggcgatcatgggcggcacgctgctgatcggcgtgagttttgtgctgatcaataacctgaccgatctgctggtacggttaaccgatccgagggtgcgctga

SEQ ID NO: 211377 - DNA, 834 bp, Klebsiella pneumoniae
atgccgacttatctgtttttacgccgtctgcgccgctcacccgccgccttcagcggcctgaccctggtgatcctgctggtactgaccgcgctgtttgccccgtggctggcgccgcacgatcccaactggcaggatgccgccgctcgtctgcaggggcccggggcgggacactggctcggcacagacagctacggccgcgacctgctgtcgcgcttgctctacggcgcccgcccggcgctgggtctggtggcgctggtgaccgccattaccctgcccgtcgggctgctggtaggtatcctctccggttactatggcgggtggctggagcggatactgatgcgctttaccgacgtggtgatgtcgatgccgcgcctgatcctcgccttcgcgttcgtggcgatgctcggcccggggctggtcaatggcgcgctggcgttagccctgaccacctggccggcctacgcccgtcaggcgcgcagcgaaattcagcgcctgcgccatagcgactacctcgccgcggcggagatgctgggcatccgcggcgggcggctgctgatcggccatattctgccgctgtgtctgccgtcggcgattgttcggctggcgctcgatctggcgggtattatccttgccgccgccgggctcggttttctcggcctgggcgcccgcccgccgatggcggagtggggagcgatgattgccgacgggatgcaggtgattttcgaccaatggtggatcgccgccatccccggcgcggcgatcctgctcgccagcctggcgtttaacctgctgggcgatggcctgcgcgatattctggagccgcaacatgactga

SEQ ID NO: 211378 - DNA, 837 bp, Klebsiella pneumoniae
atgactgacatccgactgaccgtccagggactcgccgtcgactatcccaccgcccgggtggtggacaacgtcagcttcaccctcggcaacgagcggctggcgctggtgggcgaatctggctccggcaaatcgatgaccgcccgggcgctgatgggcctggtgcgcaagcccggggtggtgagcgccgaacggctggaggtgctggggcgcgatgtgctgaccctcagcgctcgcggctggcgcgaactgcgcggcaacgatatcgccatggtgctgcaggatccgcgctatgcgctgaatccggtgcagtccattcagacgcagctggaagaggcgttaaccctgcatcagcgtctgagccgccgcgcgcgcgccgaggcggtcaaagacgccatcgccgccgtcggtctggatctgccggtcctcagccgctatcccggcgaactctccggcgggatgggacagcgggtgatgatcgccctcgcgctgctcaataacccgaaggtgctgatagccgacgagccaacttcggccctcgacgcccgcctgcgcaaccagatcctcgagctgctggtggagcagtgcgcgcagcggcagatggccatgttactgatcagccacgatctaccgctggtagccgcgcattgcgatcgcgtgctggtgatgtaccagggaagacaggtcgacgagatgccggcgcgggcgctgccgagcgcgacgcacccttacacccgcaccctgtggacctgccggccaagtgcgcatacctacggccagatgctgccgaccctcgacagaacccaggactttacggagacagcccatggcgatcgttaa

SEQ ID NO: 211379 - DNA, 705 bp, Klebsiella pneumoniae
atggcgatcgttaatcttcaggatttacaggttacattcggcgcgaagacggcggtctccgccgccagtttccgtgtcgacgccggggaaaccttcagcctgatcggcgcctcgggctgcggcaaatcgacgattttgcgcgtgctggccggattgcagcgcgaatggcgcggcagcgtggatctgctcggccaggccattatgccgggcgcccgctttcagggcgatctgcggcgcaacgtgcagatggtgtttcaggatccgtacgcctcgctgcatcccaaccataccctgtggcgcaccctggcggagccgctgcagatccacggcatccgcgacgttgccccgcgagtaaccaccgcccttgagcaggtggggctggccgccgacgccgtccgccgctatccacaccagctctccggcgggcaacggcagcgcgtggccattgcccgcgccctgctgctgcgcccgcagatcctgctgctggatgagccgacctcggcgctggatatgtcggtgcaggcggaaattctcaatttgcttaatcacctgaaacaggagcacggcatgacctatctgctggtcagccacgatgccgacgtcatcgcccatatgtccgatcgggcggcgtttatggcggagggcgtgatccagcgctttttcgatcgcgaagcgttggtcaacggagagcaccggatgaggtga

SEQ ID NO: 211380 - DNA, 1338 bp, Klebsiella pneumoniae
atgaagctggcaattcacaacgaggtcgcggtaagcaatgacgaagttcggcaattagatcgcgcctatgtgtttcattcatggtcgatgcagggcaatctcaacccgctggtcatcgccggggcgcaaggctgcgagctatgggattatgaggggaacacctggctcgatttcagcagccagctggtgaacgtcaacattggctatcagcacccccgggtactggcggccatgaaggcgcagctggagaccctggtcaccatcgcgcccgccaccgccaaccttgcccgcggagaagcggcgaagcgcatcgtcgacctggcgccggcgggcttcagtaaggtgttcttcactaacgccggggcggatgccaatgagaacgcgattcgcatggcgcggctctataccgggcgcgacaaggtgctgtcggcctatcgttcctatcatggcaacaccggcagcgcgatcgccgctaccggcgactggcgccgggtgccgaatgagttctcccgcggccacgttcacttcttcaacccctacctttaccgcagcgagttcaacgccgcgactgaggaagaggagtgccagcgcgcgctggcgcatctgcggcggatcattgaatgcgaggggccgacggccatcgcggcgatcctgctggagtccatccccggcaccgccgggatcctcgtgccgccggcaggctatatgcagagcgtgcgcgccctggccgacgagtttggcatcgtgctgatcctcgatgaggtgatggccggctttggccgcaccggcagctggttcgccttcgagcaggatggcgtggtgccggatctggtgacctttgccaagggggttaacgccggctacgtgccggcgggcggggtgctgattagcgagccgattgcccgctactttgacgaccacttctttgccggggggctgacctactccggccatccgctggcgatggcggcgattgtcgccaccatcgacgcgatgaaagaggagaaggtggttgagaacgcggcctctatcggcaacgaggtgctgcgccccggtctcgaggcgctggcggagaagcacgccattatcggcgaggtgcgcggtcgcggcctgttccaggcgctggagctggtgagcagccgtgaacaaaaaacgccgctgaccgccgccgacatggccgcgatcaaaggggccctgaccgaagccgggctgctggcctttgtggtggagaaccgcattcacgtggtgccgccgtgcaccattactgctgagcaggtggcgcaagggctggcgatttttgatgcggtcttcgctcgctttgccagtctggcgaagtag

SEQ ID NO: 211381 - DNA, 765 bp, Klebsiella pneumoniae
atggcaacgagcaacgtagtgtttatcaccggggcgacctcgggttttggcgaagcggcagcgcaggtgtttgccgacgcgggctggtcgctggtgctgagcgggcgccgctatccgcgactgaaggccttgcaggacagactcgccgccagggtgccggtgcatattattgagcttgacgttcgtgacagcgaggcggtggctgccgccgtggcgtcgctgcccgccgatttcgccgatatcaccaccctgatcaacaacgccgggctggcgctgtcgccgctgccggcgcaggaggtggcgctggaggactggaaaacgatgatcgacaccaacgtcaccggtctggtgacagtcactcacgccctgctgccgacgctgatccgccatggcgccggggcgagtattatcaatatcggctcgatcgccgggcagtggccctatcccggcagccatgtgtatggcgccagcaaggcgtttgtgaagcagttcagctataacctgcgctgcgatctgcttggcaccggcgtgcgggtcaccgatctggcgccggggattgccgagaccgaatttaccctggtgcgaaccaaaggcgaccaggcggcatcggataagctctatcgcggcaccacgccgctgagcgcgagcgatatcgccgagcagatgttttatatcgccacgctgccggcgcatatgaacattaaccgggtggaggtgatgccggtgcgtcaggcgtggcagccgttcgctatcgaccgggattaa

SEQ ID NO: 211382 - DNA, 762 bp, Klebsiella pneumoniae
atgcctgagtctattgccgtaagcgtcaaaaacgtctccaaacagttcgataatgtggaagtcctgcgggatattaacctgacggtggagaaggggaccgtggtgagtattctcggctcgtccgggtcgggaaaatccaccctgctgcgctgtatgaactggctggaacagccggaccgcggtgaaattcatatcggcggtcagcggctggggattgatgaacagcgcggccgggcgatgtcgcaccgccagctggccaaaatccgcgagcgggtggggatggtctttcagagttttaacctgtggccgcacctgaccgtgcagcagaacgtcagcgaggcgctgctgcgcgttaagggcatgaaacgagacgaggcgaaggccatggccatgcagcagctggagaaagtcggcatggcgcacaaagccgatgtctacccgatcactctctccggcgggcagaagcagcgggtggcgatcgcccgttcgctggcgatgtcgccggaagttatcctcttcgatgaaccgacctcggcgctggatccggagctggttaatgaggtgttgggggtaatgaaagcccttgccgccgagggctacaccatggtggtggtgacccacgagatggattttgcccgccaggtgtccaatgaggtggtgtttctggagaagggactgctgattgagaaggcgccgccggagaagttcttcactcagcctgactccgaacgcgtcaggcagtttctgcaaagcagccgttag

SEQ ID NO: 211383 - DNA, 666 bp, Klebsiella pneumoniae
atgaatcagtggggcgttatctggtcggttcgcgatagctttattgccgggttattcgcgaccctcgaactgtttattaccgccgccctggcggcgctgattatcggtattgcgctgtgttattttagcgaatatcaaaagaaagtgattaaccggattattattggtttcgtcagcctgatgcgcgcgatcccttttttgatcctcgcttatcttctgtattacggactgccgcagctcggtattagcatggagccgtggaccgccggtttactggccctgattatttatcatggcgcctatttctttgaaatattgcgcagccagcggcgggtattttccggcggatatattgaagcggcgattgctcagggcttttctcgctatgccatttttcggcggattattttacccaatatcgtctcttccgccttaccgctgatcggcaatcagctgattatttgcctgaaggacaccgctttcctgagcattattaccgttcaggagatcaccgccgccgccaacagcgtccaggcgacctattttattccgtttaacgcctttatcgtcgccattgggctttactgggcgatcagcattctgctggagctgctgattaagcgcctgaccgcctggggagccaaaagaggaatgagccatgcctga

SEQ ID NO: 211384 - DNA, 642 bp, Klebsiella pneumoniae
atggatgcaatttcctggcagttattaatcgaaggcgcatggacgaccctctggatttcggccatcgctatcgccttcggggtggtggctggcctgctgatcgccctggtacggatgctgcgcctgccggtgatcgaccagctgctggtggtctatatcagtctggcccgtgcgacgccgctggtgacgctggtgctatttctgttcctttccttgcccacgatgggcattaacctcgacaagaacgtggccgccatcgtggcgctgacgcttaacacgtcggcgtttaacgctgagatctggcgcaatgccttccgcacctttccgcgcgaacagcgggaggcggcggagtcggtagggatgcgccgctggacctacttccgctacatcatgctgccgcagatgtggatcgagagcctgccggcgctggtcaatgagatgtcctttttgatcaaaggtagccccgcgatcgccgtgattggcgtggtggatctcacccgggtcaccaaccgtatctcctcggtcacctacgagccgctgtcgccgatcctcgccgccggcctgctgtatgtggcgatcatcggctgtttgttgaagctgcagggtatcgcggaacgtaaagccaggcgtctggcgcgctag

SEQ ID NO: 211385 - DNA, 852 bp, Klebsiella pneumoniae
atgaaaaaatcattggcatcaatgtgtctgagcgctgtattaacggtcgctttttcttatcacgccgtcgcggccgatcttccggaaatagaaaagtccggcaccctgaaagtggcgacggaagatgattatgcgccgtttaactttatgaataatggccaggctgatggctttaacaaagatatgcttgaggaattacgtaagtacgccaaattccatgtcgaccagagcatattaccgtggaccggattattagcggctgtctccaccgggcaatacgatatggccttaaccggggcggttattaccgatgagcggctgaaggtctttgatttcaccccaccgtgggcctccgcacagcactatttcgtcaaacgcgctggcgatacctcgctaaataccattgccgatctcagcggcaaaaaagtggggttacaggccgggagcgcgctgctggcgcgtttgccggagctgaaggcgatgctggagaagaccggcggcaagctgggaccggtggtggagtatccctcctatccggaagcctacgccgacctggcgaacaagcgactggattacgtgattaacgtggtgatctcggtaaacgacctggcgaaagccaaaccgaaggtcttcgccaaagggctggccgtctccggaccggggtatatggcgtggccgatcccgaaaaactcgccgcagctgctggcctatatgaccaagtttatgaaccacatgaaggagaccggcaagctcgccgagctgcagaaaaaatggttcggcgaaacctatgacaacctgccgaccgaggcgatcaccagcccggaacagtttcacaaactcgccggactgtaa

SEQ ID NO: 211386 - DNA, 1464 bp, Klebsiella pneumoniae
atgatccgtcacctgttacacgttgattttcagcctggccgcggtttgcaggaacaggtgcgagagacgctggtgaatgccattctcagcgggatcttcgccgccgacaccccgctgccctcctgtcgccagctggccagccagcttcgcgtctcgcgtaacaccagcgcgctggtgttcgaaagtctggtcaacgagggctacctgattagccgcccacgcagcggttactacctgcatcccgactatcatgaagcttcgcctgccgccgtcgagagtgcaccgcagcgcgaagcggctgcaccacgctggggcgaccggctgcagatgacccccagccagcaggagtcgatcctcaaaccggcgggctggatgcactaccgctacccgtttatctacggccagcccgatacccggcaattcccgctggccacctggcgctcggcggcgaactggctgcacggcggggtgcgcgacccggcgtgggtcatcgaccatattgaccaggatgtgccgatgctgatcgagcagatccgcacccgggtgctgcccaagcggggcattgtcgccgcgccggatgaaattctcatcacccttggctcgcaaaatgccctctacctgctgacccgactgctgctctcttccaccacccgcattggcgtcgaaaacccctgcttccgcgaagccatcaacacctttctgctcgccgacgccgaggtggtgccgcacccggtggatgaagaggggatcgtgcttaatgagcgtccctgcgattactactatgtcactccaggtcatcaggtgcccaccggggtgaccatgagcagtgcgcggcgtcgccagttgctggagcatgccgcccgccatgacgcggtcattattgaagatgattatgactcggagagtaactttaccctcaacccgctgccggcgctgaaggccagcgatcgcagcggccgggtggtgtatgtcagcagcctgtcaaaagcgctgtcaccggggctgcggttggggtttatggtcgccgacccggacctgatcgacgaggcgcgcgccctgcgccggctggtctatcgccatccgccgaccaacattcagtaccagatggcccacttccttgcacagggccattatgagacccatctgcggcgctaccactatgactccgcccagcgctgggagcgtctgcacgccgccctgcagcgctatctgccgtcgtgtcgcgcgctggcggggagcgaacatgctaacgccttctggctgcagaccccggcgcagatcaacacccagcagctcacctggcgcgccgcccacgccggcgtgctgattgagcccggggcgcgccattttcttaacgccgcgccgccggataactattttcgcatgggattccacgccattaaccctgacgccatcgcccagggggtggaggtcctgcgcggccagctggagcagatgggttag

SEQ ID NO: 211387 - DNA, 1335 bp, Klebsiella pneumoniae
atgaaagcccgatataaagccgttgtcgaccgatatgcgcaggcgatccgcagcgggcagctgcccgccggcagccgtctgccgacgcaccgtacccttgccgccggggagcgcatctcgctggccaccgccacgcgcgtctaccgtgaactggaagagatggggctggtcagcggcgaaaccggccgcggcaccttcgtgcgcgacctctcgctgcctccggggcacggggtcgatcagcaggtggtcgccgccgatgtcgtggatctcaatttcaactacccttcgctgccggagcagggcgatgcgctgcgcgaggcgctcaggcagctggcgatggcgggcgatattgactcgcatctgcgctatcagcctcatgcagggcggctcgccgagcgggacattatcgtccgccatttgacctgccagcactttgcgccggacgcggaaaatgtcctgatcgtcaacggcgcacagcacgggctggcggtgaccgtcatggggctgttacgtccgggggatgtggtggcggtggatgcgctgacctattcgggcttcaaaattctggcggcgctgtatcatctggagctggcggcgatcccctgtcggccggagggaccggacctgcgggcgcttcagacgctgtgccagcagcggcgggtgcgggcggtgtataccatgccgacgctgcacaatccgctgggctgggtgctcaacaccggtcagcggcaggcgctggccgatcttgcgcgccagcacgatctgctgattattgaagatgccgcctatgcccggctggtgagccgtccgccgccgccggtggtcagctatgcgccggaaagaacggtgtatgtcaccggattttcaaaaaatatcgccaccggactgcgcgtgggggtggtgatttctccgccgcgctatcgcccggagattgagcgcgccatccgggccacgacgtggaatacgccgacgctgacaagttcgctgatctgcgcctggattgaagatggcacggtggcgcgctttgaaacgcagaaacgccaggatgcgcgacagcggcagcaggtggcccgcgaggtgctttgtgggcttcccgtcgtcagtcatcccgattcgtacttcgtctggctgccgctgggtgaagagagccgggccgatcggctggcgaatgcgctgatggaacgccgcatttcggtatcgaccgccgagccgttctgcgtctccgccacgatcccgcaggcgctgcgcattgcgctcggatcggtgcctttcgacagcctgcgcccggcgctgctcagcgtgcgcgacgccgttgagtatgaacaataccgctaa

SEQ ID NO: 211388 - DNA, 924 bp, Klebsiella pneumoniae
gtggtagattcagcaatggataaatcggcgcccggtccctggtccggatggcttcatggtttactgggggtgatcattttcagcggttcgctgcccgcgacgcggctggcggtgcaggatatggatccgttgttattgacctttctgcgcgcctctatcgccgggctgcttgccatcgcgctgctggtgggctttcgccagaaacgcccgcgcctggcgcagcttgtgtccctgatcatcgtctcatccggggtggtgctcggctttccgctactcacggcgctggccctgcagcgcatcacctcggcgcattcgattgtgtttattggcctgctgccgctgatgaccgccctctttggcgtactgcgcggcggcgaacgcccgcggcgggctttctggatcttttcgctgctgggcagcctgctggtggtgggattcgccctgacgcaaaatgcggcggcctcactcagcggcgatctgctgatgctggcggcggttatcgtctgcggcctcggctatgcggaaggggcgaagctgacgcgggagctcggcggctggcaggtgatctgctgggcgctggtgattgccctgccgttgatgctccccgcctcgctgctggttcagcccgcctcctggcatgccatctcggcctcctcctgggcggcgctcggctatgtgtcgctgttcagcatgctgatcggtttcatcttttggtacaaagggctggccgcgggcgggatcgccgccgtcggccagctccagctattgcagccgttcttcggactaggcctgtcggcggcgctgttgcacgaaaccgtcagccccttgatgctggcggtcacgctgggcgtggtgctgtgcgtggtgggctcgcgcaaatttgcccgccagcgggttggcgaagagaacgggggcaacaattga

SEQ ID NO: 211389 - DNA, 1116 bp, Klebsiella pneumoniae
atgcctttagccgattttcaccgctccgatccttttaccctcggtatcgaactggagctgcaggtggtgaacccgccgggttacgatctcagccaggatgcctcgacgctgattgccgacgtccagcatgagctgaccgtgggagaagccaaacacgacatcaccgagagcatgctggagatcgccaccggggtgtgccgcgacatcagccatgcgcaaatccagctcagcgccatccagcaggcggtccagcgcgcggcgctgcgccatcatctgcagatctgcggcggcggttcccacccctttcatgcctggcagcgccagcaaatcagcgataacccgcgctatgtcaaaaccgtcgagcattttggctatctggcacagcaggcgacggtctttggccagcatgtgcacgtcggctgccagagcggtgacgacgccatctatctgctgcatggcctgtcgcgctttgtaccgcacttcatcgcccttaacgccgcctcaccgtggtttgacagcaccgacagccgcttcgcctgttcacgcctgaaccgcttctcctcctatcccgacaacggtccgatgccgtgggtggccgactggcaggggtttcgtcgcctgttccgccagctgagctacaccagcatgatcgatagcatgaaggatctgcactgggatattcgccccagcccgcagtttggtaccgtcgaggtgcgggtgatggacacccccttgacccttgcccaggcgatccacatcgccggctttattcagaccctggcctgctggctgttgacggagcgtccttttaagcaccagcctgatgattatctgctgtacccctttaaccgctatcaggcctgccgctacgggctggacgggaccctcaccgacgtgcgcagcggggagcagcgcagcatccgccaggagatcctgcagctcgccgaccggctggcccctttcgcccatcagctgaaggcgacggcagcgctggaggcggtggttcgccaggcgaaatcgccgcaaagcgaggcgcagcagatgcgcgactttatcgccaacggcggttcgctttccgggctggtgcaaaaacactgtgagatttgggcggcataa

SEQ ID NO: 211390 - DNA, 720 bp, Klebsiella pneumoniae
atgttattacgttgcctgctccctctggcgctgctgcccctggccgccgtcgccagcgccgcctgtaccctcaccgacccgacgctgaccctgcagagctatcgggtggatgcgcagaaagagcgcattgcgatgtactggcaggatcggcacggcaaagcctggggttccctgcgttcgctgctggcgggtatcgatggcgacggccgggtgcagatggcgatgaacggcggcatttacgataaggcctacgcgccgctggggctgtatatcgaagacggcaaacggctgacgccggtaaaccgctccgccggcggcgggaacttctttatccgccccggcggcgtattcctggtggaaaacggccgggcgaaaatcgtgccgctgccggcgtacaaaccctctcccgccatccgctatgcggtgcagtccggcccgatgctgattgaaaatggcgccatcaactggcgactgaagccctccgccagttcgcgcaagctgcgcaacggggttggtatcgataagcagggccgggtggtgtttatgctcagcgatcgcgagaccaacttttacgattttgcctgctatgcgcagtcaaagcttggcgtgcggcagatgctttatctcgacggcaccctgtcgaagatgtaccgcaaaggcggcagcgtgccgtggcagtatcatccgttcgtgaccatgataacggtggagagaaaatag

SEQ ID NO: 211391 - DNA, 546 bp, Klebsiella pneumoniae
atgaaaatgaagcctatctggatatgttggtggcaaatgaatattgatgtcgaaacactcgtgaaacaattgggtaaagatcatcaggaaatttatgatagtggactaattaaatataagacaaaaccaactgccacagcgggctatgatacagctacattagacatgaaacgagaaggattgtttttctctttcgagaatgataaaaataaaaccttcaaagaaattacattaacattagaagatgatgacataacagactgggtctttccgaattcaatgccttttaatcttgaaccggtaatgactcaaaactggatgcgtgagcgttttgggttcccaatgatttatggcgagcctaaaactatggggagttacagtcgtggtatcagtgaagtatacccactgttaccacctaatcagaatattgctgttttatttgtttatgacgccgacctttttgttgttagtgtgactttttattctatggcgcatgcagaagcaattcaggctgcgtcagagcgaaatagattaatgaataaataa

SEQ ID NO: 211392 - DNA, 171 bp, Klebsiella pneumoniae
gtgtggtgtatttatcaaatgagtattgatgtcgaacagcttattaagaaaattagtcgaccttatcaggaaatagttgagcaagaattgattccctataagaataaactgcatggcccggttgatgaaaatgaagcctatctggatatgttggtggcaaatgaatattga

SEQ ID NO: 211393 - DNA, 507 bp, Klebsiella pneumoniae
atgatcattgacgtcgaaaaactggtaaaacaactgggtaagccttatcatgaaatttacagtcacgggttgattccttataaaacaaagccttacggtcctattgatgaagatgaagctgaattagatatgaaacgagaaggaattcttttggttttcaccaataattccgagaaaaatcttactgaaattacattaaggttagaagataaaggcaaaacagactgggtattccccaatccgatgccatttggtatggaaccggtgatgacccaattgtgggttagagagcgctttgggttgcccatgatttatgctgatgcggaaatcatcatgactatttatatgggggtgaaagaggtctatgctctacctactcctcatcaatatatcgctgccgcatttacctataacaaagatttatttgcagaaaccgtgactttttacccactggaacgggccaaagagattcaggccgtactggagaaaaaacgattagagagttaa

SEQ ID NO: 211394 - DNA, 510 bp, Klebsiella pneumoniae
atgagcttgaatgttgagaagttgataaagaaccttgggaaatcgtatctggatatttatgagcaaggattgatcccctacaaaacaaaaccaagtggtacggttagtgatgacatttatagattagatatgaaacgagagggggtatttttatcattttttaataatcaagataaaaatcttaaggaggtgaccttaaggttagaggatgagaataaaactgactggttatttcctaacttgctgccatttggtcttgaaccagtaatgacacagcgatgggtacgagaccgatttggtcatccgattacttacgttgatgcctgcgtgattatgactatttatgtcggggtggaggaaacatatattttaccgactccgaatcaaaatattgcagcggcattttcttacaataaagatttttttgttaacaggatcacatttattccggttgaacaggcgaaagaaatccagtctgcacttgagaaaaaacgacttggtggcaaatga

SEQ ID NO: 211395 - DNA, 1356 bp, Klebsiella pneumoniae
atgacacaaatactgggaaccggagagggaaaaacatcatcagccgcaaaagagccggttgttgaacgtaaacccgcacaggtattttttgaatcaatggcgctggctgcctcaatgagtggttattatgcagggccaacagccacaacgctgggaaattcgctttcattaggggcggggactgcggcaggtgtcggagaaggcgtcgcgggcgcacgggtgctggctgcgcctaatcccctcaccgttgctctgctggctatcttctattctccgtcactgaatgaaggtgagacggaaacgctacaaaatatacgtggcgaccagctctatcagaatctgatccatggccagatgatggtgggcgcttttacccgtgtaaattcaacggtcattgagggggattatgtcccggaatatgaactccgggaaatagcccgacaaaatggcacagtgcgcacgagggtgcgctttcgtattgaagaagatcctgagtcaggggaactggtttcccgcagctatgaggtgggggaaaaaagcgggctggattgggtccgggtgcggtttgcaaaacagctggataaagagacatggggctttgaagatccttcaattaaaggaacatttgtctggtcccggtctgccgggcagggaaaatttgagtggggagccagccagacgactgtccatgacgggagcgctggcggctctaccacaccgcctacacccattccggaaccgcggagcgtctggggattgcctaacccggccccggaatcgttaccgcccgtaccgggaacgccgatcccggaggaacagggaccaaatattgaaacattgcccatcgaagaccgggatttcaatgactttattattgttgacccgatgggggttgtcccggcaatctatgtttattttcagaaagcttcagttagagatttagaggttgactattacggaaattttgaaggtcgttcaaggcagggcctatatgaagtggatcatattccttcaaaggaagctgttaggatatatttgaaagggacatatccaaacctgaaagatgacattatagaacaaatgactgacagagtggctgctgtcgctataccgatagaagtacaccggcaatgtagtgaaacctatggtgggaaaaacaatagtaaatttagaacacaagacggaggattagtcactcaaaaagttctagatgccagtaatttagaagctgcagttgatgctaactgggatgtcaatgctgagtgccttaggaatgaatatggtgtaagtgatgaaaaaattgaagagatcagggccaaactacatgagttaaaccggaaagcggggttatattaa

SEQ ID NO: 211396 - DNA, 1323 bp, Klebsiella pneumoniae
atgacggcgcgggtgaccagcgcgaaagcgaatgatatctacgcctggcaggatgcgtccggcctgtaccgggtgaaatttgaccctgacagagatgagaaagggcagggtcaggaaagcatgccggtgcgtctcgccaaaccctacggcggcgacgtgtacggctttcacttcccgctgatccagggcacggaggtggcgattgctttccacgaaggcgaccctgaccggccgtatattgcgcatgcgctgcacgactcgcggcatgtcgatcctgtgacggagaaaaacagcacccgcaatgtgattcgtactccgaccaacaataagctgcgaatggaggataagcgcggcgaggagcatatcaagctcagcaccgagtacggcggcaagacgcagctgaacctggggcataacgtgaatgcgcaaagggagttgcggggcgagggtgcggaactgcgtacggataaatgggtgagcatccggggcggtgcgggagtgtttatcagtgcggataaacagccttcggcaggcgacaggatgctggcaatggaggaggcgattgcgcagcttgaaaatgccctgggtattgcgaaaagcctggcgtcggcagcggaatcggctcaggccctgccatcggataccggcaaccagcagacgctgaacgatgcgctgaaagagctggcgcagccggggatagtgctgaatgcgccgcagggcgtgagcatcagcagtccgcaggcggtacggttgtcttcgggtagcgccagcgtggggattgtgtcacagcagaatacggacatcagtgcgctgaaacgttttacggtgtcggcgggagaagccgtcagcctgctggcgcgaaaggcggagatgaagttgtttgcggcgaagggaaagattgaaatccaggcgcaggatgatgcgctggaggcgacggcgaaaaaggatatcaccgtgaccagcgtggaagggcgagtggaaatcacggcggcgaaggaactggtggtgaactgtgcgggagcgtatatcaggctaagtggtggcaatatcgaactgggctgcccggggaatattctgctgaaatcggccaatgtgcagaaaatgcgtaaggcagattttcgtgtacctccgctggaactgcctgaaggggtcgaagagcgttttactgtcaaagatcagaagaccggtgaaattgttccgtttgcccgttaccgcatcaccactgaaaaaggccaggtattcgaaggccgggcagatgctgatgggaaaacggccagcgtttataccgcattgcctgaatcaataaaaatagagctactgtga

SEQ ID NO: 211397 - DNA, 1194 bp, Klebsiella pneumoniae
atggatacctcttcaataattaccggcaccacccttaaccgttaccagctggatattccttcatgtaccgcatcgctggatgtggaagaattcagtgggacagaaaaactgagtgaactttattattacactattacgtttaccagcgcagagaaaaatattgatgccgcacagctcctgagcaaacccgccatgctgacgatgggcggcggcgcactgcagcagctggcggactgcaaacgcgtccatggcgtggtgactgccttccggcgtatcagcagttcagaagatcagtcgaaatatcagataaccctcgaacccttcctctccttactggataaacagtttcgcagccaccgttttttcgtgaataaatcggtgccggaggtggtggagcaggtattgcaggaacatcacctgcatgactgggagtatgagtttaatctcaagcaacactatccgcggcgcgagcaaattaatcagtatcaggagagcgacctggcatttatccagcgcctgctggcagaggtggggatattttatttcttcaccctgcaggaagaggcccagagcgaagtggtccatttcgccgacgcgcagcgggcgctgatgttcgataaaacacttcctgtaaacagcccgtccgggatgagcgacagcggtacggaatcgatatggggtctgaacatcacgcacaatgtcgtagaggcgaacgtcactacccgggattataacccccgcgatgcgcagagcgttctccagtcggcaacagcggatatgacccggggaaatggtgaaggcctcacttacggtgaggtatactactataagcttcgccaccgggagcgtggcgataaaatcgacccgcagacggagaccgccaacttttatgcccgcctcgaccatgagcgttttctggctcaccagacgcttattaccgagtactgcagcctggctggctccggcccaggtgctgaccgttaccgacagcctgccgtcgaccctgcctgcgcccgtacaggatccgctgttaatcaccggcaccggttttaccgccagccgccgggaggcgctgcgggtgtccctgctggcggtgccctacagcgaaacattgtgctggcgtccgccgctgctgccgcgcccgaaggtgactggcaccatgacggcgcgggtgaccagcgcgaaagcgaatga

SEQ ID NO: 211398 - DNA, 1698 bp, Klebsiella pneumoniae
atgcgtgataacgctcgtcgtctgcttacgatactgaccgtcatcctggccctgtggctagtgctgggcttctggccgctgtccatcggcaaccaggtgatcttcagtctgtgcatcctgctggcgggcggcgcggcgctctggcgtcagcgtcgccgggcagtcagccgtcagcgatcggaaatcgtcctgccgcccgaggattttcagggggcagtggttctgctctgcggggataccgacggtctgtttcccgggcgttcggcgcacggcgaaacccgtcacggctggtatctacggggagacagcgcggagcaattgccggggctggcgcagtacctggcggcggcgcgtccggcgctggtatcgcaggtttccgtgctgctggcggtggtaccggagcaccacccctccggggagcatctggcgcagtcgctgcgcgactggcggcggagtatcgtccagtgccgaacctggctaaacggtctgccgccggtgtggagcgtgttctgggtgacgccgccaggcggccaggccgtggaaagccgctggtttaccgtcacgccggagagggctggtctccaggtgcagcagaagggacaagcgccccagtcggttgccgggtggcagcgggagggcagccctgcctcacgcctgcatcagacgctgtggctggagagcattctgtccttggccgaaaacgctctgttccggccattccgcgcccggcaggcggaacttcctccgctgaacctgtgtgccgcgggcatctgcctgacaccggtagcggcggtggcgaataacctctggcaacagcaaatcgccgcgatcaccacgctctccccgggcaacgacgcggcgccaggtcctcacccgctgccggatcttcttctgtcgtcactgccgcaccgccacggggtcagccgccggatgcgcgatgccggtcttgccgctggggtgggcttcctctttctggcgctggcgatgctggcttcctttatcaacaaccagcgcctggtgcgcagcgtcggcgatcatctggcggtgtatcaccgcctcagcggcacgccgccgacgccgaagctgcaggcgcagcagcgtctgcgtgccgacagccgcctgctggatgactggttgcgccggggtgagccgctgcgttatcggctggggctgtatcagggggggcggctgatccccttcgttgaagccgctatcaatgactgggcgccgcccccgccgccgcgtccggtcatcaagcaggttgtgcaggggccgcagacgatccgcctcgatagcatggcgctgttcgataccggcaaatcgacgctgaaaccgggttcgacaaagctgctggtgaactcgctgctgggcattaaggccaaacccggctggctgatcgtggtggcaggccataccgacagcatcggcaacgatagatccaatcaacaactctccctgaagcgtgccgaggcggtccgcgactggatgcgcgataccggcgatgtgccggagagctgttttgcggtgcagggctacggcgcaagtcgtcctgtcgccagcaacgagacgccagaggggcgggcgcaaaatcgccgggtggagatcagtctggtcccgcagaaggacgcctgtctggcgccgggcacggccaatacctcaggagcagagactaacggattaaaaagcgaaaccgagtaa

SEQ ID NO: 211399 - DNA, 654 bp, Klebsiella pneumoniae
atgaatatctctgaaagcgatctgatcaacaaaactttttacccgggctggctgatggtcagccagttacgctgcggccagccggtgacggatggcgaggcgctctatcgccaggcctgtcgatgggtgaccgaggcgcgcgaggcgctgacggcggggggagtcagtgaagccagcgctgagcagatgctctatgcctactgcgcgctgctggatgagagcgtcctcaaccgcgccagtcaggatgatggctaccgcaggtggcgcaaggatccgctgcaggcgcgctttttcagcactctcaacgccggggaagagctctgggaacggatccgccagctgctgcgagagcccacggcggatgcggcagtgctgacctgcttctttcgtactttacagctgggatttgtcggacagtaccgcgccgaggatgacgaacggcgtgaggacgtggcgcaagcgcttggcgcgcgggtcccgccgttcagcctgacccgggaggcgccggtggtggttcgtgcctcccggctgcgcagcggacggcggatgtactggtgcggctgggcggctggcattgtggcgctggcggcgctgtggttgacctgctccgccatgctgtcacagatggtggcgcagatagcagggcagggataa

SEQ ID NO: 211400 - DNA, 1341 bp, Klebsiella pneumoniae
atgaagattttccgcccattatggcgcgacggggcttttctggtcccgcagcagtttcagcaacaggcccgctgggacgcgtacgtcgccgatacagtctcccgcatggcgctcgcccacccgtggggggtattgcgcgcggagtttgacgcgagcgcgctcaccctttcccggctcaacgctacccggctgatcgtgcgtttcgccgacggaacgctgattgacaccgagctggcggatattttgccaccggtccgcgatgtatcggacgtgatgcaggacagcgtggaggttctgctcgctctgccgctgctcagcgccagcggcggcaatcttgatgacggccaggagagcgcccgcccgcgccgctggcgcgccgagcaggtgaccgtccaggagctggccggccatgaacgcagcgagctggccgttctgcggcacgcgctaacgctgcgtctctccaccgaggaaaatgcagccttcctcacctgcccggtagcgcgtctggtgcacgacgcccaggggcagtggatcgttgacccggaattcatcccgccgctgctgtcgctggcggcaagcccgacgctggtcagcgagctgggcgagctgttacatcgcctgcaggcccgacgcagacgcctgatggccatgcgtcgtgaaagcaatgcgcggatggctgattttgccgtggcggatgtttccctgttctggctgctcaacgcgctgaacagcgctgaaccggtgctcagcgagctgcatcaggacccttcgcgccatccggagctgctctatcgcgaactggccaggctggccggcagtctgctgactttctcccttgaacatcatctggaagcaatcccccgctaccggcatgcctcgccagagcaggtattcccaccgctgtttgccctgctggatacgctgctcgaagtcagcctgccctcaagggtgatcgccatcgctctggagcagggcgccgaccgggagatctggcggggcaggctgcacgatgcgcggctgcgcgagggggcggatttttatctgtcggtgcgctcttcactcccccctcaccagctacagagccgctttccgcagctctgtaaggcgggtagccatgatgatgtcgccgaggtcgtcaatattgccctcagcggcatcgcgatcaaaccgctgagtcatgtgccggcggccattccgctacgtctggaaaaccaatatttcgctctggatctctccaccgatgccgcccgcgcgatgctggaggccggcaactgcaccttctataccccggaatcgcttggcgacgtgaaacttgaactctttgcggtactgcgctcatga

SEQ ID NO: 211401 - DNA, 330 bp, Klebsiella pneumoniae; identical to SEQ ID NO: 139180

SEQ ID NO: 211402 - DNA, 540 bp, Klebsiella pneumoniae
atgacaaaactcaccttacaagagcagatgctcaaagccggcctggtcagcagcaaaaaaatggctaaagtccagaggacggcgaaaaaatcccgtgttcaggcccgtgaggcccgggaagcggtggaagaaaataaaaaagcccagctggagcgtgataaacagcttagcgagcagcaaaagcaggcggtgctggcgaaagagtataaagcccaggtgaagcagctgatcgagatgaaccgcattacggtcgcccggggcgatatcggctttaactttaccgataataatctgatcaaaaaaatcatggtcgacaagcccacccagacccagctgattaacggccgtctggcgattgcccgcctggcggtggataacaagcccgaaggtgaatatgcgattattccggcggtagtggctgagaaaattgcccagcgcgacgccagcagcatcgtgttgcacagcgccctgagtcaggatgagcaggatgaagacgatccgtacgccgactttaaggtgcccgacgatctgatgtggtaa

SEQ ID NO: 211403 - DNA, 699 bp, Klebsiella pneumoniae
atgtccaccattatcgatacctttgtcgcgccgccgtgtcgcgaacagatcaccctcttgtatcaggacgaacacctggtgctgatcaataagcccgccgggctgctgagcctgtcgggcaaagatccgcgcaacctcgactccgtgcatcaccggctggtacagcgctttccgggctgcaccctggtgcaccgcctggacttcggcacctccggcctgatggtgatcgcccgcaacaagggcattaacgccttgctgtgccagcagttcagccagcgcacggtggacaaggtctatacggcgctgttgtgcggccatctggcggaagatgaggggatagtggaggcggcaatcgccaaagatccggcccgtttcccgcgcatggcgctctgcgcccgccacggcaaaccggcgcgttcgcgctatcgggtcatagaccgcctgtatcaggcgcgagaaggcgagagggcgctggcgttaacccgggtgacgctcactccggagaccggacggacccatcagctgcgtattcactgccagctgctgggctatccgatccttggctgcgatctgtacggtggccgggagctgcccggcacggaacaggctccgcggctgatgctgcacgccagcgaactgcgctttgtccaccccgtcagccatgagccgatgcatatccagcaggcgagcccgttttga

SEQ ID NO: 211404 - DNA, 483 bp, Klebsiella pneumoniae; identical to SEQ ID NO: 139177

SEQ ID NO: 211405 - DNA, 900 bp, Klebsiella pneumoniae
atgcccgtaaattttgacttcaacgatctctacgcctttcgcgccctgatggaatatggcagttttcggctggcggccgaatccatctgcctgtcgcagtcggcccttagccgacgcatcgaaaagctggagacggcgctgggcaaccggctgttcgatcgcaccacccggcgggtgaccctcacgctgtatggacaaaattttgccgaacgttcggagcagctgctggcccatgtcgagacggtgctggcggatatcagccaggtcagcaaggcgcgcaccgggctggtgacggtggcgacagtgccttccgccgcctactactttatgccggaaataatccgcagctttcaggcgcgttatccccaggtgcgcatccggttgattgacagcagcgtcgggaatgtgatcgaggcggtcagcagcggacaggctgactttggcctctgctttgccaaaaacctgccagccagtatcgaattcacccctcttgccgacgaccgctatgtggccgcctgtcggcacgatcatccgctggcgcgcaagacgcacctaagctggcaggcgtattttgaacaggattatattggcctggatcgggtctccggcaaccggacgctgcttgaccgggagctggcgcatctgacgccggcgcggccaagtatctgcgaaacccgccacgtcaccacgatgctggggatggtggaagcgggcatcggcattgccgccgtgcccgcgatgtcgatgcccgccggggagcattccgttctccgcgctgtgccgctcaccgacccggtggtcacgcgtacggtaggcctgatccgcctcagcggccgtattcagtcctacgtggcggcagagctggagaagctgattattgaacagtatccttctggctga

SEQ ID NO: 211406 - DNA, 807 bp, Klebsiella pneumoniae
atgcgtaaaacgacaggaaccctgctagccacgctgctgctggccgccaccggcggcagcgcgttatccgctgaggtcaccgtgatgatctccggcggcttcaaagcggcgctggaaaagctggccccggcgtgggaaaaacaaaccggcaaccacctcgtggtgatccctggcccgtcgatgggaaaaacgccgcaggcgatccctaaccgtctggcgcgcggcgaacacgcggacgtggtgatcatggtcggggacgcgctgaccagcctcgagaaagcgggccgtacgcaaccggattcgcgccgggagctggccgactcgccgatcggcgtggtggtgaaggcgggggcgccgctgccggctatccacagcgcagaccagctgcgggcgacgctgctggcggcgccatcggtcgcgtactccgacagcgccagcggacgctatgtcagctcgacgctgttccacaccctgggcattgatgatgcgatgcagagtaaagcgcagatggtggagcgcattccggtggcctcggaagtggccaagggacggtatgcgatcggttttcagcaggtgagcgaactgctgccggtgcccggcgtaaccttcgtcggcgaactgccggataacctgcagtacatcacccgctttgccggggcggtgaccatcagcgccgaccacccgcaggaaggcaaggcgctgctgacgtatctggcgtcaccggcggcgcaggagaccatccacgccaccggtatgcgaagcgtagccgccgccgcgccggtcagccagaaggatactgttcaataa

SEQ ID NO: 211407 - DNA, 1296 bp, Klebsiella pneumoniae
atgcattcaacaacctcacagatgagtacccgtgaccggatcggcgccattctgcgcgtcacgtccggtaactttctcgaacagttcgacttttttctgttcgggttttatgccacctacatcgcccataccttttttccggcgagcagtgaattcgcctcgctgatgatgaccttcgcagtctttggcgccggctttttgatgcgccccatcggcgctatcgtacttggcgcctatatcgacaaggtggggcggcgcaaggggctgatcgtcaccctgtcgatcatggccaccggcaccttcctgatcgtgctgatcccctcttatcagaccattggcctgtgggcgccgctgctggtgctgatcggccgtctgctgcagggcttttccgccggcgccgagctgggcggggtgtcggtctatctggccgagatcgccacctcgggccgcaaaggcttttacaccagctggcagtcgggcagtcagcaggttgccatcatggtggcagccgcgatgggctttgccctcaacgcggtactggagccgagcgctatcagcgactggggctggcgtattccgttccttttcggctgcctgattgttccgttcatttttatcctgcgccgtaagctggaggagacccaggagtttactgcccgccgccatcatctggcgatgcgccaggtattcgccaccctgctggcgaactggcaggtggttatcgctgggatgatgatggtggcgatgaccaccaccgcgttctacctgatcaccgtctatgccccgacctttggtaaaaaggtgctgatgctcagcgcctctgacagcctgctggtcacgctgctggtggcgatttccaacttcttctggctgccggtgggcggggcgctgtccgaccgctttggccgccggtcggtgctgatcgccatgaccctgctggcgctggctaccgcctggcctgcgctgaccatgctggcgaacgccccgagctttttgatgatgctgagcgtgctgctgtggctgtcgtttatctacggcatgtacaacggggcgatgatcccggcgctgaccgaaattatgcccgccgaagtgcgcgtggcaggtttctcgctggcctacagcctggcgaccgcggtgtttggcggcttcacgccggtgatttccacagcgctgattgagtataccggtgataaagcgtctcccggctactggatgagctttgccgccatttgcggcctgctggccacttgctacctctatcgccgtagcgccgttgcgctgcagacggcacgttaa

SEQ ID NO: 211408 - DNA, 927 bp, Klebsiella pneumoniae
atgaatattatgcatcctgtcctgcgccggattgacctcaacctgttgccggtctttgacgcggtctatcgctcccgctcggtacgcctggcggcggaagagctggcgatgagcacctcggcgctgagccatgcgctttcccggctgcgcagcgccctcaacgatccgctgttttaccgcgaaggccaccggatgtgtcccagcgtctatgccagccagctggcgccctctatcgcttcggcgctgaagtttctcaaccaggagctgacgccgccggcggcgtttgtgccggccgccagcaccgactgcatgcagattgcgatcaccgatttcaccgcgttctgcgtctttccgacgctgatgcaccacctgcagcgtgaggcgcccgggctgcggtttgagctccgttatctgccccacagcccggcgctgaccgagctgctggcgggcgaggtcgacctggccctcgggttcaatacccctgacgagccagcccatcccgatcttgaggagattaactggctgcgggacgaatatgtggtcatcagccaggccaaccggacggcgctgaccctggacgcctaccttgcggcccgtcatctggtggtgaccccgtggaatgagcggcagggggtgctggactgtgagctggagcgacagggctattcgcggcaggtggcgatgaaaaccccctcgatgctgagcgcgccctttattattgagcagagcgacctgttgatggcgctgccccggcgggcggcggagacgatggcccgcgccgcccggctgaccattttcccgctgccgtttccggttccgccgtttgacgtcaagatttacgcccaccaacgcagcgggaaacgcgaggctacccgctggcttatctccctgttgcagacgctggtgggggagtccaccgcttcctga

SEQ ID NO: 211409 - DNA, 477 bp, Klebsiella pneumoniae
atgagcatcacaatccgccaggccaccccggacgacgccaccgctatctacgatatgatttatgaactcgcggtctacgagaaagcccccgaagaggtagtgacgacgccagaggagatcagagagacgctgtttgccagcggcagcaaaaccgaagcgctgatctgcgaggtggcgggcaaagcggtgggctacgcggtgttcttcaccagctactccacctggcttggacgcaatggtatctatatggaggatctgtacgtcacccccgactatcgcgggatcggcgccggaaaagcgctgctgaaaaccatcgcgcaatatgctgtacaacgtcagtgcgggcgtctggagtggagtgtgctcgactggaaccagccggcgattgatttctatctgagcattggcgcgcagccacaggatgagtgggtgcgttatcgcctcactggcgatgcgctgcgggcctttgcggagtaa

SEQ ID NO: 211410 - DNA, 1644 bp, Klebsiella pneumoniae
atgtcacaacaaattgaatcagtaaaaatggctctgcaggagctggggattaatgcaagcggcgaattcttttacaaccctgattacgatttgcttattgcacatgaaacctctcctgagctgaccggcgcggcccgcggcgtgatgaccgactctggcgctgtggctgttgataccgggatcttcaccggccgttcgccgcgcgataaatacatcgtccgcgacgaacagactcgcgacaccgtctggtgggcagactccggcctcggccgtaatgacaataagccgttatcgccagacgtgtggcgcagcctgaaaagcctggtcgcgggccagctgagcggcaaaaaactgtacgtcatcgacgcctggtgcggcgccagcccggacacccgtcttggcgtacgcttcgtcaccgaggtggcgtggcaggcccactttgtcaaaaacatgtttatcgtgccaagcgccgacgagctggccagctttacgccagacttcgtggtgctcaacggcgcgggctgcaccaatgccaactggcaggcgcaggggatgaactccgagaactttgtcgcctttaatctcagcgagcgtattcagctcatcggcggtacctggtacggcggcgaaatgaagaaagggctgttctcggtcatgaactacctgctgccgcagaaaggcatcgcgtcgatgcactgctcggccaaccgtggcgaagcaggggacgtggcgctgttcttcggcctctccgggaccgggaaaaccaccctgtcgaccgatccgcatcgtcagctgatcggcgatgatgagcacggttgggacgatgccggcgtgtttaacttcgaaggcggctgctacgccaagaccatcaatctcgatccgcaggcggagccggagatttatggcgccatccgccgcaatgcgctgctggaaaacgtggtggtgcgcgctgacggcagcgtggattatgccgacggcagcaaaaccgaaaacacccgcgtctcctatccgctgtcgcatatcgacaatatcgtcaagccggtgtcccgcgcgggccatccgtcgaaggtgattttccttgccgccgatgcgtttggcgtcctgccgccggtctcccgtctgaccaccgagcagatgcagtaccatttcctgtcgggtttcacctcgaagctggcgggcaccgagcgcggcattacccagccgacgccgaccttctccgcctgctatggcgcggcgttcctgctgcttcacccgacccagtacgccagcgtcctggcggcgaagatggcggaatccggtgccgaagcctggctggtcaacaccggctggaacggcgaaggcaaacgcctgtcgctgcgcgatacccgcagcatcattagcgcgatcctcaacggcactaccggcccgctgcgcgaggagaccatcccggtgttcggtcttgcgatcccgcagagcattccaggggtagacagcgcggtgctggatccgcgtaatggctggagttcagcggataaatggcaggagaaggccgagagcctggctcagctgtttatggataacttcaagcagtacagcgataccgaagcgggcgcgcgtctggcgctggccggtccgcagctgcagaagagcgcggtcgaagcctga

SEQ ID NO: 211411 - DNA, 894 bp, Klebsiella pneumoniae
gtgttggcaaatctggaagtaaaatggctgtatgatgtgattgcccttgaggagtcgcgcagctttaccctggcggccaaagcccgcaacatctctcagtcttcgttcagtcgacgcatccagtcgctggaggcttccctcggattcagcatcttcgatcgtagcgccaaccctctgcagctgaccaaccgcgggaaaatttttgtcggctatgcgcgaaatatgctcgatgacatggattttcagatcagccgtattaagggtttaaataacactacgcaaaaaataagaatcgacgccgccccttcgctgtcggtgttattactgccggagatcatcgccggttacaccgaccgtaaaaataagacttttcatgttgaatcgattaacgtcaacgacgccgtatttaacctgaaagagggaaaaagcgattttatcctctccttctataatgaagaattaatgaactatccgtttattaatcataaaatttttgattcttacctgcacctggtctccccctgcgacgaacatggccgcccgctgtttcatttacatcgcggcgtgctgccgctgatgaaatacgccaacgacagctatatggggcgccaggtgaaccaggtgatcgaccgcacgccggagatcaccttctctctcacctttgtttcttccatgagcgagctgctcaagcgcatgatcctcaatggcgacggcgtgggctggctgccgcagtactctattcagcgcgagctggacgaaggccggctgacgatcctcgatgagagcctgtcgctgccgatcggcgcctggctctaccgctccggctcgcggcttaaccaggccgccgaacgtttctggcagcacattaaaacccgtaacgaaccgcgggaataa

SEQ ID NO: 211412 - DNA, 720 bp, Klebsiella pneumoniae
atgagccagcctttgcttgcctttaatgaggtggatgtcttctacgggccgatccaggccctgaagcaggtctctctcaccgtcaacgagggggagacggtggcgctgatcggcgccaacggcgccggtaaatcaacgctgctgatgtcggtcttcggccagccgcgcattgccggcggggagattttctatcgcggggaggcgatcagccggaaatcgtcccactttatcgccagcaacggcatcgcccaggccccggaagggcggcgcatctttcccgatatgaccgtcgaggagaatctgctaatggggaccattgccattggcaaccgctatcaggccgaggacaaggcgcgaatgtaccagctgttcccccggctggaagagcggcggggacagcgggcgatgaccctctccggcggcgagcagcagatgctggccatcgcccgggcgctgatgagccgaccgcgcctgctgctgctggatgagccgagcctggggctggcgccgctggtggtgaagcagatttttcagatcctgcgcgagctgacggcccaggggatgacgctgtttctggtggagcagaatgcccgccatgccctcaacctgtcggaccgcgcctacgtgatggtgaacggccagatccgcctgagcggtagcggccagacgctgctcaacgacccggaggtgcgtaaggcatatctggggatcagcggctga

SEQ ID NO: 211413 - DNA, 876 bp, Klebsiella pneumoniae
atgaccgacagcatcttacgcgttgagcatctgatgatgcatttcggcggcatcaaagcgctgaatgatgtcaatctggaggtggagcgggggtcgatcaccgccctgatcggccccaatggcgcgggcaagaccacggtgtttaactgcctgaccggtttttatcgggcgacggggggcagtatcgtgctgcgggcgcgggaaaaggtcaccgatgttattcaggtgctggggcagaagcttcacccggacgattttctccacccggcgcagctggggaggcggatctattacaagatgttcggtggcacccatctggtgaaccgcgctggcctagcgcgcaccttccagaatatacgtttattccgcgagatgtcggtgatcgagaacctgctggtggcccagcatacccaggtcaaccgccatctgctggccgggatcatcaatacccgtgggtatcggcaggcggagagtcaggcgctggatcgcgctttttactggctggaggtggtggagatggtggactgcgccaaccgtctggcggggaccctctcctacggacagcagcggcggctggagattgcccgcgccatgtgcacccgtccggagatgatctgtctggacgagccggccgccggcctcaacccggtggaaacccaggcgctgagccggattattcgctttctgcgccagcagcacggcattacggtgctactgatcgagcatgatatggggatggtgatggagatttcggatcatatcatcgtcctcgatcacggggacgtcatcgcccgcggcgcgccgcaggcgatccaggccaacgccagcgtgattgccgcctatcttggcgctgaggaagaggagacgcgccgatga

SEQ ID NO: 211414 - DNA, 1278 bp, Klebsiella pneumoniae
atgggtgaaattacgcgccagcctgcgcgggctatccaaaacgcgctgatcgacagcgtactggccggcctttgcgcgttaattgtctttggcccgatcgtcggcgtggtgctcaaagggtatggttttaccctcgcgcctgcgcgggtggcgattctggtggcggtggtgatggccggcaggctggcgctcagtctgctgctgcagagccacaggggaaaagcctttattgcccgctttgagggggcggatgacggggtgtacgtccggccgccgggctaccgctcgcggctgcgctggataataccgctgctggtggggctggccattgtctttccgtttctcgccacaaaatatctgctgaccgtggccattcttgggctgatctacgttctgcttggcctggggttgaatattgtggtgggcctcgcgggcctgctcgatctgggctatgtggcgttttacgccatcggcgcctacggcctggcgctgggctaccagtacctgggacttggcttctgggcgatgctgccgctgggggcggtgatggcggccctcgccggggcgttgctgggttttccggtgctgcgtatgcatggcgactatctggccatcgtcaccctcggctttggcgaaattatccgcctggtgcttaacaactgggtgagcttcaccgggggccctaacggcgtaccggtgccatcccccacgctgtttggcctcgagtttacccgcagggccaaggatggcggcatccccatccatgagtttttccacgtcagctacaaccccaacctgaaattcatctttctctacgccgtgctgtgcctgctggtgctgctggtgaagcatcgcctgacgcggatgcccatcggccgcgcctgggaggcgctgcgcgaggatgagatcgcctgtcgggcgatggggctcaaccacgtgctggtgaaactctcggcgtttatgctcggcgcgtcgacggccggcatcgccggggtgttcttcgccagctatcaggggtttgttaacccgacgtcgttcaccttttttgagtcggcgctgatcctggcgattgtggtgctcgggggaatgggctccaccctgggagtggtactggcagcgtttgttctgacggtcaccccggagctgctgcgcggttttgacgaatatcgggtgctgctgttcggcgtgctgatggtgatgatgatgatctggcggccgcgcggcctggtgcgcaccagccgcagcggggttgcgttacgaaaaggagtcgcgccatga

SEQ ID NO: 211415 - DNA, 915 bp, Klebsiella pneumoniae
atgacggcgttttttctgcaacaactgatcaatgggctgacgctgggcgcggtgtacggcttaatcgccatcggctacaccatggtgtatgggatcatcggcatgatcaacttcgcccacggcgaggtgtatatggtctccgcctacctgtgcgccatcggcctggcgctgctctcttacttcgggatccactcctttccgctgctgattttcgccactctggtgttcaccatcgtggtcaccggcgtatacggctgggcgatcgagcgcatcgcctaccggccgctgcgcaactcgacgcggctggcgccgctgatctcggctatcgggatgtcgctgatcctgcagaactatgtccagctgagccaggggccgaaccagcaggggatcccgacgctgcttagcggcgcgttgcgcatgacggtgggcgatggggtggtgcagatcacctggaccaaggtgtttattctcgtcgcggcgctggtggggatgcttatcctgacctggattattcagtatacccggctggggcgcatctgccgcgccacccagcaggaccggcgcatggcggcgatccttggcatcaataccgaccgggtgatctccctggtgtttgtcatcggcgcggcgatggccggtctggccggcgtgctggtgaccatgaactacggcaccttcgacttctatatcggatttattatcggcatcaaagccttcaccgccgcggtgctgggcgggatcggctcgctgcctggcgcgatgctgggtggtctgctgcttggggtggccgaagcccagttcgccgggctggtgaattcggattacaaagatgtcttttcctttgcgctgctggtggcgatcctgatttttcgcccgcaggggctgctgggacgtccgctggtggccaaggtctaa

SEQ ID NO: 211416 - DNA, 1065 bp, Klebsiella pneumoniae
atgagcatggccttttacgcccaggcagacgtgaagattggcgtcgccgggccctttaccggacccaacgccacctacggcgcccagtactggaaaggggcctcgcaggcggtggctgatatcaatgccgccggcggcatcaaaggcgaaaagattgtgctggtgcagggggatgacgcatgcgaaccgaagcaggcggtggcggtggccaaccggctggtggatgaagcgaaagtctccgccgtggtggggcacttttgctcttcctcaacgatgccggcctccgaggtatatgacgaagccgggatcctgaccattacccccggctcgaccaacccgcagatcaccgagcgcggcatgaaagatctcttccgcatgtgtggtcgtgacgatcagcagggggcgatcgccgccaactatatgctggacgtgctgaaggcgaagaaaatcgccgtcatccacgataaagacacctatggtcaggggctggccgatgccacccgcgcggcgctggcgaagcggggtaccaaagaagtgttgtacgaaggcctttcccgcggtgaaaaagactttaacgccctggtgaccaagatcggcgccctcaagccggacgtggtctactttggcggctgccatccggaagcgggcccgctggtgcgccagatgcgcgagcagggggtgcaggccaaattcttctccggcgactgtatcgtcaccgaggaactggtcacggccgccggcgggccgcagttcaccaacggcgtgctgatgacctttggtcaggatccgcgcaccctcccggacggcaaagcggtgatcgagaagttccgcgccagcggctttgagccggaaggttataccctctacgcctacgcctctattcaggctatcgccgcggcctggaacgccgtcggtatcgataacgccaaagccagcgactggctgaagagccacgacgtcgagacggtgatgggcaagaaagcctgggatggcaaaggcgacctcaaggtgtccgactacgtggtctatcagtgggacgacaagggcaaatatcaccagctctga

SEQ ID NO: 211417 - DNA, 2301 bp, Klebsiella pneumoniae
atgtacatgaaagtagatatcgatacccaggatgtacgatacgccgatgcctggctgggctttcgcggtacggcgtggcaaacgcagatcgacgttcgcgactttattcagcataactacaccccttacgagggcgatgagtctttcctcgctaacgcgacgccagcgaccaccgccctctgggagcaggtgatggccgggatccgcgtcgagaacgccacccatgcgccggtggatttcgacaccaatgtcgccacctccatcaccgcccacgcggcaggctatatcaaccagccgctggaaaagatcgtcggcctgcaaacggaccagccgctgaagcgcgccctgcatccttttggcggcatcaagatgatcaaaagcgccttcgaggcctatggtcgcgaaatggatcctgactttgagtatcagtttacggcgctgcgtaagacccacaatcagggcgtttttgacgtctattccccggatatgctgcgctgccgcaaatccggggtgctgaccgggctaccggacggctatggccgcggacggatcatcggcgattaccgccgcgtggcgctgtacggcattcgctacctggtccgcgaacgtgagctgcagtttgccgacctgcagccggcccttgagcgcggcgaggcgctggaggccaccctgcgcctgcgcgaagagctggccgaacagcggcgcgcgctgctgcagatgcaggagatggcggcccgctacggctgcgatatctctcacccggcgcgcactgcccgggaggcggtgcagtggctctacttcgcctacctggcggcggtgaagtcgcagaacggcggcgccatgtcgctggggcgcacggccaccttcctcgacatctatatcgaacgcgatctgcgcgccggtttattgaatgaggagcaggcccaggagctcattgatcacttcatcatgaagatccgcatggtgcgtttcctgcgcaccccggaatttgattcgctgttctccggggatcccatctgggcgacggaggtgctgggcggcatggggctggatggtcgcaccctggtcagcaaaaccaccttccgctatctgcatactctgcacaccatgggcccggcgccggagccgaacctgaccgtgctctggtcgcaagcgctgccggcggcgtttaaaaaatatgccgcccgggtctctatcgccacctcgtcgctgcagtatgagaacgacgatctgatgcgcagcgattttcacagcgacgactacgccatcgcctgctgcgtcagcccgatggtgatcggcaagcagatgcagttcttcggcgcccgcgccaatctcgccaaaacgctgctctacgcgattaacggcggggtggatgagaaactgaagattcaggtggggccgaaaaccgcaccgttgcgcgatgaggtgctggactacgacaccgtgatggccagcctcgaccactttatggactggctggcggtgcagtacatcagcgcgctgaacatcatccattgcatgcatgataagtacagctacgaggcggcgctgatggccctgcacgaccgcgacgtctaccgcacgatggcctgcggcatcgccggcctgtcggtagcggcggattcgttgtcggcgataaagtacgcccgggtgaagccggtgcgcgatcaccacgggctggcggtggactttgtcattgaaggcgactatccgcagtacggcaacaacgacgatcgggtcgatgccatcgcctgcgacctggtggagcgctttatgcgcaaaattcaggcgctccccacctggcgtcaggcggtgccgacccagtcgatcctgaccattacctccaacgtggtatacggccaaaaaaccggcaacaccccggacggacgtcgggcggggacgccgttcgctccgggggccaatccgatgcatggccgcgaccggaaaggggcggtggcgtcgctgacctcggtggcgaaactgccgtttacctacgccaaagatggcatctcgtacaccttctccatcgtgccggcggcgctcggcaaagccccgtcagcgcaggaaaacaacctggtgggcctgctggacggctacttccaccacgaggagacggtggaggggggacagcatctcaacgtcaatgtgctgaaccgggaaaagctgctcgatgcgatagaacacccggagcagtatccgaatctgacgatccgcgtctccggctatgcggtccgctttaacgcgctgacccgcgaacagcagcaggatgtgatctcccgaacgttcaccagccaactctga

SEQ ID NO: 211418 - DNA, 1209 bp, Klebsiella pneumoniae
atgactgaatttccggtagtactggtgattaactgcggctcgtcgtcaatcaaattttccgtcctggacgccgccagctgcgactgcctgctcaacggcgtggccgagggcatcaacgcggaacgggcgtctctctcgctcaacggcggcgagccggtggcgctggcgcagcgcggctacgaaggcgccctgcaggcgattgccggggcattagcccaacgcgacctcatcgacagcgtggccctgattggccaccgcgtcgcccacggcggcgacctgttcaccgagtcggtcattattagcgaggaggttatcaataacattcgccaggtatcgtccctggccccgctgcataactacgccagtctcagcggcatcgcctcggcgcagcggctgttcccggaggtgatgcaggtggcggtctttgataccagctttcaccagaccctggccccggaagcttttctctatggtctgccgtgggagtattaccagaatctcggggtacgccgctacggtttccacggcacctcgcaccgctatgtgtcccagcgcgccctggcgctgctcgggttgccggagcaggagagcggcctggtgatcgcccacctgggcaatggcgcctcgatctgcgcggtgcgtaacggccgcagcgtggacacctcgatggggatgacgccgctggaggggctgatgatgggcacccgcagcggtgatgtcgacttcggcgccatggcgtggattgccggggaaacccggcagaccctcagcgacctggagcgggtagccaacaccgcctccggcctgctggggatctccggtctttcctccgacctgcgggtgctggagcaggcgtggcatgagggccatgcccgcgcccgcctggcgattaaaacctttgtccatcgtatcgcccgccatattgccggccacgccgcggcgctgcagcgtctcgacggcattattttcaccggcgggattggcgagaactcggtgctgatccgtcggctggtgagcgagcggctggcggtctttggccttgcgatggacgccgcccgcaatcagcagcccaattcggccggcgagcgcctgatctccgccgacggcagccgggtgcgctgcgcggttattcctaccaatgaagagcgcatgattgccctcgatgcgatccgcttaggccggatccacaccgcggcggcgctggcctga

SEQ ID NO: 211419 - DNA, 1332 bp, Klebsiella pneumoniae
atgagtacgactgagagcattgcatccagccagacaagcctttcgtcctggcgtaaatctgacaccacctggaccctgggcctgtttggcaccgctatcggcgccggggtgctgtttttcccgatccgcgccggcttcggcgggctgatcccgatcctggtgatgctggtgctggcctatcccatcgccttttattgccatcgggccctggcccggctatgcctgtcgggggctaacccctccggcaatatcaccgaaacggtggaagagcattttggcaaaaccggcggggtggtgatcacctttctgtacttcttcgccatctgcccgctgctgtggatttatggcgtcacgatcaccaatacctttatgactttctgggagaaccagctgcagatgccggctctcaaccgcggggtggtggcgctgctcctgctgctgctgatggcgtttgtcatctggtttggtaaagacctgatggtcaaggtgatgagctatctggtgtggccgtttatcgccagcctggtggtgatctccctgtccctgatcccctactggaatagcgcggtgattgaccaggtcaacctcagcgatatcgccttaaccggtcacgacggcattctggtgacggtatggctgggcatctccatcatggtgttctccttcaacttctcgccgatcgtctcctcgtttgtggtctccaaacgcgaagagtatgaagcgcagtttggccgcgagtataccgaacgcaaatgctcacagatcatctcccgggccagcatgctgatggtggcggtggtgatgttcttcgctttcagctgcctgtttaccctctcaccgcagaacatggcggacgccaaggcgcagaatatcccggtgctctcctatctggcgaaccactttgcctcgatgtcgggcaccaaatccacctttgccaccctgctggagtatggcgcgtcgatcatcgccctggtggccatcttcaaatcgtttttcggccactatctcggcaccctcgaagggctgaacggtctgatcctgcgctttggctataaaggggataaaacccgggtctccagcggcaagctcaataccctgagcatggtgttcatcatgggctcgacctgggtggtggcgtatgccaaccccaatatcctcgacctgattgaggccatgggcgcgccgattatcgcctcgctgctgtgcctgctgccgatgtacgccattcgtaaagcgccttcgctggccaaataccgtggccgtctcgacaacctctttgtgaccgctatcggtctgctgaccatcctcaacattgcttacaaactgttctaa

SEQ ID NO: 211420 - DNA, 990 bp, Klebsiella pneumoniae
atgcatattacctacgatcttccggtatctattgacgatattctcgaagcgaaacaacgcctcgcgggaaaaatatataaaacaggcatgccccgttcgaattattttagcgagcgctgccagggcgaaatatttcttaaattcgaaaatatgcagcgcacgggttcatttaaaattcgcggcgcctttaataaactgtgcggtttaaccgcggcggaaaaacgcaaaggggtggtggcctgctcagcgggcaaccacgcccagggcgtctcgctctcctgcgccatgctcggcattgacgggaaagtggtgatgccgaaaggggcgccgaaatcaaaagttgccgccacctgtgattattcggcggaagtggtgctacatggcgataactttaacgataccctcgccaaagccagcgatatcgttgaacttgagggccgcatttttattcccccctatgacgacccgcaggttatcgccgggcaggggacgattggactcgaaatattagaagatctgtatgacgtggataatgtcatcgtgcccattggcggcggcggcttaattgccggtatcgcgattgcgattaaatccattaacccgacaatccgcattatcggcgtgcagtcggagaatgttcacggcatggccgcctcttggtatgccggggaaatcaccagccatcgccacgccggcaccttagccgatggttgcgacgtcgcccgcccggggaaactgacctatgaaatcgcccgccagctggtggatgacatcgtcctggtgagtgaggatgacattcgccagagcatggtcgccttaattcagcgcaataaagtgatcaccgaaggggccggggcgttagcctgcgccgcgttattaagcggcaaactcgacagctatatccagaaccgcaaaacggtcagcctgatttccgggggcaatatcgatctctcccgggtatcgcaaattaccggttttgttgacgcttaa

SEQ ID NO: 211421 - DNA, 942 bp, Klebsiella pneumoniae
atgaatactttttctctgcctaaaacacagcatctggtagttttccaggaagtgatccgcagcgggtcaatcggggccggagcaaaagcgttaggactcactcagccggcggtcagtaaaattattggcgacatggagagttattttggcagtgaattaatcgtccggcgaaataccggcgtctcgctcaccgaggccgggcaggtatttctcaactggtcagaagcgatcacccgtgaaatgaaaaatatggtcaatgaaatgaatgctctgaccaacagcgcggtggtggatgtctcctttggtttcccttcgctggtcgggtttacctttatgtcggagatggtgcatcagtttaaaatgactttccccaaggcgcgggtctcgatgtatgaggcgcagctctccgcctttttgccggcaatccgcgacgggcgcctcgacttcgccatcgggacgctgagcgatgagatgaaactgcaggacctgcacgtcgagccgctgtttgagtctgagtttgtgctggtggcgaaccgggcgcggatcggcaacggcacggtccgcctggcctcgctccagcacgagcagtgggtgctgccggagaccaatatgggctactacagcgaactgctgaccaccctgcagcgcagcggtatccgccgtgaaaatatcgttaataccgattcggtggtgacgatctataacctggtgctcaatgccgattttctgacggtgatcccctgcgacatgaccacgccgtttggctcgagccagtttgtcaccatccccattaaagaggccttgccggtggcgcgctatgcggcggtatggtcgaaaaattaccggttaaaaaccgccgcggcgtcgctggtggagatggcgaaacactattcctcggggcagggcaaccgccactggcagccattacaaattattgcgtaa

SEQ ID NO: 211422 - DNA, 174 bp, Klebsiella pneumoniae
atgatcccgcggctgcgccagcagcttaacgagcagctgatgagcgaccagctggctgtcgacctgctctcttcctatctgcggatggatcttagcgcccagccgtggggccagccgctaaagcccgccccggcgcagatcgctggcccgggcatttcgcctatagctggctga

SEQ ID NO: 211423 - DNA, 801 bp, Klebsiella pneumoniae
atggctgaacgcatgacctttccgatgtatgccatccaccgtcaacagacccaggccctgtggcagacggtgcagtcgctgctggacgaacgcggcgtgatggtggcgggggaccctccggcggctgaccccggggatctgctggctcactggcgccagccgacgctgttgctgagccagacctgtggctacccgctggtgacccaattgccggaggtgcagacggtgggctgcttccactacgctgcgcccggttgcgaagggcgccgctatcgcagcctgctggtggtccgcgaagcggatagtcaccggatgctgggggacttttttggccgtcgggcggtgtgcaatgccgagcactcgcagtccggctacaacgtactgcgtaaaatggtcgcgccgttctcccgggaggggcgttttttttcagcggtgatgttcagcggcagccatcggcaatcgctgcgcgagctgcagcaggaaaacgccgatatcgccgccatcgactgcgtgacctacgctctgctgcagcgccatcagccgcaggctctggctggcctggtggcgatcggctggagcccggccgcgccagggctgccgctgatcaccgccggcgccaccccggcggcaacgctgaatagcctgcgcgaggcgctccagcagctggtaagcgatgatcgctatcgttccctgtgcgacgccttgctgatctgcggctatagcgatatgtcgcgggaggcctatgcgccgctgctggcgtggcgggatgaagccgcggcgctgggggtcagccagctatag

SEQ ID NO: 211424 - DNA, 1014 bp, Klebsiella pneumoniae
atgaggcaacacggcaaggtatcggaagtgacggaaaagaagacggctgtctatgtggatgaccaacagcgcatcctgatccgccagctggcgcgcagctggctgtggcgcagcgagctgccgacctggctgctgattgtgacggtttacggcggctggtttgcctgcgtggcgggctggcggacgctgggactgtttccggccacgctgctgttgatctggtttaccgcctggtatatgtccttacagcatgagctgatccatgggcatcccacccggctggtatggtttaaccagctgttggggacgctgccgctggcggtctggtatccctatggcgtctaccgcgacagccacctggcgcaccatcgcaaccatctgctgacgcaccctgaggatgaccccgaatcgtactacgtaacggcggaaagctggcagcgcttctcagcctggcagcgccgccttatccacctgcgcaacaccttctgggggcgtctgctgctggcgccgatgatggatattattcacaccctgaacagcgcgctgcgggctttccgcgagggcgaccgccgcgctatcgccatgtggagtctgcatctgttgctgctgacgggtctgctgacctggatggcggcgcagggtttttctccgctgtggtttgtgctggcggtgagctacccggcgctggccctgaccaaagtacgctcttttctcgaacaccgcgccgcggatgacccgctggcccgctcggtgatcaacgaggccgggctcccctggcgggcgctgttcctcaatctcaactaccatgcggtgcatcatgatctgccaggggtcccctggtacgctttacgtcaactgtatctgcatcgccaggcggcgtatctgcagcgtaatcagggggtcctggtgcgcgggtacggcgagtggcgacgccattttagccgccgggcggtggcggtgaacgcccatccgggctttggcgagcaggcgcaggcgggaggagaacatggctga

SEQ ID NO: 211425 - DNA, 747 bp, Klebsiella pneumoniae
atgacctactgtgtggccatgtgcctggcggatggactggtgtttgcttccgactcccgcaccaacgcgggcgtcgaccatattgccacttttaaaaagctgcacgttttccatcaggagggggaacgggtgctggtgctgcaatccgccggcaatctggccaccacccagagcgtgataagcctgctcagcgcgcgcatccgtacccagcaggagccgaatctgatgcaggtcacttccctctacgacgccgcgatgctgatcggtaaaacgctgctggaggtgatccagcgcgacagcagcaaccagcagacctgcagtaacaccaacttcaactgcaacctgctgcttggcggccagatcgccggcgaaacccatcgtctgttccatatttatccggagggcaactttattgaagccacccgcgacacgccttatttccagattggcgaaagcaaatacggcaaaccgatcatcgatcgggtgctgaccatcgacacgccgctggagcaggcgatgtgctgcgcgttgatctccattgactcgacgctgcgcagtaatctgtccgtcggcctgccgctggatacgctgctctaccgcagcggcagcttcagcagtgccgggcagcatcgcatcaccgacagcgatccctacttcaaccgcattcgcaaggcgtggtccgaagggctgttgcacaccttccagactctgccgacctggacgccagcggagcgggaagaggagtag

SEQ ID NO: 211426 - DNA, 816 bp, Klebsiella pneumoniae
atgaaactggtcatcgatcatctcacccgctatggctacgatgaagaagtgaagttttccacccagtatctgcgcctgacgccgcgcagtaccgcccggcagacgatcaccgcctggacgctgaccctgccggacggcgcggcggtgaccactaccgacggctggggcaatgtgctgcatgtgctgacgctggataacccgcacaaggagatcaccatccgcgccagcgggattgtcgatatcgccgacgaaggggaggagacgcgtgatgaagaggccgagctgctgtcgccgctggtttttctgcgctgtacgccgctaacccgcgccgatacggcgatccgtgagtttgcccagcgcctctatcgtcccgatgcggcggaagagagtctgaatcaactgatggcggatctgctgttaagaatgccatactcccccggcgcgacccaggtgcaggactccgccgccgacgccttcgcccgcgcgaagggggtgtgccaggatcatacccatgtttttctcgcctgctgccgcgcgctggagatcccggcgcgctacgtcagcggctatgtctacagcgataacgcccagcatgtggcgatgcatgcctgggcggaagtctggctcgacggccgctggctgtcgtttgatatcaccaataatacccgtcgcctgaatcagcatttacggctggcgaccgggctggattatctcgacgcctgcccggtacggggcacccggctgggcggcggcggggagattatgttaactaacgctgaagtgcgcgaacacagccagcaggcgcagcagcaataa

SEQ ID NO: 211427 - DNA, 930 bp, Klebsiella pneumoniae
atgctaagtcgtacggcgagtgaactgttctggatggcccgctatctcgagcgggcggagagctacgcccgggtgctggacgtgacctggaaattatcaatgatcccccgccacagccagcagtcgcgggatctggcgctaccgctgaatttgtcgatgacccacgagttgtttcaggcgcgccatgcccgctttaccatgagcaatctgctcaacttttttgcccttgatggcaacaacccctgcagtatttacagctgcgtggagatggcgtggaacaacgcgcacgcggtgcgcggcagtctgtcggccgaagtgtgggagagcatcaatgccacccgcattgaactgcggaccctccgccagcaagggctgggcgagctggggagcgacggcttttttgagtgggtgaaagagcgggtgcatctgtttcgcggagcggtgataggcacgctgctgcgcaacgacgccctgagctttatcggtatcggcacgctgatcgagcgcgcgttcgccaccacccagctgctgctgattaaggatcaacagctgaccaacgacccggatccggtgcgggaatactaccggctggataccctgctcaatgcggtcagcgcccgcgaagcctacaacagcctctaccgccagccggtcagtcgcgaaacggtgatggagctgctgatcctgcgcaacgatattccacgttcgctgcgcgccagcattgccgacctggtgggcgagctggagaagattgccaacgatcgttcttatcagccgttgcgcctcgcccatcagctcaacgttgacctgcgcttcagcacccgtgacgacctggcgcaggcggacctgcagaccacccttaacgggctgctggcgagaattaacgcgctgtccgacagcatcagacaaacctacctggaggccttatga

SEQ ID NO: 211428 - DNA, 1440 bp, Klebsiella pneumoniae
atgattaaaattacgctacctgacgggcattattatgacgagatgctgaccgcgcagggtgaacagcggccgcactataatgcctggtggcaatggtttcgcaacaccgatcaattctctatccggcagaaaaaagcgcaagcggaactgctttttcaccgtatcggcatcacctttaacgtgtacggcgaggatgaggggaccgagcggctgatcccgtttgacagcgtgccgcggatcatacccgccggggagtggcagcgcattgaccgcggcatacgccagcgggtgaaagcgctgaacgccttcctctatgacatctatcatgagcagaatatcctgcgcgcggggctgatcccggccgagcaggtgttggccaacgagcagtatcagccgtgcatgcagggcatcaacctgccaaacaatacctatgcccatatcaccggcgtcgatatggtgcgcaataacgacggtcagtactacgtgctggaggataatctgcgcacgccgtccggcgtctcctacatgctcgaaaaccgtaagatgatgatgcgtctctatccggagatgttcgagcagcatcacattgcgccggtggagcgctacccgagctacctcctgcagaccctgcgcgaaagctcgctggtggatgatccctgcgtcgtggtgatgaccccgggtcgcttcaacaacgcctacttcgagcacagcttcctggcgcagcagatgggggtcgagctggtggagagcgccgatctgtttattaaaaacggcgcggtgtatatgcgcaccaccgaggggccgcggcgggtggatgtgatttatcgccgcatcgacgacgcctggctcgacccgctggccttccgcgccgattcgatgctcggcgtcccggggctgctgtccgtctatcgcgccggcggcgtagtgctggccaacgccatcggcaccggggtggctgacgacaaatcgatctatccgtacgtcccggagatgatccgcttttacctcggcgaacagccgatcctcagcaatatccccacctggcagtgccggaaagcggaggacctgcgctacgtgctgagcaatctcgagctgatggtggtcaaggaggtccatggcgccgggggctacggcatgctggtcggcccgcgttccaccaaagaggagcgggaggccttccgccagcgcctgctggccaatccggccaactatatcgcccaggacaccctcgcgctgtcgacctgccccaccttcgttgatgaagggctgtcgccgcgacatatcgatttacgcccctacgtgctgtccgggcaggagatgcggctggtgcccggcggcctgacccgcgtggccctcaccgaagggtcgctggtggtcaactcgtcgcagggcggcggaaccaaggatacctgggtgatggaggatgacgcatcatgctaa

SEQ ID NO: 211429 - DNA, 1746 bp, Klebsiella pneumoniae
atgacgagtactgatgcacgtcgtcccgctgctttgccctgttccctgcgcctggcgatcggcggcgctctgatcgccctgatgagcctgaacgctcaggcggaagacggcaaaaccgcgccgcccccctcgccggatattctgctgggcccgctgttcaatgatgtccagagcgcgaagctgtttgccgatcagaaaaccttcgccgacgctatccccaacagtgatccgctgatgatccttgccgattaccggatgcaaaaaaaccaggccagcttcgacctgcgccacttcgtcgaactgaacttcacgctgccgaaagagaacgacacctatgtgccgcccaaagggcaaactctgcgtcaacatatcgatggcctgtggccggtcctgacccgcagcaccgtcgaggtggaaaaatgggactcgctgctgccgctgcctaagccctacgtggtgcccggaggacgtttccgcgaagtctattactgggacagctatttcaccatgctgggtcttgccgaaagcggtcactgggataaagtcgaggatatggtcgccaacttcgccgcggaaattgacgcctggggccatatccccaacggcaaccgcacctattatctcagccgttcgcagccccccttcttctcctttatggtgagcctgctggcgacgcacgatggcgaccaggtgctgaaaacctaccagccgcagctggagaaagagtatcgctactggatggccggagcggacgcgctggctcccggcagcgccgacaaacgggcggtgcggatggcggacggcgcgctgctcaaccgctactgggacgataacgacaccccgcgtcccgagtcctggcttgacgacgtcaaaaccgccaaaagcaacccgaatcgtccggcaaccgagatctatcgcgacctgcgctccgccgccgcctccggctgggatttcagctcccgctggatggacaatccgcagcagctcgccaccattcgcaccacctcgattgtcccggtcgatctcaatgccctgatgttccatctggagaaaaccctcgcccgcgccagcaaggcatccggggacagcgctggcgctacgcagtacgatgcgctggctaacgcccgccagcaggccatcgagaaatacctgtggaatgataaagagggatggtacgccgactacgatctgaaaagccacaaggtgcgcaatcagttgaccgaggcggcgctgttcccgctgtacgtcaatgccgcgtcacgcgagcgggcgacgaaagtggccgccgccgccgagtcgcgcctgcttaaacccggcgggctgaccaccaccaccgtcaacagcggccagcagtgggacgcccccaacggctgggcgccgctgcagtgggtggcggtcgaggggctgcaaaactatggtcagcagaagatcgccatggaggtcacctggcgcttcctgaccaacgtgcagcatacctatgacagtaagcaaaagctggtggagaagtatgacgtgagctcgaccggcaccggcggcggcggcggggaatatccgctgcaggacggctttggctggaccaacggcgtcaccctgaagatgttggatctgatctgcccgcaggagaaaccctgcgatgcgctgcccgctacccgtccggtgacaaccccttcaccgcaggacaaacctgttgcggcgcccgcggctaacgaccccgcccctgcggaaccgcaaaagaccggctcctga

SEQ ID NO: 211430 - DNA, 2121 bp, Klebsiella pneumoniae
atgaacgtggctatttctcgaaaacgcccggggctgctgtatgcccttgcggtcgcactccccttcaccgcgcaagccgaagagacggtggtggtcactgccaccccgccggcgtccgccagcgcgccgacggagggctacagcgccagcacctcgctcggggcgacgaaaaccgaccagccgttaatcactaccgcccagtcggtgtcggtggtcacccgccagcagatggcggagcagggggcgaataccatcagccaggcgctggaatataccccgggggtctactccagcttcggcggcggcgccacccggttcgacgccatctccctgcgcggctaccacggcggcgacgtcgataacctgttcctcgacggcatgcgcctgatgagcgacggcggcagccataacgtattgcaaatcgacccgtggtttatcgaacgcgtggatgtgatccgcggcccctcctccgcgctctacgggcagagcgtgccgggcggcgtggtcaacctgacttccaaacgtccgcagttcagtcagcagggccacatccgcctgaccggcggcacgcaaaataccaaaggcgcggccttcgattacaccgacgccatcaatgaccagtgggcatggcggctgatcgggatgacccgcagcagcgacacgcagtatgaccatacccgcgaagagcgctacgcgatttcgccttccctgctgtggcagccggacagcgacacctcgctgctgctgcgcgcctatctgcaaaaagatccttccggcggctaccacggctctttgccgctggacggcacccgctacgcgcacaatggccgtaagctctcccccagcaccaacgaaggcgatccgggagatggctatcaacgccgccagcagatctacagctatgagtttgaccaccagttcaccgacgtctggtcggtctattccgccgggagctacacccataccaacgtctccctcgatcaggtctaccaggtcggctggatagatgacagcgacatgctggcccgcggctacagcggttcgcgcggttcgctggacggctggtcaaccgataaccgcctgcgcgccgatttcaatacaggcgacctggcgcacaccctgatcctcggcgccgaatatcatcgcttccgcaacgacctgtggaccggcgccggcggcgcggcgccccttaacccgtttagcggctataccgcgcagaccggacataccgttacctacagcgacgacaataatcgccgctattaccagaccgggctgtatctgcaggatgagatggtctggaaccgctggcatgtggatgtttccgcccgctacgaccgcatcgtttcccagcaggtcagcgatacccaggggacctcaaaccgccgttcagacgaccatatcagcggccgcgcctcgctgttgtacgccctggacaacggtctgtcgccctacctgagctacagccaggcgatcactccggcgatgctgccgggcgcggacggcaaaccgttgaaaccgaccaccgccgaacaggttgaagccggcctgaagttccagccgccgggcagcagcgatctctatagcatcgcgatttacgacctgacgcaaaaggatgtcgccactcgcgacccgaacatcgccaccgccacctatattccggcgggtaaggtccattcccagggcgttgagctggaagcgcaccaccagatcaccccgcagctgagtactatcgcctcgtatacctggaatcgtctgcgtttccaggacaccaaagacgggaccgacaataacacgccgcagctgaccccggatcagatggcctccttctgggcgcgctatcagttcccggcggggatctccgttggcgccggcgtccgctacatcggtaaacagtgggcggatgatgccaacaccgcgcggctgccgtcggtcacgttgatggacgccatgatgcgggccgacctcggcgtctggtcgccaacgctgaaaggcgcttatgtgcaggttaacgccaacaatatcggcgaccgcgagtatatttccggctgctatggcaccggcaactgttactggggagcagagcgcagcgttatagccaccgtgggctacgatttctga

SEQ ID NO: 211431 - DNA, 612 bp, Klebsiella pneumoniae
gtgaaattgagatggttgcttattttagtcgtttttctggccggttgtagttcgaaacatgattacactaacccgccgtggaaccccgaggtcccggtgaagcgggcgatgcagtggatgccgatcagtgaaaaagccggcgccgcctggggcgtggatccgcagctgatcacggcgatcatcgccatcgagtcgggtggtaatcctgcggtggtgagtaaatccggcgccgtcgggctgatgcagctcaagccgtcgacctccggacgcgatgtctatcggcggatggggtggcgcggcgagccgtcggtcagtgagctgaaaaacccggaacgtaatatctcgatgggggccgcctatctgagcattctggagaacggtccgctggcggggatcaaagacccgcaggtgatgcgctatgcggtggtggtctcctatgccaacggcgctggcgcgctgctgcgtaccttctcctcgaaccgccaggacgccatcgaggagattaacgatctcgacgccgatgagttcttcgaacatgtggtgaaaaaacacccggcaccgcaggcgccgcgctatatctggaaactacagaaagcgctggacgccatgtaa

SEQ ID NO: 211432 - DNA, 915 bp, Klebsiella pneumoniae
atgtctcagttttatctggtcgcgccatccgggtattgcatcaaccagcaggcggcagcccgcggcgtcgagcgtctgcagcaggccggacacgaggtggcccaccagcaggtcattccccgccggcagcagcgtttcgccgggactgaacatgaacggctggccgatattaaccagctggcccagttgcccggccgcaaccggatcgtcctcgccgtgcgcggcggctacggcgccagtcgcctgctgccgcatatcgactggcagggactggttgcccgccagcagcgcgacccgctgctgatttgcggccacagcgatttcaccgctatccagtcgggcctgctggccatgggcaacgtcatcaccttcagcgggccaatgctcgccggcaacttcggcgcggagacactcgacccgtttaccgagcaccatttctggcaggcgctacgccagccggaattcaccctcgaatggccgggcgaagggccgaactgccgggtggaaggcaccctgtgggggggaaatctggcgatgctgacctcgcttatcggcacgccgtggctgccggcgatccgcgacggcatcctggtggtggaggatatcaatgagcacccgttccgcgtcgagcgcatgctgcttcagctgttgcacagcggcgtgctggcggcgcagaaagcggtgatcttcggcagcttcaccggcagcgcgccgaacgactatgacgcgggatacgatttgccgcaggtctttgattatctgcgccagcagctatccctgccgctgattagcggactggagtttggccacgagcagcgcacggtgaccctgccgctgggcgcccgcgcgcgcctggtgaatcaggcggcggccaccaccctgacgatcggcggccatccggtgctgacagaataa

SEQ ID NO: 211433 - DNA, 1734 bp, Klebsiella pneumoniae
ttggacgccgctgcggtcattagtctgtttattctgggttctgttttagtaacctgcagtatcttattgagctccttttcttcgcgccttggcatcccgattctggtcatctttctggccatcgggatgctggcaggcattgacggcatcggcggcatccccttcgacaattaccccttcgcctatatggtgagtaacctggcgctggcggtgatcctactggacggcgggatgcgcacccaggccagctcctttcgcgtcgcgctgtggcccgcgctgtcgctggcgacggttggggtgctgatcacctcggcgctgaccgggatgatggcggcctggttgttcaagctggatctgatcgaaggcctgctgatcggcgccattgtcggctccaccgacgccgcggcggtcttctcgctgctcggcggcaaggggctcaacgagcgcgtcggctcgacgctggagatagagtcaggcagtaacgacccgatggcggtcttcctgaccatcaccctgatcgaaatgatccagcagcaccaaaccggcctcagctggatgttcgccgtgcatatcattcagcagttcggcctcgggatcgccatcggcctcggcggcggctacctgctgctgcagatgattaaccgcatcgtgctgcccgccggcctctatccgctgctggcgctgagcggcgggatcatgatttttgccgtcaccacctccctcgacggcagcggtatcctcgccgtctatctctgcggctttctgctgggcaaccggccgatccgcaaccggcacggcatcctgcagaacttcgacggcctggcgtggctggcgcagatcgccatgttcctggtgctgggcctgctggtgacgccctccgacctgctaccgatcgctatcccggcgctgctgctgtcgatgtggatgatattcattgcccggcccctgtcggtgtttgccggcctgctgccgtttcgcggctttaacctgcgcgaacgggtgtttatcagctgggttggcctgcgcggcgcggtgcccattattctcgcggtgttcccgatgatggccggcctggacaacgcccgcctgttcttcaatgtcgccttcttcgtggtgctggtatcgctgctgctgcagggcacttcgctgtcgtgggcggcgaaaaaagccaaagtggtggtgccgcccatcagctggcccatctcccgcgtcgggctggatattcacccggaaaacccgtgggagcagtttgtctaccagctgggggccgataagtggtgcatcggcgcggcgctgcgcgacttgcacatgccaccggagacgcggattgccgcgctgtttcgcaacaatgtcctgctgcaccccaccggcagcacccgcctgcgggaaggcgatatcctgtgcgttattggtcgggagcacgacctgccggcgctcggcaaaatgttcagccagtcgccgccggtggcgctcgatcagcgctttttcggcgacttcattcttgatgctgaggcccgcttcgccgatgtggcgcaaatctacggtctcgacggcggtgaggagttccgcgagcatcagcagtcgctcggggaagtggtgcagcagctgctgggcgccgcgccggtggtgggcgaccaggtggagttcgccgggatggtgtggacggtagctgaaaaagagaacgatcacgtgctgaaggttggggtgcgggtcgcggaagacgaggcggagtga

SEQ ID NO: 211434 - DNA, 1071 bp, Klebsiella pneumoniae
atgacccgtccggtagtggccagcatcgacctgctggccttgcggcagaatttacagatagtgcgtcgcgcggcccccgggtcgcgcctgtgggcggtggtcaaggccaacgcctacggccacggcgtggcgcgcgtatggagtgcgttaagcgcggcggatggtttcgccttgctcaacctggaagaggcgatcctgctgcgcgagcagggctggaaaggcccgatcctgctgctggagggcttcttccatgccgatgagctggcggtgctggatcaatatcgtttaaccaccagcgtccacagcaactggcagattaaggccctgcagcaggcgaagctgcgcgcgccgctggatatctatctcaaggtgaacagcggcatgaaccggttgggctttatgcctgagcgggtccacaccgtctggcagcagctgcgggcgataagcaacgtcggcgagatgacgctgatgtcgcacttcgcggaggcggagaacccgcagggaattgtcgagccgatgcgccgtatcgaacaggcggcggaggggctggattgcccgcgctcgctggccaactcggcggcgaccctctggcatccggaagcgcattttgactgggttcgtccaggcatcgtgctgtatggcgcgtcgccttccgggcagtggcaggacatcgccaacaccgggctgaagccggtcatgacgctgcgcagcgagatcatcggcgtgcagaacctgcgtcccggcgaggcgattggctatggcggcctgtaccgcaccacccaggagcagcggatcggcatcgtcgcctgcggctatgccgacggctacccgcgggtggcgccgagcggcacgccggtgctggtggatggcgtacgtaccactaccgtgggacgcgtatcgatggatatgctggcggtcgatttaacgccttgtccgcaggccgggatcggcgcgccggtcgagctgtggggcaaagagattaaaatcgacgacgtggcggccagcagcggtaccgtcggctatgagctgatgtgcgccctggcgccgcgggtgccagttgtgaccctgtaa

SEQ ID NO: 211435 - DNA, 1299 bp, Klebsiella pneumoniae
atgcgtgtcgtcatactgggaagtggggtggttggggtagccagcgcgtggtatttgagtcaggcgggtcatgacgtgacggtcatcgaccgtcagcccggtccggcagaggagaccagcgcggccaacgccgggcagatttctcccggctatgcggcgccctgggcggcgccgggggtgccgctgaaggcgatcaaatggatgtttcagcgccatgcgccgctggcgatcggtcttgacggcacctcgttccagttgaagtggatgtggcagatgctgcgcaactgcgacacccgccactatatggagaacaaaggccgtatggtgcgcctggcggagtacagccgcgactgcctgaaggcgctgcgcgacaccaccggcattcagtatgaagggcgccagggcgggacgctgcagctgttccgtaccgccaaacagtatgaaaatgccacccgcgacatcgcggtgctggaggacgccggcgtgccgtatcagctgctggaagcgaagcggttggcggaggtggagccggcgctggcggaggtcagccacaaactgaccggcggcctgcgcctgccaaatgatgaaaccggcgactgccagctgtttaccacccgtttggcggcaatggcggaacaggccggcgtgaccttccgcttcaacaccgcagtggatgcgctgctgcacgagggcgatcgcattgccggggtgaaatgcggcgatgagattatcaagggcgacgcctatgtgatggccttcggctcctactcgacggcgatgcttaaagggctggtggatataccggtctacccgctgaaaggctactcattaactattccgatcgctcaggaggacggcgcgccggtttcaactatccttgatgagacttacaaaatcgccatcacccgcttcgatcagcgcattcgggtcggcggcatggcggagatcgtcggttttaacaaagcgctgctgcagcagcgtcgcgaaaccctggagatggtggtgcgcgatctgttcccgcgcggcggccacgtggagcaggcgactttctggacgggcctgcggccgatgacgccggacggcacgccggtggtcggccgcacagcgtataaaaatctgtggctcaacaccggccacggcacgcttggctggaccatggcctgcggctccgggcagcttatcagcgatctgatctccggccgcatgccggcgatcccttacgacgatctggcggttgcccgctacagccccggttttaccccggcgcgcccgcagcacctgcacggcgtacacaactaa

SEQ ID NO: 211436 - DNA, 1533 bp, Klebsiella pneumoniae
atggctacgattgactccatgaacagggacaccacccgtttaagcgatggacccgactggacgttcgagttactggaaacctacctggccgaagtggaccgggtcgccaagctctatcgtcttgacacctacccgcaccagatcgaagtcattacttccgagcagatgatggacgcctactccagcgtcggcatgcccatcaactatccgcactggtcgtttggcaaaaaatttattgagaccgagcaggcctataagcacggtcagcagggtctggcgtatgagatagtcatcaactccaacccctgtatcgcctacctgatggaggaaaacaccatcaccatgcaggcgctggtgatggcccatgcctgctacgggcataactcgttttttaaaaataactatctgtttcgcagctggaccgacgccagctcgatcatcgactatctgatctttgcccgtaagtacatcaccgagtgcgaagagcgctatggcgtcgacgaagtagagaaactgctcgactcctgccacgcgctgatgaactacggcgtcgaccgctataaacgtccgcaaaaaatctctctgcaggaggagaaagcgcggcagaaaagccgggaagagtatctgcaaagccaggtgaatatgctgtggcgcaccctgccgaagcgcgaggaagaaaaagcgattgaatccgctcgtcgctacccttccgaaccgcaggagaacctgctgtactttatggagaagaacgccccgctgctcgaaccgtggcagcgcgagatcctgcgcatcgtgcgtaaagtcagccagtatttctacccgcagaaacagacccaggtgatgaacgaggggtgggccaccttctggcactacaccatcctcaaccatctctacgatgaagggaaagtgactgagcgctttatgctggagtttctccacagccataccaacgtggtgttccagccgccgtacaacagtccgtggtacagcgggattaacccctacgcgctgggcttcgccatgttccaggacatcaagcgcatctgtcagtcgcccacggaagaggataagtactggttccccgatatcgccggttctgactggctggaaacgctgcatttcgccatgcgcgactttaaggatgaaagctttatcagtcagttcctgtcgccgaagatcatgcgcgatttccgcttctttaccgtgctcgacgacgatcacaacaattatctggagatctcggcgattcacaacgaagagggttatcgcgagatccgcaataagctctccgcgcagtataacctcagcaatcttgagccgaatatccaggtgtggaacgttgacctgcgcggcgaccgatcgctgaccttgcgctatgtgccgcacaaccgcgtcccgctggacaaaggccggcgcgaagtgctgaagcatgtgcatcgtctgtgggggttcgatgtgctgctggagcagcagaacgccgacggcagcattgagctgttggaccgctgcccggcgcggccgaacgcgctatag

SEQ ID NO: 211437 - DNA, 720 bp, Klebsiella pneumoniae
atggtcattaaggcgcagagccctgcgggtttcgcggaagagtacatcattgagagtatctggaataaccgcttccctcccggatcgattctccccgctgaacgcgagctttctgagctgatcggtgtcacccgcacaaccctgcgcgaagtattgcagcgtctggcccgtgacggctggctgaccattcagcatggtaagcccactaaagtgaataacttttgggaaacctccggcctgaatatcctcgaaacgctggcgcgcctcgatcacgacagcgtaccgcagctgattgataatctgctctccgtgcgcaccaacatttccacgatttttatccgcaccgcgtttcgccagcatccggataaagcgctggcggtcctggacagcgcccgggaggtggaggatcacgccgacgccttcgccgagcttgattataatattttccgtggtctggcgtttgcctccggcaacccgatctacggtctgatcctcaacggcatgaaggggttgtatacccgcatcggccgccactatttctccagcccggaagcgcgcagcctggcgctcggtttctatcatcagctggcgaaagtgtgtgaggctggcctgcatgaccaggtttacgagctggttcgtcgctacggccatgacagcggcgagatctggcaccggatgcagaaatcgctgcccggtgatttagccatgaatatgcgttaa

SEQ ID NO: 211438 - DNA, 1551 bp, Klebsiella pneumoniae
gtggaaatttcttatggccgcgcgctgtggcgcaattttcttggccagtcgccggactggtacaagctggcattaatcattttcttaatcgtaaatccgctggtgttcgccgtggcgccgtttgtcgccggctggctgctggtggtcgagtttatctttaccctcgccatggcgctgaagtgctatccgctgctgccgggtggtctgctggctatcgaggcgctgctgatcggcatgaccagcccggcgcacgtgcgggacgagatcgccggcaatctggaggtgctgctcctgctgatgttcatggtggcgggtatctactttatgaaacagcttttgctgttcgtgtttacgcgcctgctgctggggatccgcagcaaaatgctgctatcgctggcgttctgcctggcggccgcgttcctctcggcctttctcgatgcgctgacggtggtggcggtagtgatcagcgtcgccgtcgggttctacggcatctatcaccgcgtcgcctcggcgcgcccggacgatagcgacctgctcgatgacagccatatcgagcagcactaccgtgaagtgctggagcagttccgcggctttctgcgcagcctgatgatgcacgccggcgtcgggaccgcgctcggcggcgtcatgaccatggtcggcgagccgcaaaacctgattatcgccaaagccgcgggctggcattttggcgagttctttcttcgcatggcgcccgtgaccctgccggtgatggtctgcggtctgttaacctgtctgctggtcgaaaagtatcgcctgtttggctacggcgaaccgctaccgccgacggtgcgcaaggtgctgcaggagtttgacgatcgcagccgcgcccagcgcagccgtcaggagcgactgcggctgattgcccaggcgctcattggcgtttggctgatcgtggccctggcttttcacctggctgaggtcggcctgattggcctgtcggtgatcattctcgccaccacctttaccggcgttaccgatgagcacgccattggcaaggcgttcaccgaggcgctgccctttaccgcgctgctgacggtcttcttctccatcgtcgcggttatcatcgatcagcagctgttcacgccggtgatcgagtttgtcctgcaggcctcgccgcacgcgcagctgtcgctgttttatctgttcaacggcctgctgtcgtccatttcggataacgtgtttgtcggcacggtctacatcaacgaagcgaaagcggcgctcgaacatggcgccatcagcctgccccagtttgagatgctggcggtagcgatcaacaccggcaccaacctgccctcggtggccaccccgaacggccaggcggcgtttctcttcctgctgacttccgccctggcgccgcttattaggctctcctatggccgtatggtgtggatggcgctgccctacaccatcgtactgacgctggtcggcctgttatgcgtcgagttcaccctgatgccagtcaccgactggctgctggcgcacggctggctggtgacgcccaccctgccctga

SEQ ID NO: 211439 - DNA, 531 bp, Klebsiella pneumoniae
atgttgcaatatttaaaccagtgctcaagaggacgcggtgcctggctcctgatggcgttgaccgcttttattctcgaactagtcgcgctgtggttccagcacgtgatgctgctgcagccgtgtgtcatgtgtatttacgaacgctgcgcgctgttcggcatcatgggcgcgggactggtgggcgctatcgcccccaaaacgccgctgcgctatgtcgccatggcaatctggttgtacagcgcgatacgcggactacagctggcgtgggagcatacgatgatccagctgcacccttcaccgttccagacctgcgatttcgccgcccgcttcccaacctggctgccgctggataaatggctgccgcaggttttcgttgcgtccggagactgttcagtacgtcagtggcagttcctgtcgctggagatgccgcaatggctggtggggattttcgccgcctatctgctggtcgctattctggtgatcgttgctcagcctttcaaagcgaaaaaacgcgatctgtttggtcgttaa

SEQ ID NO: 211440 - DNA, 345 bp, Klebsiella pneumoniae
atgtcatctttactgatccccgcagactggaaagttaaacgctccaccccattctttaccaaagagaatgtccctgccgccctgctgagccaccacaacaccgcggctggcgtcttcggccagctgtgcgtcatggagggcacggtcacctattacggttttgccaatgaacaggcgacggagccggagaaaaaagtcgtgattcatgccgggcagtttgctaccagtccgccgcagtactggcaccgcgtcgaactcagtgacgacgcccgcttcaatattcacttctgggtggcggaagaaaccgacggtgaaaacgggctgttccacgcgaagaaagcgtga

SEQ ID NO: 211441 - DNA, 447 bp, Klebsiella pneumoniae
atgagcgaacaacctttctggcaacaaaaaacactggatgacatgagcgacgcggagtgggaatcgctgtgtgacggctgcggccagtgctgcctgcacaagctgatggatgaagacactgacgagatctacttcaccaacgtcgcctgtcgtcagctcaatatcaaaacctgccagtgtcgtaactacgcgcgtcgctttgagtatgagccggactgcatcaagcttacccgcgaaaatctgccgaccttcgaatggctgccgccgacctgtgcctatcgcctgctggcggaaggcaagcctctgccggcctggcacccgctgctgactggctcaaaagcggcgatgcacggcgaacgcatctccgttcgccatattgcggtgcctgagtccacggtggtcgactggcaggaccatatccttaatctgcctgacagggcgcgctaa

SEQ ID NO: 211442 - DNA, 660 bp, Klebsiella pneumoniae
atgtaccaacatcataactggcagggtgcgcttctggattatccagtaagcaaagtagtgtgcgtcggcagtaattatgcgaaacacatcaaggaaatgggcagtgtgacgccggaagagccggtgctgtttattaaacctgagactgcgctgtgcgatcttcgtcagccgttggtgcttcctgaggggctgggctcggtgcatcacgaagtcgagctggcggtgcttatcggcagcacgctgcgtcaggcgacggaagagcatgtgctgaaagggattgccggctatggcgtcgcgctggatctcacgctgcgcgacctgcaggcgaaaatgaaaaaagcgggacaaccctgggagaaggccaaaggcttcgataacgcctgtccgatctccggctttatcccggccgctgagttccacggcgacccgcagaatacgtcgttaagcctgaagattaatggcgaagtgcgccagcagggcaccactgccgacatgatccataggattgtgccgctgatcgcctatatgtcgcgcttctttaccctcaaagccggggatgtgatcctcaccggcaccccggaaggcgtggggccgctgcacagcggtgacgagctggaggtcggcttcaacggcctggcgctcactacccgcgtgctgtaa

SEQ ID NO: 211443 - DNA, 282 bp, Klebsiella pneumoniae; identical to SEQ ID NO: 138201

SEQ ID NO: 211444 - DNA, 699 bp, Klebsiella pneumoniae
atgtcaaatacgccaatcgaacttaaaggcagtagcttcacgttatctgtcgttcatttgcacgatgcaaatcccgaggttattcgtcaggcgttagaagacaaaatcgcccaggctcccgcttttttacgtcatgctccggtggtggtgaatatcgccagcatcgaggaggaggtggaatggcgcgccatcaacgaggctatcgccgcgaccggtttacgtattatgggcgttagcggatgcaaaattccgcgcctgaaaaccgaaatcgaccgcgccggcatcccgttattaaccgaagggaaagaaaaagcctctcgtccggcaccgtccgaacccaccccgccgccgccagttgctagtcagatcacaaaaacgcgtttgattgatcagccggtacgttccggtcagcgcatttatgcgccacactgtgatcttattgttacaaatcatgtgagtgccggtgcggaacttatcgctgacggaaatatccatgtatatggcatgatgcgaggacgtgcgctggcaggcgccggtggcgacagagacgcccagatattttgtacccaccttgcggcggagctggtctccatcgccggggaatattggctgagcgataacatcccggccgaattttatggcaaagcggcgcgcctgcgtttaggtgaaagcgctttggcaattcaaccgttaaattaa

SEQ ID NO: 211445 - DNA, 813 bp, Klebsiella pneumoniae
atggcacgcattattgttgtgacttcgggtaaagggggcgttggcaagaccacctccagcgcggccatcgctacaggtttggcccagaagggaaagaaaaccgtcgttatcgacttcgacatcggcctgcgtaacctcgacctgattatgggctgcgaacgtcgcgtcgtttatgatttcgtcaacgtcattcagggcgatgccacactgaaccaggcgctgattaaagataagcgcacggaaaacctctacattctcccggcttcccagacccgggataaagacgctctgactcgcgaaggcgtcgacaaggttctcgaagaactgaagaaaatggaattcgatttcatcgtctgtgattccccggcaggcattgaaaccggtgcgctgatggcgctttactttgctgatgaagccatcatcaccactaacccggaagtctcctccgttcgcgactccgaccgtatccttggcattctcgcctctaaatcccgccgcgcggaaaatggcgaagagccaatcaaagagcatctgctgctgacccgctacaatccaggccgcgttaataaaggcgatatgctgagcatggaagacgtgctggaaattctgcgcatcaacctggtaggcgtgatcccggaagaccagtcagtcctgcgcgcatccaaccagggtgagccggtgatcctcgatgccgcttcggacgcaggcaaagcctatgccgataccgttgaacgtctgctcggagaagaacgccctttccgcttcattgaagaagagaagaaaggattcctcaaacgcctgttcggaggataa

SEQ ID NO: 211446 - DNA, 270 bp, Klebsiella pneumoniae; identical to SEQ ID NO: 139205

SEQ ID NO: 211447 - DNA, 1116 bp, Klebsiella pneumoniae
atgatcaccaccgacgatggcctgcgcgctgtctgcgaagcggcaagcgcggcctccgccgtcgctctggatacggaatttgtccgcacccgcacctattacccgcagctgggcctgctgcagctgttcgacggccagcaggtctctctgatcgatcccttgacgattaacgactgggcgccgatgcgcgacctgctgctcaaccaggatgtgactaaatacctgcatgccggcagcgaagatttagaagtcttccttaatgcatttaacctgatgccgcagccgctgattgacacccagatcctggcggccttctgcggccgcccaatgtcctggggcttcgcctcgatggtggaagagtattccggggtagcgctggataaaagcgaatcccgcaccgactggctggcgcgcccgctgactgagcgtcagtgtgaatatgccgcggccgacgtctggtatctgctgccgatcgccagccagttaatggcggagaccgatcgcgctggctggctgccggcggcgctcgacgagtgccgcgtgatgcagcagcgtcgtcaggaggtggtcgacccggccgaggcctggcgcgatatcggcaacgcctggcagctgcgtacccgccagctgggttgtctgcagctgttggcggagtggcgcctgcgcaaagcgcgcgagcgcgacctggcggtaaactttgtggtgcgggaagagcatctgtggagcgtggcgcgctatatgcccaccagcctgggcgagctcgacagcctcgggttatccggtagcgaaattcgcttccacggcaaaacgctgattagcctggtcgaaaaagcgcaggcgctgccggagtcggccctgccggcgccgctgcagaacctgatcgacatgccgggctaccgcaaagtctttaaagatattaaagcgctggtgcaggaagtgagcacggagaagggcgtaagcgcggagctgctggcgtcgcgtcggcagatcaaccagctgctgaactggcactggcagctgaaaacgcaagccggtgaacctgagctgatttccggttggcgcggggagctgatggccgagcggctgaagaggctgttaaacgactatccgcgctag

SEQ ID NO: 211448 - DNA, 1719 bp, Klebsiella pneumoniae
atgacgacgaataactatttcagaggtgatgcagtgaaaaaggtttggctaaaccgttatcccgcagatgttccggcggagataaatcctgaccgctatcaatccctggttgaactgtttgaacatgccaccacccgttacgccgaccaaccggcgtttatcaatatgggtgaagtgatgacctaccgtaagctggaggagcgtagtcgcgccttcgccgcttatcttcaggaggggttggggttacagaagggcgatcgcgtggccctgatgatgcctaacctgctgcagtatccggtggctctgtttggcatcctgcgcgccgggatgatcgtggttaacgtcaaccccttatataccccgcgcgaactggagcatcagctcaacgacagcggcgcggcggcgatcgtcattgtctccaactttgcccataccctggaaaaagtggtggcgaaaactcaggtccagcatgtgatcctgacgcgcatgggcgaccagctttccaccgccaaaggtacgctggtgaactttgtggtcaagtacattaagcgcctggtgccgaagtaccatctgccggacgccatctcgtttcgcagcgcgttgcagcacggctatcgcatgcagtacgtcaagccggagatcgttgcggaagatctggcgtttctgcagtacaccgggggcaccaccggcgtggccaaaggtgcgatgctaacccaccgcaatatgctggctaacctcgagcaggtcaatgccacctacggcccgctgctgcatcgcggcaaagagttcgtggtgaccgcgctgccgctgtatcacattttcgccctgaccatgaactgcctgctgtttatcgaactgggcgggcaaaatttgctgatcaccaacccacgcgatatccccgggctggtgaaggagctggcgaagtatccttttaccgccatgaccggggtcaacaccctgttcaacgccttgctgaacaacaaagagttccagcagcttgatttctcctcgctgcatttgtccgctggcggtgggatgccggtgcagcaggcggtggccgagcgctgggtaaaactgaccgggcaatatctgctggagggctacggcctgacagagtgttccccgctggtcagcgttaacccgcacgatattgactaccacagcggcagcattggcctgccggtgccctccaccgaagccaaactggtggatgatgatgataacgaagtggcgccgggtcagccgggcgagctctgtattaaagggccgcaggtgatgctgggctactggcagcgccctgacgcgacggatgagattatcaaagacggctggctgcacaccggggatatcgcggtgatggatgaagaggggttcctgcgcatcgtcgatcgcaaaaaagatatgatcctggtgtcgggttttaacgtctatccgaacgaaatcgaagatgtggtcatgcagcatagcggggtgctggaagtggcggccatcggcgtgccgtccggcagcagcggcgaagcggtgaagattttcgtagtcaagaaagatgctgcgttaaccgaagaggcgctgattacgttctgccgtcgccatttgaccggatacaaggtgccgaagctggtggaattccgtgacgaactgccgaaatccaacgtcgggaaaattttgcggcgagaactgcgtgacgaagcgcgcgctaaagtggacaataaaggctaa

SEQ ID NO: 211449 - DNA, 582 bp, Klebsiella pneumoniae
atggcgggtcaaaaacagggcgttcgctggctgttagccgcggcggttgccgttgcgctaagcggctgcgtgtcagtgccggatgccatcaaaggcaccagcccgacgccgcagcaggatttagtgcgggtgatgaacgccccgcagctgtacgttggccaggaagcgcgctttggcggtaaggtggtcaatgtgcaaaaccagcaggggaaaacccgcttagaaatcgccaccgtaccgctggacagcggcgcgcggccagtgctgggcgagccgtcccgcggaaggatttttgctgacgtcaatggcttcctcgatccggtggatttccgcggtcaactagtgaccgtagtcggaccgatcgccggggtggttgacggcaaggtgggcagcacgccgtataaatttatgctgatgaacgccaccggctacaagcgctggaacgtagtgcagcaggtggtgatgcctccgcaacctatcgacccgtggatgctgggtccgcgcccctggggctacggctatggcggctggggctggtacaatcccggccctgctgaggtgagaaacgttgtaaccgaatga

SEQ ID NO: 211450 - DNA, 696 bp, Klebsiella pneumoniae
atgcgaattttggctatcgataccgccacagaggcctgctccgcggctctgtggaatgatggcacccttagtgctcatttcgaaatttgtccccgcgaacatacccaacgtatcctgccgctggtgcaggaggtcctcaccgagagcggcaccacgctgagcgagctggacgcgctggcctttggccgcggtccgggcagctttaccggcgtgcgcatcggcatcggtatcgcccaggggctggcgctgggcgccgaactgccaatgattggcgtttccacgctggccaccatggcgcagggcgcctggcgcaaaaccggcgccacccgtgtgctggcggccattgatgcgcgtatgggcgaagtctactgggccgagtaccagcgcgacgagcagggcgtctggcatggcgaagagacggaagcggtgctcaaaccggacgcggtagccgaacgactggcacagctttccggcgaatgggccaccgtcggcaccggatggcaggcgtggccggatctggcgaaagcgagcggactgaccttaagcagcggcgaaattgaattgccggcggcggaggatatgctgccgttagcctgttacctgctggcggcggggaaaaccgtggccgtggagaaagcggagccggtttatttgcgaaacgaggtggcgtggaagaaacttccaggccgcgagtga

SEQ ID NO: 211451 - DNA, 1911 bp, Klebsiella pneumoniae
gtgatcgacgattttgcagcagacggccagctagccaaagccataccgggatttaaaccgcgcgagccgcagcgccagatggcggtggcggtcagcgaagcgattgaggcctcccggccgctggtggtggaagcggggaccggaaccggtaaaacctacgcttacctggcgcctgcgctgcgggcgaaaaaaaaggtgattatctccaccggctcgaaagcgctgcaggatcagctttacagccgcgatctgcccaccgtcgccaaagcgctcaaattcaccgggaaactggcgctgctcaaagggcgttccaactacctgtgtctcgaacgtcttgagcagcaggcgctggcgggcggcgatctgccggtgcaaaccctcagcgatgtgatcctcctgcgctcctggtcgaatcaaacccaggatggcgatatcagcacctgcgccagcgtcgcggaagactctcaggcctggccgctggtgaccagcaccaacgataactgtctcggtagcgactgcccactgtataaagattgtttcgtggtgaaggcgcgtaaaaaagcgatggacgccgacgtggtggtggtcaaccatcacctgttcctggccgatatggtggtcaaagagagcggctttgccgagctgatccccgaggcggaagtgatgatcttcgatgaagcccatcagctgccggatatcgccagtcagtactttggccagtcgctctcgagccgccagctgctggacctggcgaaagacatcaccattgcctaccgcaccgaactgaaagacactcagcagctgcaaaaatgcgccgaccgcctggcgcaaagcgcgcaggatttccgcctgcagctgggagacccgggctaccgcggcaatctgcgcgagctgctggcggacagccacattcagcgagcgctgctgctgctcgatgacgcgctcgagctatgctatgacgtcgccaaactttcgctaggtcgctcggcgctgctcgacgccgcttttgagcgcgccaccctctatcgcaggcgcctgaagcggttgaaagagatcaaccagccgggctacagctactggtatgagtgtacctcgcgccactttactctcgcgctgacgccgctgaccgtggccgagaagtttaaagaggtgatggcgcagaagtcggggagctggatctttacctcggcgacgctgtcggtgaacgacgatctgcatcactttaccgcccggctggggatcgacgaggcgcagactctactgctgccgagtccctttgactatcagcaccaggcgctgctctgcgtgccgcgcaacctacccctgccgaaccagcccggcgcggcgcgacacctggcggcgatgctcaagccgctgatcgaggccaacgatggtcgctgctttatgttgtgcacctcgcacgccatgatgcgcgatctggcggagcagttccgcgccaccatgacgctaccggtgctgctgcagggcgagaccagcaaaggccagctgctgcagcagttcgtcagcgccggcaacgcgctgctggtggctaccagcagcttctgggagggagtcgatgtgcgcggcgacgcgctgtcgctggtgattatcgataagctaccgttcacctcgccggacgatccgctgctaaaagcgcggatggaagattgccggctgcgcggcggcgatcccttcgatgaagtgcagctcccggatgcggtgatcaccctcaagcagggggtggggcgtctgatccgcgatatcgacgaccgcggggtgctggtgatctgcgacaaccggctggtgatgcgcccctacggcgcggtgttcctggccagtctgccgccggcgccgcgaacccgcgatatccgtcgggcggtgcgctttctcgccgtaccgccggcaaggtaa

SEQ ID NO: 211452 - DNA, 345 bp, Klebsiella pneumoniae; identical to SEQ ID NO: 138169

SEQ ID NO: 211453 - DNA, 186 bp, Klebsiella pneumoniae
atgtttgcaggtttaccttcgctgagccacgagcaacagcaaaaagcggtcgaacgtatccatgagctaatggctcagggggtaagcagcggccaggcgattgccctggtggcggaagagctgcgcgcaacgcataccggcgagcagattgtcgcgcgctttgaagatgaggatgaggacgagtaa

SEQ ID NO: 211454 - DNA, 1356 bp, Klebsiella pneumoniae
atgttgtcccccgcgattattaccctgccctggcgcccggatgcggccgaacactattttgcgccgttaagcgccctgccctgggcgatgctgctgcattccggctttgccgaccatccgcataaccgctttgatattctggtggctgccccgcgcgccacgctgctgacgcgcggtgaacagacgtgggtcgacgacggcgaaaccgttgttgtctcagcggaagatccgctgcagctcctgcggcaggagttggatcgtcagccgttcacgccgcaaccccatgacgatctgccgtttctcggcggcgcgctgggattattcggttacgacctgggccgtcgctttgagcgtctcccttcgcacgcgcaggccgatatcgcgctggcggatatggcggtggggatctatgactgggcgcttatcgtcgaccaccagcgccaacagatatcgctgctcagctatgacgacccgcagcagcgtctacagtggctggaggcgcaaacgccgacgccgggtgaaaccttcgccctgacctctgcctggcagtcaaatatgagccgccagcagtacggcgaaaaatttcgccaggtacaggcctatctgcacagcggcgactgctatcaggtcaacctcgcccagcgttttcaggccagctacgtcggtgatgaatggcaggccttccgccagctgaacaccgtcaaccgcgccccctttagcgcctttattcgcctcgatgaaggggcgattttaagcctgtcgccggagcgctttatccagctgcgccagggggagatccagacgcggccgataaaaggcaccctaccgcggctcgattcaccgccggaagatgcgcagcaggctgagaagctggcgaattcgccgaaagatcgcgccgagaatttaatgattgtcgacctgatgcgcaacgacatcggccgcgtcgccgtcccgggcagcgtccgggtccccgagctgttcgtggtggagccgttcccggcggtccatcatctggtcagcaccatcaccgcccgcctgccaatgacgctgcacgccagcgacctgctgcgcgccgcctttcccggcggctcgatcaccggcgcgccgaaagtgcgggcgatggagattatcgatgaactggagccccagcgtcgcaacgcctggtgtgggagcattggctacctgagctattgcggcaatatggataccagcatcaccattcgcaccctgacggcatggcagggacagctgtactgctccgccggcggcggaattgtggcggatagcgaggaagcggcggaatatcaggaaacttttgataaagttaatcgtatcctgcagcaactggagaattag

SEQ ID NO: 211455 - DNA, 579 bp, Klebsiella pneumoniae
atggcggatcgcgcccttaatctggatgattttctgtcccgctttcagcttctgcgcccgcagccttcttgccatgcgctcaatcagcggcaggcggcggtgctggtgccgatcgtgcgccggccgcagcccggcctgctgctgacccagcgttcgccgctgctgcgcaagcacgccggccaggtcgcctttcccggcggcgcagtagataataccgacgcgacgcttatcgccgccgccctgcgcgaagctcaggaagaggtggcgatcccgccggaggcggtcgaggtgatcggcgtcctgccgccggtggacagcgtcaccggctttcaggtgacgccggtggtgggcattattcccccggatctgcactaccacgccagccaggacgaagtctccgcggtatttgaaatgccgctcgccgaagccctgcgccttgggcgctaccatccactcgatatccaccgccggggcaacgaccaccgcgtctggctctcctggtaccagcattattttgtctggggaatgaccgccgggatcattcgcgagctggcgctgcaaattggcgcacgtccttag

SEQ ID NO: 211456 - DNA, 1365 bp, Klebsiella pneumoniae
gtgattagtctattcgacatgttcaaggtggggattggtccctcatcttcccacactgttggcccgatgaaggccggaaaacagttcgtcgatgacctggtcgaaaaaggattgcttaatgcagtgactcgtgtggcggttgacgtctacggttcactgtcattaaccggcaaaggccaccatacggacatcgccattatcatgggactggcgggcaatcagcccgatacggtcgatattgacgcgatcccggcttttatccgtgacgtcgaagcgcgcggtcgtctgctgctggccaacggccagcacgaggtcgacttcccggcggatgacggcatgcgttttcgcagcgacaacctgccgctgcacgaaaacggcatgaccattcacgcctgggccggcgagaaagagatctactgcaagacctactactcgatcggcggcggctttattgtcgacgaagagcacttcggcaaggaaaacgccaacgaactgcaggtgccctacccatttaaatcggcgcaggaaatgctggcctactgcaaagagactggcctgtcgctctccgggatggtgatgcagaacgaactggctctgcacagcaaaaaagagatcgaggattatttcgccaacgtctggcagaccatgcgcgcctgtatcgaccgcgggatgaacaccgagggcgtgctgcctggcccgctgcgcgtaccgcgtcgcgcctcggcgctgcgtcgtctgctggtggccagcgataagctctccagcgatccaatgaacgttgttgactgggtcaatatgttcgcgctggcggtcaatgaagagaacgccgccggcggtcgcgtggtaaccgcgccgaccaacggcgcctgcggcatcgttccggcggtactcgcctattacgatcactttatcgagtccgtcagcccggagatctatattcgctactttatggcctgtggggcgatcggtgcgctgtataagatgaatgcgtccatttccggcgcggaagtcggctgtcagggcgaggtgggcgtcgcctgctcgatggcggcggcgggcctggctgaactgctcggcgccagcccggaacaggtttgcgtggcggcggagatcggcatggaacacaacctcggcctgacctgtgatccggtcgccggccaggtgcaggtgccatgcattgaacgtaacgccatcgcttccgtcaaggcgatcaacgccgcgcgaatggcgatgcgccgcaccagcgaaccgcgcgtctcgctcgataaggtgatcgagaccatgtatgaaaccggtaaagacatgaacgccaagtaccgcgaaacctcgcgcggcggcctggcgattaaagttcagtgtgactaa

SEQ ID NO: 211457 - DNA, 1578 bp, Klebsiella pneumoniae
atgcagactgcacaaaaagtcattacggcctatcgtcacaaacgcattattgtctgcctgctggtagccctggcgaccctgggcgccacattagccatccgatttatttcgcagcgcagcgtaaatgaagattatattcgcacggccgccagccaacgggtggcggcgctcaatgacatcttgcgcccgctaagcgcgcagcgagccaccctgctccctctggtgggcaaaccctgccctgatatccatctgacgctgcgcaaaatggcggcctcgttgcaaaccattcgttccgtcgccctcgtcacgtcaggtatcgtttactgttccagtatttttggcccgcgacaggcggacttacatcgcctgcagcccgcgcttcctgcgccccgccctctgctgctcttctcgaacgacagctccttgctcaaaggctcgccggtactgatccaatggtatccagccgcggagaacggcctggacggcgtgatgctggtggtgaatattgagctgttgggaaccttaattcttaatgaaaaatcggccctgatcagcgacgtcagcctgcaggttggcgatcgttattttagcagccgccatgggcttctcgaaaaaacgcatgtcccgcagggcacggtgatttatcgccagcgctctacggagtttccgtttactgtcaatattaacggccctggcgcctcggcgattgcgcttgaggagctgcccggcgagctgccgctggcgctgatttttagcctgctaatgaccggcatcgcctggctggccaccgccggcagaatgagtttctcgcgggaaataagccttggcatttcggcccgggagtttgccctctggtgccagccgctgcaggatgcgcgcagcggccgctgctgcggggtggagatcctgctgcgctggaataatccccgccgtgggacgatttcgccggaggtatttatccccatcgccgaaggcaataatctgatcatccctctcacccgctatgtgattgccgaaaccgctcgccgcctggacgcttttcctcgcgaccgccattttcacatcgcgatcaatgtcgccgcgcgccatttcgctaacggactcctgctgcgcgacctgcacaattactggttcagcgtggatccggtgcagcagctggtggtcgagctaaccgaacgcgatgtcctgcaggatggcgaccagcatatggccgaacatctgcactttaagggcgtacagctggcgatcgatgattttggtaccggcaatacttcgctctcatggctggaaaagctgcgcccggacgtcctgaagatcgaccgctcgttcaccagctcggtcggcatagatagcgtgaacgcgacggtgacagatattattatcgccctcgccaaccgcctgcatattgttaccgttgccgaaggggtggagacgctggagcaggaaaactacctgcgtagccacggcgtcgatgtgctgcaggggttttattatgcgcggccgatgccggtggaggcgttcccggcgtggctggccagcagggaggagagtgagagtgagagcgagacgacagaataa

SEQ ID NO: 211458 - DNA, 1560 bp, Klebsiella pneumoniae
atggaattgttaatggatccctcaatctgggccggcctgttgacgcttatcgttctggaaattgtgctcggtatcgacaacctggtgtttattgccatcctggcggacaaactgccgccgaagcagcgcgataaagcgcgtctgatcggcctgtcactggcgctggtgatgcgcctggggctgctgtcggtcatctcctggatggtgacgctgacgaaaccactgattaccatcgccgatttctccttttccgggcgcgatctcatcatgctgctcggcgggatcttcttgttgtttaaggcgacaaccgagctgcatgaacggctggaaaaccgccagcacgatgccggtcacggtaaaggctatgccagtttctgggtagtagtattgcagatagtggtgctggatgccgtcttctccctggacgccgtgatcacggcggtcgggatggttaaccatctgccggtgatgatggcggcggtggtgatcgcgatgatcttgatgctgctggcctccaagccgttgacgcgctttgtcaaccagcacccgacggtggtcgtgctctgtctgagcttcctgttgatgattggccttagcctggtggcggaagggtttggcttccatattccaaaagggtatctgtacgcggcgatcggtttctcgatcattatcgagttctttaaccaggtggcgcgccgtaactttgttcgccaccagtcgacgctgccgctgcgcgctcgtaccgcggatgccatcctgcgcctgatgggcggccgcaaacaggcctccgtcagccatgacgcagacagtccagccgcggtgcccgttcctgagggcgcctttgcggaagaagagcgctacatgattaatggcgtgctgaccctggcccagcgctccctgcgcagcatcatgaccccgcgcggagaaatcagctgggtcgacgctgagcagagtgaagatgaaattcgtcgtcagctgctgtcgtcgccgcacagcctcttcccggtctgccgcggagagctggatgaaatcattggtatcgtgcgggcgaaagagatgctggtggccctggagtcgggggaaaacgtcgcggcgctggcttctgcctccccggcaattgtcgttccggaaacgctggacccgatcaatctgctcggggtcctgcgtcgggcgcgcggcagcttcgtcatcgtaactaatgaatttggcgtggtgcaggggctggtcacgccgctggacgtccttgaagccatcgccggtgaattcccggacgctgatgagacgccagagattgtcatcgatggcgatggctggcttattaaggggtcgaccgacctgcatgcgctgcagcaggcgctggggctggatccactgatcaatgacgatgaggatattgccaccgttgccgggctagtgatctccgccaatggtcatatcccgcgcattggcgacgtcgtgtcgcttccgccgctgcattttaccgtagtggaagcgaatgattaccgggtcgatctggtgcgcgcggtggtcactcgtccgccgagcgacgaagaagagtaa

SEQ ID NO: 211459 - DNA, 972 bp, Klebsiella pneumoniae
gtgacgattgctattgtaataggcacacatggttgggctgcagaacagctgctgaaaacagcagaaatgctgttgggcgagcaggaaaacgttggctggatcgatttcgttccgggtgaaaatgccgaaacgttgatcgagaaatacaacgcccagttggcaaaactggataccagtaaaggcgtgctatttctcgtcgatacatggggaggcagccctttcaacgctgcgagccgcattgtcgtcgataaagagcattacgaagttatcgccggcgtcaatatcccgatgctggtggaaaccttcatggcccgcgacgacgatccttcctttgatgaactggtcgccttagcggttgaaaccggcagcgaaggcgtgaaagcgcttaaagccaaaccggtggaaaaagcggcccctgcgcccgcgcctgccgcagcgccaaaagccgccgcaccggccaaacccatgggcccgaacgactacatggtaattggccttgcgcgtatagacgaccgtctgatccatggtcaggtcgccacccgctggaccaaagagaccaacgttacccgcatcatcgttgtcagtgatgaagtggccgcggataccgtgcgtaaaactctgctgacccaggttgcgccgccgggcgtcaccgctcacgtggtggatgtggccaaaatgatccgcgtctacaacaaccccaagtatgccggacagcgcgttatgctgctgtttactaacccgaccgacgttgaacgtatcgtcgagggcggcgtgaaaatcaccagcgtcaacatcggcggtatggcgttccgccagggtaaaacccaggttaacaacgcgatttcagtcgatgccaaagatattgaggcgtttaaaaagctgaacgcccgcggtatcgagctggaggcacgtaaagtgtccaccgacccgaaactgaaaatgatggatctgatcgctaaggttgataaataa

SEQ ID NO: 211460 - DNA, 801 bp, Klebsiella pneumoniae
atggagattacccttcttcagattgtgctggtgttcatcgtcgcgtgtattgcgggtatggagtcggtacttgatgaatttcagttccaccgtcccctgatcgcctgtacgctgatcggcgccgttctcggcgatatgaaaaccggtattatcatcggcggtacgctggagatgatagccctgggctggatgaacatcggtgcggcggtagcccctgatgccgcgctggcgtccattatttccaccgtcctggttattgccggccatcagagcatcggcgccggtatcgcgctggctatcccgctggcggcggcaggccaggtgctgaccatcatcgtgcgcaccatcaccgtggccttccagcacgcggcggataaagcggcggagaatggcaacctgaccgccctgtcgtggctgcacgtctcgtccctgttcctgcaggcgatgcgtatcgctatcccggccgttatcgtggcgatttccgtcggcaccagcgaagttcagggcctgctgaatgctatcccggaagtggtcaccagcggtctgaacatcgccggcggtatgatcgtggttgtcggttatgcaatggtcatcaacatgatgcgcgcaggctatctgatgccgttcttctacctcggcttcgtcaccgccgccttcaccaacttcaacctggtggccctgggtgtgattggtgcggtcatggcaatcctctacatccagctgagcccgaaatataaccgcgtcgccggtgcgccggctcaggcggctggtaacaacgatctcgataacgaactggactaa

SEQ ID NO: 211461 - DNA, 852 bp, Klebsiella pneumoniae
atggttgatatgactaaaaataccaccgagaaaaaactcacacagagtgatattcgtggcgtgttcattcgttctaacctgttccagggttcatggaacttcgaacgtatgcaggcgctggggttctgcttctctatggttccggcgattcgtcgtctgtacccggagaacaacgatgcgcgtaagcaggcgattaagcgtcaccttgagtttttcaacacccacccttacgttgccgctccggtactgggcgtaaccctggcgatggaagagcagcgcgccaatggcgcagagattgacgatggcgctatcaacggcatcaaagtcggtctgatgggaccgctggccggcgttggcgacccgatcttctggggtaccgtgcgtccggtgtttgcagccttaggcgccgggatcgcgatgagcggtagcctgctcggtcctctgctgttctttatcctgttcaacgcggtgcgtctgctgacccgttactacggtgtcgcctatggttatcgcaaaggcgtggatatcgttaaagatatgggcggcggcttcctgcagaaactgactgagggggcgtcaatcctcggcctgtttgtcatgggggcgctggttaacaagtggacgcatgtgaacattccgatggtggtgtcaaaaatcaccggctctgacggacaggttcacgtcaccacggtgcagactatccttgatcagctgatgcctggtctggtgccgctgctgttgaccttcgcctgtatgtggctgctgcgtaagaaagttaacccgctgtggatcatcgttggcttcttcgtcatcggtatcgccggctacgcggtcggcctgctgggtctgtaa

SEQ ID NO: 211462 - DNA, 459 bp, Klebsiella pneumoniae
atgaccttcacggacctggtgatcatcctgtttatccttgcgctactggcctacgcgatatatgaccagtttattatgccgaggcgaaacggcccggtactgctggccatccccctgcttcgccgcagtcgcgttgacggcatgatctttgtcggcctcaccgccattctgatctataacaacatcacccagcacggcacggcgatcaccacctggctattatctgcgctggcgctgatggggctctatttattctggatccgtacgccgaaaatcatttttaaaccgcgcggctttttcttcgccaacgtgtggatagaatatcagcggattaaagagatgaatttatccgaggacggtgtgctggtgatgcaattagagcaacggcggctgctgatacgcgtacgaaatatcgacgatctggagaagatatacaaacttctcattacaactcaatga

SEQ ID NO: 211463 - DNA, 567 bp, Klebsiella pneumoniae
atgaatttatccgctaccattcttctcgctttcggcatgtccatggacgccttcgcagcctccatcggcaaaggcgccaccctgcataaacccaaattttcagaggcagtacgcaccgggctgatttttggcgccattgaaaccctgacaccgctggtcggctgggggcttggcatgctggccagccagtttatcctcgagtggaatcactggattgcctttattttactggtgtttctcggcgggcgaatgatcgtcgaaggttttcgcggcgacagcgacgaggcgtgcgaggcgcctcaccgacatggtttctggcttctggtcaccaccgccttcgccaccagccttgacgcgatggccgtcggcgtcggtctggccttcctgcaggtcagcattgtgaccaccgcgctggcgatcggctgcgccacctttatcatgtcgacgctggggatgatggtcggtcgctttatcggcccgctgcttggcaaacgagccgaaattctcggcggtatcgtgctgattggcatcggcagcgaaatcctctggagccatttcgccggttaa

SEQ ID NO: 211464 - DNA, 795 bp, Klebsiella pneumoniae
atgtcatacagttgccccctttgtcacgcgccgctcagccgtagcgacaaccactattcctgcccgcagcggcaccagttcgatctggcgaaagaggggtacgtcaatctgctaccggtgcagttcaagcggtcgcgcgatcccggcgatagcgccgaaatgatgcaggcccggcgggcgttcctcgacgccggacattatcagccgctacgggatgctatcgctgagcggctgcgacattacgcccctacggatttactggatatcggctgtggcgaggggtattacacccacgcgtttgccgccatcgccagccgcagctgggggctggacgtgtcgaagccggcgatccgcgcggcggcaaaacgctacccgcaggtgaatttttgcgtggcctccagccagcgcctgccattttccgacgctagcttcgacgcggtagtgcgcatttacgcgccctgcaacgccgaagagctggcgcgggtggtgcgtcccggtggttgggtgatcaccgccacgccgggtccccgtcacctactggagctgaaagggctgatttacgatgaagttcgcctgcatgagctgaagacggaagcgatgccggggttccgcctggaggctcagcagcagctggcttatccgatgatcctgacgggaagtgaagcgcaggccctgctgcagatgacgccgttcgcatggcgggctaaagccgaagtgcacgccgcgctgcgtcagcagccgacctttggttgccagaccgattttatgatccactgctggcagcgcgaagcgtaa

SEQ ID NO: 211465 - DNA, 1746 bp, Klebsiella pneumoniae
gtgctaaagaaaaaaacgaagtccgccgccagtttcaccccgattcgcttcgggttactgtgtgtggccattctcggttgtctggggctgctgctggtccgcgtgggctggctacaaattatctcccccgataacctggtaaaacaagaagatatgcgctccctgcgcgaagaacccgtagcggttgagcgggggatgatcagcgaccgggaaggacggccgctggcggtgagcgttccggtcagtgctatctggatcgacccgcagaccactatggagaagggcggtgtgggctatgggccccgctggcaggcgatggccgaagcgctgcacctcaacctcggagagctggcccagcgggtacagagtcatccccacgctcgctttctctatctggcgcgtcagatcaatcccgagcaggctgagtggattgataaactgcatctgccgggcgtctacctgcgcgatgaatcgcgacggttctacccggcgggccacgtggctgccaatctgctgggctttaccaatgttgataatcagggcatcgaaggggtggagaaaagctttaacgcccagttgaccggtaaacccgggcgacgtctggtgcgtaaagataaacatggcaatgtcattgagaacattaccgaagtgccgccggttccggcgcataatctgcagctgagtattgatgaacgcctgcagacggtgacggaagacgccctcgacaacgccgtccgctggaacaaagcagagtccggggcggcggtattgatcaaaattgataccggcgagatcctggcgatggccagctatccggacttcaatccgaacaatcgcgatagcgcgacgctggatgattttcgcaaccgggccatcagcgacaccttcgagcccgggtcgacggtcaaaccgctggtgatcatgactgcgctacagcaggggattgtccagccagacagcgtggtggatacccatccgttcgtcctcgatggccatcgtattcgcgatgtgggctattatccggagctgagcctgaccgggatcctgcagaaatccagcgataccggtgtgtcccacctctcgctcgccatgccggtgcagcatctgatcgatacctataaagctttcggctttggcgaaccgacggggctggggttgaccggcgaaagcgccgggctgatgccgcatcgccgctactgggggcaactggatcgcgccaccttcgccttcggctatggtttgatggtcaccccgctccagctcgcccacgtctacgccaccatcggcggcttcggcattgcgcgaccactgtcgattacccgcatcgatccgccggtgatgggcacgcgggtgatgccggagagtattgtgcatagcgtggaacatatgatggagagcgtggcgctcccgggcgggggcggtaccaaagcggcggtacgcgactaccgggtggcggtaaaaaccggcacggcgaagaaaatcggcccggacggcaaatatatcgataagtatgtggcctataccgccggcgtggcgcccgccagtcgaccacagttcgcgctggtggtggtgatgaacgatccgagcaatggttcctattacggcggcgctgtgtccgcgccggtcttcagccagatcatgggcgatgtcctgcggctggagaacgtcatgccggacggcatgccgcaaggggcggagaatctgatcgtaatgcacgatagccacccacaggggccggcgctgtaa

SEQ ID NO: 211466 - DNA, 210 bp, Klebsiella pneumoniae; identical to SEQ ID NO: 136705

SEQ ID NO: 211467 - DNA, 291 bp, Klebsiella pneumoniae
atgagtgagttactaaatcctgggattttaaatctggcatcgctggctgtgtccgtggcgctgctgcttgttggtctgttgttatggttcttcgtcaaccgcgccagttcgcgggcgaatgagcagatagagctgctgcaagcgctgctggatcagcaaaagcggcagaatgcgctgttacgtcgcctgtgcgaagctaatgcgccagagaaagaggatgtggctgagccgaccgtcgccggcaaggcgaaaggggaggatgagtttatccgcctggtagctgaacgttaa

SEQ ID NO: 211468 - DNA, 240 bp, Klebsiella pneumoniae
atgcgattaatcattcgtactattatcttggtggctatcttatggattggcgtattaatgagcggttatggggtgttattccacagtgaggaaaacgtcggcggtctgggtcttaagtgccaatacctcaccgcccgcggagtcagcaccgcactttatgttcattccgacagcggagtgatcggcgtcagcagttgccctctgctgcgtaaaagcacaaccgtggttgataacggctaa

SEQ ID NO: 211469 - DNA, 792 bp, Klebsiella pneumoniae; identical to SEQ ID NO: 136708

SEQ ID NO: 211470 - DNA, 1371 bp, Klebsiella pneumoniae
atggataaaaattcttctgatggcgtgccgttgccgcaacgctatggcgccattctgaccatcgtgcttgggctgaccatggccgtgctcgacggggctatcgccaacgtcgcgctgccgactatcgccagcgatctcaacgcctcaccggcggcttcaatctggatcgttaacgcctaccaaatcgccattgtcatcgctctgctgccgctctccttcctcggcgacatggtcggctatcggcgtatctataagataggcctggtggtgtttatctttacctcgctggcctgcgcgctgtcgcgtagcctcgaaatgctaaccttcgcccgcgtcgcgcagggattgggcggcgccgcgctgatgagcgtcaacaccgcgctgatccgtctgatttatccgcagcgctttcttggtcgcggcatgggcattaactcctttgtcgttgccgtctcttcggcggccggcccgactatcgccgcagcgatcctctccctcgcctcatggcaatggctgtttttaattaacgtgcctctcggcatcgtcgcctttgttctggccatgcgctttctgccgcccaacagcgcgcgcagcaaaatcatccgcttcgatctgccgagcgccattatgaacgcccttaccttcgggctgctgatcaccgccctgagcggtttcgcccaggggcagtccactcagctggtgctggcggaggtcgccgctatgctggtggtggggttcttcttcgttcgccgccagctcacgatgcccgtccccctgctgccggtcgacctgctgcgtatcccactcttctctctctctatctgcacttccatctgctccttctgcgcgcagatgctggcgatggtctccctgcccttttttctgcagtcgatgatggggcgcagcgaagtggagaccggtctgctgctaacgccgtggccgttagcgaccatggtgatggcgccgctggccggctatttgatcgagaaatgtcatgccgggctgctgggggctatcggcctgctgattatggcctgcggcctgttcggcctggcgctgctgccctcgtcgccctccgatctggatatcatctggcgcatggcgctgtgcggcgccggcttcgggctgtttcagtcgccgaacaaccataccatcgtcgcctcggctccgagccatcgtagcggcggcgccagcggcatgctgggcaccgctcgcctgctcggacagagcaccggcgcggcgctggtggcgctgctattcaatttgctcggtaacaacggcacccacaccgccctgctgctggccggcaccctggctatcgtcgccgcgctaattagcggtctgcgggtcactcagccgcgcgcagcctga

SEQ ID NO: 211471 - DNA, 885 bp, Klebsiella pneumoniae
atgatgcgaatcgcgcttttcctgctgacgaacctggcagtgatggtcgtgttcgggctggtgttaagcctcacggggatccaatccagcagcatgaccggtcttctgattatggccctgctgttcggcttcggtggttctatcgtttcgctgatgatgtcgaagtggatggcgctgaagtcagtgggtggggaagtgatcgagcagccgcgcaacgaaacggaacgctggctgatgaataccgttgcgcagcaggcgcagcaggtaggtattgccatgccgcaggtagctatctatcacgcgcctgacattaacgccttcgccaccggcgcgcgtcgtgacgcctcgctggtcgccgtcagcaccgggctgttgcaaaacatgagccgtgatgaagcggaagcggtcattgcccatgaaatcagccacatcgccaatggcgatatggttaccatgaccctgatccagggggtggtgaacaccttcgttatctttatctcccgcgttatcgcgcagattgcggccggtttcctcggcggcaaccgggaagatgaaggggagagcagcaatggcaacccgctgatctacttcgcggtcgccacggtgcttgagctggtgttcggtattctggccagcataatcaccatgtggttctcgcgttaccgtgagttccatgctgacgccggctcggcgcgtctggtaggccgcgagaagatgattgcagccctgcagcgtctgaaaaccagctatgagccgcaggaagccagcagcatgatggcgttctgcattaacggtaaagcgaaatccatgagcgaactgtttatgactcacccgccgctggataagcgtattgaagccctgcgtagcggtgaatatctgaaataa

SEQ ID NO: 211472 - DNA, 2049 bp, Klebsiella pneumoniae
atgaacacattttttaaaatcaccgcgcttgcgggcctgctggcaatagcaggccatgcattcgctgttgatgacataacccgcgcagatcaaatccccgtgctgaaagaagagccgcagcacgcgacggtaagcgagcgcgtgacgtcgcgctttacccgctctcattaccgtcagtttgatctcgacaacgccttctcggcaaagatttttgaccgttacctgaacctgctggactacagccacaatgtgctgctggccagcgatgtggcgaagtttgcggctaaaaaaaaccaaattggcgatgagctgcgcagcgggaaactggacgtcttttacgacctctacaacctggggcagcagcgccgcttcgagcgctatcagtatgcgctgaaggtgcttgaacgtccgatggactttaccggcaatgataatttcaaccttgaccgctccaaagcgccgtggccaaaagacgaggccgagctgaacaagctatgggacgctaaggttaagtttgaccagttaagcctgaagctggcgggtaaagacgataaagagatccgcgacaccttaacccgtcgctataagtttgctatccgtcgcctggcgcaaaccaacagcgaagatgtcttctcgctggcgatgaccgccttcgcccgcgaaatcgatccgcacacaaattatctgtcgccgcgtaataccgagcagttcaacaccgaaatgagcctctcactcgaggggatcggcgccgtgctgcagatggatgatgactataccgtcattaattcgctggtggcgggcggtccagccgcgaaaagcaaagcgatcagcgtcggcgatcgcatcgttggcgttggccagaccgggaagtcgatggttgatgtcatcggctggcgtctggatgacgtcgtggcgctgattaaagggccgaagggcagcaaggttcgtcttgaaatcctgccggccggtaaaggagccaagacgcgtattgtaacgctgacccgcgagcgcattcgtctggaagaccgtgcggtgaagatgtcggtgaaaaccgtcgggaaagaaaaagtcggcgtgctggatattccaggcttttacgttggcctgaccgatgacgtgaaagtgcagctgcagaagctggaaaaacagaacgtcagcagcatcatcattgacctgcgcagcaacggcggcggagcgctgacagaggcggtatcgctctcgggtctgtttattccgtccggtccggtggtgcaggtgcgggataataatggcaaagtgcgcgaagacagcgacaacgatggcgtggtttattacaaagggccgctggtggtgctggttgaccgctttagcgcctcggcgtctgagatcttcgccgcagcgatgcaggactatggccgcgcgctgatcgttggcgaaccgaccttcggtaaagggacggtacagcagtatcgctcgttgaatcgtatttacgatcaaatgctgcgtccggagtggccggcgttgggttccgtccagtacaccatccagaagttctatcgtattaatggcggcagtacgcagcgcaaaggcgtgacgccggatatcatgatgccaaccggcaatgaagatcgcgaaaccggcgagcagtatgaagacaacgcgctgccgtgggatagcatcaacgcggccacctatgtgaagtccggggatctgaccccgtttggaccggagctgctcaagcgccacgacgagcgtattgcgcaggatcctgaattccagtacatcatgaaggatattgcccgttataacgcgatgaaggacaaacgtaacatcgtctctctgaactacgcccagcgtgagaaagagaacgaagaagatgatgcgattcgtctggcgcggattaacgatcgcctgaaacgcgaaggcaagccgccgttgaaaaaactggacgatctgccgaaggattaccaggagccggatccatatcttgatgaaacggtccatatcgcggtagacctggcgcatctggaaaaagcgcgcccggcggtggaaccgccggccagcaaataa

SEQ ID NO: 211473 - DNA, 678 bp, Klebsiella pneumoniae
atggaaaatcaacctaagttgaatagcagtaaagaagttatcgcctttctggccgaacgtttcccgcagtgctttagcgctgaaggtgaagcgcgccccctgaaaatcggaatttttcaggatctcgttgagcgagtgggtggtgagatgaatctcagcaagacccagcttcgcgctgcattacgtctctacacgtccagctggcgttatctgtacggcgtaaaagccggcgctattcgcgttgacctggatggcaatccgtgcggcgaactggaagagcagcacattgcccatgcgcgtcagcagctggaagaagcgaaagctcgcgttcaggcgcagcgcgcagcccagcaggcgaaaaaacgcgaagccgctgcggccgcaggccagcaggatgaaggcgttcgccgcgagcgtaaaccgcgtcctcagcagccgcgtcgtaaagaaggcgctgaacagcgtaaaccgcgtcctgttgcggccaaagccccgcgtgaagagcgtcttactccggtatcggatgtttccgttctgaccgtcggccaggcgctgaaggtaaaagcaggcaataacgccatggacgccaccgttctggaaatcaccaaagatggcgttcgtgtacagctgacttctggtatgtcaatgattgtacgcgcagaacacctggtgttctga

SEQ ID NO: 211474 - DNA, 555 bp, Klebsiella pneumoniae; identical to SEQ ID NO: 136714

SEQ ID NO: 211475 - DNA, 1284 bp, Klebsiella pneumoniae
atgccgataaaaacacccaccctcaaacctgcgaaaaagatggtcgtgcataccgtcagcacgccgcttccctatgcgcattatcagcgctgtacgcagtgtgacatgctcttccgcttaccggtgctcaaacgcaaccaaagcgcctggtgtccgcgctgtaacgcgaaggtgcgcgatggtcgcgactggtcgctgacccgcctgggcagcatggccctcgcgatgctattgctcatgcctttcgcctggtctgaacctctgctgcgcctgcatctgttgggcgtacgcatcgacgccaacgtcctgcaggggatctggcagatgaccgcgcagggcgatccgattaccgccgccatggtactgttttgcgcggtggtcgccccggtgctgctggtggtctccatcagctatctctggctgggcaatgtgctggggatgaacctgcggccggtgctgctgatgctcggcaagcttaaagagtgggtgatgctggatatctatctggtgggcatcggcgtcgcctccatcaaggtgcaggattacgccttcctgcagccgggcatcggtctggtggcgtttatctccctgacgttgttgagcatcctgacgcttattcatatgaacgtcgaagagctatgggagcgtttctatcccgagcgtccggcgacccgcgccgataataatctgcaggtgtgcaccggctgccattacaccggctatcgcgacgcgcgcggccgctgccgacgctgccacacgccgctgcatcatcgccgaccgcagagcctgcagcgcagctgggcggcgctgattgcctcgctggttttcctctttccggccaacctgttgccaatctccatcatctacgtcaacggcgcgcgccaggacgacacgatcctctcggggatcatctccctggccagcagcaatatcgccattgccggggtcgtgtttatcgccagtattttggtgccattcaccaaagttatagtgttatttaccctgctgctcagcatacaattcaagtgcgagcagggattgcgcacccgcatcctgctgctgcggctaatcacctggattggccgttggtcgatgctggatctgtttgttatctcactcaccatgtcgctaataaatcgcgatcagctcctcgccttcaccatggggccggctgcggtttactttggcggcgcggtaattttaactattcttgcagttgaatggctggacagccgcttactttgggacgcacatgagtcaggaaacgcccgcttcgcagactga

SEQ ID NO: 211476 - DNA, 2634 bp, Klebsiella pneumoniae
atgagtcaggaaacgcccgcttcgcagactgaagccagaataaaaaccaaacgccgtatttcgccattctggctgctgccggtcatcgcgttgctgattgccgcctggctaatctggaccagctttgacgaccgcggatcgacgattacgattgatttccagtccgcgaacggcatcgtgccgggacggacgccgatccgctatcagggggttgaagtcggcaccgtccaggatattagcctcagtaaagatctgagtaagattgaggtttcggccagcatcaaacgcgatatgaaagatgcgctgcgcaaagagacccagttctggctggtcacgccgaaagcctctctggccggcgtatcgggcctcgatgcgctggtgggcgggaactacatcggcatgatgccgggcaagggtgaacccgaagatcactttgtcgccctcgacacccaacctaaataccgcatcaacaacggcgagctaatgatccacctgcaggcgccggatcttggctctctgaacagcggctcgctggtctacttccggaaaatcccggtcgggcgggtgtatgactattccctgaatgccaataatcagggggtgaccatcgatgtgctaattgagcgccggtttaccaatctggtgaaaaaaggcagccgcttctggaacgtctcaggcgtcaaggccgacgtcggcctgagcggggccaaagtgcaactggagaacctgtccgcgctggtgaacggcgccatcgcctttgactcccccgccgattcgcatgtcgcctcgcaaaacgatgaatatcacctgtatgaagatctggcgcatagccagcgcggcgtggtagtgaccctcgatctgcctgatggcgatggactgaaagcgggctcgacgccgctcatgtatcaggggctggaggtgggccagttaagcaaactgaatctaaaccccggcggcaaagttactggcgagatgaccgtcgacccgagcgtggtgacgctgctgcgggagaaaacgctgattcagatgaagaagccgaagctctccctcgataaccccagcattagcaccctgctcaccggcaatacctttgagctggtgcccggcgaaggcgagccacgcaatcacttctcggtaatgccggcggataaagcgctgctggatgagcccaacgtcgccaccgttaccctctcggcgccggagagctacggcatcgacggcggtcagccgctggtgctgcacggagtaaaagtcggccaggtgctggagcgtaaactgacggccaaaggggtaacctttcaggttgccattgaccctgaataccgcgatctaattcacggcgacagcaaatttgtggttaacagtcgtctggacgtcaaagtggggctcgacggcgtgcaggtgctgggcgccagcgccagcgaatgggtgaacggcgggatcagggtgatccccggcgaaaaaggcaaaatgcaaagcagctatccgctgtacgctaaccttgaaaaggcgcaggaaaatagcctgagcgaagtgccgaccactaccctgagcctgtctgctgagacgctgcctgacgttcaggccggctcggtggtgctgtatcgtaaattcgccgtcggcgagatcatcgccgtcaaaccgcgcaaggatgcattcgatatcgatctgcatatcaagccggagtaccgctacctgctgaccaacaacagcgtcttctgggcggaaggcggtgcgaaggtcaagcttgacggtaacggactcaccgtgcaggcctcgccgctggcgcgcgcgatcaaaggggcgatcagtttcgataacctcaatggcagcagcgccggagcacggctgaataacaaacgtatcctttatgcatctgaaacggcggcgcgcgccgtgggcggccaaatcaccctgcacgcgtacgacgccgggaagatggcggccgggatgccgattcgttatctcggcatcgacatcggtcaaatccagtcgctggagctaatcaccgccaaaaacgaagtgcaggcgaaagcggtgctctatccggaatacgtcggcaccttcgcccgcgccgggacccgcttctcggtgatcactccgcaaatctccgccgcgggcgtggaacatctcgacaccctgttccaggcctacatcaacgttgagcccggccgcggcccggcgcgacgcgattttgagatccaggatacgacgatcagcgattcgcgttatatcgacggcctgaacatcgtggtggaagcgccggaggcggggtcgcttggcatcggtacgccggtcctgttccgcggactggaagtcgggacggttaccggactgtcgctggggtcgatgtctgaccgggtgatggttaagctgcgcatcagtaagcgctaccagtacctggtacgtaataactcggtgttctggctggcctcgggttacagcctcgacttcggcctgattggcggggtggtgaaaaccggtaccttcaatcagtttatccgcggcgggatcgcctttgccacgccgccgggcacgccgctggcgccgaaggcccaggatggcaagcacttcctgctgcaggagagcgagccgaaagagtggcgggagtggggcaccgctctgccgcagtaa

SEQ ID NO: 211477 - DNA, 1389 bp, Klebsiella pneumoniae
atgcgcgcggcgatgccagcgcatctctctttcgacgactttatcgccgcctgtcagcgcccgctacgccgcagtattcgcgtcaatacgctgaagattagcgtcgatgatttcctctctctggttgccccctacggctggcagctcgcgccggtgccctggtgcgcagagggattctggatcgagcgagaggatgacgacgcgctgccgctgggcagtaccgccgaacatctcagcgggctgttctatattcaggaagccagttcgatgctgccggtcgccgccctgttcgccgataaccggcagcccgaacgggtgatggacgttgccgccgccccgggatcgaaaaccacccaaattgcagcccgaatgggcaacgcgggcggcattctcgccaatgaattctccgccagccgggtgaaggtgctgcatgccaacatcagccgctgcggcatcagcaacgtcgctctgacccacttcgacggccgggtttttggcgcggccttgcccgaaaccttcgatgccatcctgcttgacgccccctgctccggcgaaggggttgtacgtaaagacgccgacgcgctgaaaaactggtcgccggagagcaacctcgacatcgccgccactcagcgcgagcttatcgacagcgccttccatgctctgcgccctggcgggacgctggtgtattccacctgcaccctgaatcgtgaagaaaatcaatcggtcattgagtggctgctgtcccgctatccgcaggcggtggagatcctgccgctgggagagttgtttcccggcgcagccgacgccttaaccgcggaaggttttctgcacgtttttccgcaaatttacgattgcgaaggcttctttgtcgcgaggttgcgcaaaactgcggcgatcgatccgctcccggcgccaggctataaggtcggtaaattcccgtttacgccgctgaaggaccgggaggccgccgcggtaactgccgccgccagggctgttggcctggagtgggacgcaggccatacgctgtggcagcgggataaagagctgtggctgtttccgctggctttggagcccctgttcggcaaggtgcgcttttctcgcatcggcgtgcgcctggcggagctgcacaataaggggtaccgctggcagcatgaggcggttatcgcctttgccgcgccgcagcgcgccttcgagctgtcgcaggaggaagcggaggaatggtatcgcgggcgcgacgtctatccgcaaaccgcgcctgggcaggatgaaaccattgtgaccttccagggcgtcccgctgggcctggcgaagcgcgtcggctcccgactgaagaacagctatccgcgcgaactggtgcgcgatggaaaactttttgccggcaaggtgtga

SEQ ID NO: 211478 - DNA, 240 bp, Klebsiella pneumoniae; identical to SEQ ID NO: 136718

SEQ ID NO: 211479 - DNA, 192 bp, Klebsiella pneumoniae; identical to SEQ ID NO: 136719

SEQ ID NO: 211480 - DNA, 654 bp, Klebsiella pneumoniae
atgtatcaacgtattaacggcagcgactggcgtaatatctggctgatgggcgatctgcatggctgctttgcgctgctgatgaatcgcctgcgtcagctgcgttttgatccctgggccgatctgctgatctcggtgggcgatctgatcgatcgcgggccgcagagcgccgattgtcttggcctgttgcgctgtcgctggttcagggccgttcgggggaatcatgagcagatggcgctggaggcgctggagagcggagatatgcggctctggcagatgaacgatggcgactggtacgtcaagggcgatgcgcggcagcgggccgacgtcgatcggctgctggcgcactgtcggcggctaccgttgattattgaagtgcaatgcgagaaagcgcggcatgtgatcgcccacgccgattacccggcgccggtctatcgctggcagcagccggtggatccccaacgggtactatggagccgccatcgtctgagtgaacacctggcggggcgccatggcgctattggcggcgcagaccatttctggtttggccatacgccgcttcaggcgcgttatgaccacgataatcaacactatattgatacgggcgctgtgtttggtgggacgctgacgctggtggcgctgcagtcggcaggctaa

SEQ ID NO: 211481 - DNA, 1011 bp, Klebsiella pneumoniae
ttgtcagtggctcgctttaaaatagggggaaatcacaacgaggtgtttatcgtgacagacaatagcctgcattcatccggcgtgctagcgccgcgctcgcatcttattgccgatctggtgatgggcagattgacacctgcccccatctggcggcaaaaaaattaccgctttaagtttttgctgcgcacggccctattttataacgccaccagagcgatgctggaagcgctcagcgctcgggatgattttaatcagctgctggccgcgcaggctacgctgccgggcaaagtacaccgtcaatatctgacccgcgatctcaacgcctggcagcgggcggtggcggtaatcaaccattatcgctatatcgacaccctacgcggatcgcggctggcgcacgctatgactgcggtgtctgaggtcccgctgctgacgttaaacggaaaagaggaccgccggtttactctttatgcctcctcggcaggcaaagccgaacgtgagggtgaaaccactctgtggctgcgcgacagcgaccacaccctgctggccagcgccaccttcagcgtaacccgtgatcacgatgcctggcagctggttatcggcggtctgcaggggccacgacgtcacgtttctcatgaggtgattaagcaggcgactcgcgcctgctacggcctgtttccgaagcgcctgctgctggagtttatctggcagctggccgcgcgcagccaaatcgcggctatttacggcgtcagcgataacggtcacgtgttccgcgccctgcgctatcgcctgagcaaaggccgccatttccacgccagctacgacgagttctggcagtctatcgacggccagccggaaagcccctggcgctggcggctaccgctatgtctggaaagaaaatcgctggagagtatcgccagtaaaaaacgggctgaatatcggcggcgattccagctgctggatcagctgacggagcaggtggcaatattgacgcagcggcatgccggtgactaa

SEQ ID NO: 211482 - DNA, 192 bp, Klebsiella pneumoniae
atgttggcccgccagttaacctgcacgccgggcctgtttaggtgcaggttttttcttttctccgccctcgtttacggttccaccgttgccacctccccttccacaggatgcgatttatgtgtaaatgaattgtgtatgctaaaaacggtgtgctataacgggacatccagaggccagcgggtgtttgactga

SEQ ID NO: 211483 - DNA, 339 bp, Klebsiella pneumoniae
atgaaaaaaattgttctgaccatgttgttactggcaagctccggggctgctctggcagcgccacaaattatcaccgtgagccgttttgaggtggggaaggagagctgggcgttcaaccgggaagaggttatgttgacctgtcgaccgggtaacgcgctttacgccatcaacccgagcacgctggttcagtatccgctcaatgaggtggctgagcagcaggtcaaagccggcaaaaccaccgcgcagccgatctcagtgatccagatcgacgatccgcagcatccgggacaaaaaatgagcctcgcgccctttatcgagcgagcgcagaagctctgctaa

SEQ ID NO: 211484 - DNA, 870 bp, Klebsiella pneumoniae
atgctgaccgggctctatattaccctgcgctttgggcactttatctccctgatgctggcttttggctgcgtgctgtatggcgcctggtgggcgccggtaccgctgagacgcgtgctgatgctgcgcttttatccactactgcgcccgctgctgctgatcggcgcgatctctacgctggcgctgtatctcctgcagggaggaataatgggcgagggctggacggatgtctggcgacccgccgtctggcaggcggtggcagggacccgctttggtggagtgtggatctggcagatcctactgacgtggatcgcacttgcggtagtgtggatccgtccccgtcacggcgcccgccagctggtggccctgctggcggcacagctgctgctttccgccggggtagggcacgccgctatgcacgatggtctcaccggcgtgctgcagcggacaaaccacgctgtgcatctcttctgcgtcgccagctggtttggcggtctgttgccctttatctattgcctgcgcctggcgcaggggcgctggcggccggccgcggtctataccatggcgcgcttttcacgttacgggcatctggccgtcgccggcacgattgccagcggagcgctcaatgcgctgttgatccagggaggattgattggcgcatcgccgtggggacgcatgttgttgatcaaatgtgcgctggtcgccgggatggtggtaattgcgttagtgaacaggtatgttctggtaccgcgcatgtcggcaagcggttcgcgggcggaaagcctgatcctgcgaaccacgcaggctgaaatagggctgggcgcgctggcgctgctggccgtcagtctgtttgccacctgggaaccttattga

SEQ ID NO: 211485 - DNA, 375 bp, Klebsiella pneumoniae
atgcgacttcttgctggacgcgcgttgcgcctctccgttgcgcttgccgggatgttaaccgcggcgggcgccttcgcccacgctcacctgcagcagcagatcccgaccgccggggcgcagctttcagcttccccacagacgttgacgctcagtttttccgaaggtattgaacccgcattcagcggcgtgaccgtcaccggtccgcagcagcatgcggtggctaccggaaaactgacccgcagcgccgataatcccgccgaggtcacgttacctttggcggaagccttgccgccgggagagtacaccgtggcatggcatgtggtctcggtggatggtcataaaaccaaagggcaatatacctttagcgtgaagtaa

SEQ ID NO: 211486 - DNA, 231 bp, Klebsiella pneumoniae
atggaaagaaatctggccaaaatttcgcaagatgagatggataaagtcaatgtcgatctcgccgccgccggcgttgcttttaaggaacggtacaatatgccggtggtcgctgatttagtcgagcgtgaacagcctgcacatctgcgcgactggttccgtgaacgactgatcgcccatcggttggcctccgtctccctttcgcggctaccgtgggagccgaaacagaaataa

SEQ ID NO: 211487 - DNA, 660 bp, Klebsiella pneumoniae
atgctgcgcgtcattgataccgaaacctgcggcctgcaggggggcatcgttgaaatcgcctcggtcgatatagtcgacgggcaaattaccaatcccatgagccatctggtgcgtcccgatcggcccatcagcccgcaggcaatggctatccaccggatcacggaagagatggtcgccgataagccgtggattgaggagattattccgcactatcatggcagcccgtggtacgtcgcgcataacgccagcttcgatcgccgggtgttgccggagatgcacggcgagtggatctgtacgatgaagctggcccgacgcctgtggccgggaatcaaatacagcaatatggggttatataaatcacgtaagctgaacgtgactacgccgccgggactgcatcaccaccgggcgctgtatgactgctatatcaccgccgcgctgctgctggatatcatcaatgtttccggctggacccctgacgaaatggccgatatcaccggtcggccggcgctgctgactacttttaccttcggcaaataccggggtaaggccgtcgccgagattgctgaaaacgatccaggctatctgcgctggttattcaacaatctcgaccgcatgagccccgaactgcgcctgacgctcaggcattacctcggggaatag

SEQ ID NO: 211488 - DNA, 2028 bp, Klebsiella pneumoniae
atgaccttgcatggcgatacacgcatcgataattattactggctgcgcgacgatgagcgcgcgcgacctgacgtgctggagtatctgcacgcggagaacgcttacggcaagcaagtgatggattcgcagctcagcctgcaggagcgtctgctgaaggagattatcgaccgcattccgcagcgggaagtctctgccccctacagtaaaaacggctttcgctaccgtcaggtgtatgagccgggctgcgaatacgctatctaccagcggcagtcggtgctgaaagaagagtgggatgagtgggagatcctgctcgatgccaaccagcgggcggcgaagagcgagttctacaccctgggcggactgggcattgcgcccaacaaccagctaatggcggtggcggaagattacctttcccgccgccagtacggcctgcgcttttgcgacctcagcaacggcgagtggtacccggaaatcctcgaaaatgtcacctccggctttgcctggagcaacgattcacgctttgtttggtatgtgcgtaaacatcccaccacgctgctcccttatcaggtctggcgccacaccgtcgggacaccggcgcagagcgacgcgctggtctacgaggaaaaagatgagaccttctacgtcagcgtgcataaaaccacctcccagcagttcgtggtaatttatctctccagcgccaccaccagcgaagtgctgctgctcaacgccgaactgccagacgccgagccggtctgctttctgccacggcgtaaagatcatgaatacagtcttgatcactatcagcacgctttctatcttcgttccaaccgggaggggaagaatttcggcctctaccgtaccgtgctgcgtgatgaagaacagtggaccacgctgatcccgccgcgtcacgacgtgatgctcgaaggatttaccctgtttaccgactggctggttgtggaagagcgtcagcgtggcctgaccagtctgcggcaaattaaccgcaagacccgggaggtggtggggatcgcttttgacgatccggcctatgtcacctggcttgcctataatccggagcccgaaacgtcgcgactgcgctacggctattcctccatgactacgccggatacgctgtttgaactggatatggataccggcgaacgaagagtgatcaaacagcaggaggtaaaggggctggatacgagctgctaccagagcgaacacctgtgggtgaccgcccgcgatggcgtcgaagtcccggtctctctggtctaccatcgcgaacattttcgcaaagggagcaacccgctgctggtctatggctatggctcatatggcgagagtatcgatgccgatttcagcgccagccggctgagcctgctcaaccgcggctttgtctacgccatcgcccacgtccgcggcggcggcgagctgggtcagcaatggtatgaagacggtaaattcctgtgtaagaaaaataccttcaacgactatctggacgtctgtgacgcgctgcttgcccaggggtacggcgatccgcggctctgctacggcatggggggcagcgccggcggaatgctgatgggcgtggccgtgaatgaacggccagagctgttccatggcgtgatagcccaggtgccgttcgtcgatgtggtgaccaccatgctggatgaaactattccgctgaccaccggtgaatttgaagagtggggaaatccgcaggatgaaacctattatcactatatgaaaagctacagtccctatgacggcgtgagggcgcaggcgtatccccacatgctggtgactaccggtctgcatgattcccaggtgcaatactgggagccggctaaatgggtggcgaaactgcgggaactaaaaaccgacgataacctgctgctgctctgcaccgatatggattccggacatggcggaaaatccgggcgcttcaaaagctatgaaggggtggcgctggagtacgcctttttcatcgccctggcgcaggggacactgccgggaaaagcggcagtgtag

SEQ ID NO: 211489 - DNA, 660 bp, Klebsiella pneumoniae
atggctaactggctacatcaactgcagtcgctgctcgggcagcagggtgcgtcaccgtccggcgagtcgtcaaaagggagcggcctgctgcccggcgccatcggtgggctggccggattgctggtggccagcaaatcgtcacgcaaattgttggcgaaatatggcactagcgcgctgctggcaggcggcggggcggtggcgggcacggtgttatggaacaagtatcagcagaaaatgcgcgcgcagaatacgtccgcccaggcgcctgagacggcagcggcgccgacggatgtcgatccgcgcagcgtgcggctgatcacggccctggtatttgccgcgaaaagcgacggtcatattgatgaccacgagcgggcgaatattgaaactcagctgcgggcggccaatattgacgttcaggcccgggtgctaattgaccaggcgctggcccagccgctggatccgcagcgtctcgccgagggcatcattgacccgcaggaggcgctggagatctactacgtcagctgcgcggtgattgatatcgaccattttatggagcgtagctaccttaatgcgctgggagacgccctggcgctgccgaaagatgtccgggccgatatagaacaggatatccagtcacaaaaacaagcgctaagcgtctaa

SEQ ID NO: 211490 - DNA, 348 bp, Klebsiella pneumoniae
atggcggttgaaattaaatatgtggtgatccgcgaaggtgaggaaaaaatgtcttttgccagcaaaaaagaggccgacgcttacgacaaaatgctcgatctggcagaggtgctgaatgactggctggtggcatcgccgttggagatggatgacgtccagcgcgataccatggcgatgtggctggcggagcgtaaagaagcgctgcagcatatcctgcgagttggccgactgccggagcaagagacgcccgcacaggacgcctccgcgccgtcggctaccgccgagacttctccggcgggtgatgacgccgtgccggcggcaaaagcgcgcaaagccagggcagcctga

SEQ ID NO: 211491 - DNA, 1179 bp, Klebsiella pneumoniae
atgactgtattaggcaccgcgctgcgcccggcagccaccaaagttatgctgttaggttccggcgagttgggtaaagaagtcgctattgaatgtcagcgtctgggcattgaaaccatcgccgtagaccgctaccccgatgccccggcgatgcaggtcgcccaccgcgcccacgtcatcaatatgctgcacggcgagagcctgcgcgccctgattgaacaggaaaaacctgattatatcgtgccggagatcgaagctatcgctaccgacaccctggtcgaactggaacaggccgggcagaaagtggtccccacggcgcgggcggcaaagctcaccatgaaccgcgaaggcattcgccgcctggcggcggaagagctgcagcttcccacttcccgctatcgttttgccgacagcgaagaaggcttccgcgcggcggttaccgagatcggtttgccatgcatcgttaaaccggtgatgagctcctccggcaaaggccagagctttatccgctcggctgaccagctcagcgaagcctggcgctatgcgcagcagggcggccgcgctggcgccggacgggtgatcgtcgagggggtggtgaacttcgatttcgaaatcaccctgctcaccgtcagcgctgtcgatggcgtgcatttctgcgctccggttggtcatcgtcaggaagacggcgactaccgcgagtcctggcagccgcagcagatgagcgacctggccctcgagcgtgcccagaccatcgcccgcaaggtggtgctggcgctgggaggttatggtctgtttggcgtggagctgttcgtatgcggcgacgaggtgatcttcagcgaagtctccccgcgaccacacgacaccgggatggtgacgcttatctcccaggatctctcggaattcgccctgcacgttcgcgccttcctcgggctacccgtcggcgctatccgccagtatggtccggccgcctccgcggtgatccttccgcagttgtccagccagaacgtcagctttggccagctgcagtcggccgtcggggctggcctgcagctgcgtctgttcggcaagccggagattgacggtacccgccgcctgggggtaaccctcgccgtcgccgattcggttgaggaggccgtggcgcgggctaaagccgccgccgcggcggtcatcgtcgaagggtaa

SEQ ID NO: 211492 - DNA, 642 bp, Klebsiella pneumoniae
atgaaaaactggaaaacaacagcagaagcaatcctcacctccggtccggttgtcccggttatcgtagtgaaaaagctggaacacgcggtaccgatggcgaaagcgctggtggcgggcggcgttcgcgtgctggaagttaccctgcgcaccgagtgcgccctggaggcgatccgcgcgattgccaaagaagttccggacgcgattgtcggcgcgggcacggttaccaacgttgagcagttgaaagcggtaacggaagccggcgcgcagttcgctatcagcccgggtcttaccgaatccctgctgaaagcggcgaccgaagacggcaccatcccgctgatcccggggatcagcacggtatctgagctgatgctgggtatgcagtatggcctgaaagagtttaaattcttcccggcggaagccaacggcggcgtgaaagccctgcaggcgattgcgggtccgttcggccacattcgtttctgcccgaccggcggtatctctccggccaactaccgtgactacctggcgctgaacagcgtactgtgcatcggcggttcctggctggtgccagccgacgccctcgaagccggcgactacgatcgcatcaccaccctcgcgcgagaagcggtggaaggcgcgaaataa

SEQ ID NO: 211493 - DNA, 1812 bp, Klebsiella pneumoniae
atgaattcgacaatgttacgggtaacaaatcgcattatcgaacggtcgcgtgacacccgcgcggcttacctcgcaaggattaaccaggccaaaaccgacaccgtgcatcgtgcgcaactggcctgcggcaatctggctcacggattcgcggcctgccaggctgacgacaaagcctccctgaagagcatgttgcgcaacaacattgccatcatcacctcctacaacgacatgttgtccgctcaccagccctatgaacactacccggagatcatccgcaaagcgctgcacagcgccaatgcggtcggccaggtcgccggcggcgtgccggcgatgtgcgacggcgtaacgcaggggcaggacgggatggagctttcactcctgagccgcgaggtgatcgctatgtccgccgccatcggcctgtcgcataacatgttcgacggggccctgtatctcggggtctgcgataaaattgttcccggtctgaccatggcggcgctctcatttggccatctgccgtcggtctttattccctccggtccgatggccagcggcctgccgaataaagagaaggttcgcattcgccagctgtatgcagaagggaaagttgaccgtatggcgctcctggagtccgaagccgcctcttatcacgcgccggggacctgtactttctacggaacggcgaacaccaaccagatggtggtcgaatttatgggcatgcagctgccgggctcgtcctttgtccatccggatgctccgctgcgggaagcactgaccgccgccgccgcgcgccaggtcacccgcatgaccggcaacggcaatgagtggatgccgctgggcaaaatgtttgacgaaaaagtggtggtcaacggcatcgtggcgctgctggcgaccggtggctccaccaaccacactatgcacctggtggcgatggcccgcgcggcgggaattatcattaactgggacgatttctccgacctgtcagacgtggtgccgctgctggcgcgcctctatcccaacggcccggcggatatcaaccacttccaggcggcaggcggcgttccggtactggtgcgcgagctgctgaaaggcggcctgctgcatgaggatgttcacaccgtggccggctttggcctgtcgcgctacaccctggagccatggctgaataacggcgagctggactggcgcgaaggggcgacagcgccattggacgaccaggtcatcgcgacctttgaaaaaccattctcccgccacggcggcaccaaggtgctgagcggcaacctgggacgcgcggtgatgaaaacttcggcggtcccggtggagaaccaggtgattgaagcgccggcggtggtatttgagagccagcacgacgtgttgccggcctttgaagcggggctgctggacaaagactgcgtggtggtggtccgtcatcaggggccaaaagcgaacgggatgccagaattacataaacttatgccgccacttggtgtattattggaccgccgtttcaaaatagcgctggtgaccgatggccgactctctggcgcctccggtaaagttccgtcagccattcacgtcacgcctgaagcgtatgatggcggcttgctggcgaaagtgcgcgatggcgatcttattcgcgtgaacggacagacgggggaactgacgctgctggtggatgaggccgaactggcggcgcgtcagccgcatatccctgacctcagcgcgtcgcgcgtgggaaccggtcgggagatgtttggggcgctgcgtgagaagctctctggcgcggagcagggcgcaacctgcatcactttttaa

SEQ ID NO: 211494 - DNA, 1476 bp, Klebsiella pneumoniae
atggcggtaacgcaaacggcccaggcatgcgacctggtcattttcggcgcgaagggcgacctggcgcggcgtaaattgttgccttccctgtatcagcttgaaaaggcgggccagatccacgctgacaccagaatcattggcgtcggccgtgccgactgggataaagcggcttataccaaagtcgtgcgcgaagcgctggaaaccttcatgaaggaaaaaattgatgaaggtttgtgggataccctgagcggacgcctggagttctgtaatcttgacgtcaatgacaccagcggcttcacccgcctgggtgagatgctggatcaaaagaaccgtgtcaccatcaactatttcgctatgccgccgagcacctttggcgcgatctgtaaagggctgggcgaagcgaagcttaatgccaagcctgcgcgcgtggtcatggaaaaaccgctcggcacctcgctggaaacctcccgtgaaatcaacgaccaggtcggcgagttttttgaagagtgtcaggtctaccgtatcgaccactatctcggtaaagagacggtcctcaacctgctggcgctgcgcttcgccaactccctgtttgtcaataactgggactgccgcaccatcgatcacgtcgaaatcaccgtcgcggaagaggtgggtattgaagggcgctggggttacttcgaccaggccgggcagatgcgcgacatgatccagaaccacctgctgcagatcctgtgcatgattgccatgtcgccgccgtccgatctcagcgccgacagcatccgtgatgaaaaggtcaaggtgctgaaatccctgcgccgtattgaccgctccaacgtgcgcgagaaaaccgttcgcggccagtataccgccggctttgcccagggcaaaaaagtgcctggctatctcgaagaggagggggccaacaagaccagcaacaccgaaaccttcgtggcgatccgcgtcgatatcgataactggcgctgggctggcgtaccgttctatctgcgcaccggcaaacgtctgccgaccaaatgctcagaggtagtggtttacttcaaaaccccggaactgaatctgtttaaagagacctggcaggagctgccgcagaacaagctgaccattcgcctgcagccggacgaaggggtagatatccaggtactgaacaaagtgccgggcctcgatcataaacataacctgcagatcactaaactggatctgagctactccgaaaccttcaaccagacgcacctggccgatgcctatgaacgtctgctgctggagaccatgcgtggcatccaggcgctgttcgttcgccgcgacgaagtagaagaggcgtggaaatgggttgactccattaccgaagcctgggcagccgaccgcgatgcgccgaaaccgtatcaggccgggacctggggaccggttgcgtcggtggccatgatcactcgcgacggtcgttcatggaacgagttcgagtaa

SEQ ID NO: 211495 - DNA, 888 bp, Klebsiella pneumoniae
atgagcgccctgttactaatgaacatgctggaaaaaatccagtcccgactggaacaccttagcaaatctgaacgcaaagtggcggaagtgatcctcgccacccccgagcaggccattcattcgagcatcgccgccctcgcccttgaggccggcgttagcgaaccgaccgtcaatcgcttctgccgtagtctcgaaacccgcggattccctgacttcaaactgcatctggcccagagccttgcgcacggcacgctctatgttaaccggaatgtcgatgaagacgacagcgttgagtcatacacgggaaaaatattcgaatcggccatggcgagtttagatcaggtgcaccattctctcgacatgtcggcggtaaatcgcgcggtggatctgctgactcaggccaaaaaaatcgcctttttcggcctcggctcctcagcggcggtcgctcacgacgcgatgaacaaatttttccgctttaacgtgccggtcatctattccgacgacattgtcctgcaacgcatgagctgtatgaattgcgatgacgatgatgtggtggtgattatctcgcataccggaagaaccaagagcctggtggagctggcgcagctggctcgtgaaaacgatgccatggtgatcgcgctcacctccgccggtacgccgctagccagggaagccacgctcgccattacccttgatgtgccggaagataccgacatctatatgccgatggtctcccgtttggcccagttgaccgtcattgacgtgttggcgactggctttaccttgcgtcggggggcaaaattcagagataacttgaagagggtcaaggaagcgctgaaggaatcgcgttttgataaagaaccattcgtacccagtgataatcaataa

SEQ ID NO: 211496 - DNA, 1443 bp, Klebsiella pneumoniae
atgtccagaaggcttcgcagaaccaaaatcgttactaccttaggcccggcaactgaccgcgataacaacctggaaaaggttatcgccgcgggcgcaaacgtagtacgtatgaacttctctcacggcaccccggaagatcatcagctccgtgccgacaaagtgcgtgagattgcggcaaaactgggccgtcatgtggccatcctcggcgacctccagggaccaaaaattcgcgtatcgaccttcaaagaaggcaaaattttcctcaacgtcggcgataaattcctgctcgacgcaaaccttggcaaaggcgaaggcgacaaagagaaagtcgggatcgactataaaggcctgccggcggacgtcgtgccgggcgatatcttattgctcgacgatggtcgcgtgcagctgaaagtcctcgaagttcaggggatgaaagtgttcactgaagtgaccgtcggcggcccgttgtccaacaacaaagggatcaacaagctgggcggcggcctgtctgccgaagcgctgaccgacaaagataaagctgatatcgtcaccgccgctaaaatcggcgtcgattacctggccgtctctttcccgcgctgcggcgaagacctgaactacgcccgtcgcctggcgcgcgatgccggctgcgatgcgaaaatcgtcgccaaagttgagcgtgccgaagcggtttgcgatcaggatgcgatggacgacgtgatcctcgcctccgatgtggtaatggttgcccgtggcgacctcggcgtcgagatcggcgatcctgagctggtgggcatccagaaagcgctgatccgtcgtgcccgtcagctgaaccgttccgtcattaccgccacccagatgatggagtcgatgatcaccaacccgatgccgactcgcgcggaagtgatggacgtggccaacgccgtgctggatggtaccgatgcggtgatgctctccgcggagaccgccgccggtcagtatccttcggaaaccgtggccgcgatggcgcgcgtgtgtctgggcgcggaaaaaatccctagcctcaacgtctccaaacaccgtctggacgtccagttcgacaacgtggaagaagcgattgccatgtcggcgatgtatgccgccaaccacctgaaaggcattaccgccatcatcaccatgaccgaatcgggccgtaccgcgctgatgacttcgcgcattagctccggtctgccgattttcgccctctcccggcacgagcgcaccctgaacctgaccgccctctaccgcggggtgacgccggtgttcttcgatagccagaatgacggggtggccgccgcgcacgacgccgtcaatctgctgcgggacaaaggctatctggtctccggcgacctcgtggtcgtgacccagggtgacgtgatgagcaccatcggcagcaccaacaccacccgtatcctcaccgtcgagtaa

SEQ ID NO: 211497 - DNA, 975 bp, Klebsiella pneumoniae
atggaaacgaaaaaaaataatattgagtttatccctaagtttgaaaaatcctttttactgccgcgctactggggcgcctggctgggggtctttgccttcgccggtattgcgctgacgccgccatcctttcgcgatccgctcctcggcaaactcggtcgtctggtagggcgtctggcgaaaagctcgcgccgccgggcgcagattaatttgctgtactgcttcccggaaaaaagcgagtacgagcgggaagcgatcatcgacgccatgtatgcctcggcgccgcaggcgatggtgatgatggccgagctgggcctgcgcgatccgcagaaaatccttgcccgcgtcgactggcaggggaaagcgatcatcgacgagatgcagcgcaataatgagaaggtgatttttctcgttccgcatgcatggggtgtggatatcccggcgatgctgatggcctccggcgggcagaagatggcggcgatgttccataaccagggtaacccggtgttcgattacgtgtggaataccgtgcgtcgtcgttttggcgggcgtatgcacgcgcgcaacgatgggatcaaaccgtttattcagtcggtgcgtcagggctactggggctactatctgcccgatcaggatcacggcgccgaacacagcgagtttgtggatttctttgctacctacaaggccacgctgccggcgattggccgcttaatgaaagtgtgccgcgcccgcgtcgtaccgctgttcccggtctacgatagcaagacgcaccgcctgacggtgctggtgcgcccgccgatggacgatctgctggacgctgacgatacgaccatcgcccggcggatgaacgaagaagtggaagtgtttgttaagccgcacaccgagcagtatacctggatcctgaagctgctgaaaacgcgcaagccgggtgaaatcgagccctataaacgcaaagagctgttcccaaaaaagaaataa

SEQ ID NO: 211498 - DNA, 1320 bp, Klebsiella pneumoniae
gtgcaacagatagcccgcgctgtcactcaggcattcaacaatctgccacgacctcatcgcgtcatgctggggtcgcttagcgttcttaccttagcggtcgccgtctggcgaccctacatttaccacccggaatccgcccccatcgtcagaaccattgaactggaaaaaagcgagatccgttccctgctgccggaagcctccgagccgatcgaccaggccccgcaggaagaagaagccattcctcaggatgagctcgacgaaaaagccgatagcgatgccggcgggcacgaatatgtggtgtcgaccggcgatacgctcagcagcatcctgaaccagtacggtatcgatatgggcgatatcgcccagctttcctccgccgataaagagctgcgcaacctgaagattggccagcagctctcctggaccctgaccgccgacggcgatctgcagagcttgacctgggagatgtcccgccgcgagacccgcacctatacccgtgtggataacggttttaaaatgagcagcgagctgcagaaaggcgattgggtcaacagcgtgctgaagggcaccgtcggcgccagctttgtctccagcgcgcgtgatgccgggctgaccagcacggaaatcaacgcggtgatcaaggccatgcagtggcagatggatttccgtaagctgaagaaaggcgacgaattctcggtattgatgtcgcgcgaaatgctcgacggcaaacgtgagcaaagccagttactcggcgtgcgtcttcgctctgacggtaaggattactatgccatccgcgccgaagacggcaaattctacgaccgcaacgggacgggtctggcgaagggctttatgcgcttcccaacggcgcgtcagttccgcgtctcctctaactttaatccgcgtcgtctgaacccggtcaccggccgcgtcgcgccgcaccgtggcgtcgatttcgcgatgccgcagggaacgccagtgctggcggtgggcgatggtgaagtagtcgtggccaaacgcagcggcgctgccgggtattacgtcgcgatccgccacggtcgcacctataccactcgctacatgcacctgcgtaagctgttagtgaagccggggcagaaagtgaagcgcggggatcgcattgcgctgtcggggaataccggacgctctaccgggccacatctgcactacgaagtgtggatcaaccagcaggcggtcaacccgctgacggctaagctgccgcgtaccgaagggctgagcggttccgaccggaccgactatctggcacaggtcaaagaggtcgttccgcagctgcggtttgactaa

SEQ ID NO: 211499 - DNA, 945 bp, Klebsiella pneumoniae
atgttacataaaaatacgcttctttgcgctggacttggcgctgtttttttgttcgcgcaggtaccgctggccagcgccgccgtggtgacttctatgaaaccgctgggctttattgcggcggccatcgccgatggggtgaccgagacccaggtgctgctgcccgatggcgcctccgagcatgattattccctccgtccttctgatgtaaaacgcttacagaacgcagacttagtggtgtggattggtccggaaatggaagcctttatggataagtcgacgcaaagcattgcggcgaataaaaaggtgacgattgccgagctggatggggtcaaaccgctactcatcaccggggcggacgacgatgacgatcaccatggtcatggccatggcgcagcagaaaaaggtgacggcgatcaccatcacggtatttacaatatgcatctgtggttatccccagagatagcgcggctttcggcggttgcaatccacgataaattattggaacttatgccgcagagtcgagccaaactcgacagcaacctgcagcagttcgagaccgcgctggcggcgaccgacaagcaggtgagcaatgagctggcaccgctgaaagggaagggctatttcgtttttcatgacgcctacggttactttgaaaaacactacggtttgacctcgctggggcactttaccgtcaaccctgaaatacagcccggtgcgcagcgtttacacgaaatcagaacacaactggttgagcagaaagccacttgcgtttttgctgagccacagttcaggccagcggttatcgaagctgttgcccggggcacgtctgtgcgcatggggaccctggatccactggggacaggaattacgctgggtaaaacgagttacccgcaattcctcacccaactggcgaatcagtattcgagctgcctgaaaggagattaa

SEQ ID NO: 211500 - DNA, 753 bp, Klebsiella pneumoniae
atgacaaaccttgtaacgctggaaaatgtctcggtggcctttggccaacgccgcgtgttgtctgacatctcgctggctctcacgccaggcaaaatcttaaccctgctgggccccaacggcgccggcaaatcgacccttgtgcgggtggttctcgggctggtagcaccgacagagggtgttatcaagcgtgacgcacgcctgcgcatcggctatgtgccgcagaaactgcatctggacgccacgctgccgctgaccgttagccgcttcctgcgtttgcgcccgggcacccgtaaagacgacatcctgccggcgctgaagcgcgtgcaggcggggcatctgatcgatgcgccgatgcaaaagctctccggcggcgaaacgcagcgcgtactgctggcccgcgccctgctcaaccgtccgcagctgctggtgctggatgaaccgacccagggtgttgacgtcaacggccaggtggcgctctacgatcttatcaaccagctgcgccatgaactggactgcgcggtgctaatggtatcccacgatctgcatctggtgatggccaaaaccgacgaagttttgtgcctcaaccagcatatctgctgctctggcgcaccggaggtggtctccatgcacccggagtttatctccatgttcggcccgcgcggcgcggaacagctggggatataccgccaccaccataatcaccgccacgaccttcaggggcgaattgtactgcgtcggggaaacagccgctaa

SEQ ID NO: 211501 - DNA, 786 bp, Klebsiella pneumoniae
atgattgaacttctgttacctggctggcttgccgggatgatgctggcctgcgccgctggtccgctgggctcctttgtggtctggcgccgcatgtcttatttcggcgacacgctggcgcatgcgtctctgctcggcgtcgctttcggtttattgcttaacgtcaatccgttctatgcggtgatcgccgtgaccctgctgctggccggcgggctggtgtggctggaaaaacgaccgcatctggcgatcgataccctgctgggcatcatggcgcacagcgcgctgtccctggggctggtggtggtcagtctgatgtctaacgtccgcgtcgatctgatggcgtacctgttcggcgatctgctggcggttacgccgcaggacctgatcgccattgccactggcgtggtgattgtgattggcattctactctggcagtggcgaaatctgctggcgatgaccatcagtccggacctggcgtttgtcgacggcgtgaagctgcagcgggtcaagctgctgttgatgctggtcaccgccctgactatcggcgtggcgatgaagttcgtcggggcgctgatcattacttccctgctgattatacctgccgccaccgcccgccgttttgcccgtacgccggagcagatggccgccgtggcggtgggcgtgggcatgctggccgttaccggcgggttaaccttctcggctttctatgataccccggccgggccgtcggtggtgctctgcgccgcggtgctgtttattctcagcatgacgaaaaaagccgccagctga

SEQ ID NO: 211502 - DNA, 1011 bp, Klebsiella pneumoniae
atgattgaagcagaccggctggtatcggcagacagcagcggctttgaagaggccgctgaccgcgccatccgcccaaaattgctggcagagtatgtcggccagccgcaggtgcgttcgcagatggagatctttatccaggcggcgaagctgcgcggcgacgccctcgatcacctgctgatttttggcccgccagggttggggaaaaccaccctggccaatatcgtcgccaatgaaatgggggtgaatctgcgtaccacctccggcccggtgctggagaaggcgggcgatctcgccgcgatgctcaccaacctcgaaccgcacgatgttctgtttatcgatgagatccatcgcctctcgccggtggtggaagaggtgctctatccggcaatggaagactaccagctggatattatgattggcgaaggtcccgcggcgcgttccatcaagatcgatctgccgccgtttaccctgatcggcgccaccacccgcgccggttcgttgacctcgccgctgcgcgaccgctttggcatcgtgcagcgtctggagttctatcagatccccgatctgcagcatattgtcagccgcagcgcccgccatatggggctggagatgagcgacgagggcgcgctggaagtagcccgccgttcacgcggcacgccgcgtattgccaaccgtctgctgcgccgggtgcgtgactttgcggaagtgcgccacgacggcaccatctccgccgatattgccgcccaggcgctggatatgcttaacgtcgatgcggaagggttcgactatatggaccgtaagctgctgctggcggtgatagataagttctttggcggcccggtggggctggataacctcgccgccgcgattggcgaagagcgggaaaccattgaagatgtactggagccctacttaattcagcagggctttctgcagcgtacgccgcggggaagaatggcgacggtgcgcgcctggaatcatttcgggattacgccgccggaaatgccgtag

SEQ ID NO: 211503 - DNA, 612 bp, Klebsiella pneumoniae
gtgataggcagactcagaggcatcattctcgaaaaacaacccccgctggtgttgctggaaacggcgggcgtcggctatgaagtgcatatgccaatgacctgcttctatgagctgccggaggccgggcaggaggcgatcgtcttcacccactttgtggtgcgtgaagatgcccagctgctgtatgggtttaacaacaaacaggaacgtaccctgtttaaagagctgattaaaaccaacggcgtggggcccaagctggcgctggcgatcctctccggcatgtcggcgcagcagttcgtcaacgccgttgaacgggaagaggtcgcctcgctggtgaagctgccggggattggcaaaaaaaccgctgaacgtctgatcgttgagatgaaagaccgcttcaaagggctgcacggcgacctgttcaccccggcggccgatctggtgctgacctcgccggcaggcccaacggcggacgatgccgagcaggaagcggttgccgcgctggtcgcgctgggctataaaccgcaggaggccagccggatggtcagcaagatcgcgcgtccggacgccaacagtgaaacgctaattcgcgaagcgctgcgcgctgcgttgtga

SEQ ID NO: 211504 - DNA, 522 bp, Klebsiella pneumoniae
atggctattattctcggcattgacccggggtcgcgcgttaccggttatggcgtgatccgccaggttggacggcagctgagttacctgggcagtggatgcatccgcaccaaagtggacgatctgccgtcgcggctgaagctgatctacgccggggtgacggagatcatcacccagttccagcccgactatttcgccattgagcaggtctttatggccaagaatgccgactcggcgttaaagctcgggcaggcgcgcggggtggcgatcgtcgcagcgaccaatcaggcgctgccggtgtttgaatacgccgcccgtcaggtcaagcagaccgtggtcgggattggcagcgccgaaaagagccaggtccagcatatggtgcgcaccttgctcaagctgccagccaatccgcaggcggatgcggcggatgcgctggcgattgccatcacccattgccatgtcagccagaatgccgctcagatcagcgagacccggctcaatctggcgcgggggcgcttacgataa

SEQ ID NO: 211505 - DNA, 741 bp, Klebsiella pneumoniae
atggcaggtcatagtaaatgggccaacaccaaacaccgcaaagcggcacaggatgccaaacgcggtaaaatctttacgaaaatcattcgcgagctggtcaccgccgcgcgtctgggcggcggcgatccggcttccaacccgcgtctgcgtgcggccgttgataaagcgctgtctaacaacatgactcgcgacaccctgaaccgcgccatcgcgcgcggcgtcggcggcgatgaagacgcgaacatggaaaccatcatttatgaaggctacggccctggcggtaccgcggtgatggtggaatgtctgtccgacaaccgtaaccgtaccgttgcggaagtgcgtcacgccttcaccaaaaccgggggtaacctcggcaccgacggttccgtctcctacctgttcagcaagaaaggcgttatctccttcgagaaaggcgatgaagacactatcatggaagcggcgctggaagcaggcgcagaagacgtggtgacctatgacgacggcgccatcgacgtctacaccgcctgggaagagatgggcgctgtgcgcgacgcgctggaagccgccggcctgaaagccgacgctgccgaagtctcaatgattccgtccaccaaagcggatatggatgccgagacggcgccgaagctgctgcgtctgatcgatatgctcgaagactgcgacgacgtgcaggaagtgtaccataacggcgagatctccgacgaggtcgcagccaccctgtga

SEQ ID NO: 211506 - DNA, 444 bp, Klebsiella pneumoniae; identical to SEQ ID NO: 138284

SEQ ID NO: 211507 - DNA, 1788 bp, Klebsiella pneumoniae
atgcgtacagaatattgcggacagcttcgacagtcccacgttgggcagcaggtgactctgtgtggttgggtcaaccgccgtcgcgatctcggtagcctcatttttatcgatatgcgcgaccgcgaaggcatcgttcaggtgtttttcgatccggatcgtgcggatgcgttgaagttagcctctgaactgcgtaatgagttctgcattcaggtcactggcaccgttcgcgcgcgtgaagagaaaaacatcaacgcggacatggccaccggcgctatcgaagtgctggcttccgatctgacgatcattaaccgctcagaatcgctgccgctggactccaatcacgtcaacaccgaagaagcgcgtctgaaataccgctacctcgacctgcgtcgtccggagatggcgcagcgcctgaaaacccgcgcgaaaattaccagctttgtgcgccgctttatggacgaccatggcttcctcgacatcgaaaccccgatgctgactaaagccaccccggaaggcgcccgcgattacctcgtgccttcccgcgtgcacaaaggcaaattctacgcgctgccgcagtcgccgcagctgttcaaacagctgctgatgatgtccggcttcgatcgctactatcagatcgtcaaatgcttccgcgatgaagacctgcgtgccgaccgtcagcctgaattcacccagatcgacgtggaaacctcctttatgaccgcgccgcaggtgcgtgagatcatggaggcgatggtgcgtcagctgtggctggaagtgaaaggcgtcgacctgggcgagttcccgatcatgaccttcgccgaagccgaacgtcgctatggctccgataaaccggatctgcgtaacccgatggagctggtggacgtcgccgacctgctgaagtctgtggaattcgcggtctttgccggcccggccaacgatccgaaagggcgcgtggcggccctgcgcgtcccgggcggggcctctctgacccgcaagctgattgacgaatacggcaactttgtgaagatctacggcgcgaaagggctggcctatattaaagtgaccgagcgtgccaaaggcatggacgggatcaacagcccggtggccaaattcctgaccgctgaaatcgtggaagcgatccttgaccgcaccggcgcgcaggatggagacatgatcttcttcggcgccgacaacaagaaagtagtggccgacgcgctgggcgcgctgcgtctgaagctgggtaaagacctgagtctgactgacgagagcaaatgggcgccgctgtgggtgatcgacttcccgatgttcgaagacgacggcgaaggcggcctgacggcgatgcaccatccgttcacctcgccgaaagatatgaccgcggatgagctgaaagccgccccggaagaggctgtagccaacgcctacgatatggttattaacggttatgaagtcggcggcggttcggtgcgaatccaccgcggcgagatgcagcagaccgtatttggtattctgggcattaacgaacaggaacagcgtgagaaattcggcttcctgctggatgcgctgaagtacggtacgccgccgcatgcaggtctggccttcggtcttgaccgtctgaccatgctgctgaccggtaccgataacatccgcgacgttatcgctttcccgaaaaccaccgcggccgcctgcctgatgaccgaagcgccaagcttcgccaatccggcggcgctcggcgaactgggtattcaggttgtggagaaagaggcaaaagcgtctctggagaacaagtaa

SEQ ID NO: 211508 - DNA, 567 bp, Klebsiella pneumoniae
atgttagaactcaatgcaaaaaacacggcgctggtggtaatcgatctgcaggaaggcattctgcctttcgccggcggcccgcatcgggctgacgaggtggtggcgcgcgccgctcgcctggcagacaagtgccggcaacagggttcgccggtcatcatggtccgcgtgggctggtcggccgatttcgccgaagcgctgaaacagcctgtcgacgctcaggccggggcgcatacgctgcccgaaaactggtggacctacccggccacgctgggtaagcaggagagcgatatcgaagtgaccaaacgccagtggggcgcgttctatggcaccgaccttgagcttcaactgcgccgccgcgggatcgacaccatcattctctgcggcatctccaccaacatcggcgtcgaatccaccgcccgcaacgcctgggagctgggttttaacctggtcatcgctgaagatgcctgcagcgccgcctccgccgaacagcatcagagcagcatgacgcatattttcccgcgcatcggccgagtgcgcagtaccgaggagatcctcacggcgctatga

SEQ ID NO: 211509 - DNA, 819 bp, Klebsiella pneumoniae
atgatttatattgggcttccccagtggtcgcacccgaaatgggtgcgccttggcatcaccagccttgaagagtacgcccgccactttaactgcgtggagggcaacaccaccctgtatgcgctaccaaagccggagattgtcgcccgctggtacgaacagacccacgatgacttccgcttctgcttcaaattcccggccaccatctcgcaccaggccgccctgcgccattgcgacgagttaagcagcgaattttttgcccgcctggcgccgctggcctcgcgcatcggccagtactggctgcagctgccggcgacgttcggtcctcgcgatctccccgcgctatggcattttctcgacggactgccgaaggatttcacctacggcgtcgaagttcgtcatcccgagtttttcgccaaaggggaagcggaacagcagctcaaccgcgggctgcacgagcgtaacgtcaaccgcgtgatcctcgacagccgcccggtccatagcgctgcggccaccagtccggcgatgatcgatgcccaacaaaagaaaccgaaggtgccggtacatgcggtgatgaccgcccgacagccaatggtgcggtttatcggcggtgacgatatggcccataaccgggaactgtttcgcgtctggcttcagaccctggcgaagtggcatcagtcggggaccccgtggttgttcctgcataccccggacattgctttcgccccggcgctggtggataccctgtggggtgacctgcgcgctgccctgccggcggcaggaaatgcgccgtcgattccgcagcaatcttctcttttctga

SEQ ID NO: 211510 - DNA, 396 bp, Klebsiella pneumoniae
atggtcagcgcgctgtatgccgttttaggtgcgttattgttagtgaagttctcatttgacgtggtgcgtctgcgcacccaataccatgtaggctacggtgacggcggctttagcgagctgcaggttgccatccgcgttcacggcaatgccgtcgaatatgtgccgattggcctcattttgctgttatttatggagatgaacggcgctcagacctggatggtgcacgtttgcgggattttattgattgtcgggcgactgatgcactcctggggctttcatcaccgcgtctactactggcgccgctccggcatgagcgccacctggtgcgcgttgttgctaatggtgctggccaatctttggtatatgccctgggagttggttttctccctccgttag

SEQ ID NO: 211511 - DNA, 744 bp, Klebsiella pneumoniae
atgtctcaccgcgatacgcttttttccgcgccgattgccagcctcggcgactggacctttgatgaacgggttgctgaagtcttccccgatatgatccagcgttctgtgcccggctactccaatatcatctcgatgatcggcatgctggccgagcgcttcgttcagcccaacactcaggtttacgatcttggctgttcgctgggcgccgccaccctctccgtgcgccgcaatattagccatccgggctgtcgcattatcgccatcgataactcgcccgcgatggtggagcgctgccgtcgccatattgacgcttataaagcgccgacgccggtcgaagtgattgaaggggatatccgcgacgtgaccattgaaaacgcctcgctggtgatcctgaactttactattcagttccttgagccgggcgatcgccaggcgatcctcaataaagtctatcaggggctgaatccgggcggcgcgctggtgctctcggaaaaattcagcttcgaagacgcccacgttggcgaactgttgttcaatatgcatcatgactttaagcgcgccaacggctacagcgaactggagatcagccagaaacgcagcatgctggaaaatgtgatgctgacggactccgtcgaaacccataaagcccgcctgcgtcaggctgggtttgaacatgccgaactgtggttccagtgctttaactttggctcgctagtggccgtgaaagccggggagcaggcatga

SEQ ID NO: 211512 - DNA, 1005 bp, Klebsiella pneumoniae
atgatcgacttcagtaacttctatcagctgatcgccaaaagcccgctgtctcactggctggagacgctgcctgcccaggtagccgcctggcagcgcgatgccctgcacggcaagtttcgtgaatgggagcgcgccgtagaatttctgccggagctaacgccctggcgtctggatcttctgcacagcgtcaccgccgagagcgaaacgccgctcagcgaaggccatcagcgacggatcgaaaatctgcttaaaaacctgatgccgtggcgcaaaggcccttattcgctgtacggcatcaatatcgataccgaatggcgatccgactggaaatgggagcgcgttctgccgcacctgtccgatctcactggccggactatcctcgacgtgggctgcggcagcggctatcacatgtggcggatgatcggcgccggcgcacatctggcggtcggtatcgatcccacccagctgttcctgtgccagtttgaagcggtgcgtaagctgctcggtaacgaccagcgggcgcatttgctgccgctgggcatcgagcagctgccggcgctggaggccttcgacaccgtgttctcgatgggcgtgctctaccaccgccgctcgccgctggaccatctgtggcagctgaaagatcagctggcgccagggggcgagctggtgctggagacgctggtggttgaaggagatgaaaatacggtgctggttccaggcgaccgctatgcgcaaatgcgcaacgtctattttatcccctcggcggcggccctgaaaatgtggctggagaagtgcgggtttattgacgtgcgcatcgtcgacgcctgcgtcacctcgacagaggagcagcgacgcaccgaatggatgacgaccgaatcgctggccgatttcctcgacccacaggatcagcgcaaaacggtggaaggctatccggcgccattacgggctgtgatcattgccaccaaaccggaaacccagcagtcgctggcgaaaaaagcgagataa

SEQ ID NO: 211513 - DNA, 744 bp, Klebsiella pneumoniae
atggcggtactggaagtgtgttgctacagcgtggcgtgcgcccgggaggctgagcgctgcggcgccgatcgtattgagctctgcgccgcgccgcaggaagggggattaaccccctcttatggggtgctggtctcggcccgcgaggcgattactctcccggtgcatccgatcgttcgcccgcgcggcggcgatttctgctacaccgaggaagagttcgccgcgatgcttaacgatattcgcatggtgcgggatctgggctttcccgggctggtgaccggcgtgctggatgctgatggccaggtcgatatcccgcggatgaaaaaaataatggccgcggcggggccgctggcggtgacctttcatcgcgcgttcgatctgtgcgctgacccgcgtcaggcctggaaaacgctggggacgctgggggttaaacgtatcctgacttccggtcagcaatcctcggcggagaaaggtatttcattaattacggaacttattgccgcaggggatactccaatcattatggccggtgcgggagtccgcgccgcgaacctgccgctgtttctgcaggcgggggtgaaagaggtccatagctcggctggccactggttgccgtcggaaatgcgctttcgtcatccgggcgtttcgatgtcagccgatcccgatgccgatgaatacagacgctacgccgtgaatggcgcagcggtggcggagatgaaaaggattatctccgcctggagaagttaa

SEQ ID NO: 211514 - DNA, 570 bp, Klebsiella pneumoniae
atggcaaactggcagcaaaatgaacaactggccgatattacggcggatctcccgcgattttccgatgcgcttcagcgcttcactgcgcgactgggactggagatcgccgggctcgacgccgaccatatctccctgcgctgtcatcagaataccactgcggaacgctggcgccgcggtctggagcagtgcggcaccctgctgtcggagaatatgatcaacggccggcccatttgcctgttcaaactggcggagccggtctgcgtggcgcactggcgcttccatatcgttgagctgccgtggccgggtgaaaagcgttatccccatgaaggctgggagcatatcgaaatcgtcctgcccggcgatccggcaaccttaaatgcccgcgcgctggcgctgctggccgatgacggactcagccagccggggatcgtggtcaaaaccagctcgccgaaaggggagcatgagcgcctgccgaatcctaccctggcggtgaccgacggcagcgtgacggtcaaatttcatccgtggtctattgaacaaatcgtcgccagcgagcaagccgatacgtaa

SEQ ID NO: 211515 - DNA, 1734 bp, Klebsiella pneumoniae
gtgaatattcaggctcttctctcagaaaaagtcagccaggccctgatcgcggcaggcgcgcctgccgattgcgaaccccaggtccgccagtcagcaaaagttcagttcggcgactatcaggccaacggcgtgatggctgtcgccaaaaagctgggtatggcgccgcgacaacttgcagagcaggtactgtctcatcttgacctcaacggcattgccaacaaggttgaaatcgccgggccgggctttatcaatattttcctcgaccccgcgtttctggcggacaacgtcaaccgcgcgctgcagtctgagcgcctgggcgtcacgaaaccgcaggcgcagactatcgtcgtcgactactcggcgccaaacgtagcgaaagagatgcacgtcggccatctgcgttcgaccatcattggcgatgcttcagtccgtaccctggagttcctgggtcataaggtgatccgcgccaaccacgtcggcgactggggcacccagttcgggatgctgatcgcgtatctggaaaaacagcagcaggaaaacgccggcgaaatggccctggccgacctcgaaggtttctatcgcgaagcgaaaaagcactatgacgaagacgaagccttcgccgagcgcgcgcgcagctacgtggttaagctgcagggcggtgatgagtacttcctgcagatgtggcgtaagctggtcgacatcaccatgtcgcagaaccagatcacctacgatcgcctgaacgtcaccctgacccgcgatgacgtgatgggtgagagcctgtacaacccgatgctgccggggatcgtcgccgatctgaaagccaaagggctggcggttgagagcgaaggcgctaccgtggtcttccttgatgagtacaaaaacaaggagggcgaaccgatgggcgtcatcatccagaaaaaggatggcggctacctctataccaccaccgatatcgcctgtgcgaagtatcgctatgaaacgctgcacgccgaccgcgtgctctactacatcgactctcgtcagcaccagcacctgatgcaggcgtggaccatcgtgcgcaaggcaggctacgtgccggactccgtgccgctggagcaccatatgttcggtatgatgctggggaaagacggcaagccgtttaaaacccgcgccggcggtaccgtgaagctggcggatctgctggacgaagcgctggagcgcgcccgtcgcctggtggccgagaagaacccggatatgtcggctgacgagctggaaaatctggcgaaagtggtgggtatcggcgcggttaaatatgccgacctgtcgaaaaaccgcaccaccgactacgtcttcgactgggataatatgctggcgttcgaaggcaacaccgcgccgtatatgcagtatgcctatacccgcgtgctctccgtgttccgcaaagccggcatcgacgaaaacgcgatgatcgacgcgccggtggtcatcgccgaagatcgcgaagctcagctggccgcgcgcctgctgcagtttgaagagaccctctccgtggtcgctcgcgaagggacgccgcacgtgatgtgcgcctacctctacgatctggcgggcctgttctccggcttctacgagcactgcccgatcctcagcgcggaaagcgaagagacccgcaacagccgtctgaagctggcgctgctcacggcgaaaaccctcaagctgggtctcgataccctcggtatcgaaaccgtcgagcgtatgtaa

SEQ ID NO: 211516 - DNA, 1140 bp, Klebsiella pneumoniae
atgaaagtttggccggtcaaacatagcccattactgcgtcagcctgagcgttttatcgcccgcagcgaactgcaggcgctgatccgcaacgtgacgcaaaacctggtgaatattaaggatgagagcgggcaatttttactacgcctggatgacgggcgcgtgatcgataccaaaggctgggccggctgggagtggacccacggcgttgggctgtacggcatctatcagtattaccagcaaaccggcgatatcgagatgcgtgatatcatcgatcgctggtttgccgaccgcttcgccgagggagcaacgaccaaaaacgtcaatactatggccccgtttctgaccctggcttaccgctttgaagagaccggccgtatggcgtatctgccgtggctggagagctgggcggagtgggcgatgcacgagatgccgcgcaccgagcagggcggtatgcagcacatgactctggcggaggagaaccatcagcaaatgtgggatgacacgctgatgatgaccgtgttgccgttagccaaaattggcaagctgcttaaccgcccccagtatgtggaggaggcaacctaccagttcctgctccatgtgcagaacctgatggaccgggagaccgggctgtggtttcacggctggaactatgaggggcggcataactttgcccgggcgcgttgggcgcggggcaacagctggctcaccatggtgatcccggattttctggaactggtggatctccccgaggggaatgcggtacggcgctatctgattacagtcctcgacgcacagattgccgccttagcagaatgccaggacgacagcggcctgtggcataccttgctggacgacccgcactcttatcttgaggcctcggcgaccgccggctttgcctacgggattctcaaagcggtgcgcaagcgttacgtcgggcagcactacgccggggtggctgaaaaagcgattcgcgggattgtgcagaatatttcgccgcagggggagctgctgcagacctcatttggcaccgggatggggtcagacctcgacttttatcgccagatcccgcttacctcgatgccctacggtcaggcgatggcgatcctttgtctgacggagtatctacgcaagtacttctga

SEQ ID NO: 211517 - DNA, 1584 bp, Klebsiella pneumoniae
atgaaaacacgaaaaattggactggctaactatctggcctacggcgcgggcgattttctcggcgccggcacgacggcgttaaccgccgcatggctgctctacttttacacgaccttttgcggactgaccccgattgaggccacgcttatttttgctgccgcccgcgtgctggacgcggtggtaagcccgctgatgggctttctcaccgataactttggcaccacctggcttggtaagcgcttcggccgcagaaaattctttattctgctcggcatcccctgcgtattcagctattcagcgatgtgggtcggcgagatgggcttctggtactacctggcgacctatctgctgtttgatatggtctataccatgattttggtgccctatgagacgctggtgccggagatgaccgatgactttaaacagaaaaccaaattctccggcgcgcgcatttcgatggcgcagatgtcggcgattttagcctccttcctgccggggatccttctctcctggctcggcaaagataatgccagctcgttcttctatgccagtctggtgttctcggtgctgtgcgcggtgatgctgactctggtctggtgtttcacctgggaacgaccgcgggaggcgtggtcggaagcggccctgcgggcggaagcggaaaaacaaaacttaacccttgctcagagcctcaatcgcctggtgattgagctgagttctacgctgcggataaaaattttccgccagcacctcggcatgtatctggggggctatatcgcccaggacgtcttcaatgccgtgtttacctattacgtggtctttgttctgatgcaggaagccgccgtcgcctcgaacctgctggggacgatggccatcttccagtttattgcagtaatcgccatgatcccgctgtgcattcgttttggccccgcgccgtcgtaccgcatggtggtggtcctgtttggcctgagctcactctcctacgcgctgctctattacgccggactgagcgacgtctattccttattgctgctcatctctgctgtcgccggactgggacgcggcgggataaattacgtaccgtggaatacctacacctatattgccgacgtcgacgaagcgatcaccggccagcgccgggaggggatttttgccggcatcatgaccctgacccgcaaagcctcgcaggcgggggcggtgatgctggtggggatcattatgcagttgtcggggtttgtttccgggcaaaaaatacagcctgaaggggtcagccataccattctgctgatcctcagcgtcggcactctggtggtgttagcctgcggcttcctcgtctcgctgcgcttcaagctcaacctgcacacccacagcgtcctgcgcagcgagaccctcagaatgcgcgagctcggctacgctcagtcggaacagaccagtgcggaacaccgcgcggtggtcgagctgctggcggggatgccttacgactgtctgtggggcaataacaatattggctatctgaatcgtcataaacctgctgccccggcgctcattaagggcggcgctttgaattcgacatatacccgaggttaa

SEQ ID NO: 211518 - DNA, 429 bp, Klebsiella pneumoniae
atgccttatacccatctgctggttgccgtcgcgccaacgccggagagtcaggtattaattaaaaaagcggtgtcgatagcccgccccgttaacgcgaaagtgagcttaatcactctcgctacggatccggagctgtataaccagttcgccgcaccgatgatggaaaatctgcgtgaagtgatgcaggaagagacgcgggagtttctcaatgagctggctcgccacgcggactacccaatagaaagaatgaccatcgcctgcggcgagctaggccatcatattaaggacttctgccggtcgcaccgtgttgatctggtgatctgcggcaatcacaaccattccctcttctcacgcgccacctgctcggcgaaaagtatcgtcggcagctgcggcgttgatgtcctgttggtttcccttgaaaagggctaa

SEQ ID NO: 211519 - DNA, 1425 bp, Klebsiella pneumoniae
atgagtcgtttagtcgtagtctctaaccgtatcgccttaccggacgataaaaaatcgagcgctggcggtctggccgtcggcatcctgggggcactgagagcggcggggggtctgtggtttggctggagcggcgagattggcgatgaccagcaaccgctcaagcaggtctcccgcgggaatatttcctgggcgtcgttcaaccttaatgaacgggaccatgatgaatactacaaccagttctctaacgccgtgctgtggccggctttccactatcgccttgatctggtcagctttcagcgcgaagcctgggagggatatctgcgggttaacgccatgctggcggacaagcttctgccgctgattgagccagacgatacgctgtggatccatgattaccatcttctgcccttcgccagcgagctgcgcaagcgcggggtgaacaatcgcatcgggtttttcttacatattccgttcccgacgccggagatttttaacgctctgccgccgcacgctgagctgctggagcaactgtgcgattacgatctgctgggcttccagaccgaaagcgacagaaccgcttttctcgacagcattgctatgcagactcgcctatccgacctcggcgataaacgctatcaggcatggggtaaggcgttcagtaccgaggtttatccgatagggatcgatccggacgaaattacgcgcaacgctaaaggtccgctgccgccgaagctggcccagctgaagaacgagctgaaaaatgtgaagaatatcttctccgtggagcgtcttgactattcgaaagggttgccggagcgattcctcgcctacgagacgctgctcgagaagtaccctcagcaccacggcaaaatccgttatacccagatcgcgccgacctcccgcggcgatgtgcaggcctatcaggatatccgccaccagctggaaaccgcagccggacgcatcaacggacagtttggtcagcttggctggacaccgctctactatctgaatcagcattttgatcgtaagctgctgatgaaggtcttccgctactctgacgtcgggctggtgacgccgctacgcgatggtatgaatctggtggcgaaggagtacgtcgcggcgcaggatccggataaccctggcgtactggtcctgtcgcagtttgccggggcggcgcaggagctgaccagcgccctgatcgtcaatccttacgatcgcgacgaggttgccgccgcgctggatcgcgcgctcagcatgccgctggcggaacgtatcgcccgtcattcagcgatgctggacgtgatcagagaaaatgatattcataactggcaggcgcgctttgtcgatgatctgcagcatatttcaccgcgcagcgaggagagccgtctgcgggggaagatagccaccttccctaaactggcctag

SEQ ID NO: 211520 - DNA, 789 bp, Klebsiella pneumoniae
gtggataaccagatatctgtaccgcctgcgctaaccggaaactacgcttttttctttgacctcgacggtactcttgccgatatccaaccgcaccccgatcaggtggtgatacccgacagcacgctgcaggcgctcaatgcgctggcccagcagcaggggggcgcggtggcattgatttcagggcgctcaatggctgaacttgacgcgctaacccatccatggcggctaccgctggccggcgttcacggggccgagcgccgtgatatcaatggtaaaacctacatcgtctctctgccgacagcgctgcgcgatgagatcgcggctgagctgacgtcggcgctggaagcgctcccgggatgtgagctggagagtaaagagatggctttcgcgctccactatcgccaggccccgcagcagcagagcgccgtgctggagctggcgcagcggattgttcagcgctatccgctgctggcgttacagcttggcaagtgcgtggtggagattaaaccccgcggcgtcaacaaaggggaggcgattaccgcgttcatgcaggaggcgccattcgccggccgcgaaccggtttttgtcggcgatgatttgaccgacgaggcgggattcagcgtcgttaatcaactgcagggaatgtcggtaaaagttggcgccggggaaactcaggcgcactggcggttggcggatgccgccgctgtaaggacgtggttgcaacatctggcgtatgacgcgcaaaccgaaaggagggatgaccatgagtcgtttagtcgtagtctctaa

SEQ ID NO: 211521 - DNA, 981 bp, Klebsiella pneumoniae
atgtcatcagtgactacgtccggggctacccgctcaacctttagctttgcccgcatctgggatcagtttggcatgctggtggtgtttgcggtgctgtttatcggctgtgtgatttttgtgcccaactttgcttcattcgtcaatatgaaagggctggggctggcgatctcgatgtccgggatggtggcctgcggcatgctgttttgcctggcctccggcgattttgacctgtcggtggcgtcggttatcgcctgcgccggggtcaccaccgcggtggtgattaatctcagcgaaagcctgtggctggggatcgccgcaggcctgttgctgggggcgcttagtggcctggttaacggctttgtcattgcgcgccttaagatcaacgcgctgatcaccacgctggccaccatgcagattgtccgcggcctggcctatattatctccgacggcaaagcggtggggatcgaagatgaacgtttcttcaccctcggctatgccaactggtttggtttgccggcgccgatctggctgaccgtcgcctgcctggtggttttcggattattactaaacaaaaccacctttggccgtaatacgctggctattggcggcaatgaagaggcggcgcgcctggccggcgtcccggtggtacgcaccaagattattatctttgtgctctccggtctggtatcggccgcagcggggatcattctggcgtcgcggatgaccagcggccagccgatgacctcgattggctatgagctgattgttatttcggcctgcgtgctgggcggggtgtcgctgaagggcgggatcggcaagatctcctacgtggtggccgggatcctgatcctcggaaccgtggaaaatgcgatgaacctgctgaatatctcgccattctcacaatacgtcgtgcgcggggtgatcctgctggcggcggtgatcttcgaccgctacaaacaaaaagccaaacgtgcggcctga

SEQ ID NO: 211522 - DNA, 1515 bp, Klebsiella pneumoniae
atgcaacagtctaccccttatctctcatttcgcggcatcaccatgacgttccctggcgtaaaggccttgtccgatatcagttttgactgctacccgggacagatccacgcgctgatgggcgaaaatggcgcaggcaaatcgacgctgttgaaaattctcagcggcaactatatcccgaccgcgggccatttgcagatcggcggccagcagatggcattcgccaataccatggaggcgctgaacgccggcgtggcaattatctaccaggagctgcatctgatcccggagatgaccgtcgccgaaaatatctatctcggtcagctgccgcacagaggcggcatcgtcaatcgctcgctgctcaactatgaggcccgcctgcagctggagcatctgggtctggatatcgacccggagacgccgctgaaatatctctccattggtcaatggcagatggtggagattgccaaagcgctggcgcgtaacgccaagattatcgcgttcgatgagccgaccagctcgctctccgccagagagatcgacaacctgtttcgcgtcatccgcgagttgcgggaggagggaagggtcatcatctatgtttcacaccggatggaagagatttttgccctcagcgatgccatcaccgtctttaaagatggccgctacgtttgcacctttgacgatatgccgagcgtcagccacgacgccctggtccaggcaatggtaggccgcaatctgggcgatatttatggctggaagcctcgcccctatggcgaggagcggctgcgcctggaggaggtcaaagcgccgggcgtgcgcacgccggttagtctctcggtgcgcagcggtgaaattgtcggtttgttcggactggtgggtgccgggcgcagcgaactaatgaaaggcctgtttggcggcacgcagataaccggcggtcaggtgtatatcgatggccagcccgtctccattcgcaaaccggcccaggccatccaggccgggatgatgctgtgtccggaggatcgtaaagcggaggggattattccggtgcattccgtgcgcgataacatcaatatcagcgcccggcgcaagcatattcacgctggctgcctgatcaacaacgcctgggaggcggacaacgccgatcaacatatccagtcgctgaatattaaaacgccgggcccggaacagctgattatgaacctgtcgggcggcaaccagcagaaagcgatccttggccgctggctgtcggaagagatgaaggtgatcctgcttgatgagccaacccgcggcatcgacgtcggcgccaaacatgaaatttacaatgtgatctatggcctcgccgcctccggtgtcgccgtggtgtttgcctccagcgacctgccggaagtgctgggcgtcgctgaccgcatcgtggtgatgcgcgaaggacaaatcgccggcgaactgctgcatgaagaagccaatgaacagcaggcgttaagccttgcgatgccaacagtgagccaggctgtcgcctga

SEQ ID NO: 211523 - DNA, 981 bp, Klebsiella pneumoniae
atgcacaaatttactaaagcgctggcggccattggtctcgctgcggttatgtcacaatcagctatggcggaaaatcttaaactgggttttctggtgaaacagccggaagagccatggtttcagactgagtggaaatttgctgataaagcaggaaaagatttaggctttgacgttattaaaattgcggttccggatggggagaaaaccctgaatgccattgacagcctggcggccagcggcgcgaagggctttgtcatctgtacccccgatcccaagctcgggtcggcgattgtcgccaaagcgcgtggctatgacatgaaggtgattaccgtcgatgaccagttcgtcaatgcgaaaggcaaaccgatggagagcgtaccgctggtgatgatggcggcgagcgaaattggcgcccgtcaggggcaggaactctataaagagatgcaaaagcgcggctgggatgtcaaagacaccgccgtaatggcgatcaccgccgatgagctggataccgcgcgccgtcgcaccaccggctccatcgatgccctgaaggcggccggcttcccggacgcgcaaatctaccgcgtgccgacaaaatccaacgatatcccgggagcgttcgacgccggtaactcgatgctggtccaacatccgcaggttaaacactggctgatcgtcgggatgaacgacaacaccgtcctcggcggcgtgcgcgcgaccgaaggtcagggctttaaagctcccgatgtgattggcatcggcatcaacggcgtggatgccgtcaacgaactgtcgaaggcgcagccgaccggcttctatggttctctgctgccaagcccggatatccacggctacaaaaccagcgaaatgctctacaactgggtcaccaagggcgtcgagccgccgaagttcacggcggtgaccgatgtggtgttgattacccgcgataacttcaaagaagagctggcgaaaaaagggctgtaa

SEQ ID NO: 211524 - DNA, 510 bp, Klebsiella pneumoniae
atggcagttccaggaatggcacaaaagctaaacacccaaatgaatcttgagtttcacgcctctaacgtttacctgaacttaagcgagtggtgcgcccggcatcgcttcgacggcgccgcgacgtttctgcgcacccgcgcgcaaagcagcatcaccctcaccatgcgcgtatttgactacctgaaaaaagccggcagctggccgatcgtcaatcccgaccacgcctgtaaccctgagtgcacctcgctggaagatctgtttacccaaaccctgagcgattaccaacagcgcagtcgtctgctgagcggtctcgctcaggaagccaaagcgcaaagcgatgacagcacctggcggtttctcacgctgttggcggaagagcagcagcaggatggcctgctattgcaaagcgtgcttgaggaaattcgtaatgccgataaagccggtctcgggatggagcagaccgatcggcgtctgatggctatcgttggagaagcgcagaaagcgcattaa

SEQ ID NO: 211525 - DNA, 1563 bp, Klebsiella pneumoniae
atggctagatacacggcttcagcctctgaagggctgcagggaagaccgatcttgttacgccatcagttagcctacggcggcggaaatctgttagggagcggcgcactggcgataagcggcgcatggctactctatttttatacgaccttttgcggcctgacgctgatcgaggcctcatttatcttctccgtcgccagcatcattgacgctatcagcaacccgctgatgggctatctgacggataattttggcaaaacgcgtttgggcaagcgcttcggccgccggcgtttctttctgctaatcggtattccgctgatgatgttctacccgctgctgtgggtggaaggcctgagtttctggtactaccttagcacctatgtggtgtttgagatcatctacacctctatcatggtgccttatgaaacgctggcgacagagatgaccgatgatttctcactgcgttcaaaactgaccggctataaagctatctttggtaagctggccaacttcctcgcggcgtttattcccggccagttcattctgctgtatggcaaagattctgccacccctttcttcctcaccggtctgacctatggcgcgatcctgatcgtcgctatttcctgcctgtggttgtgcagctgggagcgtgagcgcggggaagaggtggaaaccagcgcgaaaaaaggactgctgagcaccctgctgtcgctggcgaaagatatgcgttcgactttttatctacgcgtattccgcaagcatcttggtatgtacctgtgcggctttggcgcggaatggctgtttgcctccatcttcacctatttcgtgatcttcgttctacaacacgatccagcgatggtggccgggctgaacagcctgaactcgattctgcagctgatctctacggcgctgtttatcggcctgtgcgtgaaaaagggcttcagcaaaccctatatcctggcgctggggatcgtcattttcgcggttctgctgtatacctcgctgtggtttttccatctaccgtccggcctggcgacagtgctgatgttcggcattaccgtgctgttcggcctgggtaccggcggggtttactatataccctggaccgtttacaccttcctggccgatgtcgatgagatctacaccggacgccggcgggaagggatctatgccggcgccatgaccttctcaggaaaaattctgcgctcgattgtggtgttctcgatgggggcgatcctgagcttctacggtttccagtcaaaagcgcacagccaaccggaaagcgcggtgaccgctatcgcagtggtattctgcgtcggggtgatcgcattagccctggccgccatcgtcttcagcaagcagatgaagctggaccggaaggcccatctggtggtgctgcaggaagtcgcgcggataaaagcgggcggcaaaattagcgatattgcgccggacgtgcgggttatcgtggaggatctggtcggccatcgctacgaagagtgctggggcaacagcaaattgttcaaagatgctgcccctgcgcctgcgcagaccgtcgtttcccattaa

SEQ ID NO: 211526 - DNA, 252 bp, Klebsiella pneumoniae; identical to SEQ ID NO: 137321

SEQ ID NO: 211527 - DNA, 1422 bp, Klebsiella pneumoniae
atgaataccgcgatctcttcccgcgatgaacgtgctttttcagcgccggcgctgctggtggccggtgccttttttatggagtttctcgacgggacggtgatcgccaccgccctgcccgatatggcgagggattttggcgtcaccgcggtcgaactgaatatcggcatcagcgcctatctgattacccttgcggtcctgatcccggccagcggctggatcgccgatcgcttcggcgcccgggctatttttactctcgccctggcgatctttacccttgcctcggtcttctgcggcctctccaccgaggtgcatatctttgtcgccatgcgtatccttcagggagtcggcggcgcgctgatggtccccgttggtcgccttgcggtgctacgcaccacgccgaaacaccagctgatcaaggccatcgccaccctgacctggccggcgctggtggcccccattatcggcccgcctttgggcggctttataacccgctacgccagctggcactggatcttctttatcaatgtcccgctgggccttgccgccatcatcctttcgctgcgcattatccctgatattcgcgaaacggaacggcgctccttcgatctcagcggatttatcactacctcggtcgcgatggtcagtctggtaaccgcgatggagcggctcggcgatcgccagccgcagatctggccgacgctggctctcgccgcgcttggcttcggctgtctgttatattccattcgtcatttccgccgggcggcggcgcctatggttcgtctcgacgccctgcaggtgccgacgttccgggtgacaatgtacggcggctcgttgttccgggcctccatcagcgcggtgccttttctgctccccctgctgttccaggtgggattcggtatggatccttttcattccggcctgctgatgctggcggtgtttgtcggtaatttaaccattaaacccgccaccacaccgctcattcgctggctgggctttcgtcggctactgctgatcaatggcgcgttgaacgtctgttcgctgctggcttgcgcgctgcttacgccgcagacgccggtctgggccatcatgctgatcctttatctcggcggggtgtttcgctcaatccagtttaccggtgtaagcacgctggccttcgccgatgtccccgccgcgcagatgagtgatgctaatacgctgttcagtaccgcgtcgcagctggcggtagggctggggatcacgctcggggcgattggcattcgcctgggcgagcaggtcggcgactggctgcatcttactgaactaccggggatcagcttccgcctgtcgtttgtgtttatcgccttgatatgtctggtagggatgatcgacagcctgcatctggccaaaacggccggcagcagcgtgtcggagaagaagaaatag

SEQ ID NO: 211528 - DNA, 639 bp, Klebsiella pneumoniae; identical to SEQ ID NO: 137319

SEQ ID NO: 211529 - DNA, 498 bp, Klebsiella pneumoniae
atgctgaaaacggacatgattgacaaactcaatgaacagatgaatcttgaactctattcttctcttctttatcagcagatgagcgcctggtgcagttaccacagttttgaaggcgccgcggccttcctgcgtcgccatgctcaggaagagatgacccatatgcagcgcctgttcgactatctaaccgacaccggcagcctgccgcggatcaacgctatcgcctccccgtttgccgaatatgcctcactcgacgagctgttccgccagacctacgagcatgagcagctgatcacgcaaaaaataaatgaactggcgcacgcggccatggccagccaggattatccgacctttaatttcctgcagtggtatgttgctgaacagcatgaagaagagaaattatttaaatcggtgatcgataaactgaccctcgctggaaaaagcggcgaaggtctgtactttatcgataaagagctggctaccctcgacgcgcagaattaa

SEQ ID NO: 211530 - DNA, 240 bp, Klebsiella pneumoniae
atgtcttctattcatggtcatgaagttttacagatgatgctcgcctcgggtgagtcctggacggtcgcctcgctggaggccgccattcgtcgccgctttggcgaagaggcgcggtttcacacctgttcagcagagaatctaagcgccgcacagttggtggcgtttttagagaaaaaaggcaaatttattgccagagaggaaggttttactaccacagaaaataagatctgccgacattaa

SEQ ID NO: 211531 - DNA, 1143 bp, Klebsiella pneumoniae
atgccattggccgcagcaggcgtcggctttaccgtcacgttgggtttacttttcaccctgtgggcattgatgtgctataccgcccttttgctgctggaagtctaccagcatgtccctgccgatatggggctcggttctctggcggcgcgctatctgggccgttatgggcagtgggttaccggattctgcatgctgtttctgctgtacgccctcacggcagcctatatcagtggcgccggtgaattactcgcttccagcctcaaccagtggctggactggcagctaccgccggccgcaggcgtactgatcttcaccctcctcggcggggcggtagtgtgcattggcaccgcgctggtggatctgttcaatcgcttcctgtttagcgccaaaatcgtcttcctggtgattatgctggccctgctgatgccgcacattcatcaggtgaacctgctgacgctgccggttgagcaaggcctggccctgtcggccattccggtgattttcacctcctttggttttcacggcagcgtcccgagcatcgtcagctatctggggggggatattcgcaaattgcgccgggtatttatcatcggcagctttattccgctggtggcctatattttctggcagctggcgacgctgggcagtatcgacgccccggcctttaccgccctgctggcaaataacgctggtctgaacggcctgctggaggcgatccgcgaagtggtggcgtcaccgcatgtggagctggccgttcacctgtttgccgaccttgcgctggcgacgtcattcctcggcgtctcgctcggcctgtttgattatctggcggatatgtttcagcgtaaaaacagcgtcggcgggcgtctgcagagcgggataatcaccttcctgccgccgctggcgttcgccctgttctatccccgcggtttcgtcatggccctcggctacgccggggtggcattagccgtgctggcgctgataatgccggccctgctggttatgaagagtcgccgagagcatccgcaggctacctggcgggtcgccggcggcgcaccgacgctatggctggttctgctgtgcgggatcggcatcgtggctattcagttcagcatcgctgccgggttgttgcccgcggtgggataa

SEQ ID NO: 211532 - DNA, 669 bp, Klebsiella pneumoniae
atgaataccggacctttgaacgaaaacgaactggaatggctggatgacactctggcgaagtacgccgccgaaggcgccattctggatgtctctgaactggatggcctgctgacggcgatcctctctgcgccgaccgacatcgaacccgctcagtggctgctggcgatttggggcggggcggataatgtcccgcgctgggccaacgatcgcgagcgcgatcgctttgtcaatctgacgctgcagcatatgagcgatatcgccgaacggctggagtcttatcccgatcagttcgaaccgctgttcggcacccgcgaagcggaaggtcaggagctgaccatagtcgaggagtggtgctttggctatctgcgcggcgtggcgctgagcgactggtcgacgttgcccgctgaactccagccggagctggacgctatcgcgctccacggcagcgaagaacagtttagcgcgctggataatctgacggcggatgaatttatcgccagcatcgagcgtatcacgccggcggcgctggcgctttaccagtactggatagcgaatccgcagccggtggaggccccgcagccaataagaaatgaagcgaaagtcggacgcaacgatccctgcccatgcggcagcggtaaaaagtataagcagtgttgcttagcgaaatga

SEQ ID NO: 211533 - DNA, 882 bp, Klebsiella pneumoniae
atgttcactggactttgcgcatttcctttgacacctttgcatcagcaagattttgatgaaaaagcgtttattcgtattctcgcccgtcttaccgatgccggagtcgactctctgggcatcttaggttcaaccggcagctacgcttatctcagccgtgagcagcgcagacgagtggtgcaggtggcgaaggcgcatgcggggtcgatcccgatgatggtcggcgtcggcgccattgcgactaacgaggtgctacgcctggtggaggatgctcaggaggcaggggcggatgcgttattactgccgatgatgtcctatcagccgctttccgcggaggagatctttgccttttacgaagaagtctgtcggcatgtctcggtgccggtttgcctgtatgacaatccccgcactacccacgtaatgctggcggatgagctgcaggggcgcatcgccgccttgccggccattgcctcgattaaaattcccggcctgcccgcgccacaggcgagcgaacgtgtagcggccctgcgtcagcatcttccctctcgcgttacgcttggcgttagcggcgatgcgtgggccactgccgggttgcaggccggctgcgaagcctggtattcggtctgcggcggactctttccccgcttctcactggcgctggtaagagcgatacgtagcggcgatgtggcgcagactgcggcactgaatgagcagctggcccccctatggcgatgctttgatcgctatggtggtagcctgcgagtgatagccagcgccgcagcgatgctcggactctgcgatccagactcgcttccccgtcctttgctttcgttaggggaggaggcttgtcgtgaggtggcgtcggcgctgcgcggcctggcctga

SEQ ID NO: 211534 - DNA, 549 bp, Klebsiella pneumoniae
atgcaatttaatatccctacgttgcttactctgtttcgcgtcatcctgatcccgttttttgtgctggcgttttatctgccctttagctgggcgccgtttgcctgcgcgctgatcttctttgttgccgcggtaaccgactggtttgatggtttcctcgctcgtcgctggaatcagagcacccgttttggcgccttcctcgacccggttgccgataaagtcatggtggctatcgccatggtgctggttgccgaacactatcacacctggtgggtcacgctaccggcggcgaccatgattgcccgtgagatcattatctccgcgctgcgtgagtggatggcggagctggggaaacgcagcagcgtggcggtctcgtggattggcaaagtgaaaacgaccgcccagatgaccgccctggtatggatgctgtggcgtccttatccgtgggtggagtgggccgggatcgtgcttttcctcgtggcggcggtgctgacgctgtggtcgatgctgcagtatttgaacgcggcgcgcggcgatttgcttgatcagtga

SEQ ID NO: 211535 - DNA, 1833 bp, Klebsiella pneumoniae
gtgagtgatgtttttgacgcaaaagctttcctgaaaacggtgaccagccagcccggtgtgtatcggatgtatgatgctggcggaaccgtcatctatgttggcaaagccaaagatctgaaaaagcggctcagtagctacttccgcagcaaccttgcgtcgcgtaaaacggaagcgctggtagcgctgatcgcgcaaatcgacgtgaccgtcacccacaccgagacggaagcgctgctgcttgagcacaactatattaagctgtaccagccacgttacaacgtgctgttacgcgacgataaatcgtatccttttatttttctcagcggcgatactcatccgcgtttggcgatgcatcgcggcgccaaacatgcgaagggcgaatattttggtccttttcccaacggctatgccgtgcgcgagaccctggcgctgctgcagaaaatctttcccatccgtcagtgtgaaaacagcgtctaccgcaatcgctcccgcccctgtctgcagtatcagattggtcgctgcctggggccgtgcgtggccgggctggtcagcgaagaagagtatgctcagcaggtagagtatgtgcggctgtttctcgccggcaaggatgaccaggtgctgacccagctcatcgcgcggatggagaaggcgagccagaacctggagttcgaagaggcggcgcgcatccgcgaccagattcaggccgtccgccgcgtgacggagaaacagtttgtctccaacaccggtgacgacctcgacgtgatcggcgtcgccttcgatgccggcatggcctgcgtgcatgtgctgtttatccgtcagggcaaagtgctgggcagccgaagctacttcccgaaagtgccgggcggcaccgagctgggagaggtcgtggagacctttgtcggccagttctacctgcagggcagccaaatgcgcacgctgccgggggagattttgctcgattttaaccttggggataagacgctgctggccgactcgctgtcggagctggcgggtcgtcgaatcaatgtgcagactaagccgcgcggcgacagagcgcgttatcttaagctggcgcggaccaacgccgcgacagcgttaacgaccaaattgtctcagcaatcgaccattcatcagcgtttgcaggcgctggccagcgtactggagctgccggccgtcaagcgaatggagtgttttgacatcagccacaccatgggcgaacagaccgtagcatcctgtgtggtgtttgacagcaatggcccactgcgcgcggagtatcggcgctacaacatcaccggcattacccctggcgatgactatgcggcgatgaatcaggtcctgcgccgtcgctatggtaaagcgattgatgacaacaagatcccggatgtgatcctgatagacggcggcaagggacagctggcccaggcgaaagccgtgtttgctgaactggacgtcccctgggataaacatcatccgctgctgctgggcgtggcgaaaggtagcgatcgaaaagcgggtctggaaacgttattctttgagccggaaggggaagggtttagcctgccgccggattcgccggccctgcatgtgatccagcatattcgcgatgaatcgcacgatcatgcgatctccgggcatcgcaaaaaacgggcgaaagtgaagagcaccagctcgcttgagactatcgagggggtggggccgaagcgtcgtcagatgctgctgaagtatatgggtgggctgcaggggctacagcaggccagcgtcgaagaaattgctaaagtaccgggcatctctcacgctctggcagaaaagatcttctactcgttgaaacattag

SEQ ID NO: 211536 - DNA, 657 bp, Klebsiella pneumoniae
ttgatcaacgttcttcttgttgatgaccacgaactggtgcgcgcagggatacgacgcattctggaagatataaaagggattaaagtcgctggcgaagcctgctgcggcgaggacgccgtcaagtggtgccgggctaattccgcagatgtcgtcctgatggacatgaacatgcctgggatcggtggccttgaagcgacgcgcaaaatcgcgcgctccgtggcgggcaccaaagtgatcatgttgaccgtgcataccgagaatcctttacctgccaaggtcatgcaggcgggcgcggcgggctatctcagtaaaggcgccgcgccgcaggaagtggtgaatgccatccgctgcgtcgcgtccgggcagcgctatattgcctccgatattgcccagcaaatggcgttaagtcagattgaacccgaaaagacagaatcgccgtttgccagtttgtctgaacgcgaattgcagattatgctgatgatcaccaaaggtcagaaggtgaatgagatctcagagcagctaaatctgagtcctaaaacggttaacagctaccgctatcggatgttcagtaaattaaacattcatggcgatgtcgagctgacccacctggcaattcgccatggcctgtgtaatgcggagtcgttagcaagccagtga

SEQ ID NO: 211537 - DNA, 225 bp, Klebsiella pneumoniae; identical to SEQ ID NO: 136369

SEQ ID NO: 211538 - DNA, 723 bp, Klebsiella pneumoniae; identical to SEQ ID NO: 136370

SEQ ID NO: 211539 - DNA, 753 bp, Klebsiella pneumoniae
atgagtgcgatagaagtgaaaagcctggtaaaaaaattccatggccagacggtgctccatggtatcgacctggaggtacagaaaggggaagtggtggcgatcatcggccccagcggctcgggcaaaaccaccctgctgcgtagcatcaacctgctggagcaaccggagagcggcacaatccgcgtcggcgatgtgacgatcgacgccggtcgtagcctcgggccgcagaaagggctcattcgccagctgcgccagcacgtcggctttgtcttccagaactttaatctgtttccccaccgtacggtgctggagaacattattgaagggccggtcatcgtaaaaggtgaagataagcaggagtccatggcgcgggcgcgcgaactgctggcgaaggtggggctcagcggaaaagagaatagctatccgcgccgtctctccggcgggcagcagcagcgagtggctattgcccgcgcgctggctatgcgtccggacgtgatcctgtttgatgaacccacctcggccctcgatcctgagctggtgggggaggtgctcaacaccatccgtcagctggcgcaggaaaaacgcaccatggtgatcgtgacccatgaaatgagtttcgcccgcgacgtagccgatcgggcgatatttatggatcagggacgcattgtcgaacaaggcgaggcaaaagcgttgttcgcttcgccccagcagccgcgtacccgtcagttccttgaaaaattcctgatgcagtaa

SEQ ID NO: 211540 - DNA, 669 bp, Klebsiella pneumoniae
atgcaagaaagtatccaactggtcattgattccgccccttttctgctgaaaggggccgtctttacgctgcagctgagcattggcgggatgtttttcggcctggtgctgggctttatcctggcgctgatgcgcatgtcgccagtctggccggtaaaatggctggcgcgcatgtatatctctattttccgcggcacgccgcttatcgcccagctgtttatgatctactacggcttgccgcagttcggcattgagcttgacccgatcccggcggcgatgatcggcctgtcgttgaatactgcggcctatgcggcggaaacgctgcgcgcggccatcgcctcgattgataaagggcaatgggaagcggcggccagtatcggtatgacgccctggcagacgatgcgtcgggccattttaccccaggcggcgcgggtcgctttgccgccgctgtcgaacagttttatcagcctggtaaaagatacctcgctggcggcaacgatccaggtgccggagctgttccgtcaggcgcagctaatcacctcgcgaaccctggaggtcttcaccatgtatctggcggcctccctgatctactgggtaatggcgacagtgctctcctcgctgcagaattattttgaaaaccagctgaaccgccaggagcgtgatccgaaatga

SEQ ID NO: 211541 - DNA, 987 bp, Klebsiella pneumoniae
atgtcactgcaaaacttaacccgctttccgcgcctggaattgatcggcacgccgacgccgctggagtatctcccgcgtctgtccgatcaccttgggcgcgaaatttttattaaacgtgatgatacgacgccgctggcgatggggggcaacaaactgcgtaagctggagtttctcgccgccgatgcgctgcgcgagggcgcggataccttaatcaccgccggcgcgatccagtctaaccatgtgcgtcagacggcggcagtcgctgcgaaactgggactgcattgcgtggcgctactggaaaatcccatcggcaccagggcggagaactatctgagcaatggcaaccgtctgctgctggatctctttaacacccaggttgagatgtgtgatgccctgaccgatcccgccacccagctcgatgagctggcgacccgcattgaggcgcaggggtatcgtccgtatgttattccggtcggcggctccaatgccctcggcgcgttaggctatgtggaaagcgcactggaaatcagccagcagtgcgaagacgcggtggcgatctcgtcagtcgtggtcgcctccggcagcgccggcacccatgccggattggcggtcggccttgaacagctgatgccgcaggcggaactgattggggtgaccgtgtcgcgctcggtcgctgaccagttgccgaaagtggtggcgctgcagcaggccgtggccaacagtctcgagctacaggcgaaggctgaaattatactgtgggatgactactttgccccaggatacggtacgccaaacgaagatgggatggccgctgtgaagctgctggcgcagctggaaggtattttgctcgacccggtctataccggcaaagcgatggccgggcttatcgacggcatcacgcagaagcgctttaaggatgaagggccgatactgttcgtccacactggcggagcgccggcgctgtttgcctatcatcctcacctctaa

SEQ ID NO: 211542 - DNA, 768 bp, Klebsiella pneumoniae
atgggcgtgatggccgttgttttgatggctggcgtcagcgtgaaaacttttgcggcggaaaacctgctcaatcagattaaagagcgcggcactctacgcgtgggcctcgaaggcacctaccctccctttagtttccagggggatgacggcaagctgaccgggtttgaagtggaattcgctaacgaactggcgaaacatcttggcgtgaaggccgatctcaaaccgaccaagtgggacggtatgctggcctcgctggactccaagcgtatcgacgtggtgattaaccaggtcactatctctgacgaacgtaagaagaaatacgatttctccaccccatataccgtctccggcgtgcaggcgctggtgaagaagggtaacgaaggcgtgattaaaaccgcggcggatctgaaaggcaagaaagtgggcgtcggactgggcactaactatgaagagtggctgcgtcagaatgtccagggcgtggacgtccgtacctatgatgacgatcccaccaaataccaggatctgcgtgtaggccgtattgacgccattctggtagaccgtctggcggcgttggatctggtgaagaaaaccaacaatacgctggcggtaaccggcgaagccttctctcgtcaggaagctggcgttgcgctgcgtaaaggcaacgacgacctgctgaaagcggtagatggcgcgattgcagacatgcagaaagatggcagcctgaaggcgctgtccgagaaatggtttggcgctgacgtgacgaaataa

SEQ ID NO: 211543 - DNA, 1488 bp, Klebsiella pneumoniae
atgaaaaaccccaccttattgcaatgttttcactggtactaccccaccggcggcgagctgtggcctgaggtcgaagcgctggcgcccagcctgaatgaaatcggcatcaatatggtctggttgccacccgcctacaaaggcgcctcgggcggttactccgtcggctatgatacctacgatctctttgacctcggcgagtttgatcaaaaagggtctgtcgccaccaaatatggcgacaaagcgcagttgctggcggcgatcaacgccctgaaggagcacaatatcgccgtgctgctggatgtggtggtaaaccataaaatgggcgctgatgaaaaagagtctctgcgcgttcagcgcgtcgatgagcaggatcgtacgcaaattgacgaggagatcattgagtgcgaggcatggacgcgctacaccttcccggtgcgcgccggacagtattcgcagtttgtctgggactacaaatgttttagcggcattgaccacatcgagaacccgacggaagacggtgtgtttaaaatcgtcaacgattacaccggcgaaggatggaatgaacaggtcgatgatgagctcggcaactttgactatctgatgggcgccaatatcgatttccgcaatcatgcagtgaccgaggagatcaaatactgggcgcgctgggtaatggagcagaccggctgcgacggttttcgtcttgacgcggtcaagcatatccccgcctggttttataaagcgtggatcgagcatgttcaggaggtggccccgcagccgctgtttattgtagcggaatactggtcccatgaagtggagaagctccagcagtatatcgacctggtcgagggcaaaacgatgctgtttgatgccccactgcagatgaaatttcatgaagcgtcgcgccagggccgcgattatgacatgagccagattttcagcgggacgctggtggaagccgaccctttccatgccgtcactctggtcaccaatcatgatacgcagccgctgcaggccctcgaggcgccggttgaaccctggttcaagcccctcgcctatgcgctgatcctgctgcgggagaatggcgtgccctcggtcttttatgccgatctcttcggcgcttcctatgaggataccggcggcgacggagagacctatgccattgagatgcccgttatcgaacaactccacgagctgatcgacgcccgtcagcgttttgcccatggcgtgcaaaccctttggttcgatcatcctaactgcatcgcctttagtcgtagcggtactgacgacgatccaggctgcgtggtgatcatgtccaatggcgatgagggcgaaaagacgctgacgctgggcgaaaactatggcaacaaacgctggcgggattttctcggtaaccgggaagagattgtcgaaaccgatggcgaaggctgcgcgacctttacatgtaacggggggagcgtgagcgtgtgggtgttagaggaggtattgtag

SEQ ID NO: 211544 - DNA, 432 bp, Klebsiella pneumoniae
atgaaaaagttattttttgctggcatggtggtggcgctggccggttgcgtacaggttgatcgttatgaggacgtggttaaagcgccggcgccggctggccttgcaggtttctggcaaacgaaagggccgcagagcgcgatgatgagtcctgacgccattgccagcctgattgtcaccaaagaaggggacaccttcgactgccgccagtggcagcgcgtgattgcgcagccggggaaactgatgaatcgtgacagtgagatctacaacgtgaccgcttccctggacatctatcctgtcgagcgcgagggcaacacgatctcctacgatcggatgacgttgtcccgtgttgaacgtctcactccggagtgcgagaaggcgtgggccaaagcgcgagcgacggggcccgtcagcgcgccggcctccacgcgctga

SEQ ID NO: 211545 - DNA, 624 bp, Klebsiella pneumoniae; identical to SEQ ID NO: 136377

SEQ ID NO: 211546 - DNA, 192 bp, Klebsiella pneumoniae
atgcaggtgaacgatcgtgtcacggtgaagaccgacggtggcccacgtcgatcgggggtagtgctggcgattgagtcgtttagtgaaggaacgatgtatctggtttcactggaagactatcctctggggatctggttttttaatgaaataggccacccggatgggattttcgtggaaaaagaggtctcgtaa

SEQ ID NO: 211547 - DNA, 225 bp, Klebsiella pneumoniae
atgatgaagcaccaattaacaggccagaccggggacgaccttgacgtcaacgtagatgccctgctggcggcaattaatgagatcagcgaaagcgaagtccatcgcacgctggacgacccgcagcgcgccagcattgatggccgcgggtcacatacctggcgtgagctggcggaggcattcgaactcgatattcacgatttcagcgccagtgaagccaaccgttag

SEQ ID NO: 211548 - DNA, 1680 bp, Klebsiella pneumoniae
atggataagccactgcggttgaagttaaaaaagtgctaccacctggctcgcccggcgcatgtggttaacgcttgttttatcgcagtgctatttttctccacgctgctgatctggcgtgaaatcaatgttctggaagaggcctacgtggccaaccagcgtaataatctggctaacgtcgctcatgaaatggatgggctgttgcagttcaacatcgacagaatgatgttttttcgccatgggatgcaggcggcgctcgaacagccgcttgatatcgatgtattgcgtaaggccagccaacgctatctgagccagcgccatcagcaggcctggcgggtggcgctaccgaatcggcgtacgctgccggtgtttggcatctcgggcagcgtcgctggcgacaaccctatcctgctggtggacgatccgctggcggctgatgaactaatggcgacgctcgagctgggctatctgctaaatctgacgcagcacgaccgcgatttcgccgagcggatgcagtatatctctcgtagcggcttttttacctcgaccctgccgctgcgggatgagtcgcaggtgataacgcactattcccaagccctcagcgctccgtggtttacccgccagacccaacgaaataatccggggcgaggcgttatctggcaaatctttcctgacgatgacccgcagctggaagagcaggtggtcaccgcttcgataccgttggattttgccggttactggcgcggcgtgctggcgatggatttctcagtcagtgaaatcaaagcgtttttggttagcgccatgcaggggggacaagtgggagagtaccaactttatgatagccatttgaacctgctggcttcttccgcgccggggaatgtcctgaccctgctgtcgccgcgcgagcaggagctgctgagccgcgcgtttgtccatgataaccagggagggctgcgtctgctgacgcgctatatcagctgggccaaactgcgcaattttgacggcgtgctgctgcggatccacactctgcgggaaggcgtccgcgggaactttggcaccatcaccatcgccctgaccctgatgtgggtcctcttcaccttgatgctgttgctctcctggctggtgatccgccgcatggtccgcaacatgagcgttctgcaaacctctctggagtggcaggcatggcacgatgccttgactcgcctgctcaatcgcggggcgctgtttgaacaggcgatggcggtagccagcgactgccagcgcagcggacggccgctggcggtgatccagctcgatctggatcattttaagcacatcaacgatcgctatggtcatcaggcgggggacagggtgctgtcgatggtggccagtacgctgtccagcgcggttcggcagggcgatctgctgggcagagtgggcggagaagagttttgtatcgtgatgccgaataccaccctgcaggaagcagcggcggtggcggagcgattgcgccagcgtatccagggacgggaagtctttttgcataacaacgtgacgctgcgggttagcgcctcgttaggggtgagcgccagcgaagagcggggggagtatcagtttgaagcgctgcagtcggtggccgatgggcgactctatctggccaagcaaaatgggcgtaaccaggtctgttttcgcagcgcagcgtga

SEQ ID NO: 211549 - DNA, 912 bp, Klebsiella pneumoniae
ttggcaggaagtagtcttttaacattacttgatgatatcgccacgctgctggacgatatttccgtgatgggcaaggtagcggcgaaaaaaacggcgggggtgctgggcgacgatttgtctctcaatgcccaacaggttaccggcgtgcgggcgaatcgcgagttgcccgtggtctggggagtggcgaaagggtcgttcgttaataaggtgatcctcgtgccactggctttgttgatcagcgccttcatcccctgggcgattacgccattgttgatgttgggcggcgcgtttctctgtttcgaaggggtggagaaggtactgcacagtctggaagcgcggaaacacaaagaggatcctgaacggcggcagcagcgtctcgccgcgctggcggagcgcgatccgctggcctttgagcgtgacaaagtaaaaggcgcgattcgcaccgattttattttgtccgcggaaattgtcgccattaccctcggcatcgtggcggaagctccgctgcttaaccagatccttattctctcggggattgcgattctggtcactatcggggtgtatggcctggtgggggtgatcgtcaagctggacgacatgggttactggctggcggaaaaacgtagtgcgctggcgcagtggctgggtaaagggctcctggccgtcgctccccgcctgatgaaggtgttgtccatcgtcgggacgctggccatgttcctcgtcggcggggggattgtcgttcacggtattgcgccgctgcatcatgccatcgagcactggagcgcggggttgggtggggtgatggcctccacgctgccggtcgtcgccaacctggtgctgggttttatcatcggcgcggtggtgctggcgggcgttaaggcggtgagcagcctgcgtggcgctggaaagtag

SEQ ID NO: 211550 - DNA, 912 bp, Klebsiella pneumoniae
atgtctacccgtcagcttttaccgctcatcggggcgctgtttgcgctgtatatcatctggggctctacctatttcgctatcgccgtcggggtcgccagctggccgccgctaatgatggccggcattcgttttctcgctgccggcgtgctgttgctggggtggctactggccaccggccataagctaccggcgcgtcgtccgctgcttaacgctgcgctgatcggcgtgttgctgcttgcggttggcaacggcttcgtgacgctggctgaacatcagcacgtcccctccggcatcgcggcggtgatggtcgccaccgtaccgctgttcaccttatgcttcagccgctttttcggcatcgccacccgtaaactggagtggctgggcattgccattggccttgcgggtatcgtgatgctcaacagcggaggcaacctgaacggcaacccctggggcgcactgctgatcctgattggttccctaagctgggccttcggctcggtttacggttcgcgaatcgtactgccgatcggcatgatggcgggggcaatcgagatgctcgccgccgggatcgtcctgctggcggcctcatggctgagcggtgaaaccttaacccgcgtcccttcctggtccgggatcgccgccctggcctatctggccatctttggctcgctgatcgccattaacgcctacatgtttttaatccgcaatgtcaccccggcggtcgccaccagctacgcctatgttaatccggtggtcgcggtgctcctcggtactgggttcggcggcgagagcctgtcgctcattgagtggctggcgctggcggtgattattttcgccgtagtgctggtgacgctggggaaatatctcttccccgtccgcagcgaggctactccttgtaaggcgtcgaagtag

SEQ ID NO: 211551 - DNA, 498 bp, Klebsiella pneumoniae
atgatggcggatgttcacgataaagcgacgcgcagtaaaaatatgcgggcgatcgccacgcgcgatacggcgatcgaaaagcggatagcggcgctgctgaccggggcgggattcacctttgtcgcccaggatcgcgcgctgccgggacgtcccgatttcactttacccgactaccgttgcgttatctttactcacggctgcttctggcatcaccatgactgctatctgtttaaggtgccggccacccgcacggcattctggctggacaaaatcgccggtaacgtggcgcgcgacgcccgcgaccggcaacagctggctgagcagggctggcgggtgcttatcatctgggaatgcgccctgcgcgggcgccttaggctgagtgatgcggcgctcaccgagcgtctggaagagtggatctgcggcgccggacacgacgcgcagatcgatacgcaggggatccgcgaactgacgactacttcgacgccttacaaggagtag

SEQ ID NO: 211552 - DNA, 1401 bp, Klebsiella pneumoniae
ttgtcgttggctgaacaggccggggaacacgctgaggcgctgctgcgtcagctgatgacgatctacgatgtaaaaacgctggttgccgaactggtgagcgtcggcgaacagcactggagcgcggcgatcctcaagcgcgtggcggcgcttggccgcgcggcggagcgtttgcgcccgcaggaagttgctcatctggcgacgctcctgccttcgccgccggcccatcatccgcactatgggttccgttttatcgatctgtttgccggtattggcgggatccgcagtggttttgaagccatcggcggacagtgcgttttcaccagcgagtggaacaagcacgcggtacgcacctataaggccaactggtactgtgatccgcagcagcaccgttttaatgaagatatccgcgatattaccctcagccaacgctctgacgttagcgacgaggaggcggcgcggcatattcgcgaatctatccctcagcatgatgtgctgctggctggcttcccctgccagcctttctcgcttgccggcgtctctaagaaaaatgcgatgggccgtgcgcatggctttgcctgcgaaacccagggaacgctgttttttgacgtggtgagaattatcgcggctcgtcagccagcgatttttgtgctggagaatgtcaaaaacctcaaaagccacgatcaggggcgcaccttccgtatcatcatgcagacgctggatgagctgggatatgaagtagctgacgcggggcataccgggccggatgacccgaaggtgattgacgggcgccatttcttgcctcaacaccgggagcgcatcgtgctggtgggtttccgtcgcgatctgcagctgcatgctggatttacgctgcgcgacatcgcggcgcagtacccggcggtgcggccaacatttggcgagctactggagccgacggtcgatgcgaaatttattcttacgccggtgctgtggaaatatctttatcgttatgcccgcaagcatcaggcgcggggtaatggctttggttatggcctggttgaccccgccaatccccacagcgtggcccggacgctttctgcccgctactataaagatggtgccgaaattctcgtcgatcgcggctgggaccggccgctcggtgagaagcattttgacgatccgctgaatcaacagcggcggcctcgccggttgacgccgcgcgaatgcgcccggctgatgggctttgaatccccgcagggggcgcgttttcgcatcccggtatcggatacgcaggcctatcgtcagtttggcaactcggtggtggttccggtcttcgccgcggtggcgaaactcctggcgccgcgcatcgctcaggcggtggcgcgccgcgaagcggatgataatgatggcggatgttcacgataa

SEQ ID NO: 211553 - DNA, 708 bp, Klebsiella pneumoniae
atggacctggttgactggcagcaacgatttgagcgctggatactgacgcaccatgcgcaggatgacgccgcacacgatctgtcccattttcgtcgcgtctgggcgaccgccactcagctggccgcgggggaggaagtcgaccggctggtactcctcacggcctgctattttcatgacatcgtcagcttgccaaaaaatcatccggagcgaagtcgatcctcgatgatggccgccgagaaaaccctcgccattctgcagtcggcctttgctgattttcctgcggatcgttacccggcggtcagccatgccatcgaggcgcacagcttcagcgcggcgatcccaccgcgcacgctggaggcgaaaatagttcaggatgccgatcgactcgagtcgctgggagccattggtctggcgagggtcttcgctgtcgccggcgctctgaataccatcttgtttgatgccgaagatccttttgctgatcggcgggcgctggatgaccgcaaatatgccctcgaccatttccagtgcaaacttctgcgcctgccggaaaccatgcaaactgacaaggggaaagcgatggcgcagcataatgcccgttttctcgtcgaatttatggctaagctcagcgcggagctgcagggggagccgctggcgctggatgaagcggttttgcgccgctttgcaccgcaggcgtcaaccgaccggtga

SEQ ID NO: 211554 - DNA, 282 bp, Klebsiella pneumoniae; identical to SEQ ID NO: 136386

SEQ ID NO: 211555 - DNA, 1146 bp, Klebsiella pneumoniae
atgaaaagaaaagtactggcactcatggttccggcattattaatggctagcgccgctaatgccgccgaaatctataacaaaaacggtaataaactggacctctacgggaaagttgacggcctgcattacttctctgacgacgcttcagaggacggcgaccagacctatgttcgctttggtctgaaaggcgaaacgcagattacttccgagttaaccggctacggtcagtgggaatacaacattcaggcgaacaccagcgaaaaagaaggcgcgaattcctggacccgtctcggctttgccggcctgaagtttgccgactgcgggtcgctggactatggccgtaactacggcgtggtctacgacattgaatcctggaccgatatgctgccggaattcggcggcgatacctacacccagaccgacgtttacatgaccggccgtactaacggcgtggccacctaccgtaacagcgatttcttcggcctcgtcgacggcctgcatttcgccctgcagtatcagggtaataatgaaaacgccggttctggcgaaggcactaataacggtgggaaacgtaagctggcgcgggaaaatggcgacggttttggtatctccagctactacgatctcgatatgggcatcagcttcggggcagcgtattcgtcttctgaccgtacccataaccagctggcggccgcgcgtagcagccagcgttatgccaacggcgataaagccgatgcctggaccgtcggcgcgaaatatgacgccaataacatctatctggccgccatgtatgctgagacccgcaacatgaccttctatggcaacgatagttttggcggaattgccaacaaaacgcagaacttcgaagtggtcgcgcagtatcagttcgacgactttaatttaccgctgcgtccgtcggtggcctatctgcagtcgaagggtaaagatctctacgcctattctcgctacggcgacaaggatctggtcaagtatgtcgacgtgggcatgacctactacttcaacaaaaatatgtccacctatgtggattataaaatcaacctgctggatgaagacgaccgcttctacaaaaacagcggtatcgcgaccgatgatatcgtcgccctcggcctggtctatcagttctga

SEQ ID NO: 211556 - DNA, 798 bp, Klebsiella pneumoniae
atgtttaaatggccctggaaagcagatgatgagtccggcaacgcagagatgccctgggagcaagcgcttgccattccggttttagcccatctttcgtccactgagcagcacaagctcacgcagatggctgcccgttttttacagcaaaagcggctggtggcattgcaggggctggagctgaccccgctgcatcaggcgcgcattgctatgctcttttgtctgccggtgcttgagctgggcattgagtggctggatggcttccatgaagtgctgatctaccctgcccctttcatcgtcgatgatgaatgggaggatgatattggtctggtccacaaccagcgggtggtacagtcgggacaaagctggcaacagggtcctgtagtgctgaactggctggatattcaagactcttttgatgcgtcaggctttaaccttgtggtgcatgaagtggcgcataagcttgatacgcggaatggcgaccgggccagcggcgtgccgcttatcccgttgcgtgaagttgccggctgggagcatgatctccacgccgcgatgaacaacattcaggatgagatcgatctggtcggcgaaagcgccgccagtattgacgcctatgccgccaccgatcccgcagaatgctttgctgtcctctcggaatattttttcagtgcgcctgaattgttcgcgcctcgcttcccggccctgtggcagcgtttttgccacttttaccgccaggatccgctggcgcgtagacgtgagaatggcctgcaggacgaaggcgatcggcgcattgttcactaa

SEQ ID NO: 211557 - DNA, 390 bp, Klebsiella pneumoniae
atgacagcacgcgaagccgtttttcccttcggtcgtcaggcgctctatgagcgcaatcgttattcaccggccatcaaatccaatggtttcttgtttgtttcggggcaggtgggtagccacgaggatggttcgcctgagcacgatctgaaagcacaggtcaggctggcgttcaaaaatcttaatgctgtgctcgcagcggcgggctgcacgtttgaggacgtggttgatgttaccctctttgtcgtcgatcctgagtcaaatctcgacgctatctggagtatcctgccagaatattggggagaagcgccttaccctacgctgaccgggatcggcgtgacgtggctttatggatttaagttcgagattaaggttattgccaggctaccctaa

SEQ ID NO: 211558 - DNA, 921 bp, Klebsiella pneumoniae
atggatcgtttcgatgcaatgcgcgccttcgctcgggtggtagaggcagggagcttcacgaaggctgcccaaacgcttcatatgagcaaaaccacggtgacgcaactcattcagcagctggaatcgcgcctgcgcgtcagattgctccatcgcaccacccgcaagctcggtgtgactcccgatggcgcggtctactacgaacgcgtcatccgtctgctggcggacatggaggatgctgaaaacagcctgtccagcgcggcgatgacgcccaggggacggctacgggtggatgtaccgagtccgctggcccgccttattctggtgccggcgctaccggctttccacgcccgctaccctgatatccagatcgacatgggtgtgagcgaccgggaagtggatctgatcggcgacaacgtggattgcgttctgcgcggtggtcaaatcaccgaccagtccctaatcgcacgccatgtcggcgatttgcaaatcggcgtctacgtcgcccccagctatgtggaacgccttggcgctcccgcacacccgcgcgagctacaaaatactgaccattgcatagtgggattcttgtcctcacgcaccagtaagattgatcctttggtactgtgcagtgagaatgaacgtattgaaatcacgggcaactacgtacttgccgtggatgatggcaatgcttacctcgaagctgggttagttggcttaggcgtgattgcgctgcccaactatatggcggcagcgcatcaggccgttggcgctttgattccattatttacacaatggcggattagcccaatgcctctgtacctggcgtttccaccgaaccgccatgtcaacgccaagctgcgcgtttttattgactggatcgttgaattgatggagcagcatgtccccattgccaacaatcagtga

SEQ ID NO: 211559 - DNA, 237 bp, Klebsiella pneumoniae
atgataaaaggtataaaaattttcatcactgtagtcttcgtgattctggcattgttgagcggcatgatgagcttcatgatcgtcgggatgggggtcagcggtagtggctgtggtcaggagtgttttgataatatggattctgcaaaattcattagtattatattctggatattggctatcataagcggtatcttcgctttcatggacaatggcagccaaaaaaaagatcctcagtaa

SEQ ID NO: 211560 - DNA, 942 bp, Klebsiella pneumoniae
atgacgatgcggcgtgtgaaattactctgtacggcgctgatgctgcttgccagccacggcgcgctggccgtcagctatccgctgccgccggaggggagccgtttggtgggcagcgcatttaccattgccgttccggacaataacacccagccgctggaaagttttgccgcccagtacggccaggggttaagcaatatgctggaagccaaccccggggtcgatgtctatttaccacgctccggttcgacgctgactattccgcaacagctgatcctgcccgacaccgtgcgggaggggatcgtcatcaacgtcgccgaaatgcgtctctattattacccgccgctgggcaacagcgtcgaagtgctgccaatcggcattggccaggccggacgcgaaacgccgcgtaactgggtgacggcagtagagcgtaagcaggaaggccccacctgggtgccaaccgccaatacccgccgcgagtatgcgaaagagggcaaaaccctgccggcgctggtaccccccgggcccgataacccgatggggctgtatgcgatctacatcggcaggctctacgctatccacggcaccaatgccaactttggtatcgggctgcgcgtcagccagggatgcattcgcctgcgcaatgacgatattaaattcctgtttgataacgtgcctgttgggacgcgggttcagctgatcgatcagccggtgaagtacagcgtggagccggacggcagtcactggctggaggtgcacgagccgctgtcgcgcaaccgcgcggagtttgaatccgacagaaaagtccccttgccgatgacctcggcgctgcgcgactttacccaggggccgggagtgagccctgcccaggtcgagcagaccctgcagcgccgctccggcatgccggtgaatatcagcgccacagcggcgcagggaagtttgtag

SEQ ID NO: 211561 - DNA, 951 bp, Klebsiella pneumoniae
gtgaacttccagcagctgaaaattatccgtgaggcggcccgtcaggattacaacctgacggaagtcgcgaatatgctctatacctcgcagtcaggcgtcagtcgccatatccgggaactggaagaggagctggggattgagatctttatccgccgcggcaaacgcctgttaggcatgaccgagccgggtaaagcgctgttatcgattgccgagcggatcctcaatgaagccagtaacgttcggcggctggcggatctcttcactaacgatgcgtcaggcgtcttaactatcgccaccacccatactcaggcgcgctacagcctgcctccggtcattaaagctttccgcgagctgttctcagatgttcgcgtcgagctggtgcagggtaccccgcaggaaatcgaagcgctgctgcataacggcggagcggatatcggcatcgccagcgagcgcctgagcaacgatccgacgctggcggctttcccctggttccgctggcatcacagcctgctggtgccgaaggatcatcctttgacgcatgtttcccccctgacgctggaggcgatcgcccgctggccgttaatcacctaccgccaggggatcactggccgttcgcgcatagatgaggcgttcaaccgcaaggggttgatgccggatatcgtgctgagcgcgcaggattccgatgtgatcaagacctacgtggagctggggctgggcgtcgggctggtcgccgagcagtccggtgatgcccgggaagcggacacctttacgcgtcttgatacccgccatctgttcgatgccaataccgtgtggttgggactgaagcggggccagctgcagcggaattacgtttggcgctttatcgaattgtgcaatgccggactgtcgctggatgagattaagcgtcaggcgatggagccggaagaggccgcaatcgactatcagatttaa

SEQ ID NO: 211562 - DNA, 918 bp, Klebsiella pneumoniae
atgaacttaagacgactgaaatattttgtgaaaatcgtcgatatcggcagtctgacccaggccgctgaagtcttgcatatcgcccaaccggccctcagccaacaggtcgcgaccctggaaggtgaaatggaccagcagttgctgatacgcaccaagcgaggggtcacgccaacggaagccggtaaaattctctacacccatgcgcgcactatcctgcgccagtgcgagcaggcgcagctggcggtcaataacgtcggccagacgctgcgtggtcaggtgtcgatcggcctggcgccgggcaccgcggcctccgccattaccatgccgttgctgcaaacggtacgcaatgagttgcccgaggtgatggtctatctgcaggagagcagcggcacagcgctgaatgacaagctgctggcgggccagctggatatggcggtgctctatgagcgttcgccggtggcaggcatcgtcagccagccgctgctgaaagaagacctttacctggtcggcacccgcgactgcccggggcagagcgtggatctcacggcggtggcggagatgaacctgttcctgccgcgcgattacagcgcagtgcgggcgcgggtcaccgaggcattcaccctgcgtcgtctgtcggcgaaaattatcggcgagatcgaatccatcaccaccctgaccgcggccatcgccagcggcatgggggcgacggtgttaccggaatccgctgctcgttccctgtgcggggcggcgaacggctggatggcgcggatcagcacgccttcaatgagcctgtcgctgtcgctgaacatgtcggctcgcggcagtctgtcgccgcaggcgcaggcggtgaaagagatcctgctgtctctggtgagccgcccatcgctggaaaaccgtgaactgcagctggtcagttag

SEQ ID NO: 211563 - DNA, 1635 bp, Klebsiella pneumoniae
atgtcgctaattgctatcgtgctggtctttatcatggccatcgtggtgaccgtgttcctgtcccatcttctgcccgttaaagtgccgctaccgctgatccaaatcgccgcgggcgccgcgctggccgccagtggctttcaggtcgattttgacccgcatatttttttactgctgtttatcccgccgctgctgttcctcgatggctggcgcatccccaaagacgcttttttccgcgatatgaagccgattttatcgctggcgataggcctggtgatggtgactattctcggtattggcctgtttattcactggctgatcccggctatcaccgtggcggcagggttcgccctcgcggctattctgtcgcctaccgatccggtggcggtatcggcaatgaccgccagctcgccgcttccctcaaggatggcgcatattctcgaaggggagtcgctgttaaacgatgcttcagggctcgtcgcctttaatttcgccatcgccgcggtgctgaccggcagcttctccccgggagacgcggtggtgaaatttttcctgatggccttcgggggcatcttcagtggcctcgtggtggtgtgggtcaccggcaaatgtaataactttctggttcggcgcacccgcgaggagccagccatccagatcctgatcagcctgcttatccctttcgccgcctacctgctggccgaggcgttccatgtctcgggcattcttgccgccgtcgccgccggcattgcgatgcattatgagcagctgtcggggccccggcttccggcgacgcgcatgaaaagcagcgcggtatggtccatgctgcagaccaccctcaacgggatgatctttctgatgctgggcgagcagctgccgcgcatgctcaggacgctgccggcggtagccagccaggccggcgtctcttcgccctggtatctgctgctgtacgccgtggcaatcaccctggcgctcggtctgatgcgcttcgcctgggtatggctgtcgatgaagctgacaatttttcgccgcaaacgtcgaggcaaggccatcaccgtccgtccacgcttcagtatcctcgccgtcatggcgctggcgggagtgaagggctctgtgaccctcgccggtattctgacgctgccggtggtgctggcagatggttcgccgttcccgggccgtgaactactgatctttctttcgatggcggtgatcctgatgtcgctggtggtggcggctatcggtttgccgtttatgactcgttatcttgccgatgatctaccgcatgacaccggtaaggacgacattggcgccgtgatgaccgaggtggccattaaccgtcttaacgcgctactggacgagccggtggaggatcccagtgagcaggccctgcgggccgatgctggcaatatgctgctcgagacctatcagcggcggcttcactataacgacaatgacgaggggcaggatgtcgggctggagctggctaagcgcgccaggctggagaaatatatgcaacgagaggtcattatcgcccagcgtcaggagctgttccggctgcgccgcgcccataacatcagcgatatcactttttatgaggtgctgcgggagatagatctgaaggaagagagtttacgctaa

SEQ ID NO: 211564 - DNA, 705 bp, Klebsiella pneumoniae
atgaatcccaatacctccaccgtcctgaacccccgccgcggccgtccacccaaggtcgatcgccagtttgacgatacgcgtcaggcgctgattcgctcaggccttgaagtgctgaccgaaacgggctatctcgcggcgggtattgatgcggtgatcaagaatatcgccgtgccaaaggggtcgttttatcattgctttaaaagcaaagaggcttttggcctcgccgtgcttgccgcctatggcgacttctttgcgcataaattagataaattcctgctggacgacgccgtgccgccgctggaacggatggcggcctttgtgcgtcatgccggtcagggaatggagaaattccagtttcgccgcggctgcctggtgggcaacctgctgcaggaagccccgttgttacccgagacgtttccccaacggttgatggctatcctggcggcatgggagtcgcgcgtggcgcgctgtctgcgcgaagcgcaggcagccggggccatcgccagcgacgcctcaccgcaggcgctggcccaggtgttctggatcggctgggaaggcgcggtgatgcgcgccaggctggtccagtctgccgcaccgcttaaccagtactgggatttttttgcgcacagtatgacaacaaaaacacctgcacaggacggcgctagcgccgataacccccttccgacgaggaatactctgtcatga

SEQ ID NO: 211565 - DNA, 978 bp, Klebsiella pneumoniae
atgaaagcattagttctggaccagatcgacaaccgcaccgtcgccaccgtcaaagatatcgacctgcccgctcttgccgaaggcgacgtccgggtcgccatcgactggtcgagtctcaattataaagacgccctggcgatcaccggcaaaggcaaaattatccgtcagtttccgatggtgccgggcattgattttgccggtcaggtgaaagaaagccgcgatccgcgctttgttcccggccaggccgtgatcctcaccggctggggcgtgggcgaaaaccactggggtggcctggccaccgaagcctgcgttaaaggcgactggctggttgctctgccggagacgctcagcgcgcgccaggcaatgatcatcggcaccgccggctttaccgcgatgctatgcgttgatgctctcgttagtgcgggtgtcacccctgatagcggggatatcctggtcaccggcgccagcggcggggtcggcagcaccgccgtggtgttgctcaaagcccttggctaccgggtgacggccgtatcgggccgggaatcgacacacgattaccttcgccagctgggcgccgatacgatcctgccgcgcagcgacttcgcggagacccgtccgctggagaaacagctgtgggcgggcgcggtggataccgttggcggcccggtgttggccaaagtgctggcgcaaacgcaatatcgcggctgcgtcgccgcctgcggtctggccgggggcttcgatctgccgaccaccgtgatgccgtttattctgcgcaatgtgcgtctgcagggggtggattcggtgatggtgccgaccgctgaacgcgacgctgtctggcagcgtctggcccagcttctgccggagagctactaccagcaggcggccactgaaatcacgctggagcaggcgccagcgtatgccgcagatttcctcagcaataatattcatggtcggacgctggtcaatatcggccagtaa

SEQ ID NO: 211566 - DNA, 933 bp, Klebsiella pneumoniae
atggatgtcataagcatcattatggcggcgggcaagtcgtccgttgacgtcgcgctgtatacgctgttgccgatcatggtgatcatgctgatcatcatgaaataccttgaggtccgcggtatcctcgatgtgattgttcgctgggtggccccgctgctgaagcccttcggcttaaccgggatgagcgccttcgccctgatccagattaactttgtcagctttgccgccccgctcgccacgctgtcgattatggataaacgcggcgtctcggaccgacaaatggccgccacgctggccatggtgttcgccatggggcaaggcaacgtcttctatcctcttaccccttttggtctgcactggctggcctcgatcgttatctcggtggtcggcggcctgtgcgcggccgccgtcgcctggcacgtcaccggacggcgcttatcggtcgccgagaacccccgcgcggaagcgctgccgaacgccgagcagaacagccagggaattctggccgtgattaatagcgccggctccgacgccatccgcctggcgctcggcgcggtgccaatgctgatcctgtcgttaaccatcgtcgggctgctgcagggcgccggggctatcgacctgctgcagcagctgctgaagccgcttctcggctggctgcacatcccccagaactttgtgctgccggcgctggtgaagtgcgttgccgggggcaccgcctactttggcgtcatttccgagctgatccagcagggcaaagtcaccgtggaccaggtcaacgcctcggcaggtctactgatccagacctttgatcttcccggtatcggcatttttcttggcatcagctcacggtttgtccgcctgttccgcttcgtggctcccgcggcgatcgtcggtatcctgctgcgtaccgttctgcacctgatcctgttttaa

SEQ ID NO: 211567 - DNA, 1623 bp, Klebsiella pneumoniae
atgaagcatctatttcgacactggcgaacgtccggcgccgttatcggctccctgctgaaaaaagggagcattgcggtactggcgctgctggtggtctttctcgccgggcggatctatgagtcccagcgcggcccggccctgcatcgctggcatacctggagtggcaacgagatgtcggccgaagagatcgaccaggcgacctttgcccagtatctggcgcgggagaagacgattttcgccgatctccagcgtgaggtgacagaggctttgccggaggaagataaaaccccggtcaaccgcttttatcgtcacagccgggtctggccggggcagtttaagcaggactggaaccgttcttttgtgctgatgccgctgggcaagccgcgcggcagcgtggtgctcctccatggcctgaccgattcgccctacagcgtgcgctatctggcgcaactctggcagcagcggggttatgtggcggtggcgccgcgtttgccgggacacggcaccgcgccgggggcgttaacggcggttgactgggagacctggctggcggcgacgcgtctggcggtacgcgaagcgacccgccttgccggggcggacgtgccgctgcatctggtcggctactctaacggcggcgcgctggcgctcaagtatgccctcgatagcctggaggatagccacctgcgtcagccgcagcagatcattctgctgtcgccgatgatcggcgtgaccgcgtttgcccgtttcgccggcctcgccgggctaccgtccgtcttcccggcgttcgcccgcgcggcctggctgaacgtggcgcctgagtttaatccgttcaagtacaactcctttccggtcaaggcggcgagacaatcgtggttattgagccaagcgctgcagcagcagattatccgcgcggcccggcagggcgagctgaaagcgctgccgccgatcctcacctttcagtcggtgatggattccacggtcagcacccgcgcggtggtggagtccctgtatcgttatctgccggataacggcagcgagctggtggtgttcgatattaaccaggcggcggatctccgggtcctgtttcgccctgcgctctatgcggcggtgaatacgctgctgcccccggcgccgcgggcctataccaccacggtggtgaccaacgcgacggcacacacgctgcagaccgtcgcccggaccacgctggcccaggaacgggaagagcatcgttatcctttacacctggcctggccggcggatatgtactctttgtcgcatgtggcggtgccgtttcccctgagcgactcgctgtatggtcgcgagccggacgagaagaaccgctacggcattagcctgggcaccatttcactgcgcggagagaccgggacgctgagcgtggggctggagacgttaatgcgcgtcacctccaatccattctttccatggatgatgacgcgcgtcgatgagcgcatcgcctgcggcgaacaggcggcggtggcggcctgcctgaaagcgcagaccagagcagaggcattaaaacaggatcaggtgcagaacggtacgcagcaggataccgacgatcgccgcgggagccacgaagcggaacaggcggacaaaccgtga

SEQ ID NO: 211568 - DNA, 246 bp, Klebsiella pneumoniae
atggagtggtgggtaaaaaaagtacaggacaacgcttcggccagcctctgccgcgtcgtgcttcagagcggtgcgctggagatgatcgcagagattgaagcctgtcgcctccgcctgcgggaaggggataaactcactccgctggccgatgcgcgctattgcctgaataataatccgacgcaaactttgaagattcgcaacgccactcattatagcagcgagcgttggacaaacgccggcaaataa

SEQ ID NO: 211569 - DNA, 1455 bp, Klebsiella pneumoniae
atgaatatcaaggccgccagtctgaccccggaacaagcgcttgccgagctggaagcacgctatgaagcctcggtcacggcgttacgcaaagccatcggcgactatatcgaccataatacgctccccgataccgaagcccgcgcggaaggtctttttgtctatccgcagctgtcggtctcctgggacggcgccgatcataaagccctcaaaacgcgcgcctggggacgtttcacccatgccggttgctataccaccaccattacgaatccgaaactgttccgcaactatttgctggaacagctgaccctgctgtatcaggactatggcgcacatatcagcgtcgagctgtcgcagcatgagatcccctatccttacgtgatagatggttccaccctgacactcgaccgctcgatgagcgccggtctgacgcgctatttccctaccaccgagctgtcacaaattggcgatgagaccgcggatggcctgttccatcccaccgagttctatccgctgtcgcactttgacgcccgccgcgtcgatttttcgctggcgcgtctgcgtcactacaccggcacgccggcggaacacttccagccctacgtgctgttcaccaactatacccgctacgtggatgagttcgtcagctggggctgcagccagatcctcgatcccgacagcccctatatcgctctctcctgcgccggcgggatctggatcaccgccgagaccgaagcgccggaacaggccatttccgatctggcgtggaagaagcaccagatgccggcctggcatctgatcacccacgacggcaaagggatcaccctgattaacattggcgtcggcccggctaacgccaaaaccatctgcgatcatctcgcggtactgcggccggacgtctggttaatgatcggccactgcggcggcctgcgcgaaagccaggccatcggcgactatgtgctggcccacgcctatctgcgtgacgatcatgtactggatgcggtgctgccgccagatattccgatccccagcattgccgaagtgcagcgcgccctctacgacgccaccaagcaggtgagcgggatgcccggcgaagaggttaagcagcggctgcgtaccgggacggtggtcaccaccgacgaccgtaactgggagctgcgctattccgcttcggcgctgcgctttaatctcagccgggcggtagctatcgatatggagagcgcgaccatcgccgcacagggctatcgcttccgcgtcccctacggcacgctgctctgcgtctcggacaagccgctgcacggtgaaatcaagctccccggccaggctaaccgcttttacgagggcgctatctccgagcatctgcagataggcatccgggcgattgacctgctgcgcgccgagggagatcacatgcactcgcgtaagctgcgcaccttcaacgagccgccgttccgttaa

SEQ ID NO: 211570 - DNA, 1437 bp, Klebsiella pneumoniae
ttgaacgtcacctccgccgtacgccaggccgtcgaacgggcatcctggtttaaaaaacgtcagcgttatcgtgtgctgtactggcgcgaaatcagccctctcgctgtgcccattctgctggaaaatgcctgtgtgctgctgatgggggtgttgagcaccttccttgtcagctggctgggaaaagaggccatggccggggtggggctggccgatagctttaacatggtcatcatgtccttctttgccgccatcgatctgggcaccacggtggtggtggcctttagcctcggcaagcgcgatcggcggcgggcgagggcggccgcgcgccagtcgctggctattatgacgctgttttccattttgctggcgggggtgatccatgcctttggccaggagattattgattttgtcgccggcgatgccaccgcccaggtcaaggacctggcgctgacctatctggaactgacggcgctgagctacccggcagcggcgattgcgctgatcggcagcggggcgctgcgcggcgccggcaccaccaaaatcccgctgctgatcaacggcgggatgaatatcctcaatatcttaatcagcagcgtgctcatctacggcatcttctcctggccggggctggggtttgtcggcgccgggcttgggctgaccattgcccgctatattggcgcgatagccacgatctgggtgctgatggtgggcctcaatccggcgctgcggctgtcgctgaagggctacttcaaaccctttaacttcgccattatctgggaggtgatggggatcggcatcccggccagtatcgaatcggtcctcttcaatggcggcaagctgctgacccagatgtttgtcgccgggatgggcaccaacgttatcgccggcaactttatcgccttttcggtggcctcgctaattaacctgccgggcaacgccctcggctccgcctcgacgatcattaccggcaagcggctgggaaaagggcagattggtcaggctgaattccaggcctggcacgtattttggctgtcgacgatcattctgacgctgatcgcctggggcagcgccccctttgccggctttatcgcctcgttctacacccatgaagaagatgtaaaagaagtggttaaacagctgctgtggctcaacgccctgtttatgccgatctggtcgctgtcgtggactttaccctgcgcttttaaaggcgcccgtgacgtacgctacaccatgtgggtgtcgatgctcggcatgtggggctgccgggtggtggcgggctataccctgggcatcgtgctggggatgggggtgattggcgtctggttagggatggtgctcgactgggcggtgcgcggcgtgctgttttatttccgcatggtgagcggccgctggctgtggaaatatccgcgcgtgaaggcttcatcggaggaaagctga

SEQ ID NO: 211571 - DNA, 858 bp, Klebsiella pneumoniae
atgggaaacggatggcatgaatggccgctggtgctgtttacggtgctgggtcagtgcgtggtcggcgcgaccatcgtcagcggtcttggctggctggcgctgggggaccaacgggaagcccggcggcggctggtgcgcaatatgttttttatctggctgttgatgggcattggttttcttgcttcggtgatgcatctcggttcaccgctgcgcgcgtttaactcgctgaaccgcatcggcgcctcggcgctgagcaacgaaatcgccagcggcgctctgttcttcgccgtgggcggattctggtggctgctggcggtgctggaaaaaatgccggcgacgctgggtaaagtctggctggcgatcgccatgctgttagggctgctgtttgtcctcgcaatgacccgggtttaccaaatcaataccgtgccaacatggtacaatggctacaccaccagcgcgttctttctgacggtgctcctcagcgggccgctgtttgccgccctgctgctgcggctggcgaaagtcgactttaacggctggttttttgccggactgagcgtggccgcgctggtcatcagcgccgcagttatcattatgcaaagcgccgggctcagtacccttcacagctcggttcagcaggcggccaccctgctgccagattacggcaaactccaggcgctacgcctggtactgctggcgctgggcctcggctgctggctatgtccgctgatccgccgccagccgccgcgcgctacggggctgctgatcggcctgctgctggtcttgatcgccgaatgtattggccgcggcctgttttatggtctgcatatgaccgtcggtatggcggttgccggttaa

SEQ ID NO: 211572 - DNA, 609 bp, Klebsiella pneumoniae
atgatgccgatcccaaatcgcgacgccgtcgcgttaagcgcccgcaccctgggcgctctgttctcttatgcgccgaatagtgcggaaaatgcgccgctggtcgccgccttccaggacgggagctggcagcagcagtggcccttcccggtcgcagccccgctggcgtcagggtttgccgcatcggctgaagaaacgttgccggaagcctggcagcgcctgtttatcgggccatgggccctgccggcgccgccctggggctctgtctggctggataaagagtctgtgctgtttggcgattccacgctggctctgcgccagtggatgcgcgagaacggtatcgcgctggaggccgatggcaacgaaccggaagatcatttcggcaccgtgctactcctggcggcatggttgtgcgaaacggagcaggatgcgttgtttgcccagctgctggcctggcacctgctgccgtggtccgggcgtttcctgagcgtctttgtcgaccatgccgcccaccccttctatcaggcgctgggtcagctggcgcaggcgactctggcgcagtggcaggagaatctgccgatcgccgtggcgcaaaaaccgctctatcgttaa

SEQ ID NO: 211573 - DNA, 1296 bp, Klebsiella pneumoniae
atgcatcgtcttcatccctatcctgatgtgcaggtgatgtttcgccgcctgctgatcgccaccctgattggccttctcgccgccctggcggtggcgctgtttcgccacgctatggtggttctggaaacgctgttgctcagtaatgacagcgggagcctggtcaacgccgcacagtcgctgccggcgtggcgtcggctggttacccccgcgctgggcggcctgacggcgggaaccttactctggctctggcaacgacgcagcgtcgcgcgtccgcatgccgccaccgattatatggaagccctggagaccggcgacggctgtttcgatacgccggcaagcctggtgaaatcgctggcgtcattgctggtcgtggtgaccggcagcgcgattggccgggaaggcgccatgatcctgctggccgcgctggcggcctcgctgtttgcccgtcgcttcacgccgcagagtgaatggaagctatgggtcgcctgcggcgcggctgccgggatggccagcgcttatcatgccccgctggccggcagcctgtttattgctgaaattctctttggcacgctgatgctggcctcgcttgggccggtggtgatctcggcggtgatcgccctgctgttgacgcagtttcttaatggcggcgccgcgccgctgtatcacgtcgtgttacagcagaacctcagcgccctgcactatggcttaatgctggcgactggcctgctggccgggctgtgcgggccgctgtttatctggctgatggactacagccaccgcgggttcgttaaactgaagctggcgccgccgtggcagctggcgctgggcgggctgattgtcggcggcttatcgctcatcaccccggcagtatggggcaacggctacagcgtagtgcaaagctatttgctgctgccgccgtccggtgcgctgctggtgggcgtatttatctgcaaactgctggcggtgctggccagcagcggctccggcgcgcctggcggggtcttcaccccgacgctgtttgtcggcctggcgatgggcatgctgtttgcctgcttcagcaggctgtggctgccgggaagtgaagaaatggccatcatgatgggtctgaccggcatggcggcgtttctggccgccacgacccatgcgccgatcatgtcaaccctgatgatttgcgagatgaccgggcagtatacgctgctgcccggcctgctgataacctgcgtcgtgtcgtctgtgctgtcgcggacgttacgccgggattcgatctatcgccatcacgttgccgagcatgtctaa

SEQ ID NO: 211574 - DNA, 696 bp, Klebsiella pneumoniae
atgtttaagcgtttctttattacaggtacagacacctctgtcgggaagacagtggtttcccgtgcgctgttgcaggcacttgctgccagaggcaaaagcgtggccgggtataagcctgtggcgaagggcagcaaagagacgccggacggtttacgtaacaaagatgcgctggtgttgcagagcgtctccacgctggcgttaccttatgaggctgtcaaccccatcgccttaagcgaagacgagagcagcgtggcgcatagctgcccgatcaactacggtctgctgtccgatggtttgcagcgtctggccgcgcaggtcgaacacgtggtggttgaaggcaccggcggctggcgcagcctgatgaacgacctgcggccgctctccgagtgggtggttcaggagcagctcccagtgctgatggtggtggggatccaggaggggtgcatcaaccatgcgctactgacagcccaggcgatcgccaatgacggtttaccgctgattggctgggtggccaatcggatcaaccccggtctggcgcactacgccgaaatcatcgatgtcctcagcaaaaagctgccggcgccgctgatcggcgagctgccttatctgccgcgcgccgaacagcgtgagctgagccgctacgtcgacttagacatgctcggcaacgtgatggcgatagatcgaatcccggcgtaa

SEQ ID NO: 211575 - DNA, 1224 bp, Klebsiella pneumoniae
atggtggtagcggatagtcaaccaggccatatcgatcaaataaagcagaccaatgcgggcgccgtgtatcgcctgattgatcagctcggcccggtatcgcgtatcgacctttcccgatttgcgcaactggcgccggccagcatcaccaaaatcgtccgcgaaatgctggaagcgcatctggttcaggagaccgagatccaggagcccggcagccgcggccgcccggcggtggggctgatggtggagaccgaggcatggcactatctggcggtgcgcatcagccgcggtgagatccatctttcgctgcgtgatttaagcagtcagctggtggtggaggatcagctggagctggcgctcaccgacagcacgccgtttctgacgcgcgttatcgaccatattgatcgcttctttattcgccatcaaaagaagctggaacgccttacctccatcgccatgacgatgcccggtattatcgataccgaaaatggcattattcatcgcatgccgttttatgaggatgttaaagatgtcccgctcggcgaagcgctggccaatcataccggggtgccagtctatattcagcatgacatcagcgcctggactatggcggaatctttgtttggcgcctcgcgcggcgcccgggacgtcattcaggtggtcatcgatcataacgtcggcgccggggtgatcaccgatgggcgcctgctgcacgccggcagcagcagcctggtggagattggccatacccaggtcgatccctacggcaaacgctgttactgcggcaatcatggttgtctggagacgattgccagcgtagaaagcgtgctggagctggcgcagatgcgcatggcgcagtcgatgagctcgctgctgcaccagcgtccgctgagcgtggagtggctttgtcaggcggcgctgcagggcgatttgttagcccgggacatcatcagcggcgtgggtaatcacgttgggcggattctggcgatcatggtcaatctgtttaatccgcagaaaattctgattggctcgccgttcaatctggcggcagaaattctttttccggcaatttccagctgtattcggcaacaatctctcccagcctatagccggcatattaccgttgaaagtactcagttctccaaccgcggaacgatggctggcgcggcgctggtcaaagatgcgctctataacggatccttactcatacgactgttacagggttaa

SEQ ID NO: 211576 - DNA, 903 bp, Klebsiella pneumoniae
atgaatatcgagttgcgtcatttgcgctactttgtcgccgtcgctgaggagctacattttggccgcgccgcggcgcgactgaacatctctcaaccaccgctaagccagcagattcagatccttgagcagcagaccggcgctcgcctgtttgcccgtaccaaccgcagcgtcagcctgacggcggccggaaagcagtttctcgccgatagccgacaaatcctcgcccaggtggatgaggcggctgctcgcgccgcccgtctacaccatggcgaaacgggtgagctgcgcatcggctttacctcctcggccccttttattaaggccgtctccgatacgctatcgatgtttcgccaacgccttccggatgtgcatattctcacccgcgagactaacacccgcgaacagatagtgcccctgagcgaaggggctctggatttggggctgctgcgcaatactcaactgccggacaccctggcgtgggagcgggttctgcgcgagccgctgttggcgatggtcccggcgaatcacccgctggcccgccagccctcggtcagcctggcggcgctggcgcgcgagcccttcgtctttttcgacccgcacgtcggcactggcctgtatgacgacatcctcggcttgctgcgccgctacggccacacgccgaagattgcccaggaggtgggggaggcaatgacgattattggtctggtggccgccggcctgggggtatcgatcctcccggcctcctttcagcgcgtccagctcagtgaaatgcgctggctgccgatcgacgaacaggatgcggtatcggagatgtggctggtgtggtctaaacaccatgagcaaggggcactggcaaaacgctttcgtgaggcgctgctctcctggaaaagcgagcataattga

SEQ ID NO: 211577 - DNA, 1251 bp, Klebsiella pneumoniae
gtgagtcgtacaacaaccgttgacaccgtgccggcgggcgaggtcagcgtcgctggtgcatcccgcccggatccgtttattaagcgtggcaccccgcagtttatgcgcgtcactctcgcgctgttctccgccggtctggccacctttgccctgctctactgtgtgcagccgatcctgccggtgctgtcgaacgagtttggcgtgtcgccggccagcagcagtatttcgctttcaatttccacggcgatgttggcggtgggcttgctgtttaccggcccgctgtcggacgctataggccgcaagccggtgatggtcaccgccctgctgctggccgcctgctgttcactgttatcgactatgatgaccagctggcacggcatcctgattatgcgcgctctcatcggcctgtcgctgagcggcgtagcggcggtcggcatgacctatctgagcgaggagatccaccccagtttcgtcgccttttcgatgggactctatatcagcggcaactccatcggcggcatgagcggccgcttgctgaccggggtctttaccgatttcttcggctggcgcgtggcgctggcggcgatcagcggctttgcgctggccgccgcgattatgttctggcgtatcctgcccgagtcgcgccatttccgcccgacctcgctgcgaccgaaaacgctgctgattaacttccgtctgcactggcgcgaccgtggcctgccgctgctgttcatcgaaggttttctgctgatgggcgcttttgtcaccctgtttaactatattggctaccggctgatgatgtcgccgtggtcgttaagccaggcggtggtaggcctgctgtcggtagcttatctcaccgggacctggagttcaccgaaggcaggggccatgaccgtacgctttggccgcgggccggtgatgcttggctttacagcggtgatgctctgcggcctgctgctgacgctcttttcttccctgtggcttattttcatcggcatgctgctgttttccgctggcttcttcgccgcgcattccgtcgccagcagctggattggcccacgcgcccgccgcgcccgcggtcaggcgtcatcgctgtatttgttcagctattatttgggttcaagtcttgccgggacgttaggcggggtattctggcatcactacggctggaacggcgtcggtgggtttatcgcgctgctgctccttgccgcgctgttgaccggcacctgcttacatcagcgactgaaatag

SEQ ID NO: 211578 - DNA, 1488 bp, Klebsiella pneumoniae
atgactgaaaatacgccttatcagcagcttacccgtacctttcagcgcctgtcgcgcttttcgcatctcgccgccatcgccggctgggatatgttcgcgatgatgcccccgggcgggagcgtcgcccgcggcgaagcgctggccgagctcggcgtgctgcagcatcagatcctgaccgataaaaaagtgggacaatggttacaggaggcccgccagcaggatcttaatgatgttgaacaggccaacctgcgggaaatgcagcgtcagtacgatcaggcggcgctgctgccggagagcctggtggaagcaaaatcgctggccggcagccgctgcgagcatgcctggcgcagccagcgtcccgccaatgactggacgggctttgccgacaacctacgcgaggtggtcagactgagccgtcaggaagcgcagatccgcgccgatgccaggggcggctcacgttacgacgcgctgctggatattttcgaaccggatatgaccagcgcgcggctggacagcctgttcgccgatctcaaatcgtggctaccttccctgcttagccaggcggtggagaagcaggcgaagcagacgctaatcgccccgcaggggcctttccccattgctgaacaacgggagctgggcctgcaggcgatgcgtatccttggctttgacttcgacggcgggcgcctcgacatcagcgcccacccgttctgcggcggcgtaccccaggatgtgcgcatcaccacccgctacaacgaaaacgacctgctcagcgctctgttcggcgtgatccacgaaaccggccacgcccgctacgagcagaatctacctcgcccgtgggtcgaccagcccgtaggactcgcccgctccaccgctatccacgagtcgcagagcctgttttttgaaatgcagctgggacgcagcgagcggtttcttaaccgcctgttaccggcggtgcgcgagcggtttggcgatcggccggcctttagccaggacaattttgtcgcctggaatcagcaggtgaaacccggctttattcgcgtcgatgccgatgaggtgagctacccggcgcatgtcatcctgcgttatgaaattgaacgtgcgctgatcgacggcgagattgaggtagatgatatcccgtcgctgtgggacgagaaaatgcagcactggctggggctgtcgaccaccggcaactatcgggatggttgcatgcaggatattcactggaccgacggcggattcggctatttcccttcctataccctgggcgcgatgtatgccgcgcagttgatggccgcggcccgccgcgcgctgccgacattagatcgcgatattgaggaaggcgatttcagcgccctgttcgactggctgcggcagaatatctggcagcatggcagccgcttcaccacctcgcagttgattcagcaggccaccggtgaggatcttaatagccgctacttccgcgagcacctgaccactcgctacctgtaa

SEQ ID NO: 211579 - DNA, 372 bp, Klebsiella pneumoniae
gtgtttagtggttttgtggtgttttttcgctgcctgcgctttctgggctgccggtttagccgcagctttgtgatgctttttcgccgcctgagctttctgcggagcagctggtttagctgctacttttttgtgttttttagcggcctgggctttctgagcagcggctggtttagcttctgcttttttgtgttttttggcagcctgagctttctgctctgcggccggttttgccgcggctttgtggtgttttttgtgatgggtggtcttggcagccgtgctgtgggtggcagccggagcctgagtggtgcttactgcgtcagcagcgaaagcggcggaagagagacccatagcagcggcaacgaccagagctaa

SEQ ID NO: 211580 - DNA, 813 bp, Klebsiella pneumoniae
atgcgtagagacgttctgttattactgtgttcattttatctgttacctctgggcgcacatgccgatgatagcggactgagcgccaaagatattaagacgttgtttttcggtcacgatgaccgcaaagcggtgaaccgccccgaggagagtccgtgggacgcgattggccagctggaaaccgccagcggcaatctgtgtacggcgacgctcatctctccgcatctggcgctgaccgcgggccactgtctgttaacgcccccgcgcggcaagccggacaaagcggtcgccctgcgctttatttcccgcaagggcaactgggtctatgagatccacggcattgacgggcgagtcgatcccagcttaggcagacgcctgaaagccgatggcgacggctggattgtcccttccgctgcagcgccgtccgattttggtctgatcgtgctgcgctatgctccgtctggcattacgccgatcccgctctttccgggcagcaaggccgatctcaccgccgcgctgaaggcggcggaccgtaaagttacccagtctggctatcctgaagatcatctcgataatctttacagccaccaggattgcatcgtgacagggtgggcgcaaaccagcgtactgtcgcatcagtgtgacaccctgcctggcgacagcggctcgccgctgctgctgaaaacggaggacggctggcaggtgatcgccgtgcagagttcggcccccggcccgcaggatcgctggcgggcggacaatcgcgccattgcggtgactggctttcgcgataagctggaggcgcttgccggtgagtaa

SEQ ID NO: 211581 - DNA, 330 bp, Klebsiella pneumoniae
atgcagcagtttgagtggatccacgccgcctggctggcaatcgccattgtgctggaaattattgccaacgtctttttgaagttttccgacggcttccgccgcaagatctacggcatcctgtccctggcggcagtattgggcgcgttcagcgccctgtcgcaggcggttaaagggatcgatctctcggtcgcctatgcgctgtggggcggcttcggtatcgcggcgaccatcgccgccggctgggtgctgtttggtcagcgtctgaataacaaaggctgggcgggggttatcctgctggtagccggcatggtgttaattaaactcgcctga

SEQ ID NO: 211582 - DNA, 363 bp, Klebsiella pneumoniae
atgttttattggattttattagctttagcaattattgctgaaattaccggcaccttgtctatgaaatgggcaagcgtgagcggcgggcacaccggctttattttaatgctggccatgattgccctgtcatatatttttcttgcctttgcggttaaaaagattgccctcggtgtggcctatgcgttgtgggaagggatcggtattttactgattaccctgttcagcgtgctgctgtttgatgagagtctgtccctgctgaaaatagccggcttgaccaccctggtgatagggatcgtcttaattaagtccggcacccagaaaaaagcgtcttccaagcaggaggtggcccatgcagcagtttga

SEQ ID NO: 211583 - DNA, 1035 bp, Klebsiella pneumoniae
atggctaaacccattattacacttaacggattaaagatggtcatcatgttgggcatgctggtgatcatccttaccggcattcgctttgcggcggacataatcgtcccgtttatcctggcgctttttctggcggtgatcatcaatcctctggtccagctcctggtccgctgccgggtgccgcgcgtgctggcgatctcgctactgattggcctgattgttatgttagccattgtgctgctggcctcgctggggacctcgctcaacgagctggcgcgcaccctgccgcagtatcgcaactatctctatgagccgatgcaaaccatcgcgccctggctgcagcgtatgggattcaccgtttcggtggtcgagctcaataagtacatcgaccctaacgccgtaatgaccctggtcaccagcctgctcactcagctgtcgaacgccatgtcctccatttttctgctgctgctgacggtggtgtttatgctgctggaggtgccgcagcttcccgctaagctgcagcagttaatgtccagaccagtagaaggcatgggcgccatccagcgggccatcgacagcgtatcgcattatctggtgctgaaaactgcgataagcctgatcaccggcctggtggtctggggcatgctggtgctgctggatgtgcgcttcgcctttatgtgggggctactggccttcgcgcttaactatattcccaatatcggttccgtgctggcggccattccgccgatcctgcaggtgctggtgttcggtggtctgtacgaggcgctggtagtgctggccggctacctgatcgtcaacctggtattcggcaatattctcgaacctcgtatcatgggacgcgggctgggcctctcgacgctggtggtattcctgtccttaatcttctggggatggttgctgggtccggttggcatgctgctctcggtgccgttgacgattatcgtcaaaattgccctcgagcagaccagcggcgggcagagtatcgctttcttattaagcgatgttagtaaacagtag

SEQ ID NO: 211584 - DNA, 1656 bp, Klebsiella pneumoniae
atgaatgccgaacaaacgacggggcgggtctggaaccgtcgccgaacggaaaaacagcggcggctggccgaggcgaacatgccaggtaaggtcatcccgactgaccagttggtcagcgtactggaaaacctgctcgcccccggcgaccgggttgtgctggaaggcaacaaccagaaacaggccgatttcctctcgcgcatgctggcggaagttaatccgcaaaaaatccacgacctgcatatgattatgcccagcgtcgggcgcagcgagcatctggacctgtttgaaaaaggtattgcccgcaagctggatttctctttctccggcacccagagcctgcgcatttcgcaactactggaagatggcctgctcgaaatcggcgccatccacacctatattgaactctactcgcgcctgtacgtcgatctgtcgccaaacgtcgcgctgattgccggctataaagctgaccgcaaaggcaacctgtataccggaccgagtaccgaagataccccggcgctggtggaagccgccgccttccacgacggcattgtgatagcccaggtcaacgaactggtggacgacgaatgcgatctgccgcgcgtcgatattcccggctcgtggatcgattacgtggtggttgccgacaagccgttctttatcgaaccgctcttcacccgcgatccgcgcctgattaagcaagaacacatactgatggcgatgatggcgatcaagggcatctatgcggaacatcaggtgcagtcgcttaaccacggtatcggctttaataccgccgccatcgagttgctgttgccgacctatggcgagcagctcggcctgaaaggcaaaatctgtaaacactggaccctgaatccgcatccaaccttaatcccggccatcgagagcggctgggtggagagcgtgcactgcttcggcggcgaactggggatggaagagtacatccgcgcccgcccggatatcttctttaccggcccggatggctcgatgcgctctaaccgcgccttctgccagctggcgggccagtacgcggtagatatgttcattggttcaaccctgcaggtggatggtctggctaactcctcgaccgtcacccgcggccgtctttccggcttcggcggcgcgccgaacatgggccacgacccgcacggtcgccgccacgccaccccggcatggctcaatatgatcaccgagccggacccgatgcagcgcgggaaaaagctggtggtgcagatggtcgaaaccttccaggccggcgtgaaaccaaccttcgttgagacgctggatgcagttgaggtggcgaaaacctccggcatgccgctggcgccggtgatgatttatggtgatgacgtcacccacgtcctgaccgaagagggtatcgcctacctgtaccgtgcggagagccttgaagagcgccgggcgatggtcgccgcggtggccgggatcaccgatatcggccttggtgtggacgccaaacgcgtcgccgcgctgcgtcagagcggcaaagtggtctacccggaagatctcgggattcgccgcagcgatgccacccgctccctgctggccgccggcagcgtcgccgagctggtggagtggtccgacggactgtacaacccaccggcaaaattccggagctggtaa

SEQ ID NO: 211585 - DNA, 843 bp, Klebsiella pneumoniae
atgaaaaatctctcccccctgcacgcagaaagccgcgtcagctggctggcgcataccgccagcgcctgtctgattgacgaagcccgtctgagcccgaaaccgggtctggtggatagccgcggcaacggcgcgcatcaggacctgaatctggcgctgatggagcgctccgcccgcagcctgcagccgacctttcacgcgctggccgagcaaagctggcgtcgcccggcggacatcgcgctgcgcgaaaccgtcggccgccttggccgcgaaggcgaagcgcagatgatgctggcgacgggtggggttaacacccaccgcggcgctatctgggcgctaggcctgctggtcagcgcggtggcgatgttgggtggagagggtcagtcacaggcgatcgccgacgccgccgccgccctcgcccgcctgcccgacggcttcgcgccgaaaagctttagtaaagggcttcgcgccagccgccgctggcaggtgccaggcgcccgcgaggaagcgcagtgtggtttcccgcatatcacccgcctggcgctgccgcaactgcagcacagccgggcgcgaggcgccagtgagccgcaggcgcagcttgatgcgctgatggccatcatgacctcgctgagcgatacctgcgtgctgtcgcgcgccggtatggccgggctgcaggccatgcagcaaggcgcttgtgaggtgctggcggctggcggttgcgccagtttcgccgggcgcgccgccctggcccgcctggacgcaatcatgctggcgctaaacgcctcgccgggaggcgccgccgatctccttgccgccaccctgtttctcgacagagttgccggctaa

SEQ ID NO: 211586 - DNA, 300 bp, Klebsiella pneumoniae
atggaacagattacattgtcatttcctgccagccgcgccctgagcggccgagcgctggcaggagtcgtgggttcaggcgatatggaagtactttataccgccgcacagagcgccacgctcaacgtacagatcatcacctcagtggataacagccaggcgcgctggcaggcgctgttcgacaggttgaacctgatcaacggcctgcccgccgggcagttgattatccacgacttcggcgccacgccgggcgtcgcccgtattcgtattgaacaggtttttgaggaggccgctcatgcgtaa

SEQ ID NO: 211587 - DNA, 834 bp, Klebsiella pneumoniae
atgcgtaacgatcgcagctttatcgaactgcgcgctcgcgaacgcgcccacgccctgctggacgacggcagctgccgcgaactgctggatccgtttgacggtattatgtcgccgtggctcggcgcccagggcatcgtcccgcaatccgatgacggtatggtggtcgccaaaggcacgatcaacggccagcctgcggtggtgattgccatcgagggcaccttccagggcggcagtatgggcgaagtgtccggcgccaaaatggccgccgcgctggagctggcggcggaagataaccgcaacggtatcccgacgcaggcggtgctgtgcctcgaaaccggcggcgtacgtctgcaggaggccaacctcggtctggccgccatcgccgatattcacgccgcgattgtcgacctgcgccgctacaccccagtggtcggcatcatcgccggcaccgtcggctgctttggcggtatgtctatcgccgccgcgctgtgcagttaccttatcgtcactcgtgaagcccgtctcggtctcaacggcccgcaggttatcgagcaggaagccggcattgaagagtacgactcccgcaaccggccgtttatctggagcatgaccggcggcgaaattcgcgccgccagcggactggtcgacgcgctggttaacgatggcgttaacgccgttaaaaccgcaatgaatgaggcgatcgccaaaggcgtaccggtacagcaccgcagcgacaactatgacgattatctgcgtcgcttgagccagttcgacacccgccagcaggcggataccgcgcagattaaacagctttttgcccgggaggataaataa

SEQ ID NO: 211588 - DNA, 801 bp, Klebsiella pneumoniae
atgagtcagttcccaaaccgcgccgcgctgtggctgaacaaactggcgcccgacgtgccgctgatgagcggcctgtgcccttccgtccaggtggcagacggccagattaatggcgaaaacgtgcgttttatcgccgtggtcccggatgctaacaaccactacccgcgcgccgccggcggcgaagtcggcctgctggaaggctggacgctggcgaaagtggttaatgaaaccatcgccgccgacgccgaccagccagtcaaacggccgatcgtcgccgtgatcgatgtgccaagccaggcctatggccgccgcgaagaagctttcggcattcaccaggcgctggccggggcggctggcgcttatgccaaagcccgtttggccggccacccggtaattggcctgatcgtcggcaaagcgatgtccggggcgtttctggcccacggctaccaggccaaccgcctgatcgcctttaacgatagcggcgtgctggtccacgcgatggggaaagaatcggcggcgcgcattacgctgcgtaccgtagaggcgctggagaaactggcggctaccattccgccaatggcctacgacgtcagcaactatgcgacgctcggcctgctctccgccctgctggatattaataatccggatgcccctgacgatcacgatctgtcgttggtcagcaacacgctgcgcgacgccatcgctgatgcgcgcaccgatgcctcactgaagtgccgcctgggcgcggaaaaccgccgcagctcgcaactggttcgcgatcgcatgcgcgccagctggtaa

SEQ ID NO: 211589 - DNA, 960 bp, Klebsiella pneumoniae
atgacttatgtgattattcatgctcttgccccgattttcgttatcatgctgctgggcttctgggccggtaaggccgggatggtagataacaaaaacgtctcgctgcttaatatttttgtaatggattttgccttacccgccacgctgtttagcgcgacggtacaaacgccgtgggccgggatcgtcgcccagtcgccgctggtgctggtgttgaccggcgcgatgtggatcacctatgccgcgatctacttcctcgccaccagcgtgttcaaacgcacgccgcaggatgccgcggtgctgaccctcaccgtcgccctgccaaactatgccgcgttaggtctgccgatcctcggcagcgtgctgggtgaaggcgcgtcaacctcactgtcggtagcggtctctatcgcctgcggctcggtgctgatgaccccgttctgcctgctgattctggaacgtgaaaaagcccgcgccgcgggagaaaacagcggttctacgctggcgatgctgccggtgctgatgtggcgttcggtgaaaaaaccgatcgtctggggcccgctgcttggggtggtgctttccgcgatcggcattaaaatgccggacctgctgctggcgtcgatcaaaccgctgggcctggccgccaccgccgccgcgctgttcctcaccggggtgatcctgtcggcgcgtaaactgcagctcaatgcgctgatcgctacatcaaccatcgtgaaactgctggtgcagccgtttattgcctggggtctggtgatgttacttgggctgcacggttctatcgccattaccgcgatcctgatgattgccctggccgccggcttctttggcgtggtcttcggcaaccgcttcggcgtccagtctccggatgctgaagccgtgctgctgttgagctcggttctgtgtatcctgtcgctaccgctgtttatctctttgacttcaggactgtaa

SEQ ID NO: 211590 - DNA, 618 bp, Klebsiella pneumoniae
atgtcagcaacgccgcgtccccatgatctagtttggttaaaccacgccagcgccctggaagatattgccgagccgtgggtggctcagcagtggcgagccgcgctgccggtggtggtgaggcgcgacgttgacgaccaggcccgcgtcccggttggggtgcggggcatgaagcgcgagcagcgcgccgccggctgggtacaggcgcgcaatatcgtgcgcagcgtcaccccggagatgcttgttgatcgtgaggtcttactccattcgccttttgtctcgcagccgccggtccagggggctatcgccctcaccttacaccgctggccctggggctggggcgtcaccggcagtaccggctacgcgctggcaaccgagatcccggtgctgcatgcggccagcgatctggatctgctgatccgcgcgccacagccgttggaccgcgaggcgctgctggaatggcagacccgggtggcccaactcccatgccgcgctgatacccaggtcgaaacgccgtacggcgccttcgcccttaatgaatggctgcgcgacgggcgcgcgctgctgaaaacgtcccgcggcgcgcgcttaaccgcgacgccgtggcacagggaggaataa

SEQ ID NO: 211591 - DNA, 903 bp, Klebsiella pneumoniae
atgaagattttatttacctttcccggtcagggcggccagcgtcccggcatgctggcgatgatccccgatcgcgaggcaatcctcacccaggcgcgcgccgtgctgggggatgaagtcgctactctcgatagcgccgatgcgctacaacacacccgtgcggtccagctctgtctgctgatcgccggtgtcgcctgggcgcgcgagctacagcgtcagggcgtggatccgcagatggtcagcggcctgtccatcggcgcgtttccggccgcggtgattgccggcgcgctcgatttcgccagcgcgttgcggctggtggccctgcgcggggacttaatggaacaggcgtatcctgaaggttacggactgacggcgattatgggcctgacccgcccgcgggttgaggcgctgatgcagggccacgaggtttatctcgccaacctgaacgccgaaacgcagttcgtgattgcgggccgtgatgaggcaatggccgaggtggcgcagctggcgctgcgggctggcgccagtaaagcccagcggctggcggtcagcgtgccgtcgcactgcgcgctgctggataaacccgccgctgagctggcgaaagcttttgccggcgccagcttaaggcgcccacggtgcgcctatttaagcggctcgacggcgcgcgtgctgtgggatccgcagcggatcgccgacgatctggcgatgaacatggcgcgcccggtccactggcaggaggcgatggtcgccgccgatgagcgcgatgcgcgcttagccattgagatgccccccgggggggtgctcacctgcctgacccgccaggcgggctggcgcggggagaccattgcgctggagcgcagcggcctggacgtcgcccgccatctggcgcagcggcttagcgattaa

SEQ ID NO: 211592 - DNA, 927 bp, Klebsiella pneumoniae
atgcaagaggatattaaccaggagatcaccttccgcaagctgtcggtctttatgatgtttatggcgaaaggtaatatcgccagaaccgccgaagcgatgaaactcagcagcgtcagcgttcaccgcgcgctgcataccctggaagagggggtgggctgcccgctgtttgtccacaaagggcgcaacctgctgccgctgcaggcggcgtggacgctgcttgaatactgccaggatgtgataagtctgatgaaccgcgggctcgaggcgacgcgcaaggttgcaggcgtcggtcaggggcggttgcgcatcggtaccctctattctctgaccctggaaaccgttccgcgcatcattatggggatgaagctgcgtcgcccggagctggagctggacctgacgatgggttcaaatcagatgctgctggatatgctggaagacgatgccctcgatgccatcctgatcgccaccaacgaaggggagttcaataataccgctttcgacgtggtgccgctgtttgaggacgatatttttctcgccgccccggcgaccgaacggctggatgcctcacggctcgccgatctgcgcgattacgccgaccgcaagtttgtttcgctggcggaggggttcgccacctatgccggattccgggaagcattccacatcgccggcttcgagccggagatcgtcacccgggtgaatgatattttctcgatgattagcctggtgcaggctggcgtcggttttgccctgctgccggggcggatgaagaaagtgtatgagaaggatgtacagctgctaaagctggcggaaccctaccagatgcgccagctgatctctatcgtctattcgcaccatcgcgaacgcgatgccgacctgctggcgctggcagcggaaggacggatgtacgcccgcagtattaatcgctaa

SEQ ID NO: 211593 - DNA, 1647 bp, Klebsiella pneumoniae
atgaaaaaaacgattatttccttaaccgcattagcgatgttggtcagcgcggcgacgcatgctgaagcggatacctcgaaaaaaaccgacttcctgctgattggcggcgggatcatgagcgcctcgctcggcacctggctgcaggcgctgcagccggactgggatctgaccatggtggagaaactggacggcgtggcgctggagtcttccaacggctggaataatgccggtactggccactcggcgaatatggagctgaactatacgccggagcgggcggacgggtcgattgacgtcagcaaagcgctcgatattaacgagcaatttatgatttcccgtcagttctggtcggcacaggtgaaacgcggtattttgcacgatccgcactcgtttattaattccacgccgcatatgagcttcgtctggggtgataatgtggattatctgcagaagcgttataacgcgctgcagcagaccaccttattccaggggatgaaattctccaccgatcacgcgcaaattaaacagtgggcgccgctggtgatggaaggccgcgatccgcagcagaaagtggcagccacctggacgccggtgggtaccgatgtcaactacggcgaaatcactcgccagctgatcggcagcctgaagaaaaataaccacttcaccctgcagacctcctctgaggtaacggatttcaaacgtaatgccgacaactcctggcacgtaacgattaagaatgtgcagagcggggaagcgcagactattgacgccaaatacgtctttatcggcgccggcggcggcgcgttgaagctgctgcaaaaaaccggtattccggaagcggacaactatgccggcttcccggtgggcggctcgttcctgatgaccgagatcccggcggtcactgcgcagcacctggagaaagtgtatggccaggcttcagtcggcgcgccgccgatgtcggtgccgcaccttgatgcacgttacctcgacggtaagcgcgtggtgctgttcgggccattcgccaccttctcgaccaagttcctgaaaaatggttcgttcttcgatctgctcagcactaccacaaccaataacgtgctgccgatgacccacgtcggtctcgacaacttcgatctggtgaaatacctggttagccaggtgatgctcagcgatgatgaccgtttcgctgcgctgaaagagtactacccggacgcgcgtaaagaagactggaaactgatccaggccggccagcgcgtccagatcatcaagaaagacgcagagaagggcggcgtgctgaagctcggtaccgaagtggtggtcgatcagcagaaaaccatttccgcgctgctcggcgcgtcgccgggcgcttccaccgccgcgccgatcaccctgaacgtgctcaagcagatgttcccgcagcagtttaactcgccggagtggcagagccgcattcacgctattgtgccgagctacggccagaagctgaacggtaacgtggcgctgacccagcaggtttgggatgacaccgctgcgaccctgcagctgacgaaaccgccggtgatccagatgccagcggctgcgcctaccgcgaccgccaagccggcagagacgccgcgcgaggcctcgccgcagcacgatatggcactgtaa

SEQ ID NO: 211594 - DNA, 921 bp, Klebsiella pneumoniae
atgagcagttcgctaaccgcgtcaatgcaggctcgtcgtcacccggagaccacccacatcgatcgcctcgccaccgccgatatgctggcgatgctgcatcaggatgataagcagatatcggaggcggtcggcgcctgtctgccggatatcgcccggctgattgatatcgccaccgcgacgataagccggggagggcgcctggtcattattggcgccggcgcttcgggccggacgaccattgaggcggtcagcgactattcgccggaaggtaaacacgcgctggtggggctgattgctggtgggcagacggcggcgatggccgagcgggagactgcggcgaataattatgacctgggcgcctttgagctgcagtcgctggacttcagcaaccgcgatatgctgctggcgctgaccgtcagcggcaagacgccatgggtgtggggggcgatgcgccacgcctggtcgctgggcgccccgatagcggtcatcacccagcagccgaccagcgaggcggcgcagctggcggatatcattattgctccgcagaccgggccggaggcggtggcggggttagccaatccgaaggctcagttggcccagaggcagatcgtcaatatgctgacaaccggactcgccatccgtgacggtcgggtgtacagcaatttgcgggtggacgtgcaggctgacaattcgcactgggcggagcggcagatagcgattgtgatggcggccaccgattgcacgcgcagtgaagcaaaggccgccctggccagctgtcatcagcactgccgcaccgcgatcctgatgctgctcagcgggcttgacgcctggcacgcgcgggagctgctaaccaaacatcacgatcatctgcgtctcgccctgcgtgaagcccagcgtagcgctgtcactcccgcccagtaa

SEQ ID NO: 211595 - DNA, 357 bp, Klebsiella pneumoniae
atggaactggcttttctggtccgggatatcctccggcagcggcacgttgaacgtctggcgcagcatcgtgaacaggataatgaagcggaagcagagtgggagatcgcccgctggcggcatcgcagcggggtggtgatccagcgccgctatgagctcgagatcgcgcagcaggatagcgcatcctgcccggagtgctggattgactggcaggttatcgacgccgccggccaggagatcaacccgatgcgcaaacagttttataacctttgccagcaatccttctggctggctatgcaggcgggtggtgaagatgagacctcagacagaattgctcagataaccgacaatcacccgtaa

SEQ ID NO: 211596 - DNA, 1617 bp, Klebsiella pneumoniae
atgaaggcttcagagcacccgcctcgcgttcgccaacgcgccttaccgttaaagctgagcaccgccgtgtccttgatgatcggcagcgtcatcggcgccgtgctgctgctggtgtatgccttgtggtatatgcagatcagcaacgccacccgcgacggtctgaaagagaccgcgctggcggtggcgcgcaccatggccgatatgccgcaggtgaagcgcggactggaggcgcccccgcagcagcagatcattcagccgctggcgcaggccattacccgccgcaacgacctgttgtacgctatcgtcaccgatatgcagggtattcgctattcgcatccggacagctcaatcatcggcaaaccgttcatcggccacgatattcagccgacgctgcagggaaaagagaatgtcgccatcaaccacggggtgctggccccggcgctacgggtgtttacgccggtgttcaacgaacggcatcagcaaatcggcgtggtggtggtcggcatttcactgagtaaagtggacgaacagatcgccaacagccgttgggacgtgctgctgaccatcctgttcagcgcgctggtctgcgcgctgggcacctggagcctggttcgcggcctgaagcgcgtgctgctggggctggagccgcacgaaatatccacccagtttcagcagcgtcaggccatgcttcacgccctcaaggagggggtggtggcggtcgatgcccatggcgaggtaaatctcatcaactccgcggcggaagagatcctcttttccggcccggataagactctcgttcacagccccctgctcgacgatctgcagaccgtactgcagagcggcgagccaatgtacgaccgcgaactggggtgcaatggtctgctgctgatcggcaatacagtgcccattcgcagccagggtgcggtggtcggcgccatctgtaccttccgcgataaaactgaggtcagccaattgctgcagcgactggacggcatgatgagctatgtggatgccctgcgcaccacctcccatgagtttatgaataaattgcacgtgatcctcggtctgctgaatatgaaaagctacggcaaactcgaggaatacgtgctgcagaccgcccaccgctaccaggcggacatcggcgacattcagcaccgcattaaatccccggtggtggccggcttcctgataagtaaaattcagcgcgccacagagtgcggctttaccctgacgctggcggaggagagcctggtgccggattgtccgaacgagaaacaggtcacggtgctggtgacggtgctgggcaaccttattgagaacgcgctggacgccatgagcggccaggcggagggtgagatcggcctgctgctgcactaccaggacggctggctaagcggtgaagtgagcgacgatgggccggggatcccggagaacaacatcgacgctatctttaacaaaggcttctccaccaaaggcgagaatcgcggcgtcgggctgtttcttgctaaccagcagttgcgcgagctcggcggcaccctcgccgtcgaatcggaacccggcgtatttacccaattttttgttcatctcccctgggatagtaaaaggaaacctgcgtga

SEQ ID NO: 211597 - DNA, 720 bp, Klebsiella pneumoniae
gtgataaatgttttaattgttgacgatgatgccatggtggccgaactgaatcgcctgtacgtggcaagggttcccggctttcgttgcagcgcgagcgcttcgacgctcagtcaggcccaggagatgattaacgatccgcagcaggagatcgatctggtgctgctggatgtctacatgcagcaggacagcgggctcgatctcctgccaaccatccgcgagtcggggcgcgccatcgacgttatcatgattacctcggcggcggatgccgccacggtacagaccgcgatgcattacggggtggtcgattacctgattaaacccttccagtttccgcgctttgaagaggcgctcaccacctggcgggagaagcgcaaactaataaccggccagccctattacgaacaggccgatgtcgaccgcctgctgcacggcggcgcgccggaggccagcgacgcgcgcaagctgcctaaagggttaaccgcgcaaacgctgcgcacactctgccagtggattgacgcccatccggatgtcgaattctctaccgatgagctggcggcggcggtgaatatctcccgcgtttcctgccgcaaatatctgatttggctggcgcagatcaatattctctataccactatccactacggcgctaccgggcggccggtctatcgctaccgcctggtcgccgaacagtacagtttgcttaagcagtacagtcaataa

SEQ ID NO: 211598 - DNA, 951 bp, Klebsiella pneumoniae
atgtccgataaccgcgtctatagctactccgccgtgttgatgggctcgcccatcctgctcaaactctgttcccacgatgaggcgatggcctcccgcgttttccagcttatcaagcgctacgaagacctgcttaccgttaaccgcgccgagtcgcaggtgatggatatcaaccatgccgccgggcgtcatccggtcaccgttagccgaccggtctttcagctgatccagtgcgccaaagcagccagcatggtgcgcgacagcgcctttaacctcgccatcggcccgctggtgaagctgtggcgaattggttttcacgggcacagcgtgcctgacgcggctgatatcagagcccgactggcgctgacccgcccacaggaggtgatccttgatgaggcaacctgcagcgtgtttctgcaacagccggggatggagctggatctcggggcgatcgccaaaggctatatcgctgaccgcgtgcgcgattttctccgtcagcagcaggtggagaaggcgctgatcaacctcggcggcaatgtgcataccctcggcgaatgggccattggcctgaaaaaaccatttgccgacgcgcaggcgctgatcggttccctgacggtcaacgggcaatcggtagtcacctccgggacctacgagcgctatttcgaacaggatggcaaacgctggcaccatattctcgacccgcgcagcggttatccgctggacaacgaactcgacagcgtgacggtcatttccgcggattctttagacggcgacatctggaccacgctgctgttcggcctcggcgtggagaagggctgcgcagcgctgcgtcagcggcaggatatcgacgcgattttcgttaccaaaaatcgcgacattattctctcatcgccgcagcggctgcgttttgcgtcgctggacagcggctatcgggttattgactgtactgcttaa

SEQ ID NO: 211599 - DNA, 2778 bp, Klebsiella pneumoniae
atgaccagtaacgaacgtattttgcagccatttactttaccaaatggtaccgagctgaaaaaccgtttgctcatggcgccaatgaccacctgcaccggttatttcgatggtactgtcaccagcgagctggtggagtactaccgcgcgcgcgccggaagcatcggtaccattattgtcgagtgctgctttattgatgactacggtctggccttcccgggcgcgatcggcatcgataatgatgaaaaaattgccggcctggcgaaaatcgctgaggcgatcaaagccgagggttcaaaagcgattctgcagatctaccacggcggccgtatggtcgacccgcagctgatcggggggcgccagccggtggcgccgagcgctattgccgcgccgcgtgagggcgccgccatgccgcgggcgctgagcggagaagaagtggaagggatgatcgccaagtttggcgacggcgttcgtcgcgccattctcgccggtttcgacggggtcgaaattcacggcgccaacacctatctcattcagcagttctattcgccgaactccaaccagcgcgatgacgagtggggcggtagccgcgacaaccgcgcccgtttcccactggcggtgctggatattacccacaaaatggcccgccagtatgctgacgatgcctttatcatcggctatcgcttctcgccggaggagatggaggtcccggggatccgctttgacgacaccatgtatctgctggaaaagctggccgcccgcggtgtcgactatctgcacttctcggtgggtgccaccctgcgtccgtctatcgtcgataccagcgacccgacgccgctgatcgagaaatactgcgcgatgcgctctgacaccctcgcccaggtgccggtgatgggcgtcggcggggtggtgaacgccgctgatgccgagcagggcctcgatcatggttatgacctgatcgccgtgggccgcgcctgcatcgcctatccggactgggcgtcacgtatcgccgccggcgaagagctggagctgtttatcgacagcacccagcgtgaagcgctgcacattccggaaccgctatggcgtttctcgctggtggaagcgatgatccgcgacatgagcatgggcgacgccaaatttaaaccggggatgtttgttgagaccgtccacgatgacgccaatgagctggtgatcaacgtcagcctcgaaaatgaccatattgccgatatcgaactggcggcgagcccggtccagaccgtggaattcaccaccagctttgaagagatccgcgaacgtattctcaccgccaataccccgcacgtcgatgccatttccggggccaccagccagagcgaggcggtgaaaaaagcggtcgccaaagcgatgctgaaatcgagtaaagcgctggcggcggaagagggcggcaatgacgccgcgccgaaaagctatgatgtggtggtagtcggcagcggcggcgccggtctggcggcagccattcaggcccacgacgaaggggccagcgtgctgatcgttgaaaaaatgccaaccatcggcgggaacaccatcaaggcttccgccgggatgaacgccgcggaaacccgcttccagcgcgtgaaaggtatcgaagacagtaaggagttgttctatcaggaaaccctgaagggcggccacaacaaaaacaacccgcagctgctgcgccgtttcgttgaaaacgcgccgcaagccattgagtggctggcggaccggggcattatgctcaacgacattaccaccaccggtgggatgagcattgaccgtacccaccgtccgcgcgacgggtcagcggtcggcggctatctgattagcggcctggtgcgcaacatcaccaaacgcggtattgacgtcctgctggatacctcggtggaagagatcctgatgcgcggggatgaggttagcggtgtacgtctgatcaacgacgaaaaagaggtcattgaagtacagaccaaaagcatcgtagtggccaccggcggcttcagcgctaacagcgcgatggtcgtgaagtatcgtcctgaccttgaaggcttcgtcaccactaaccacaaaggggctaccgggagcggtatcgcgttgctggaacgcatcggcgccggcaccgtggacatgggcgaaattcagattcacccgaccgtcgagcagcagacctcgtatctgatttccgaatcgattcgcggcggcggcgctattctcgttaaccagcaggggaaccgcttcttcaacgagatggagacccgcgataaagtctcggcggcgattatcgctctgccggaacactatgcttacatcgtcttcgacgagcatgtgcgggcgaaaaacaaagctgccgacgagtacatcgccaaaggcttcgtcaccagcgccagctcaccgcgggaactggcggagaaactggggatggattaccatgccttcctcgccaccctcgaatgctacaacggggcggtggaaaaacagcatgatgaacagtttggccggaccaccgcgctgcgcgcgccgattaacgaaggcccgttccacgccattcgcatcgcacccggggtgcaccacaccatgggcggcgtgaccattaataccgatggcgaagtgctgaatgtggcgcagcagccgattcgcggcgcctacgccgccggtgaagtggtgggcgggatccacggcggcaaccgtatcggcggtaacgcggtggcggatatcatcatcttcggtaccctcgcgggccatcaggcggcgaaacgtgccagaggataa

SEQ ID NO: 211600 - DNA, 1434 bp, Klebsiella pneumoniae
atggcgctgccgattatcgttgccgtgctgttattgttcgtcccggtccccgaaggcctgccgccgtacgcctggcactacttcgctatctttgtcggggtgatcgtcgggttgatttttgaaccgctgcccggcgccgttatcggtatcaccggcgtggtagttattgccctgtgcagccagtggctgctgttcagcccggatcagatggccgcgccaggcttcaaaatggctggcgcctcctttaagtgggcggtgagcggcttcggcaactccaccgtgtggcttatcttcggcgcgttcatgttcgccgccggctacgataaaacgcagttcggccgccgcctggcgctgattctggtgaaatatcttggccgtcgcagcctgacgctcggctacgccatcaccttcgcggatctgctgctggcgccgtttacgccatctaacaccgcacgcagcggggggactatctacccgattatcgctaacctgccgccgctgtacggttcaaagccaaacgatccgagcgcacgtaaaatcggttcctatctgatgtgggtagcgatcaccgccgcctgtattaccagctcgatgttcctgtcggctttggccccgaacctgctggccctggcgctggtcaaaagcattgttggcatcaatatctcctggggcacctggttcatcgccttcctgccgctgggtatcctgctgattctggctatgccgctgctggcctactggttctacccgccggaagtgaaagtcaataacgaagtgccactgtgggccgcgcgtgaactggaaaaactgggcaaactgtcgcgcaatgaaattctgctgctggtattcgtctgcttcgcgctgatgatgtggatcttcgccgccgactggatcgaaccggcgctggctgccctgctggttatcgtgctgatgctgtggaccggcgtgctctcctggagcgatatcaccaacaacaaagcggcatggaacacctttgtctggttcgccaccctggtggcactggccgacggcctctcctccaccggctttatcgcctggctgggtaaagagggcggcgcgctgatgagcggcatctccccggggatggcgaccatcgtcctgctgctggcgttctacctgctgcactatctgtttgccagcaccaccgcgcacaccaccgcgctgctaccggccatgctgaccattgcctcgactatcccgggaatgaatatggaagtgtttgtcctgctgatggtcacctcgctgggcgtgatggggatcatcaccccgtacggtactggcccaagcccaatctactacggcagcggctacctgccgaccaaagattactggcgcctcggcaccatctttggcgccatcttcctggccgccctgctgctgattggctatccgtggatgtccatgatgttctga

SEQ ID NO: 211601 - DNA, 1653 bp, Klebsiella pneumoniae
atgtcgactaaaccgtttgtttatcaggatccgtttccgctggcgcacgacgatacggaatactatctgctcagcaaagagcacgtctccgtcgccgaatttgacggccagcaggtcctgaaagtagagccgcaggcgctgaccctgctcgctcagcaggccttccacgacgccgcctttatgctgcgcgtctcccatcagcaacaggtcgcctcgattttgctcgacccggaagccagcgataacgataaatatgtcgccctgcagttcctgcgcaactcggaaattgccgccaagggcgtgctgccgacctgccaggataccggcaccgcgattatcatggggaaaaaaggccagcgcgtctggaccggcggcggcgatgaagccgccctggcgcagggggtgtacaacacctataccgaagataacctgcgctactcacagaacgcgccgctggatatgtataaagaggttaacaccggcaccaacctgccggcgcagatcgatctctacagcgtcgacggtgaagaatataagttcctgtgcatggcgaaaggcggcggttccgccaacaaaacctatctgtaccaggagaccaaggccctgatcaccccggcgaagctgaaaaactacctcgttgagaagatgcgcactctcggcaccgccgcctgcccgccgtaccacatcgcgtttgtgatcggcggcacctcagcggaagcgacgctgaagaccgtcaaactggcctcgacccgctattacgacggtctgccgaccgaaggcaacgaacacggtcaggcgttccgcgacgtgcagctggagcaggagctgctgcaggaagcgcagaacctcggcctcggcgcgcagtttggcgggaaatacttcgcccacgatatccgggtgatccgtctgccgcgccacggcgcctcctgcccgatcggcatgggcgtctcctgctccgccgaccgcaatatcaaagccaaaattaaccgcgacggtatctggatcgagaagctggagagcaatccgggaaaatatattcctgaacatctgcgtcaggccggcgaaggcgaggtggtaagcatcaacctgaatcagccgatgagcgagatcctggcgcagctgtcggcacatccggtctccacccgcctgagccttaacggcactattatcgtggcccgcgacatcgcccacgccaagctgaaggagcttatcgacaacggcgaggcgctgccgcagtacgtcaaagatcacccgatctactacgcgggcccggctaaaacgccagccggttacgcttccggctccctcggcccaaccactgccggccgcatggactcttacgttgatctgctgcagtcccacggcgcgagcatggtgatgctggcgaaaggcaaccgcagccagcaggtgaccgatgcctgccataaacacggcggcttctaccttggaagcatcggcggcccggcggcagtgctcgcccagcagagtatcaagagcctcgagtgcgtggcctatccggaactggggatggaagctatctggaaaatcgaagtggaagattttccggcgtttatcctcgtcgatgataaaggcaacgacttcttccagcagatccagaataagcagtgcgcgggctgtaaacagcacggctaa

SEQ ID NO: 211602 - DNA, 1617 bp, Klebsiella pneumoniae
atgaacaggatgagcatcgttatcctctgggcgctggcgctgctggtgctccagccggcgctggccgccgaaccgcgacagcagccaaccgcgcgcgagcaggcacgcacggtcacgattttccaccaacctgtcgtcatgttgcaggccacctttggccagaccacgcccgaagagcgcgttttgcgcacccgtagcgccctgcgcgccttcaccgaagatgatattcgccagccgctgcgggtcgtgccggttatccgctatggtcagccaggcagactgttgctgatgaacggcaaaccggtgctgctgctgagccaggcggatctcgacgagggcgatgatttaaccctcgaccaggcagcccagcgggtgctggcgcgtatggaagcccagcgcaccagcctccaggagcagttcaacaaccgctatctgttcatctccgccggtaaagccctggccggggcgctgctgctggcgctgttttactacggcgccttccgcgcctggcggcgggtgcgacgttttttcctgctgcggatcctcgaaaaacgtagcgccataccgcagcactggcggcgctatctcggcaatattgaagttcgactctatgctgtgctggtcatccttctcggcatgctggcctgttatctctggctgagctgggccttcagcctgtttccctggacgcgggtgtggagcgaatcgctgggcgactggtcgctgggggtgatccgccacctctctctgtcgattgtcgcctccctgccggggctgatgatcgtggtgcttattttccttctcacctggcttatcattcgcctggtgaaggtggttctcgaccaggtcgccgccggccgcattcagattcccggcattcatccggagaccgttagcgccacccgtcggcttatctcggtggtcatctggttgtttgccctctccgccgcctacccgttccttcccggcgccaactctctcgccttcaaaggcattagcctgttcttcggcctgatgctcaccctcgggtcaaccggagtgatgacccatgcgatgagcggcctggtgctgatctactctcgggcgctgcgcaaaggcgactggatccgcctcgccgataatgagggtcaggtcagcgagattggcgtgctggcgaccaaaattctcacccgcgaaaattacatcgttaccgtcccgaacgcggtggtggtgagcgggaaaattattaatctcagcgccgaaagcgccgacggtggagtcaacctcaccaccagcgtcaccatcggctacgatacgccgtggcgtcaggtccatgcgctgctggagctggcggcgagacgcaccccggggatcgatcagcaaattgcgccggtggtgcgtaagctgggattgcttgactggtacacctcgtatgagctgcaggtgcgcttactccccacaaccaagctgccggatggccgcaacgcattgcatagcagcattattgatgtgtttaacgaattcggcgtgcagattatgtcgccgaactttgtgatgcagccaaaggcggcggtagtggtgccgcaggaagcctggtacgccgccccggccgtcgcgccgcaggagccggagaaataa

SEQ ID NO: 211603 - DNA, 390 bp, Klebsiella pneumoniae
atggatgataaacagcgctatcaggacgggatggcggtacggcgcaaagtattgggcgacgcccacgtcgaccgtacgctgcagcatctgacgccgttgaatgatgagtttcaggactttattacccgctatgcctggggcgagacctggacgcgtccggggctcgatcaccatacccgcagcatgatcactattgccatgctgatcgctctcaatcgcgaggcggagctgaagatgcatctgcgcgcgtcgtttaacaacggggtgacccgcgatgagctgaaagagctgatcatgcactctgcgctgtactgcgggctgccggcggccaatgccacgatgcatctggcgcagcaggtgtttgacgacatcgacgccgcgcagggttga

SEQ ID NO: 211604 - DNA, 765 bp, Klebsiella pneumoniae
atgaatcttgattatcaactcgacgggccggatggcgcgccggttatcgtcctctccaattcgctgggcaccacccgggcgatgtggcagccgcagatcgaggcgttaaccgcccatttccgggtgctgcgctacgacacgcacggccacggtaaaacgacaaaaaatggcaaagtgaccctcgcccagttgggggaggatgtgattgcgctgctcgatcacctgaatatcgaccgcgcctggttctgcgggatctcgatgggcggtctgaccggcctgtggctgggacgctttgcgccggagcgttttcatggtctggcggtcgccaacaccgcggcgcgcattggcgatcaggccagctggctgtcgcgggcgcgggccgtacgtcaggaggggatggcggtggtggccgccggagcggcagaccgctggtttacccacgcgtttcgccagaaggcgccggaggtggtcgaggcgctttgtcaccagctgacccataccgatgctgaaggctatgccgcctgctgtgaggcgctggccgccgccgacctgcggggcgaagtggggcagatcccgctgccgacgctaatcatcgctggggaaagtgaccctgtcaccacggtcggtgacgctcatttcctgcagcagcagatccccgcctccgaggtggttgttctggcggcatcgcatctgtctaacattgaggcgccgaaaagctttacttcggcgctgctgagctttttccagggggaacgccatggatga

SEQ ID NO: 211605 - DNA, 1353 bp, Klebsiella pneumoniae
atgagtttgttgaccccgatgctgcgcagcagtccgctaaccgactggttcagcgacgcgcagcgggtgcagggcatgctggattttgaagcggcgctggcgcaagcgcaggccgcctgcgggatggtgccgccggaagcggtcgggccaattgtggcggcctgccgccacgaggccatcgattttgccgcgctgggcgaggcggcggtgggagccggtaatctggccatcccgctggtgaaacagctgacggcgcaggtaaaagcgcaagatcctgaggctgcgcgctacgttcactggggcgctaccagccaggacgccatcgacaccggactggtgctccagctgcgcggggcgctggatgccgctgagactctgcttgagcagctgttggcggccctggctctccaggcggatcgttatcgcgataccgtgatgccgggccggacctggatgcagcacgcgctgccggtgacctttggcctgaagctggcgggcaccctcgacgcgctcctgcgctggcagcagcggctgcgcgagatgcgtccgcggctgctggcgctgcagtttggcggcgccgcgggcactctggacgcgctaaaagagaaagggccggcggttggcctggcgctggcgcagatcctcgggctgtcgctgccggatactccgtggcacagccagcgcgatcggctgctggaggcgggcgcctggttcgccggcgtctgcggcacgctggggaaattcgctaacgacttttccctgctgatgcagaccgaagtggctgaggtgggcgagccggtggcggaaggtcgcggcggttcgtcgacgatgccgcataagcgcaatccggtggcctgcgcggcgatcctgaccgccgcccagcgtacgccggggctgatggcgacgctctacgccagccaactccagcagcatgagcgggcgctgggcggctggcaggcggagtgggagaccctgccggagctaattaccctggtgggcggggcgttggcgcaaagcgaggcgctggtgcgcgacatgcaggttttcccgcagaaaatgcgcgccgatctcgatatcacccacgggctgattatggctgaggcggtgactctggcgctggcggaattcattggcaaagccgaggcgcatcatcacatcgaagcgctgtgccgccaggcgctggaccgtcactacccgctggtcgatctgctcgcggctgacccacaggtcagtcagtatctctctcgtgaacgcttaaccacgctgctggacccggcaacggcgaccggcagcgccgaacgctttgtgcgccaggtgctggcgcgttatcaggagcaacgtgatgaatcttga

SEQ ID NO: 211606 - DNA, 1203 bp, Klebsiella pneumoniae
atgaatcaggcatttatctgtgatgcggtgcgtacaccctttggccgtttcggcggtgccctggcgacgatgcgcgctgacgacctggcggcgctgccgctgaaagcgctgctggcgcggaacccgggactggatccctcgcgcattgacgatgtgatctttggctgcgccaaccaggccggggaagacaaccgcaacgtggcgcggatggcgctgctgctggccggcctgccggagagcgtgcccgggagcaccatcaaccgcctgtgcggttccagccttgacgcgatcggcgtcgcggcgcgggcgattaaaagcggggagacgcagctgatgatcgccggcggggtggagagcatgtcccgcgcgccgtttgtgatggggaaagcggagagcgcctttagccgcagcatgcagatggaggataccaccatcggctggcgctttattaacccgcagatgaaagccctgtacggcgtgcattccatgccggagacggcggaaaacgtcgccgatgagtttgccatctcccgtgccgatcaggacgcgttcgccttacgcagtcagttgcgtaccgccgcggcgcaagaggcggggcgtttcgccgatgagctgatcgccgtccaggtgccgcagcgcaaaggcgagccgctgctgtttagccgcgatgagcacccgcgcagcacctcgctggaggcgctggctaaactgcgcggcgtggtgcgcgccgacggcagcgttaccgccggtaacgcctccggggttaacgacggcgcctgcgcgctgttgatggccagcgagacggcgctgtcggctaacgatcttcagccgctggcccgggtggtcggcgtggcgacggcgggcgttgcgccgcggatcatggggtttggcccggcgccggcggtgcgcaaggtgctggcgcagaccggcctgacattaggccagatggatgtcattgagctgaatgaagccttcgccgcgcaggcgctggcggtgacccgcgatttaggcttaccggacgatgccgcccacgtgaaccctaacggcggggcgattgcgctgggccacccgctcggcgcctccggcggccggctggcgatgaccgcggcttatcagctgaaacggaccggcggtcgttacgccctgtgcaccatgtgcatcggcgtcggacaggggatcgccctgattattgaacgtgtttaa

SEQ ID NO: 211607 - DNA, 657 bp, Klebsiella pneumoniae
atgcaaaaactgacccgtgacgaaatggcccagcgcgtggcccgcgatattcccgaaggtgcttacgtcaacctcggcatcggcctgccgacccggattgccaattacctgcccgctgacaaagaggtgttcctgcacagcgaaaacggcctgctggggatggggccgaaaccgcagcccggggaagaagatcccgagctgatcaatgccggtaaagagtatgtcaccctcctgcaggggggctgctatttccaccacggcgactccttcgccatgatgcgcggcggccatctcgatatctgcgtgctgggggcctatcaggtttccgccagcggcgacctcgccaactggagcaccggtgcgccggatgcgatcccggccgttggcggggcgatggatctggccatcggcgcccgccaggtatttgtgatgatggaccacctgacccgtgacggcgagtgcaagctggtggcgcagtgcagctacccgctgaccggcgtcggctgcgtcagccggatctataccgacctggcggtgatcgacatcaccgaccgcggcccggtggtgcgggaaatctttaacggcctctcttttgaagagctgcagcgcatcactccggtggcgctgacctttcaacaactggcggaaagcgcgtaa

SEQ ID NO: 211608 - DNA, 687 bp, Klebsiella pneumoniae
atgattgataaaagcgtatcgacgctgagcgaggccatcgccgggatccacgatggggcgactattatgatcggcggctttggccccgccggccagccgacctttctgattgacgccctgattgaccagggcgctcgcgacctgaccatcataaataacaacgccggcaacggggaagtgggtctcgccgcgctgctcaaggcgggccgggtgcgcaaaatgatctgctcctttccgcgccaggtggattcgcagattttcgatgatctctaccgtcgcggcaaagtggagctggagctggtgccgcagggcaacctcgcggcgcggatccaggcggccggcgccgggctgggggcggtgtttacccccaccggctacggcacgccgctggcggaaggcaaggagacacgggaaatcgacggtcgccactacgtgctggagtacccgatcaaagccgatttcgcgctgattaaagcccaccagggcgaccgctggggcaacctggtctatcgcaaggcggcgcgcaactttggcccgatcatggcgacagcggcgaaaaccaccatcgtagaggtctcgcagctggtggcgctgggcgacctcgatccggaaaacatcatcacccccggcattttcgtccagcgcgtcttctcgctggaaaacctgactgccgcacaacgcgcctga

SEQ ID NO: 211609 - DNA, 807 bp, Klebsiella pneumoniae
atggacaagcatccagacgatttactgaccggcgacggcgatccgtttaaaggcgatcctaactttatggcctccctggcgcggggtctggaggtgattcaggcgttcacgccgcagcggcccctgctgtctatctcacagatcagtcagaagaccggcatcccgcgcgccgcggtgcgccgctgcctgtataccctgagcaagctggggttcgtgtatgccgaagacggtaagaatttccagctgcggccgcggatcctggcgctgggccacgcctggctggcctcgacgccgctggcgcgttcggcgcagccggtgctgcggcatctgagcgaaatgctcaatgagtcctgctccatcgccaccctcgacggcgacgatatcctgtatatcgcccgcgcctccagctcgcggattatgaccatcgacctggatatcggcagtcgccttccggcgtgggcgacctcgatgggccgggtgctgctgagccatcagccggaggagaagctcaacgatatgctggcccgggtgaccatgatccgctataccccacagacggtggattcggtggcgaagctgcgcgccgaactgaaacgggtgcatcagcaggggtatgccctcaacgatcaggagctggagatggggctgcgctccctcgcggtcccgctgtttaacgctcaggggcaggtccaggcggcgctcaacgtcggggtgcatgcgggccagatgacggcccgcgagatgatcgagcgcgtgctgccggagctgcaaaaagccgcccgcgagctgacgctgcttctgcgctaa

SEQ ID NO: 211610 - DNA, 564 bp, Klebsiella pneumoniae
atgaaccttgatgacaaatccctgtttcttgacgccatggaagatgtccagcctctgaaacgtaataatgacgtgcactggcatcccgggcgtaacagccgggccccgcaacgcgtcgataccctgcagctggataattttctcaccaccggctatctcgatatcgtgccgctcgccacgccgctggagtttaagcgagaagggctgcagagcggcgtgctggataagctgcggcgggggaaatacagccagcaggcgagcctctccctgctgcgccagccggtggaacagtgccggcagatgctcttcgcctttatggtgcaggcgcagaaagaggggttacgcaatgtgctgatcgttcacggcaaaggccgcgacgaccagtcccacgccaatattatccgcagctatctggcgcgctggctggaagagctgccggaggtgcaggccttctgcgccgcgcttccgcatcatggcggcagcggcgcctgctatgtcgcgctgcgtaaatcggcgcaggcgaagcaggagacctgggagcagcacgccaagcgcagtcgttag

SEQ ID NO: 211611 - DNA, 909 bp, Klebsiella pneumoniae
atggcatttcagattaaatttcatcaaattcgcgccttcgtcgaagtagcccgggaaggcagtatccgtggcgccagccgggcgctggcggtctcgcagccggcgctgaccaaagcgattaaagagctggaggaggggctttccgcccagctgttcgtccgccgcagccagggggtggcgttaaccgacaatggcgaaagtttttatcaacatgcgagcctgatccttgaggagctgcgggcggcgcaggatgaactgctgcagcgccagggggaacaggccgggcaaattaatattggccttggcgccagcgtcgcccggtcgctgatgccgtcggtgatctgccgctttcatcagcagcatccgcaggtgaaggtacggatcatggagggtcaactgctggcgatgattaatgagctgcgccagggggagctggatttcaccattaatacctattaccccgggccgtacgaccatgagttcagctttgagaaactgtttgagaaaccgttcgcggtgttcgcccgcgcgggccatccggcggcgcaggccacctcgctgggagaattgatggatcaccactggaccatgccgacgccgcgcggcagctacttcaagcagctgcaggaatgcttcgaacagctgggacgggagccaaaggtggggatcgtctgcgaaacgttctcatcctgcatcagcctggtggtgaaaagtgattttctcagcatcctgccggtggagctgggcaacgacccgctgatggccgacaaactggtgatgatccccatccgtgaagtgttacccaccgccacctattatctgatccagcggcgcgatacccgacagacgccgctcacggcgtcgttaatcaccctgttccgccgccagagccgacaattgtttccttaa

SEQ ID NO: 211612 - DNA, 1311 bp, Klebsiella pneumoniae
atgccgcaacttgatgaatacctccgccaactggcgccctccatgacccaatggcgccgtgattttcacctgcacgctgaatccggctggctggagtttcgcaccgccagtatggtcgcggatattcttgacgggctaggctatcagctggcgctaggccgcgacgtcatcgatgccgacagccggatggggctgccggacgaggagaccctggcccaggctttcgaacgcgcccgcgaacagggcgcgccggagcgctggctgccagcgtttgaaggcggtttcgccggcgtggtggccacgctcgacaccgggcggcccggaccaaccctggcctttcgcgtcgatatggatgccctcgatctcaacgaacagcatgacgacagccaccgcccccatcgcgatcatttcgcctcctgcaacgccggcatgatgcacgcctgcggccatgacggccataccgccatcgggctggggctggcgcatgtgctcaagcagtatgccgcccagctcaatggcgtcattaaactgattttccagcctgctgaagagggtacccgcggcgcccgcgcgatggtggccgccggcgtggttgatgacgtggattatttcacggcgatccatatcgggaccggcgtgccggcaggtaccgtggtctgcggtggagacaactttatggccaccaccaaattcgacgtgcagttcagcggcgtggccgcccacgccggcggcaagcccgaggacgggcgcaacgcgctgctggccgccgcccaagccgcccttggcctgcacgccatcccgccgcacagcgccggcgcctcgcgggtcaacgtcggggtgatgcaggccggtaccgggcgcaacgtggtgccctcttccgcgctgttaaaagtggaaacccgcggcgaaagcgaagccattaatcagtacgtgttcgagcgggcgcagcacgtcgtcgccggggctgcggcgatgtacgaagcccgctacgaactgcgcatgatgggcgcggcgaccgccagcgcaccgtcgccggcgtgggtggactatctgcgcgaacaggccgcccgggtgcccggcgtgcaacaggcggtggatcgcatcgccgccccggcgggctcggaagacgccaccctgatgatggcccgggtccaggcgcgcggcggcctcgcctcgtacatgattttcggcactgaactcagcgccggtcaccacaacgaaaagtttgacttcgacgagagcgtgatggcggtagcggtcgaaaccctggcgcgcgtcgcgcttaactttccctggcagcggggggtgtaa

SEQ ID NO: 211613 - DNA, 750 bp, Klebsiella pneumoniae
atggaagccatttttcagtttgtggacgaggtggttgaggcacaacgcgacacttactgcgccatcgccgacgacatctgggaccacccggagacccgctttgaggagttctggtcagcccaacggctggccgacgccctggaggcggaaggttttcagctcacccgcgatgctggcgggatcccgaatgcctttatcgccagcgtcggtgagggccaaccggtcattgccctgctcggcgaatttgacgccctggcgggactcagccagcaggcccacagcgcggaaccgacgcccttgacgccgggagccaacggccacggctgtgggcacaatctgctcggcaccgcggcattcgccgcggcggtcgccgccaaaggctggctgcagcagcacggcgacagcggcactctgcgcttctacggttgtcccggcgaggaaggcggttcgggaaaaacctttatggtgcgcgaagggttgtttgatgatgtcgatgcggcgctgacctggcatccggaagcctgggccgggatgttcagcacccgcaccctcgccaacattcaggcggcatggcgatttaccggcaccgcggcccacgccgctaattcgccgcacctgggccggagcgcgctggatgccgtcaccctgatgaccaccggcagcaatttcctcaatgaacatatcatcgagaaggcgcgcgtccattacgccattaccgataccggcggcgtctcgcccaacgtggtgtag

SEQ ID NO: 211614 - DNA, 684 bp, Klebsiella pneumoniae
gtgctgtatttgatccgcgcgccggagatggccgacgctgagcaaatcttcgcccgcatagagaagattgcccagggggccgcgctgatgaccgagacccaggtcagctgccgctttgaaaaagcctgctccagctatctgcccaaccgcacgcttgaggcggcgatgtatcaggcggtctgtcattacggtacccccgcctggagcgacgaggaacgcgcttttgccgcggcgatccgcgccactctcagcgccaacgatattaacaacagcctgaacaatattgccggcaccagtggcgaggaaggcaaaacgttcgctcgtcgtcaccgcgacaccttgctgattgatgaggtggcgccctgggcggccacggataacgtcctcgccggatccaccgacgtcggcgatgttagctggaaagcgccggtggcccagtgcttcagcccgtgcttcgcggtgggtaccccgctgcacagctggcagctggtgagccagggcagaacctccattgcccataaagggatgttgctggcggggaaagtcctcgcggcgaccgccatccatttattcagcgacagcgccctgctggaggccagccagcaagagctcaggcaggtactggccgaacgcccctatcgttgcccgatcccggcggaggtgagtccgtccgttttacgataa

SEQ ID NO: 211615 - DNA, 1527 bp, Klebsiella pneumoniae
atgagtatgtcatccataccgtcatcttcccccggcggaaagcgctatggctgggtagagaagatcggtaacaaggtcccgcacccgtttttgctgtttatctatctcatcgccgtgctgatcgctgccacggcaatcctctccgccctcaacgttggggtacaaaacccaactgacggttcgcgggtggtggtcaaaaacctgctcagcgtggaaggattgcactggtttttgccgaacgtgattaaaaacttcagcggtttcgcgccgctgggggcgatcctcgccctggttctgggcgccggctttgccgagcgggtgggcctgttaccggcgttgatggtcaagatggcctcgcacgtcagcgcccgctatgccagctatatggtgctgtttatcgcctttttcagccatatctcttccgatgcggcgctggtgattatgccgccgctgggagcgctgatgtttcttgccgtcggtcggcatcctgtcgctggtctgctggcggcgatagccggcgtgggctgcggctttaccgccaatctactgattgtcaccaccgacgtgctgctctccgggatcagcaccgaggcggcaaagtccatcgatgcctctttgcacgtcagcgtgatcgacaactggtactttatggcgacttcagtgatcgttctgacgctcgtcggcggactgatcaccgataagctggtcgagccgcggctgggccagtggcaaggcagtcgtgatgaaaagctgcagacgctgacgcccggggagcggttcggcctgcgcatcgccggcgtggcgacgctggtattcgtggcggtcatcgccctgatggtggtccccgaaaacggtattcttcgcgatccggttcagcatacggtcatgccctcgccgtttatcaaaggcatcgtgccgctaattatctttttcttctttgtcgtgtcgctggcatacggcatcgccaccggcaaaattcgccgccaggccgacctgccgcagttgatgattgagccgatgaaagagatggccgggtttatcgtgatggtcttcccgctggcgcagttcgtggcgatgttcaactggagcaacatgggcaagtttatggccgtcggtctgacggacctgctggagagttcaggcatgaacggtgttccggcgtttgtcggccttgcgctgctgtcggcttttctgtgtatgtttatcgccagcggctcggccatctggtcgattctggcgccgatcttcgtgccaatgtttatgctgttgggctttcacccggcgtttgcgcagatcctgtttcgtatcgctgattcatcggtgctgccgctggcgccggtgtcaccgtttgtgccgttgtttctcggctttctacagcgctaccggccggatgcccgcctcggcacctactactcgctggtgctcccttacccgctgatttttctcgccgtctggctgctgttgctggtgggctggtatctggtgggactgccgatcggccctggcatctatccgcggctgtcttaa

SEQ ID NO: 211616 - DNA, 159 bp, Klebsiella pneumoniae
atgcaatatatactgactggcgtaatcgtactgatcttcagcggtctggttattcatggtatgtcgctgttgcttgagcgagggtatcgcgcgcttttcggcatattcgccggagccggggaagcgacccgtaagttcaaagtgaagatatcgcgttaa

SEQ ID NO: 211617 - DNA, 516 bp, Klebsiella pneumoniae
atgttgaccttgctgcaggataaaatggataccccgctggggccgttgtgggtgctttgcgacgaacagtttaatttgcgcgccgtcgagtgggacgagcaccgcgatcggatggaaacgctgctcgaggtacactatcgccgggaaggctatcagcgcgtcgactgccgcaatcccggcggtctcagcagtaagctgagcgactattttgccggcgatttagccattatcgagactctgcctaccgccaccgccggcaccccttttcagcgccaggtctggcaggcgttacgcgaaatcccctgtggccaggtgatgcactacggccaactggccgaggcgctcggtcgtcccggcgccgcgcgcgcggtgggcgccgccaatggcgccaatccggtgagtatcgtggtgccctgccatcgggtcatcgggcgcaacggcaccatgaccggctatgccggcggcgtacagcgtaaagagtggcttttgcgtcacgagggctatctgttgctttga

SEQ ID NO: 211618 - DNA, 753 bp, Klebsiella pneumoniae
atgatccctgagaagcgaattattcgacgcattcagtctggcggttgtgcaatccattgtcaggattgcagcattagccagctctgcatcccctttactctgaacgagcatgagcttgatcagctggataatattatcgagcggaaaaagcctatccagaaaggtcaaaccttgttcaaagccggtgatgagctgaagtcgttgtacgctattcgctccgggaccatcaaaagctataccatcaccgagcaaggtgatgagcagattactggcttccatctggcgggcgacctggtgggctttgacgccatcggcaccggtctgcacccgagctttgcgcaggcgctggaaacctcaatggtctgcgagatccccttcgaaacccttgacgatctttccggaaaaatgcccaatctgcgtcagcagatgatgcgcctgatgagcggtgagattaaaggcgaccaggatatgatcctgttgctttccaaaaagaatgccgaagagcgcctggccgcgtttatctataacctttctcgtcgtttcgcccagcgcggcttctcaccacgtgagttccggctgaccatgacccgcggcgatattggcaactatctcggcctcaccgtcgaaaccatcagccgtctgctgggccgttttcagaaaagcggcatgctggcggtgaaaggcaaatatatcactattgaaaacagcgatctgctggcccagctggccggacaggcgcgcaacgtcgcttaa

SEQ ID NO: 211619 - DNA, 951 bp, Klebsiella pneumoniae
atggcgaagtatcagagcatgctggtagtaatcgatcctaaccaggacgaccagccggcgctaaggcgagcggtgtacctgcaccaacggattggtggacgcatcaaagcctttttgccgatctatgatttttcctatgaaatgaccaccctgctgtcgccggacgagaggacggcaatgcgccagggcgtcattgcccaacgaacggcctggatccgcgagcaggcgaaattctacctggaatcgggcgtgccgattgacgtgaaagtggtgtggcacaaccgccccttcgaagcgattattcaggaggtggtcagtgagaaacacgatctgctgctgaagatggcccaccagcacgacaaactggaggcggtgatctttaccccgacggactggcatctgctgcgtaaatgcccttgcccggtgtggatggtcaaagaccagccgtggccggaaggcggcaaagcgctggtcgccgtcaatctcgccagcgaagagaattatcacaacacccttaacgagaagctggttcgcgagacgctgtcgctggcggaagaagtcaaccacactgaagtgcacctgatcggtgcctacccggtgacgccgatcaatatcgcgatagaactgccggattttgatcccagcgtctacaacgacgcgatccgcggccagcatctgctggcgatgaaagcgctgcggcagaagtttggcatcgatgaaaaattcacccacgtcgaaaaaggactgcctgaagaggtgatcccggacctcgccgagcatctgcaggcggggatcgtggtgctgggaacggtcggacgtaccggcctgtcggcggcgttcctcggcaataccgcggaacaggtcgtcgatcatctgcgctgtgacctgttggtgctgaaaccggaggcctaccagacgccggtggaactggacgacgacgacgacgattaa

SEQ ID NO: 211620 - DNA, 222 bp, Klebsiella pneumoniae
atgttccggttcttacatcagacagaggatattatggataccgagttaaccccaacgcagatggccatcgaattcttacgccgcgaccccaccgtcatgaccccagcgcagtatctgaaaaaacttaaactgctggagctggagtttgctgacctgatggcgctctcctcgctggagctgaaagaagagatcgatctggcctggcgtctgggtatccactaa

SEQ ID NO: 211621 - DNA, 1389 bp, Klebsiella pneumoniae
atgtctggtggattagtaacggctgcatacattgttgctgcaatcctgtttattttcagcctggcgggcctgtcgaaacacgaaacgtcgcagcagggcaactatttcggcatcgccgggatggccattgccctgatcgctaccatcctggggccggacgccggcaacgtcggctggattattcttgcgatggtgatcggcggggcgatcggtattcgtctggcgaagaaggtcgagatgaccgaaatgccggagctggtggctatcctgcacagcttcgtgggtctggcagcggtgctggtgggtttcaacagctacctgcagcatgaaaccggtatggagcaaattctggtcaatattcatttgaccgaagtgttcctcgggatcttcatcggcgcggtgaccttcaccggttcggtggtggcgtttggtaaactgcgcggcaaaatttcctccaggccgctgatgctgcccaatcgccataagctgaacctggcggcgctggtggtttccttcatcctgatggtgatttttgttcgctctgacagcaccggcacccaggtcctgtgcctgctggtgatgaccgcgatcgcgctggcctttggctggcacctggtggcctctatcggcggtgcggacatgccggtggtggtctcgatgctcaactcctactcgggctgggcggcggcggcggcgggctttatgctgagtaatgacctgctgatcgtcaccggcgcgctggtgggctcttccggcgccatcctctcttacattatgtgtaaggcgatgaaccgctcctttatcagcgtgatcgccgggggcttcggcaccgatggttcctcaagcggcggcgatgaagaagtgggcgagcatcgcgagattagcgccgaagagacggcggagatgctgaaaaactcgcactcggtgatcatcaccccgggctacggtatggcggtggctcaggcgcagtatccggtagcagaaattaccgagaagctgcgggcgcggggtatcaaagtacgctttggtattcatccggtggccgggcgcctcccggggcatatgaacgtcctgctggcggaagccaaagtgccttacgacatcgtgctggagatggatgagatcaacgacgatttcagcgacaccgacaccgtgctggtgatcggcgccaacgataccgtcaacccggcggcgcaggacgatccgaagagcccgatcgccggcatgccggtgctcgaggtgtggaaagcgcagaatgtggtggtctttaagcgttcaatgaacaccggttacgccggcgtacagaacccgctgttctttaaagagaacactcatatgctgtttggcgatgctaaagccagcgtcgatgcgatcctgaaagcgctgtaa

SEQ ID NO: 211622 - DNA, 1530 bp, Klebsiella pneumoniae
atgcgtattggtgtaccacaagaaaggctagcccaggagacccgggccgccgccacgccgaagaccgttgagcaattgctcaaactcggctttagcgtcgcggtagaaagcggcgccgggaagctggccagctttgacgatgaggcctttgccgaggcaggagctgaaatcgtgaccggcgacgaggtatggcagtctgatgtcatccttaaggtcaatgctccgaatgacgatgaaattgccctgctgaatccggggaccacgctgattagttttatctggccggcgcaaaacccgcagctgatggaaaaactggcggcccgtaatatcaacgtaatggcgatggattccgtgccgcgtatttcccgcgcccagtcgctggatgcgctcagctcaatggccaacatcgccgggtaccgcgctatcgttgaagcggcgcatgaatttggtcgattctttaccgggcagattacggcggcaggcaaggttccgcccgccaaggtgatggtcattggcgccggggtagccggtctggcggcgattggcgccgccaacagcctgggcgctattgttcgcgccttcgatacccgtccggaagtgaaggagcaggtgcagagtatgggcgccgagttcctcgagctggattttaaagaggaagcgggcagcggcgatggctacgccaaggtgatgtctgaggcctttattaaggctgaaatggcgctgttcgccgcgcaggcgaaagaggtcgatatcattgtcaccacggcgttaatcccgggcaaaccggcgccgaagctgatcacccgcgaaatggtcgactccatgaaatcgggcagcgtggtggtcgatctggcctcgcaaaacggcggcaactgtgagtacaccgtaccgggcgaagtggtgaccaccgccaacggcgtgaaaatcatcggttacaccgatcttcctggccgtctgccgacccagtcctcccagctctacggcaccaacctggtgaacctgctgaagctgctgtgcaaagagaaagacggcaatatcgttatcgatttcgatgacgtggtagtgcgcggcgtgaccgttgttcgcgaaggtgaaatcacctggccggcgccgccgattcaggtctccgctcagccgcaggccgcggcgaaaaaagtggaagcgccgaaagaagcggtgaaaccggcgtcgccgtggcgcaaatatgcgctgatggcgctggcgattattctcttcggctggctggccaacgtggcgccaaaagagttcctcggccatttcaccgtcttcgcgctggcctgcgtggtgggttactacgtggtgtggaacgtctcccatgcgctgcatacgccgctgatgtcggtgaccaatgccatttcgggcattatcgtggttggcgcgttgttgcagataggccacggcggctgggtcagcttcctgagctttatcgcggtgctgatcgccagcattaatattttcggtggttttaccgtgactcagcgcatgctgaaaatgtttcgcaaaggataa

SEQ ID NO: 211623 - DNA, 951 bp, Klebsiella pneumoniae
atgaagcttaaaaacaccctcctggcgtctgctctcctgacaaccgccacgttgtctgcccatgcagcgaccgagttgaccccggagcaggcggctgcgctgaagccctacgatcgcgttgtcgtcaccggccggtttaatgccattggcgatgcggtacaggcagtatcgcgcaaagccgacaaagacggcgcggcctcattctatgttgtcgacacgtcggactacggcaatggcggcaactggcgcgtcacggctgacctttataaagaagacgcgccgaaagcggatgcgccgaagaatcgcattatcaacggcgtgatggagttgccgaaagatcaggccgttgagctgatgccttacgacaccgtcaccgttcagggcttctatcgcagccagccggaagtcaacgacgccatcaccaaagcggcgaaagcaaaaggcgcctatgcgttctttatcgtccgccaggttgacgccaaccagggcggcaaccagcgcattaccgcttatatctacaaaaaagatgctgaaaaacgcgtgctgcagagcccggacgctatcccggctgactctgaagctggccgcgcagcgctggccaaaggcggcgaagcggcgaagaacgttgaaattccgggcgttgccaccaccgccgcggtgggttcgggtaccggcgttgggcgtttctttgagactcagtcttcgaaaggtggacgttacactgtcactctgccgaacggcactaaggtcgaagaagtgaacaaagtgactgcggcgcaaatggtgccgttcgataacatccagttcaccggcaactacggcaacatgaccgaaatctcctatcagacggcgaaacgcgcggcgaagaaaggggcgaagtactaccacatcacccgccagtggcaggaacgcggcggcaacatcaccatcagcgccgatttgtacaaataa

SEQ ID NO: 211624 - DNA, 1383 bp, Klebsiella pneumoniae
atggaaaagaaactgggcctgagcgccctgaccgccctggtccttagctcaatgctcggcgctggcgtattcagtttgccgcaaaatatggctgccgtggccagcccctccgctctgctcattggctgggccatcaccggcgtcgggatcctgtttctcgctttcgccatgctgctgttgacccgtattcgtcccgacctcgacggcgggatcttcacctacgctcgcgaaggattcggcgaactgatcggcttctgctccgcctggggatactggctgtgcgcggtgatcgccaacgtctcctatctggttatcgtcttttcggcgctcagttttttcaccgatacccctgagctgcgcctgtttggcgatggtaatacctggcagtctatcgttggcgcgtcggttctgctgtgggtcgtccactttctggtcctgcgcggtgtccagacggcagcggggattaacctggtggccaccctcgccaagcttctgccgctgggcgcctttgtcgcgctcgccgccctggcctttcagctggatacgttccgcctcgattttagcggcctggcgctgggcgtgccggtatgggagcaggtcaaaaacaccatgctgatcaccctgtgggtgtttatcggcgtggagggggcggtagtcgtgtccgcgcgggcgcgacacaagcgcgacgttggccgcgcgacgctgctggcggtgctgtcggccctcgcggtgtatctgctggtcaccctgctgtcgctgggcgttgtgccgcgcagcgaactggccgaaatgcgcaacccgtcgatggcgggactgatggtcaggctgatggggtcatggggggagatcgtcattgccgccgggctgatcgtgtcggtgtgcggcgcttatctcagctggaccatcatggccgcggaggtgcctttcctcgccgccactcataaagccttcctgcgcctgtttgcccgtcagaatagcaacaacgccccctccgcctcattgtggttgaccaatatcagcgttcaggtatcgctggtgctgatctggctgaccggatcggactacggcacgctgctgaccattgcctctgagatgattctcgtgccctatctgctggtcggcgcctttctgctgaaaatcgccactcgcccgctgcataaagcggtggctatcggcgcctgtatttatggcatatggttattatacgcgtcggggcctgtgcatttgctgttgtcggtggtactttacgctccgggtcttctggtctttttgtacgcccgacgtacgcaccagcacgatcgttcgctcaaacgccgcgaagtggcgctaattggtttattgctggttgccgctgtgccggcaacgtggatgctggtggggtaa

SEQ ID NO: 211625 - DNA, 723 bp, Klebsiella pneumoniae
atggctgaacaacagccccgcccgattctgatcacaggagcaggccgccgcatcggcctcgctctggcacaccattttctgcagcagcgccagccggtcatcgtcagctatcgtacgccctatccggcgattgacggcctgcgcgaagcgggcgcgctctgcctgcaggccgattttagcagcgatgacggcattctgaccttcgctgaagcggtcaaatcacacaccaacggtctgcgcgccatcatccataacgccagcgactggatggcggaaaagccgggcgtcccgctgagcgccgtcatcaaccgcatgatgcagatccacgtccacgccccctatctgctcaaccatgcgctggaggcgttgctgcgcggccacggccatgccgccagcgacattatccatatcaccgattacgtggtggagcgcgggagcgacaaacatatcgcctatgccgccagcaaagccgccctggataacatgacccgctccttcgctcgcaagctggcgccagaggttaaggtcaacgccatcgcgccgtcgctaatcatgtttaatgagggtgacgacgaggcctatcgtcagcaggcgctggataaatcgctgatgaaaatcgcccctggcgaaaaagagattagcgatctcatcgattacctgtttaccagccgctacgttaccggccgctcattcgctgtcgacggcggccgcccgctgcgctag

SEQ ID NO: 211626 - DNA, 336 bp, Klebsiella pneumoniae
atggggctgttaatcaaagggctgctgggagcgctggtggtggtgctgattggcgtgctggcgaaaaccaaaaactacgctatcgctggcctggtcccgctgtttcccacctttgcgctcatcgcccattatattgtcgccagcgagcgggggatcgaagccctgcgcgcgaccatcgtattcggcatgtggtcgattcttccctattttatctatctgctgtcactgtggtatttcaccgggattatgcgcctgccgttggcgctggcaggcgcagtgggatgctgggggctgtgcgcctggctgttaatcctcggctggagccgtttccactag

SEQ ID NO: 211627 - DNA, 720 bp, Klebsiella pneumoniae
atgaataaaatcgtttttgttgaggatgaccctgaggtaggcacgctgatcgccgcctatctcggcaagcatgatatggatgtggtggtcgagcctcgcggcgaccgcgctgaggaggtgatcgcgcgggagaaaccggatctggtgctgctggacattatgctgcccggcaaggacggaatgacgctctgtcgcgatctgcgcgggcaatggcaagggccgattgtcctgctgacttcgctcgacagcgatatgaaccatatcctctccctggagatgggcgccagcgattatattctgaaaaccaccccgccagcggtcctgctggcgcgactgcgtctgcatttgcgccagcatattgctccggcaggcgccggatccgcctcctcaacgctcacgccacataaaaccatctccttcggctcgctgaccattgacccggtcaaccgccaggtgctgcttggcggagaaaacgtcgccctgtcgaccgccgatttcgatctgctgtgggagttggccacccacgccgggcagattatggaccgcgacgcactgctgaaaaatttacgcggcgttacctatgacgggatggatcgcagcgtcgacgtggctatctcccgcctgcgcaaaaaactgctcgacaacgccacggagccctatcgtattaagaccgttcgcaacaaaggctacctgttcgcccctcacgcctgggataactaa

SEQ ID NO: 211628 - DNA, 363 bp, Klebsiella pneumoniae
atgatgaaatacgttgtacttttggcactctcactgttcacttctctctctggctgggctttttccctcgacaacgccgatattcgactcctctgtccgcagcgcgggcaaatcgaggtgatccttcatcgctatgaacatacccagcaatcctgggggcagcatcactttgaaaccggcggcggccacgttcgccaggggccgctgctggtgatcccgtttgccaacctcgatcagatgatttaccaccagaccaccggcgagtttgcttactggtatgccgaaacggaaaaactggtgcgctgtcggctgctgagtctgacgaccacctatccggtagacattccttattatcgtgagtag

SEQ ID NO: 211629 - DNA, 1302 bp, Klebsiella pneumoniae
atgaaaaagctgttcgtgcagttctatcttctgctcttcgtctgctttctggtgatgaccatgctggtcggtctggtctataaatttaccgcggagcgcgccggacggcagtcgcttgacgatttgatgaaaagctcgctgtatctgatgcgcagcgagctgcgggagataccgccgcgcgactggagcaagacccttaaagagctggacctgaatttatcgtttgatctgcacatcgagccgatcagcaaatttaagctgtcggaaagctcgatgcagcacctgcgcgccggcgatatcgtcgccctcgacgatcagtacacctttattcagcgcattccccgcagccactatgtgctgtcggtgggcccggtgccctatctctattttctgcatgagatgcgcctgctggacgtggcgctaatggcgtttattgctatctctctggcctttccggtgtttatctggatgcgcccgcactggcaggacatgctgcgcattgagacggccgcccagcgctttggcgaaggtcacctcagcgagcgcattcacttcgacagtatgtccagcttcgagcggctcggggtggcctttaaccaaatggccgataacattaatgcgcttattgccagcaaaaagcagctgattgacggcatcgcccatgaactcaggacaccgctggtacgcctgcgctaccgtctggagatgagcgagaatctcaccgaggcggaatcgcaggcgctgaaccgcgatatcggtcagctggaggcgctgattgaagagctcctgacctacgcccgcctcgaccgcccgcagacggagctcagcctgacgactcccgattttcccgcctggatcagcgatcacgtcgaggatatccagatggttaacccacagcgcgaggtcgccctggcgacgctgacccacggtaactacggcgcgctggatatgcgactgatggagcgggtgctggataatttggtcaataacgccctgcgctacagcagccagcgggtggcggtcagcctgacgctgcagggttcgcgcgcttcgttgctggttgaggatgacggcccgggaatcgcccccgaggagcgcgagcgggtgtttgagccttttgtccgccttgaccccagccgggaccgggcgacaggaggctgcggcctcggcctggcgattgtccacagtatcgcccaggcgatgggcggcgaggtgcgctgcgaggccagccctctcggcggcgcccgcttctgctttagctggccggtctatcatcagctgcctgatttcacctctgcctga

SEQ ID NO: 211630 - DNA, 933 bp, Klebsiella pneumoniae
atggccagctacgacctcgttgaacgtctgaataatacctttcgccagatcgagctggagctgcaggcgctccagcaggcgttaagtgactgccgtctgctggcgggccgggtatttgaactgccggcgatcggtaaggatgccgagcacgatccgatggccactattccggtggtgcagcacatcggcaagacggccctggcgcgcgccctgcgccactacagccatctgtttatccagcagcaatcggaaaaccgcagcagcaaggccgccgtacgcctgccgggggctatctgcctgcaggttaccgccgcggagcagcaggatctgctggcgcgtattcagcatatcaatgccctgaaggccaccttcgagaagatcgtcaccgtcgactccggcctgccccccaccgcccgttttgagtgggtacaccgtcatttgccggggttgatcaccctaagcgcctaccgcacgctgacgcccctcgtcgacccgagcaccatccgcttcggctgggccaataagcacgtcatcaagaatctgacccgcgaccaggtgttgatgatgctggagaaaagcctgcaagcgccgcgggcggtgccgccgtggacccgggagcagtggcagagcaaactggaaagggagtatcaggatatcgccgccctgccgcagcgggcgcggctgaaaataaaacgaccggtgaaagtccagccgatcgcccgcgtctggtacgccggcgagcagaaacaggtacagtacgcctgccccagcccgctgatcgccctgatgtccggcagccggggggtcagcgtaccggatattggcgagctgctgaactatgatgccgacaatgtgcagtatcgctacaaaccggaggcgcagtcgctgagattgcttatcccgcgcctgcacctctggctggctagcgaatag

SEQ ID NO: 211631 - DNA, 1401 bp, Klebsiella pneumoniae
atgacaacgcatcgcagtgaaaaagactcgatgggcgccatcgaggtcccggccgataaactctggggcgcccagacccagcgctcgctggagcatttccgcatctcgaccgaaaaaatgcccggggagctgatatacgccctggcgctgaccaagcgggcggcggcgaaggttaaccaggatctcggactgttgacggcggagaaagccggggcgatcgtcgccgccgctgacgaagtgctggccggaaagcacgcgcaggagttccccctggctatctggcagaccggctccggcacccaaagcaatatgaatatgaacgaggtgctggccaaccgcgccagtgaactgctcggcggagaacgggggatggcgcgaaaaattcatcccaatgacgatgtgaataagagccagagctcaaatgatgtattccccaccgccatgcacgtcgcggcgctgattgccctgcgggaaaaagtgatcccgtcgctgcaggcgctgcgggcgacgctcaatgaaaaagcggtggccttcagggatatcgtcaagatcggccgcacccatctgcaggacgccacgccgctcaccttaggccaggagatctccggctgggtggcgatgctggaccatagcctgaagcacattgaagccagtcagccgcatcttgccgagctggcgctgggcgggacggcggtaggaaccgggctgaatacccatccggaatatgccgtacgggtggcggccgagctggcgtcgctcagcggacagccatttgtcaccgcgccgaacaaattcgaagcgctggccactgtggatgccctggtccatgcccacggcgcgctgaaaggcctggcggcctcgctgatgaaaatcgctaacgatgtccgctggctggcctccggcccccgctgcggcattggtgaaatcgccatcccggaaaacgagccagggtcatcgattatgccgggcaaggttaacccaacccagtgcgaagctctgaccatggtctgctgccaggtgatgggcaacgacgtggcggtgaatatcggcggtgcttccggcaactttgagcttaacgtctatcgcccgatggtcatccacaacttcctgcagtcggtgcgtctgctggcggacggtatggcgagctttaacgagcactgtgcggtgggtattgaaccgaatcgcgagcggatcagtcagttgctcaatgagtcgctaatgctggttactgcgctgaatacccatatcggctacgacaaggcggcggaaatcgctaaaaaagcgcaccatgaggggctgactctcaaagcctcggcgctggcgctgggctacctgacggaagccgaattcgacagctgggtgcgcccggaagagatggtcggcagcctggctattcgctag

SEQ ID NO: 211632 - DNA, 1647 bp, Klebsiella pneumoniae
atgtcgaataaaccgtttgtttaccaggatccttttccgctcaaaaaggatgacaccgagtattatctcctcagcagtgattacgtctccgtcgccgaattcgccggccaggaagtgctaaaagttgaccctcaggcgctgacccttctggcgcagcatgctttccacgacgcctcctttatgcttcgccctgcgcatcagcagcaggtggcggatatccttaacgatccggaagccagcgaaaacgataaatacgtcgcgctgcagttcctgcgcaactcggatatcgccgccaaaggtattctgcctacctgccaggacaccggcaccgcgatcatcatgggtaaaaaaggccagcgcgtgtggaccggcggcggcgatgaagccgccctggcgcagggggtgtacaacacctatatccaggacaacctgcgctactcgcagaacgcgccgctggatatgtataaagaggttaacactggcaccaacctgccggcgcagatcgatctctatgctaccgatggcgatgagtacaaattcctctgcatcgccaagggcggcggctcggcgaacaaaacctatctgtaccaggaaaccaaagcgctgatcaccccggcgaagctgaaaaattacctcgtcgagaagatgcgcaccctcggtactgccgcctgtccaccgtaccatatcgccttcgtgatcggcggtacctcggcggaagcgacgctgaagaccgtgaagctggcgtccaccaaatactacgatggcctgccgaccgaaggtaacgagcacggccaggcgttccgcgacgtgcagctggagcaggagctgctgctggaggcgcagaaccttggtctcggcgcgcagttcggcgggaaatactttgcccacgatatccgcgtgatccgtctgccgcgtcacggcgcttcctgcccggtagggatgggggtttcctgttccgccgaccgcaacatcaaagccaagattaaccgcgacggcatctggatcgagaagctggagagcaacccggggaaatatatccctgagcatctgcgccaggccggggaaggcgaagcggtgaaggtaaatcttaaccagccgatgagcgagatcctggcgcagctgtcgcaatatccggtgtccacccgcctgtcgctgagcgggactatcatcgtcgcccgcgatatcgcccacgctaagctgaaggagcttatcgacaacggcgaggcgctgccgcagtacgtcaaagatcacccgatctactacgcaggtccggccaagacgccggacggttacgcctccggctctctggggccgaccaccgcaggccgcatggactcttacgttgatctgctgcagtcccatggggcgagcaagatcatgctggcgaaaggcaaccgcagccagcaggtcaccgacgcctgccacaaacacggcggcttctacctcggcagcatcggcggcccggcggcagtgctggcccagcagagcatcaagagcctcgagtgcgtggcctatccggagctgggtatggaggctatctggaaaattgaagtggaggatttcccggcctttatcctcgttgatgataaaggcaatgacttcttccagcagatccagacctcgcagtgcgcccgctgcgtgaagtaa

SEQ ID NO: 211633 - DNA, 1179 bp, Klebsiella pneumoniae
atgcaaaagctgattaacgccgtgcagaactatgcatggggaagccacaccgccttaaccgaactctatggcatcgccaacccggacaatctgccgatggcagagctgtggatgggggcgcatccgaagagcagttcgcagatcctggcggccgacggccagccgcgttcgctgcgcgaggtgattgacgcggataaagccgctctgctcggcgacaaggttgccgcccgctttggtgaactgccgttcctgtttaaggtactgtgcgccgctcagccgctctcaattcaggtgcatcccaacaagcaggcctcggaagaaggtttcgcccgcgagaacgccgccggtatcccgctctccgccgccgagcgtaactacaaagatccgaaccacaaaccggagctggtttttgccctgacgccgttcctggcgatgaatgcatttcgcgagttcagcgagattgtcaccctgctgcagccggtggctagcgcgcatccggcaatcggcgccttcctgcagcagccggacgcgactcacctgagccagctgtttgccagcctgctaaatatgcagggtgaggaaaaggccaaggcgctgcaggtgctgcgcgacgtactggcccgtgaacaaggcgaaccgtggcagactatccgcctgatcgcggaattctatccggacgacagcggcctcttctccccgctgctgctgaacgtggtgaagctgaacccaggcgaagcgatgttcctgtttgctgaaacgccgcacgcctatctgcagggggtggcgctggaggtgatggccaactcggataacgtactgcgcgccggcctgacgccgaaatacattgatattcctgagctggttgctaacgtcaagttcgaggctaaaccggcgggtgagctgttgacccagccgcagcgtcacggcgcggaactcgacttcccgatcccggtggaagattttgccttctccctgcatgacctctccgccgaggccagcgatctggcccaggcaagcgcggcgatcgtgttctgcgtcgacggcgaagccgtactgcgcaaaggcgaccagagcctgaccctcaagccgggcgagtcggccttcgtggccgccagtgaatcgccggtgcaggtcagcggccgcggccgcgtggcgcgcgttttcaataagctccagtaa

SEQ ID NO: 211634 - DNA, 1527 bp, Klebsiella pneumoniae
gtggcgctgggcgtggtatggacaggcggcgcctggttcaccggtaaacagctggaaggccggatcgccgatatggtgcagcaggcaaacgcccagctgcgcagcagcgcgccggagtcaggtctggagctgagctatcaggactaccagcgcgggctgttcagcagccatctgcagctggtggtgaagccgatcgccggtcaggctaacggctggctggccgccggtcagagcgtggtgcttgacgaagtggtcgatcatggccccttcccgctggcctcgttaaaagcctttaatctggcgccggcaatggcttccgtccacaccacgctggtgaaaaacgacgccagccaggcgctgttcgagatagccaaaggcgacaccccctttaccgtcgatacgcgcattgcctacagcggcgacagccagtcggctatcgtccttaacgccctcgactacgctaaaggcgatgagaaagtcaccttcagcggcggtcagttccagctcgacgccgaccgcgacggcaaaaacatcagcctgaagggccaggccggcagcgggcagatcgatgcgctcaatgaatataatcagaaggtacagctgcgcttcgtcaacctgaccaccgacggcgccaccgagctggccagcttcaacgaacgtatcggccagcaaaaaatgaccctcgataaactggccatcagcgtcgaaggcaaagagctggcgctgatcgacggcatggcgctggacggcggctcgacgctgacccaggacggcaaaggcgtgaacagccaggtgaactacaccgtcaacagcctcaagctgcaggggcaggatatgggcagcggcaaactcacactgaaagtggataacgtcgacggtcaggcgtggcaccagttcagtcagcagtacagcgcgcagtctcaggcgctgctggcgaaaccggagctggcgcagaatccggagctgtatcagcaggccctcaccgaaacgctgttcaatgcgctgccgatcctgctcaaaggcaacccgtcggtgaccatctctccgctgagctggcgcaatgccaaaggcgaaagcaccctcaacctctcggttctgttgaaagatccggcccaggtgaccgctccgccgcagaccctggcggaaagcctggatcgcgtggtgcagtccctggacggcaaagtggtgatcccggtggatatggcgacggagtttatgactaagatcgccggtctggaaggctatcagccggccgatgccgccaagcttgccgatcagcaggtcaaaggcctggcggcgatgggccagatgttccgcattaccaccatggaagataacgccatcagcagcagtctgcagtacgcgaacggccaggtgacgctgaacggacagaaaatgccgctgcaagattttgccgcgatgtttggtctggaagcgccttcgctgccggacagcgcgccgcaggaaggccagccgcagcaggatgacgccgctcctcagcaggacgacgccgccccgcagccgtaa

SEQ ID NO: 211635 - DNA, 1029 bp, Klebsiella pneumoniae
atggcaatcgcaaaaaagatcaccatcaatgatgtggcgctggctgccggcgtctccgtgagcaccgtttcgctggtgctgagcggcaaagggcgcatctccagcgccaccggcgagcgggttaatcaggctatcgaacagctgggatttgtgcgcaatcgtcaggcggcctcgctgcgcggtgggcagagcggcgtgattggccttatcgtcagcgacctgtcaaaaccgttttatgctgaattaaccgccggcctcaccgatgccctggagaggcaggggaaaatggtatttctcacccagggaggccgcagcggcgaaaagatggcccagcggtttgatacgctggcggcgcagggggtggacggggtgattatcgccggggcgatcgaccgcgggagcgagctgcgcgagcgtgcggcggaggcgggggtgccgctggtgtttgcttcccgcgccagctatcttgacgatgtcgacctgatccgcccggacaacatgcaggcggcgcagctggtgacggagcatcttatccgccgcggccatcagcggatcgcctggctcggcgggcagagtgcttcgctgacgcgcgccgagcgggtcggcggctattgcgccaccttgctgaaatacggcctgccgtttcacagcgaatgggtgctggagtgcgagtccagtcagaagcaggcggcggaggcgatgaccggcctgctgcgccagaatccgaccatcaccgcggtgctgtgctacaacaacgtggtagccaccggcgcgtggttcggtctgttacgggctggaagacagagcggggaagatggcgtcgagagctactttgagcagcgggtggcgctggcggcgtttgccgacgtgccggaggccgccctcgacgacctgcctctcacctgggtgaccaccccggcgcgggagatggggaaaagcctggcggattcgatgctgcggcggctggaagaggggactggcgagacgcgaaaccagattatgcccccgcggctggtgacgcgaaaatga

SEQ ID NO: 211636 - DNA, 1593 bp, Klebsiella pneumoniae
atgacggcgaaaacagcaccaaaaatcaccttatgggaatttttccagcagctgggaaaaaccttcatgctgcccgtagcgttgctctcgttttgcgggatcatgttggggatcggcagctcgctaagcagtcacgacgttttgactctgctgccgtggctggatatgccgctgctgcaggccatctttatctggatgagcaaggtcggctcctttgccttcagcttcctgccggtcatgttctgtatcgccatcccgctgggtctggcgcgagagaacaaaggcgtcgccgccttcgccggcttcgttggctacgcggtcatgaacctggcggtcaacttctggctgaccgcgaagggtattctgcccaccaccgacgccgcgatcctgaaggccaacaatatccagaacattatcggcattccgtcaatcgataccgggatcctcggggcggtgatcgccggaattatcgtctggctgctgcatgaacgcttccataacattcgcctgccggacgccctggccttcttcggcggcacccgcttcgtgccgatcgtcaccaccgtggtgctggggctggtcgggctggcgatcccgctggtgtggccagtcttcgccatggggatcaacgccctcgggaagatgatcaacagcgccggggattttgggccgatgatcttcggcaccggcgagcgactgctgctgccgtttggcctgcaccatattctggtggcgctgatccgctttaccgaagccggcggcaccctcgacgtctgcggccacagcgtcagcggcgcgctgaccatcttccaggcgcagctgagctgtccgacgacccacggcttcgccgaaagcgccacccgtttcctgtcgcagggtaaaatgccggcattcctcggcggcctgccgggagccgcgctggcgatgtaccactgcgcccgtccggaaaaccgacataaaattaaaggcctgctgatctccggggtcatcgcctgcgtggtcggcggcaccaccgagccgctggagttcttgttcttgtttgtcgcgccggtcctgtatgtcatccacgcgctgctgaccggtctcggctttaccatcatggcggtgctcggggtaaccatcggcaacaccgacggcaatatcatcgacttcgtggtgtttggcattctgcatggcctggccaccaagtggtatctggtgccggtggtggcggctatctggttcgcggtctactatgccatcttccgcttcgccatcacccgcttcaatctgaaaacgccgggccgcgacatcgacactgccgccagcgtggagaaagccgtcgccggtaccatcggcaaatccgggtataacgtaccggcgattctggcggcgctcggcggcgcagagaacattgtttcgctggataactgcattacccgtctgcgcctgtcggtgcacgatatgagcaaagtggacgccgccgcgctgaaagcccatcgcgccatcggggtggtacagctcaaccagcataatctgcaggtggttattggcccgcaggtacagtcggtaaaagatgagatggccacgctgatgaataccgtgcaggcctga

SEQ ID NO: 211637 - DNA, 1173 bp, Klebsiella pneumoniae
atgtttgattttgccacccctatcgatcgccacggcacctggtgcacgcaatgggactatgtcgccgaccggtttggcgccgccgatctgctgccgttcactatttccgatatggatttcgccaccgcgccctgtattctcgacgccgttagccagcggctggcccacggggtgttcggctacagccgctggcgcaacgaggcgtttctcggggcgattgcccactggtacgccagccgctttaacagcgacatcgatccgcaatctgtggtctacggaccctcggttatctatatggtggcggaaaccatccgccagtggtcgaaagaaggcgacggcgtcgtggtccacacccctgcctacgatgcgttctataacaccatcaccgctaaccggcggcggattgccccggtgccattgatcctgaaggataatcggtggcgctgcgatatggaccgcctggaggcggcgctggcggagccaaagaataccctgctgctgctgtgcagcccgcacaacccaacggggaaagtctggcgtcgcgaggagctggagaccatggcggccctgtgtcaaaaacatggcgtcagggtgattagcgacgaaattcatatggacatgacctggggcgaacaccgccatatcccgtggagcgaggtcgctcagggaccatgggcgctgttcacctccggttcgaagagcttcaatattccggcctttaccggggcctacggctttatgcccgaagagaacgagcgcgacagctacctgcaggcgctaaagggtcgcgacgggctctcttccccttccgtgccggcgctggtcgcccatatcgccgcctaccgcgacggggctccctggctcgatgccctgcgcgactacctgcaggcgaatatgcgctatgtcgccgacacgctcaacaacgccttccccgcgctctgctggcagccgccggaggccacctacctggcatggatcgacctgcgcccgctcaacgttgacgatcgcgcgctacagcaggcgctgatcgccgaacagaaggtggcgattatgccgggttatacctatggtcctgagggcaacggctttctgcgtctcaacgtcggctgcccgcgcgagaagctggaacgcggtgtcgaaggactgattgccgccctgcgcagcctcagctga

SEQ ID NO: 211638 - DNA, 1029 bp, Klebsiella pneumoniae
atgaatcaagacgtcaccgcgaagatgttaaagcccgattttgatagtgaagtttccggcctggtgcatggctatttgtttcatgaacagcgccccccgcagccgatcgcctctggcgaggtctgcgcccgctatcaggcgctcgccgatgacaaggcgtttatctggttacacctgaatcttaatcatgccaccgccgagaaatggttaaccagccactttccggtggccgattttttcttcgaggagatccgcagcggctcgcacaccacccgcattgagcgacagggggaaaatctgttcgctgtgcttaacgatgtgctgtttcgtccgcaggataccagcgcggaaaccgccacgctgtggctctactgtagccccaggctggtggtgacggcgcgcttcaaaccgttgcggtttatcgaatggatgctgccgcgcttgcagacgctcagggtgaacacgtctactgagctgctggcctttctgctggaggagcaggaggaggtgctggagcaggtcgtccgccaggccagccgccatgttgaccttattgaagagcgtcttctgagcaatcacgtgcagcgcaaccgggccgatctggcgcggctacggcggatgcttttacgcttccagcggttgctggcgccggagccggcggcgatgttccggctgcttaaccggccgccggcgtggatggatcgcgcggtggtgcaggcgtttcgtcagttcaccgaagagtttagcgtggtgcttaacgatctgtcgggcctgatcgagcgcatcagtctgctgcaggaggagattggcgcccgccagctggagcagagcaatcgcaccctctataccctgacggtgatcaccgtcctcgcgctgccgattaacatcgtcgccggtttcttcggcatgaacgtcggtgggatcccgctggcaagcaaccaccacgggtttatcctgctggtggtgattgtcgctgtctttaccctcggcgccggttacctggcgtttcgccggcgcgatgacctgtag

SEQ ID NO: 211639 - DNA, 204 bp, Klebsiella pneumoniae
atgaaaacctatgaccgtaatcgtaacgctattgctaccggcagcatggtaatgatcgccggtaacgggacgacgggcgtgattaaagctatccatggcgaggggaaaaccgctgagcagttgcgccgggcggactgcgttgaaatcgacggctgcgagggccgcttctgcccgttggatctgatccgtctcggcttccattaa

SEQ ID NO: 211640 - DNA, 480 bp, Klebsiella pneumoniae
atggttgccatgccgtcggcgcaggccggggaattaagcctctactcgatgaataccggttcctatgtctatcatatgacgggtaaccacggacaatataacgaacatttcaataacaactttttctcggtggagcgcaagttttctcaggattcaaaatacagcgtgctggtcggaacgatgaaaaacagctttgacgatcgttgcctgaccctcggcgtgcgccgcgactggctgaaaaacgataccggctgggtactgaaaggggtgtatgcctataccggggaatttttctttgatgccttcagccactgtggggattccggcacctaccgcaccgccaaaaaaatcaccggcatcggtttttcgccctacctctatcatggcctgcaatataatttcaccgattatttcggtgtggaaggcggcattattgtgccggcgatctttgtgatgagtgttcagtggagctttcgctag

SEQ ID NO: 211641 - DNA, 354 bp, Klebsiella pneumoniae
gtgttagccactctcctcgttgcgctggtcgctattattcatctcgccatcctggtgctggagatgtttctctgggaagcccccgccgggcgccgggcctttaacctcagcgccgatttcgcccggcagacccgggtgctggcggccaaccagggcttgtataacggctttctggccgccggcctggcatgggggctgtggctgggggcgccgggtgtgcaggtggttatctttttcctggcctgcgtgctggccgccgggattttcggcgcgctgaccgccagccgcaaaattctctatattcaggcgctgcccgcgctgctggcgctggttgccgtgctgacgcaagcgtag

SEQ ID NO: 211642 - DNA, 1209 bp, Klebsiella pneumoniae
atgacatggcaatccttcaaacaggcctggcttatccggttctggtctcctgtcccggcggtcattgccgcgggcattctctctacctactattttggcatcaccggcaccttctgggcggtgaccggcgaattcacccgctggggtggtcagctgctgcagctgctgggcgtccacagcgaacagtggggctattaccagctgatacatctcgaagggtcgccgctgacccgcatcgatggcaggatgatcatcggcatgttcggcggctgcctggccgccgcgctgtgggcgaataacgtcaaactgcgcttgccacgcagccggatccgcattgcgcaggccgtggcgggcggcatcatcgccgggttcggcgcacggctggcgatgggctgcaacctggcggccttcttcaccggcattccgcagttctccctgcacgcctggctgtttgccatcgccaccgccatcggctcctggtttggcgcccgcttcacgctgctgcccctttttcgcatcccggtaaaaatgcaaaaagtgtccgccgcctcgccgttaacccaaaaaccgcagcaggcgcgccgccgcttccgcctggggatggtggtctttttcgccatgatcggctggggcctgcttaccgccgcagaccacccggcgctgggcctggcgatgctgttcggtattggctttggtctgcttatcgagcgcgcgcagatctgctttacctccgcctttcgcgatatgtggatcaccggccggacggtgatggcgaaggcgattatcttcggcatggcggcgagcgccatcggtatcttcagctatgtgcaattggggatggcgccgaaaattatgtgggccggtcctaatgcggcgattggcgggctactatttggctttggcatcgtgctggccggcggctgtgagaccggctggatgtaccgggcggtggagggccaggttcactactggtgggttgggctgggcaacgtcatcggctcaacgctgctcgcctggtgctgggacgatatcgccgcccccctcgccacccactggcagaaagtcaacctgctgaacgccttcggtccctttggcggactactggccacctatctactgctgctgatcgccctgctgctggtgatcgcctgggagagacattttttccgccgccaggcggcggtccggaccgtgaaggagagcgcatga

SEQ ID NO: 211643 - DNA, 234 bp, Klebsiella pneumoniae
atgaaaaacatcatccctgattatcgcctggatatggtcggcgaaccctgcccgtatccggcggtcgctaccctggaggcaatgccttccctgcaaaaaggcgagatcctagaagtggtcagcgactgtccgcagtcgatcaataacattccgcttgatgcaaggaaccacggctacacggtgctggatattcaacaggatggcccaaccattcgctatttgattcagaagtag

SEQ ID NO: 211644 - DNA, 393 bp, Klebsiella pneumoniae
atggaactgctggtcaggctgggtcatttttttgagcaagcgcgttctgacgccgactatgccaccttcgccaatgaactgcgtcggcataaggtctcctactacatctattttgtttccaccggcaatatgaatttcgtaatggcaaacgacgaggtggtctcggtaaaaagcgcccgcgggctgctgcgcgttcgcgctgaggccagccattgtctgaccagggccgccgttatccgccactttgcccgggccattaactttgaacagtactgccgggatctcgccagcgccggggtgtttaagtggatcgtcgatctggaagaggagacccggcactactggtcgaaggataatacgctgttatataaagagtgcctgatgcccccctga

SEQ ID NO: 211645 - DNA, 159 bp, Klebsiella pneumoniae; identical to SEQ ID NO: 136317

SEQ ID NO: 211646 - DNA, 999 bp, Klebsiella pneumoniae
atgagtaaacttgggattaatggatttggtcgtatcggacgtctggtgttacgtcgtttattagaagtcgacagcagcctggaagtggtggctatcaacgacctcacttcgccaaaggtgctggcctacctgttgaagcatgattcaaactacggccccttcccgtggagcgtcgactttaccgaagatgcgctgatcgtcaacggcaaaaccattacggtgtatgccgaaaaagaggcgcagcatattccatggcaggcggcaggcgccgaggtgattgtggagtgtaccgggttctacacctcggccgagaaatcgcaagcccatctccaggccggcgcgcgcaaagtgctgatttccgcccccgccggcgagatgaaaaccatcgtctacaacgtcaacgatgacaccctgaccccggatgacaccatcatctccgtggcctcctgcaccaccaactgcctggcgccgatggccaaagttctgcaggatgccttcggcatcaccgtaggcaccatgaccaccatccacgcctataccggcacccagtcgctggtggacgggccgcgcggaaaagatctgcgcgcctccagggcggcggcggaaaacgttatcccgcacactaccggcgcggcaaaagccattggcctggtgatccctgccctgagcggtaagctgaaaggccatgcccagcgcgtaccgaccaaaaccggctcagtgacggagctggtatcggtgctggagaaaaaggtgactgcggatgaggtcaatcaggcgatgaggcaggcggctgagggcaatgaatcctttggttacaccgaagaggagatcgtctcttccgatatcatcggcagccatttcggttcgatctacgatgctacccagctggagattgtggaggccggcggcgtacagctggtgaaaaccgtcgcctggtacgataacgaatacggctttgtcacccaactgatccgcgtgctggagaaatttgcccgctaa

SEQ ID NO: 211647 - DNA, 1440 bp, Klebsiella pneumoniae
atgacagcacccgttcaacacccgatgtatattgatggccagttcgtttccggtcgcggcgacggctggatcgacgtgcttaacccggcgaccgaagcgctgctgtcgcggatcccggacgggactgccgaagaggcgcggctggcgattgacgccgccgagcgcgcccagcccggctgggaagcgctgccggccattgagcgtgcgggctggctgcgcaaaattgccgccggtatccgccagcgtgccgacgagatcgccgggctgattgtcgctgaaggcggcaagatccagcagctggcggcggtggaggttgcgttcaccgcggactatctcgactatatggcagaatgggcgcgccgttacgaaggtgagatcgtgcagagcgatcgcccgggggagaatatccttgtctttaaacgcgcgctgggggtgaccaccgggatcctgccgtggaacttcccgttctttcttatcgcccgcaagctggcgccggctctcatcactggaaataccattgtcattaagcccagcgaatttacgcccaataatgccatcgcctttgccgagattgtccatcaggttgggttgccgaaaggggtctttaaccttgtgcttggccgcggagaaaccgttggccaggagctggccggcaatccgaaggtggcgatggtcagcatgaccggcagcgtggcggcgggagaaaaaattatggccgctgcggcgaaaaatatcaccaaagtgtgcctcgagctcggcggcaaagcgcctgccattgtgatggacgatgcggatctggagctggcggtgaaagcggtggtggactcgcgggtgattaacaccgggcaggtgtgtaactgcgtcgagcgggtctatgttcagcagggcatttacgaccgcttcgtcaaccgcctcggcgaggcgatgaaggccgtgcagtttggcgacccggcgacgcgggatgacatcgcgatggggccgctgatcaacgcggcggcgcgggaccaggtggcgggcaaagtggcgaaggcggtggcgcagggggcgcgggtggcgctgggcggtcagccgctggagggcaaaggctatttttatccgccgaccctgctgctggatgtacgtcaggagatggacattatccatgaggaaaccttcggtccggtgctgccggtggtggccttttcgaccctcgatgaggcgctggcgatggccaatgacagcgattatggcctgacctcctcaatctatacccgcgatctgaacgtggcgatgaaagcgattaagggactgaagtttggcgaaacctacatcaaccgtgagaactttgaggcgatgcaggggttccacgccggctggcgtaagtcggggatcggcggggcagatggccgccacggcctgaatgagtacctgcagacccaggtggtctatctgcaggcctga

SEQ ID NO: 211648 - DNA, 801 bp, Klebsiella pneumoniae
atggcagaacaatttccccggctgtcggcggcgacgctggcggcggctaaccaggtcggcgcctggctggcgcaggacgatctggcgatgctacccgcgctgccgcaggtggacgtggtggtgctggccggcaacgccgtgatcccgaccatcgacgccgcctgccggctggcggcggaacgggaagtcccgctgctgatcagcggcggcgtgggacattctacgaactatctctacgaggcggtgcgccaggatacccgttaccgtatgttgccggtggtggggcgtccggaagcgcatgttctggccgatattgctcatgactactggcaaattccgcgctcgcggctggtggtggaggaccagtcgaccaactgcggcgagaacgcccgttttacccggaccacgctggagaacggggggatccctcatcgtcgcgggatcgtcattcaggaccccaccatgcagcggcgaaccatggccaccttcgcccgcgtctggcagggggtgacgacgccgccacagtggctgagctttcccggctgctcgccggtgctggagcagaccgatggtcaactggggttcgcgggcggcggggcggggctgtggccggtcgcccgctacctggcgctgctgctgggcgagctgccgcgcctgcaggatacgcctgaaggatacggtccgcgggggaaagacttcatcagccacgtcaccttcccgccggagatcatcgatgcctggcgacagctgcgggaggacgcccagcttgccggggcgctgcaggcccgcaccctcggctga

SEQ ID NO: 211649 - DNA, 1323 bp, Klebsiella pneumoniae
atgagcaatccacaagacaacactgcatccattctgcagaaaaacaagaaggtactgatcgcgagcctgacaggcagcgccatcgaatggttcgattattttctctatggcaccgccgccgcgctggtgttcaacaaaatcttctttccgatggtcgacccggttatcggcctgatcctctcctggctctccttctcgctgacgttttttatccgccccatcggcggcgtgattttcgcccatatcggcgatcgcatcggccgcaagaagacgctggtgctgaccctgtcgctgatgggcagcgcaacggtggcgatcggcctgctgcccacctacgagatggtgggcctctgggcgccggccctgctgattactctgcgcattattcagggcatgggtatcggcggcgaatggggcggcgcgctgctggcctatgaatacgcgccggaaaagcggaaaggctttttcggcagcattccccaggccggggtgaccatcggcatgttgatggcaacatttatcgtctcgctgatgacgctgttcgatgaggcgcagtttctcgcctggggctggcgcataccgttcctgctcagctccgtcctcgtttttctcggcctgtggatccgcaaagatatcgacgaaacgcccgcctttaagcaggtgaaaaaatccggccaggtggcgaaggccccgctgcgcgatacgctcaagcaccactggcgggaagtgctgatcgccgccggcctgaaagtggtggagaccgcccccttctatatcttctccacctttgtggtcagctacgccaccaccaccctgagctatcagaagtcgcaggcgctggaatccgtgaccctgggcgcgctggtggccaccgtgatgatcccgctgatggggctgctgtcagacaaggtgggtcggcaaaagatgtacaccctgagcgtggtgctgctggggctgtttatcgtcccgtggttcctgctgctcgacaccggcaccggctggggcatcatgctggcgacgatcgttgccttcggcatcctgtgggcgccggtaaccgcggtgctcggcaccctgtgctctgagattttcagcgccaatgtgcgctataccgggatcaccctcggctaccagctgggcgccgcgctggccgggggcaccgcgccgcttatcgccaccggtctgctggcgaaatatgacggtgactggcggccggtggccatttatctgggcgttacggtggcgatttcgctgctggcgatattctgcgccagccggatgaagtccgcgctgggcacggccccctcccgggcggaaagcgcctga

SEQ ID NO: 211650 - DNA, 1431 bp, Klebsiella pneumoniae
atgactgaacatcaacatcaggcgtcacctgccgccggaggtgaaggcgcgtcacagcttaagcgcgggctcagcgcccgccatatccagatgattgccctcgggggcgccatcggcaccgggctgtttatgggggcggggcgcaacatcgccgtcgccggcacctcgatcctggttatctatgtgctggtcgggttctttacctatatggtgatgcgggcgatgggcgagctgctgctcacccgccatgactaccgctcgtttgccgactttgtcggcgagtatctcgggccgcaggccagcttttacctcggctggacctactggctaagctgggtggtgacctgtatcgccgacgtagtggtctgcgggagctatatgcagtactggttcccggaactgtcggcgtggatgccggccctcagcatgctggcgattctgttcctgcttaacctgctgtcggtgaaaatgttcggcgaggcggagttctggttcgccctgatcaaggtgatcaccattatcgccctgatcggcaccggcggctggatgattgccaccggctggacctccccggacggcgtgacggcctccctcagccatctcaccgacccgacggcctttatgccccacggcatcaccggctttttcgccggcttccagatagcgatcttctcctttaccggcattgagctgctgggcaccatgacggcggagacccgcgatccgcagcgcattttgcccaaggcgatcaatgctctgccgctgcggattatcatcttctatctgctgtcgatggtggtgatcatcgctgtcgcctcgtggccgggggtgtcggcggagaccagccccttcgtgacgctgttcgccaaggccgggctgcctgccgccgcggcggtgattaactttgtggcgctgacctcggcgatgtcctcggccaacagcggggtcttctccagcacccgcatgctgtacggcctgtcggtggagaagcatgcgcactggcagtttcgtatcctgtcgcgcagtacccgcattccggtgcgcagcctgctgttctcctgcttctgcatgctgatcggcacgctgttgctgtttctggtgccgaacgtgatgaccctgttcaccatcgtctcgaccctggcggcgattatggtggtgttcagctgggggatgatcctcgtggcctatctggtttaccgccgtcagcgtccggacctgcacgccgggtcgatctttaagatgcccgccggggtggtgatgagctgggtgagcctgctgttcttcgcgttcgctatcttcatcatgatctttgacccggacacgctgctggcgctgttggcttctccgctgtggtttatcgcgctgtggggcttctggaagctgaagcagcggcgcgaggggcagcttcagctggacaaccagagcgcctga

SEQ ID NO: 211651 - DNA, 996 bp, Klebsiella pneumoniae
atggagcacctggttaacgatttactgcactgccgcctgcaggcgtggacctttccggcgggcatcgaggcccgctggctgggcgagggcattttacagctgctgccgacggcgccgtggcgccaggcgacgatcctctccgccggcgtgcatggcaatgagaccgcgccgattgaactgctgctgcagctaacccacgatctgagccaggggcggcagccgctcacgcaggcgctgctgatcgtctttggtaatctgccggcgatccgcgccgcgcgccgctatctgcataacgacctgaatcgcctgttcggcggccgccatctggcggtcaccccgggaaatgagtcgcggcgggcttttgcgctggagcaggcggtgcaggctttttatcgcgccgccgatacggcggggccggtcaaccgtggtcatctcgatatgcacaccgccattcgcggatcgctgtatcgccagtttgcgctgctcccggcccacgccggggatttttcgcccgatttctatcagctgctgcaggccagcgggatggacgccgtcgtgcgccataccgaagcgggcggcaccttcacccatttcacctgcgaaaagttcgccgcgcaaagcgccaccctggagctggggaaagtgatgccgttcggcgccaacgatctcagcctgttcgccgccgccgacgcggcgatccgggcctggatcgctgacgcgccgctgccgccgcgcgacaaagcgccggtggactacttcctggtcgaggagagcatcatcaagcgcgagggggaatttacgcttaatctcgcggcagacgttgaaaacttcaccgcgctcccggcagggtatgagatcgcccgccaggcagagaaacgttgggtggtgcaggcccgggccccctatatcctctttcccaacgccggggtcgccaccggccagcgcgccgggctgttgctccgcgccgctgcccttcgtctcccgcaaccagcctga

SEQ ID NO: 211652 - DNA, 1341 bp, Klebsiella pneumoniae
atgtctggttttgaagcaaactttgatggcctggtcggcccgacgcaccactacgccggactctccgtcggcaatgaagcctcgcaaaataaccgcgatggtctctctaaccctaaacaggcggcgctgcaggggctgtataaaatgaaagccctggccgatcgcggcttcgtgcagggcattctgccgccgcagccgcggccgaatctgcgtctgctgcgtgaagtgggtttccagggcagcgatgagcaggttatccggcaggcggcccacgcggcgccgcagctgctctccgccttcagctccgcctcgtcgatgtggaccgccaacgcggcgaccgtctcaccgtcggcggacagcgccgatggcaaagtccatttcaccgtcgccaacctgaacaataagctgcaccgtatgcatgaggcgcccaccacctcggcgatccttggcgccacgttcgccgatccgcgctactttgcccaccatgcggcgctgccgcagcatggcgacctcggcgatgaaggggcggccaaccataaccgcttctgccgggaatatgaccggcagggggtgcagtttttcgtctatggtcgacgcgccagcggcggtatcgccccggtgaagtatccggcgcggcagaccctcgaggccagcgaagcggtggcccgcctgcatcagctggatccgcgctacacggtgtttgcccagcaggcgccgcaggctatcgatcgcggcgtgtttcataacgacgtcattgcagtcagcaatcgccatgtgctgtttcaccatcagcaggcgtttgtcgatcaggcggcggtgctgaccacgctgcgggctaaaagcgacagtctggatatcccgttcaccagcgtggaagtgccggacgagcgggtttcgctcgacgacgccgtagcctcttacctgttcaacagccagctgctgagcaaaccagacggcaagatgctgatcgtggtgccggaggagtgccgccagcgggaaaacgtctggcgctatctcagcgatctcgccgccgatagcgcatcgccgatcgatgaagtggcggtctttgacctgcgggaaagcatgcgcaacggcggcggcccggcctgtctgcggctgcgggtggtgctcaacgaggcggagcgccaggcggtcaacgcccatagcctgatgaacgacgaacgttatcagcagctgacggcatgggtggaaaaacactatcgcgaccggctgcatgcccgcgatctggcggacccgcagctgctgcgcgaggtttatcaggcgctggatgagctgacgcagatcctgcgcctgggcgcggtctatgattttcagcgttaa

SEQ ID NO: 211653 - DNA, 1467 bp, Klebsiella pneumoniae
atggcggtaaaagcacagtttatagccgggcagtggctgccaggcagcggcgcaacgatgagcaaactggccccggaggatcagtcgctgctgtggcaggcggccagcgcgggggctgacgacgtccaggcggcctgcgccgcggcgcgcgcggcgttttatccctggtcgcaccggccgctggccgagcgtattgacgtcgtacagcgttttgctgcgctgctggagacgcataaagaggcgctggcgaccctgatttcccgcgagaccagcaagccgctgtgggagacccgcaccgaagtgcaggcgatgatcggcaaggccgcgatctccatcgaagcctatcaccagcggacgggctttcatgagtcgacgctgccggacggtaaagcgctgctgcgccacaaaccgcacggcgtgatggcggtctttggcccctacaacttcccgggccacctgcccaacggacatatcattccggcgctgatcgccgggaacaccattgtgtttaaacccagcgagctgacgccggctaccgctgaaatgaccgtccagctgtggcagcaggcgggcatccccgacggggcgatcaacctgctgcagggcggaaaagccaccggccaggcgctgctggaaaatcgtgatatcgacggcgtgctgttcaccggcagcgcggcggccggtttccacttccatcgctacttcggcggccagccggagaagatgctggccctcgagatgggcggcaacaacgcactgatcgtcgccgacgcggccgatatcgatgcggcgctgcatgtgattatccagtcggcgtttatctctgccgggcagcgctgcacctgcgcgcgccggctgatcgtgccgcgcggcgagcagggggatgcgctgctgcagcggctggtagaggccagcgcgcagatccgcgccggcaagtgggatgatcagccggcgccgtttatgggcggggtgatctctctcgacgctgcgcagaacatgctggcggcgcagcaaaaactggaggggctcggcggcaaggtgctgctgcgcatgcgccagcctgacccgcgctccacggtgctgaccccggggatcgtcgacgtcaccggtattgaggtgccggatgaagagtactttggcccgctgctgacgattatccgttacgacggcttcccggaggcgattcgcctcgccaatcagacccgctatggcctggccgtcgggctgatctccagcgatgcggcgcagtttgatcagctggcggacgaggcgcgagccgggatcgtcaactggaacaagccgctgaccggcgcatcgagtaaagcgccgtttggcggggtgggcgcctccggcaaccatcgcgcggcagcgtggtatgccgccgattactgtgcctggccgatggcctctctggtcagcgatacgctgacgcttccggcgacggtatcgccgggcctgccattctga

SEQ ID NO: 211654 - DNA, 1023 bp, Klebsiella pneumoniae
atgctatttcgtcccgtacgggaaaacgatctcgacgacatcgtccgcctcgccgcgcgggcgggggtcggcatgacctctttaccgcatgacgtcgggcgcctggcggccaggatccggcgcagtatcgagaccttcgccggcgaactgccgcgcagccagcagggtttcctgtttgtgctggaggacaccgcgctggcgcgggtggtgggggtgagcgccattgaggtcgcagtgggcctggacgagccgttttacaattttcgcattcagaaaacggtgcgcgcctcgaaagcgctgggagtctataagccccaggagctgcttaatctcagctatgaccacaccgggcatagtgagctgtgtacgctgtttctcgacccggcgtatcagcgcaaccgcaatggtctgctgctctccaaggcgcgctttttatttatcgccgcctttcgcgagtggttctccccgcacctgtttgccgaactgcgcggctgcagcgatgagcagggacagtcgccgttctgggatgcgctgggccatcatttcttcgacatcccgttcgccgatgccgaccggctgaccggcaccggcatgaaaacctttattgccgaactgatgccggcgtacccgatctatatctcactgctgccggaagcggcccgcggggtcatcggtcaggtgcatcccaataccgccccggcgcgggcgatcctcgagaaagagggtttcagctggcgcggctcggtggatattttcgatgccggtccggtgctggaggcggacaccgatcagatccgcgccgtgcgcgacagccagcgcctgcctgtccggcagctgatgggcgacctgccggcgccgaccctcgtcgccaacggtcaattcgacaactttcgggcgctgctggtggcccacgaagagcaggtctcgcttgacagcgccgcgctggacgcgctgcaggtcagtgaaaccgaccgcgtttatacggtaaccctgaatccagaggacaacagatcatggcggtaa

SEQ ID NO: 211655 - DNA, 1206 bp, Klebsiella pneumoniae
atgtcaggcagtatgactcgcgaagattttgacgcttacctggttccctgttttgcccccgcgccgtttattccggtcagagcggcgggctcccgcgtctgggaccagcaggggaaagagtatatcgatatggcgggcggcatcgcagtgaacgccctgggccatgctcacccggcgctggctcaggccctgcaggatcaactggcgaaactgtggcatatcggcaatggctataccaacgagccggtgctgcagctggcaaaaaccctcgtgcagtcgacctttgccgacaaggtgtttttctgcaactccggcgccgaagccaacgaggcggcccttaagctggcgcggaaatatgcccacgataagtttggcggtgaaaaaagcgaaatcatcgccttcaaccacgccttccacggccgcacgctgttcaccgtctccgttggcggccagccgaaatattccagcgattatgctccgctgccgcagggcattacccatctgccctataacgatatcgaggcggtcaccgcggcgatctcctcgcgcacctgcgcggtgatcgtcgagccgattatcggcgaaggcggggtgatcccggcggacccggcgttcctgcaggcgctgcgtaccctctgcaatcgccatcatgccaccctgatattcgatgaggtgcagaccggcgccgggcgtaccggccatctctacgcctaccagcattacaacgtcgtcccggacattctcaccagcgccaaagggctggggggcggcttcccgatcggcgcgatgctggcgaaagaggcctgggcgcaggtcttccagccaggcacccatggcaccaccttcggcggcaacccgctggcggcaaccgtcgctaacgccgtgctggcccatctcgatgcgccgctgctggcgggcgttggcgagcgccatgcgctgatcgttgaccagttgaatgcgatctctgcccgttacgatgcgttcagcgccgtgcgcggcaccggtctgctgatcggcgctgagctggcggggccgctgcgcggcaaggccaaaacgttgaccaacctggcggcggaagaggggctgatcgccctgattgccggcccggacgtgctgcgcttcgcgccggcgctcaatatcccgctggcggatattgcggaagccttcgtgcgccttgatcgcgccgttgcccgcttaacccgctaa

SEQ ID NO: 211656 - DNA, 1275 bp, Klebsiella pneumoniae
atggaaaagttatcttacgcatctgaaagtagtacatctccatggaccacctacctgcgccagatcgaccgcgtcgcgccttatctcggcgatcttgcctactgggtggaaaccctgcgccatccgaagcgcgcgctgatcgtcgacattcctgtgcaaatggacgacggcaccatccgccacttcgagggctatcgcgttcagcacaatctgtcgcgcggaccgggtaaaggtggtgttcgctaccatccggatgtcgatcttaacgaagtcatggcactttctgcctggatgaccattaagtgcgccgcggtcaatattccttacggcggggccaaaggcggcatccgcgtcgaccccttctccttgtcggaaggtgaactggagcgtctgacccgccgttacaccagcgaaatcggcattattatcgggccgcagaaagatattccggcgccggacgtcggcaccaatggcaaagtgatggcatggatgatggacacttactccatgaaccatggcaccaccatcaccggcgtggtcaccggcaaaccgatccacctcggcggctccctcggtcgtgaaaaagccaccggacgcggcgtgtttgtcaccggccgggaagttgcccgtcgcgccggtatcgaaattgaaggcgccaaagtggcgctgcagggctttggtaacgtcggtagcgaagcggcccgcctgttcgctggcgtcggcgctcgtatcgtggttattcaggatcataccgcgaccctgtataacgaaggcggaatcgatatggccgccctcaccgcctggcaggcggagaaaaagcagattgccggtttcccgggcgcccaggagatcgataaagacgccttctggaccaccccgatggacatcctgatcccggcggcgctggaagggcaaatcacccgcgagcgcgcggagaagctgacctgcaaactggtgctggaaggggccaacggcccaacctatccggaagcggacgacgtgctggccgagcgcggcgtgatcgtggtgccggacgttatctgcaacgccggcggggtgaccgtcagctactttgagtgggtacaggacatggccagcttcttctggagcgaagaggagatcaacgccaagatggaccgcattatgaccgacgctatcgtgcacgtctgggataaagccgccgagaaagagtgtacgctgcgcaccgccgcctatatcgtggcctgcgagcgcatcctgatggcgcgtaaagaccgcggcatctacccgggctga

SEQ ID NO: 211657 - DNA, 999 bp, Klebsiella pneumoniae
atgaaaacacgttatcttggaaaagagaagtttcaggtttccgcattaggtctcggatgtatgggtatgagttttgcctatggcggcgctgaaacgtcgcaggcgataaatacgatccatgccgccatggacatgggcgtgaccttcctggataccgccgaagtatatggtcctttcgataatgaagttctggtcggaaaagcgattaaaggttttcgcgataaggtgcagattgccaccaaatttggatttcgtattttgccgaccggccagggtctggagcggatggccggcgttgacagccgtccggcacatattcgcgaatcagtggaagggtcgctgaagcgactgaatgtcgagaccatcgatctgctctatcagcaccgcgtcgatcccgcggtaccggtggaagaggtggtgggcactatggccgatctggttaaagagggtaaaattcgccatatcggtctgtcggaagtatctgctcagacgctgcgccgggcctgcaaggtacatccgatcgctgccgtgcagacggaatattcgctatggagccgcgagccggaggccggtattctccacacctgccgcgagctgggggtcggctttgtgccatacagcccgcttggccgcggcttcctgacggggacaattaccgaccccggcgttttggcagcggatgatttccgccgccatctgccgcgcttccaggccgaaaccatgcgcaaaaaccagctgctgcttgagcgcctgcagcaggtggccacccgctatgacgcgacccttgcgcagattgcccttgcctgggtgatgagcaaaggcgaggatatcgtgcctatcccgggggcgaggaaaattgctcacctgcgcgacaatgccggcgccgcgaatattaccctcgcggcggaggacatcctcaccatcgaacatattttcactgccgacaacgtcactggcttacgctatacccagggcgactttgatttaatcgaaaaataa

SEQ ID NO: 211658 - DNA, 948 bp, Klebsiella pneumoniae
atgaaaaccttgcccgatctgcaacaaatagaaatattaatactcatagtgaaacatggcagttttcgtcaggccgctaaagcgttaaacctttccccaccggcccttaccgtcgctattaatcatctggaagaaaagttaggcgtgcgcctgctaaatcgctcaacacgcagtttgtcattaaccgcagtgggtgaggaatttcttaataatataacgccggtggtcaatgattatcgccgggtggtggacagtctgaattatcaccgtctgactccggaaggcgtggtgaaagttaatttaccgcgcattgttattgacctgttttttcaagactattttatcgcctttaaaaacgcctgtcccaatgtgacgctcgaactgtatgccaccgatcgaaaagtcaatattatcgagtccggttttgacgccggcattcgctattcgcaggatgtgcccaaagagatgattgccatcccctttggcgagaaactatcgctgatcccggtggccagcccggactatatacgcgaagccggagagcccgacaccccgcagtcattagttaatttccgctgcattaaccgctgttttcctggtggtgagaagtaccgctgggagtttattggccccagcggcgagcttagcgaggtcgcggttaaaggcgatctggtcgtcgatgccgatagcgcaatgatccaggccgcggagagcggattaggcatcgcctttgtctatcagtcgctggtgacgcagcagctgagcgcgggcagcctggtccatttgttacccgactaccgctatcctgccgaccatttctgcgtctactacccaagccggaaacatattcccgcccccctgcgggcctttatcgcctgggtgatggcgcagaataaaaatatcctcggtcagcagaccgcacgacacggatcgcggccggaaggttaa

SEQ ID NO: 211659 - DNA, 432 bp, Klebsiella pneumoniae; identical to SEQ ID NO: 137871

SEQ ID NO: 211660 - DNA, 1653 bp, Klebsiella pneumoniae
atgccccgtcgccaggataacccctacgccccgcatgactgggcgccgcatgaaaaaccggctctgctcggttcgccgtcgacgccgctgcacagtccggcgaaacgccttgcctacggcgtggtcggtctgctggtatgtctcaccggcgcgctgggcaacgcagtggtcaccgccaacctgcagctgctgcagggtaccttcgccgcctggtcgacagaaatcgcctggctgccggcggtatacgtgatgaccaacgtctccatcaacctgctgctggtgaaattccgccagcagtttggcctgcgcgctttcaccgaaggctttctggtgctctatgtgctggtcacctttttccacctcttcgtcaacgatctcagctcagcgatgatggttcgcgccgcccatggcatggtggccgcggcgctcagctcgctggggatctactaccaggtacaggcctggcctgctcggcatcgcctgaaagggctgactatcggcatcaccggctcgtcgctagccattcccctggcgcgcctcttttccaccgaactgctgcagaccgatgaatggcgcggtctctacttctttgagctgggcctggcgctggtgtcgctggcctgcgtcatcgcgctaaaactgccgccaagcgatcgtaaaaaagtgttcgaaaaaaaggatttcattaccttctttctgctggcgcccggcatggcgctggtgtgcgccgtgctgtcgctggggcggctcgagtggtggtttgaagcgccgtggatcggctgggcgctggcggcggcggtaatactgatcgtcgctgcgattaccttcgagcataaccgcagcaaccccctgctcaataccaaatggctctccagcggcagcatcgtgcgtctgggcctgattatgctgttgatccgcatcgtgctggcggagcagaacaccggggtcatcggctggctgcagtacgttggcctgcaaaacgaacagatgactaacctcgcgtggtcgattttcgccggtattctgtgcgggatcattgccagctgtctgacgctcaacccgcagaagctctactggccgaccgccaccgcgctggcgctgatcatgatagcctcgctgctcgacagccagtccaacgccctcacccgtccggaacaattaatgttcagccagtttttactcggcttcggcagcgccttctttctggccccggcgatgctcgccgggattggcggcgtgtttgccgacccgcgcaacctggtcagcttctcggtgctgttcggcatgagccagaacattggcgggctgctcggctcggcgatcctcggcaccttccagacctggcgtgagaaattccactccagccagctggcggaccagataaccaccctgaacccgctgatcgtcgagcggctgcagcagtacagccagatgtatcagagccagattggcgacagtacgctgctcaacgttcaggccaccaccctgctgcaaaacgccgcgacgctgcaggccaatattctcgcctggaatgatacctatctgctgacggcggcgatctccgccgggacactagtgtgggttttctggcgcttaattcgcttacgactgactgcccgtatcgcgttgcaacgcgctaccggcagcaaataa

SEQ ID NO: 211661 - DNA, 1086 bp, Klebsiella pneumoniae
atgagtcagcaggatgcggccaaacaacaggccaacacccggaataatattcgcgtggtttccatttttaccgccgcggcgataggcctcgtcggcgtgctggtgatcctctacgcctggcaactgccgccgttcactcgccatagccagtttaccgacaacgcctatgtgcgcgggcagaccacctttattagcccgcaggtcaacggctatatcaccgccgtcaacgtcaaagatttcgcgattgtccagccgggcgaggtgctgttccagatagacgatcgcatctataaacagcgggtgcatcaggcccaggctaccctggcgatgaaagaggccgcgctgcgcaataacctgcaacagcgcaaaagcgccgaggcgacgatcgccaagaatgaagccgcgctgcaaaacgcccgcgcgcagaatctgaaaatccaggccgatttaaaacgcatccagcagttaaccgccgacggttcgctgtcgatccgcgaacgtgattcggcgcgggccagcgcggcgcaaggggcggcggatattgagcaggcgaaagcggcgctggagatgtcgcgccaggaccgtgaatcgaccatcgtcaatcgcgattcgctggaggccgacgtggccagcgccaaagcggcgcttgagctggcgcagatcgacctgcagaatacccagattatcgcccccaccggcggccagctggggcagatctcggtgcgtcttggcgcctatgtcagcgccggaacccatctgacctcgctggttccgccgcagcactgggtgattgccaacctcaaagagacccagttggccgaagtacgcgttggccagccggtcaccttcaccgtagacgcgctcaacggcgagaccttccacggcaaggtgcagagtatctccccggcgaccggggtggagttcagcgccatctctccggacaacgccaccggcaatttcgtcaagatcgcccagcgcatcccggtgcgtattacggtcaacgacgggcaaaacaacagcgaacgcctgcggccggggatgtcggtgcaggtgactattgatacccgtgcggagaaacaaccatga

SEQ ID NO: 211662 - DNA, 1380 bp, Klebsiella pneumoniae
atgatccgcccggtcgcccttgctatcgttctggcgctggtcggctgtcaatccgccgatgtgcaacgcgcgcagccgaccctgaccattcttgccgcctggcgggccgacgttggcccggccagcccggtggagggtgtatggtggcgcaattttcatgacagtaccctcaatcagtatgtcgaccaggcgctgcgctataacagcgatgtgctgatcgcccgcgagcgggtgaatgagtatcaggcgcgcgcttacgccgccgacagcagcctgtttccgtcactggacgccagcctcaccggcacccgcgcccggacgcagtccgccgccaccggcctgccgatccacagcacactgtataagggcggcctgaccgccagctatgatgtcgatatctggggagcgaaccgcagcgcggccaacgccgccggggccagccttgaggcgcagaaagccgccgccgccgccgccaatttgagcgtcgccagctcggtggccgttggctacgtcacgctgctgtcgctggatgagcagctgcgggtgacccagcagacgctaacatcaagggaagacgcgtggcgcctggccaaacgtcagtttgaaaccgggtatacttcacgccttgagctgatgcaggcggattcggagctgcggtcaacgcgggcgcagatcccgccgctacagcaccagattgcgcagcaggaaaatgcgctcagcgtgctgctcggcgataaccctggcgcggtaaaacgcggcgagttcgcccagcttaccccgctgcgtctgccgtcgcagctgccgtccaccttgctcaaccgccgtccggacatcgctcaggccgagcgccagctggtggccgccgacgccacgctggcctcgtcgcaggcgcagctgctgccctctattaacctgaccgctaccggcagcctgcaggaccggacgctgccggatctgctggacaacccgctgcggctgtggagtcttggcggcagtattctggcgccgctgctaaaccgccaggcgttaaatgcccaggtggacgtctccatggcccagcgcaaccaggcgctctatagctatgagaaaacggtgcgcagcgcgttcaaagaggtcaatgacagcctggacgccatcagtcgctatggcgaacagttaaccgagcttcaggaacaagagaccgttgcccaggaaaccttacgtattgcacaaaaccgctaccgtaacggctactcttcttatctggatgtgcttgatgcccagcgaacgctgttctccacccagcttagcgtggtgcaggtgaagaacaacctgctgctggcgcagatcgatctgtaccgggcgctgggaggcggctggtctgactcatcagggagctaa

SEQ ID NO: 211663 - DNA, 660 bp, Klebsiella pneumoniae
atgcaacaacagtggtcggcagtagacaattatttgattaaggccttaattcccggcgatcctgtgctcgatcgggtactggaaaacaaccatcgtgccgggctcccggcacacgatgtcgccgccaatcagggtcagtttctcgccctgctggtacggctaacccaggctaagcggatactggagatcggcaccctcggcggctatagcaccatctggatggcgcgcgagcttcctgcagacggccaactcctcaccctggaggccgacgcgcatcatgcccaggtggcgcgggagaatctgcagctggcgggcgttgaccagcgggtcacgctacgggagggacccgcgctacagtccctggagtcgcttggcgaatgtcccgctttcgacctgatcttcatcgatgccgataagccgaataacccccattatctgcgctgggcgctacgttattcccgcccaggaaccttaattattggcgataacgtggtacgcgacggcgaagtggtcaacccacagagcgccgacgagcgcgttcagggcgtgcgtcagttcattgagatgatgggcgccgagccacggttgacggcaacggcgctgcaaaccgtgggcactaaaggctgggacggctttactctggcgtgggtaaacgcttaa

SEQ ID NO: 211664 - DNA, 3903 bp, Klebsiella pneumoniae
atgacagaacaacaaaaaatcaccttcccccagctttatcaacagctcgacggcctgatgctgcgcgacaaaacgcgctttgcccgccgtctgcacggcgtgaagaaggttaaaaatcctgaatcgcaacaggccattctgcaggagatggcgctggagataagccaggcagccggtaaagtcctgctgcgcgaagcggcgcgtccggccatcacctatccggaaaacctgccggttagccagaaaaaacaagagattctcgaggcggtgcgcgaccaccaggtggtgatcgtcgccggggagaccggttcgggtaaaaccacccagttgcccaaaatctgcatggagctggggcgcgggctgaaaggactcatcggccatacccagccgcgtcgcctggcggcgcggaccgtcgccaatcgtattgccgaagagctgcagagcgagccgggcggctgcatcggctataaagtccgcttcagcgaccacgtcagcgaaaacaccatggttaagctgatgaccgacggtatcctgctggcggagatccagcaggatcgtctgttgatgcagtacgacaccatcattatcgatgaggcgcacgagcgcagcctgaatattgactttctgctcggctatctgaaagagctcctgccgcgccgcccggacctgaaaatcatcattacctcggcgaccatcgacccggaacgtttctcaaagcatttcaataatgcgccgattatcgaagtctccgggcggacttacccggtggaagtgcgctatcggccgatagtggaagaggcggacgataccgagcgcgatcagttacaggcgatctttgatgcggttgacgaactggggcgcgaagggcccggcgatattctgatctttatgagcggtgagcgggaaattcgcgataccgccgatgcgctgaataagctggatctgcgccataccgaagtgctgccgctgtacgcccgcctgtccaacagcgagcagaaccgcgtcttccagccgcacagcgggcggcgcatcgtgctggcgaccaacgtggcggaaacctcgctgaccgtgccgggcattaagtacgttatcgatcccggtactgcgcgtatcagccgttacagctaccgcaccaaggtgcagcgcctgccgatcgagccggtttcccaggcgtccgccaaccagcgtaagggccgctgcggccgcgtttcggaagggatctgtattcgtctttattcagaagacgatttcctgtcgcgcccggaatttaccgacccggagattctgcgcaccaacctggcgtcggtcatcctgcagatgaccgccctgggcttaggcgatatcgccgccttcccgtttgtcgaagcgccggataagcgcaatatccaggacggcgtacgcctgctggaagagctgggtgccatcaccaccgatgagcaggccaccgcctataagctgacgccgatgggccgccagctcagccagctgccggtggacccgcgtctggcgcggatggtgctggaggcgcagaagcacggctgcgtgcgggaagcgatgatcatcacctccgcgctgtcgatccaggacccgcgcgagcggccgatggacaaacagcaggcctctgacgaaaaacatcgccgcttccacgataaagagtccgatttcctcgccttcgtcaatctgtggaactacctcggcgagcagcagaaggcgctgtcgtcgaatcagttccgccgccagtgccgggtcgattttcttaactatctgcgcgtgcgcgagtggcaggacatctacacccagctgcgccaggtggtgaaagagcttggcctgccgatcaacagtgagccggcggaatatcgcgagatccatactgcgctgctgaccggtctgctgtcgcacatcggcatgaaggatgccgataagcaggagtttaccggcgcgcgcaacgcccgcttctctattttcccgggttccggcctgtttaaaaagccgccgaagtggacgatggtggccgagctggtcgagaccagccgcctgtggggccgcatcgccgcgcgcattgagccggagtgggtggagccggtagcgcagcacctgatcaagcgctcatacagtgagccgcactgggagcggtcgcagggcgcggtaatggcgacggaaaaggttaccgtttacggcctgccgatcgtcgccgcgcgtaaggtcaactacagccagattgatccggcgctgtgtcgtgagctatttatccgccacgcgctggtagagggcgactggcagacgcggcacgccttcttccgcgataacctgaagctgcgcgcggaaatcgaagagctggagcataagtcgcgccgccgcgacatcctggtggatgacgagacgctgttcgagttctacgaccagcgcatcagccacgacgtcatctccgcccgccacttcgatagctggtggaagcgggccagccgtgaaacgccagacttgctcaattttgaaaagagcatgctgattaaagagggggcggagcaggtcagtaaactggactacccgaatttctggcatcagggcaacctcaagctgcggcttagctaccagtttgaacctggcgccgacgccgatggcgtgacggtgcatattccgctgccgctgctcaaccagatagaggaagccgggtttgaatggcagatccctggcctgcgtcgcgagctgattatcgcgctgataaaatcgctgccgaagccggtacggcgcaatttcgtcccggctcccaactatgcggaagcgtttcttggccgggcggcgccgcttgagctgccgctgctcgattcgctggagcgcgagctgcgtaagatgaccggcgtgaccatcgaccgcgaagcctggcagtgggatcaggtgcccgatcacctgaaaatcaccttccgggtggtggatgataaaaacaagaagctgcaggaagggcgctcgctgcaggcgttgaaagacgccctgaagggcaaagtgcaggagacgctgtcggcggtcgctgatgacggtattgagcagagcgggctgcatatctggagctttggcaccctggcggaaagttacgaacagaagcgcggtaactataaggtgaaagcctggccggcgctggtggacgagcgcgacagcgtggccatcaaactgtttgataatccacaggaacagcagcaggccatgtggcgcggtctgcgtcgcctgctgctgctcaacatcccgtcgccgattaagtatctgcacgagaaactaccgaataaagccaagcttgggctctactttaacccgtacggcaaagtgctggatctgattgacgattgcatctcctgcggcgttgataagcttattgacgaggcgggcggtccggtgtggacggaagagggctttagtcagctgcacgataaagtgcgagccgagctcaacgacacggtggtggagatcgctaaacaggtcgagcagatcctcaccgcggtgttcaatatcaacaaacggctgaaaggccgggtggatatgaccatggcgctggggctgtcggatatcaaagcgcagatggcgggtctggtgtatcgcggctttgtcaccggcaacggtttccgccgtcttggcgatacgctgcgctatctgcaggcgattgaaaagcgtctggagaagatggctatcgatccgcaccgcgatcgggcgcagatgcttaaggtggagagcgtgcagcaggcgtggcagcagtggctgaataagctaccgccgaaccgccgtgaggacgacgatgtccgggagatccgctggatgatcgaggagctgcgggtcagcttcttcgcccagcagctgggcaccccgtatcctatctcggacaagcgagtgttgcaggcgatggagcaaattaccccatag

SEQ ID NO: 211665 - DNA, 606 bp, Klebsiella pneumoniae
atgagcaaagtattagttctgaaatccagtattctggcagggtactcacaatctggtcagctttccgactattttgttgaacaatggcaggaaaaacaccctggcgatgagatcaccgtgcgtgacctggccgccaatccgatcccggttctggatggcgaactggttggcgccctgcgtccgagcgacgcgccgctgactccgcgtcagcaggaagcgctggccctttccgacgagctgatcgccgaactgaaaggcaacgatgtgattgttatcgctgcgccgatgtacaacttcaacatcccgacgcagttgaaaaactatttcgacctggtggctcgcgccggcgtcaccttccgctacaccgagaaagggccggaaggtctggtaaccggtaaacgcgcggtcgtcgttaccagccgcggcggtatccataaagatactccgaccgacctggtcaccccatacctgtccaccttcctcggcttcatcggcatcaccgacgtgaactttgtgttcgccgaaggtatcgcttacggcccggaagtcgcggccaaagcgcagtctgacgcgaaagcggccatcgacagcgtggttgcagcctaa

SEQ ID NO: 211666 - DNA, 408 bp, Klebsiella pneumoniae
atggcagagaaattatccgctcactgtcactgcggtgcggtggcgtttaccgtggaactcagcgacggcttcaacaccgttcggcgctgtaactgctcatattgtcgcatgcgtggggcggtcgcggtctcttcgccgcgttcaggaatagaggtggtacgcggaggggataagctcacagagtatcgctttaatacaggggaagccgtgcactttttctgctcggtatgcgggatctacacctttcatcaacggcgatcaaacccacagcagtatggggtgaatgtggcctgcattgacggcgtttcgcctttcgatttcccttgcgtggaggtcaacgacggcgtgaatcatccaaaggatggcggcggaggcgtggtggggtatttacgctacgagaaaaagtaa

SEQ ID NO: 211667 - DNA, 597 bp, Klebsiella pneumoniae
atgccgatatatcagattgatggactgacgccggtggtgccggaggagagttacgttcacccgaccgcggtgttgattggcgacgtgatcctcggcaaaggggtctatgttgggcccaacgccagcctgcgcggcgacttcgggcgcatcgtggtcaaagacggcgccaatattcaggataactgcgtgatgcatggcttccccggccaggatacggtggtggaagaggagggccatatcggccacggcgctattctgcacggctgcgtgattggccgcaacgcgttggtgggcatgagcgcggtgattatcgacggggcggtcattggcgaaaacagcattgtcggcgcttcggcctttgtcaaagccaacgccgagatgcccgccaaccatctgattatcggcagcccggcaaaagcgattcgcaccctgagcgaacaggagctggcgtggaaaaaacaaggtacccgtgaataccaggcgctggtggaacgctgtaagcagacgctgcaccaggtggagccattacgggaagtcgaagcagggcgtaagcggctggcgtttgatgaaaacctgcggccaaaagccgcaacctga

SEQ ID NO: 211668 - DNA, 936 bp, Klebsiella pneumoniae
atgaatcagatgagtaaactcgacgcctttattcaacaagcggtgacggcgatgcccatcagcggcacgtcattaattgcctcgctgtatggcgacgctttattacaacgcggtggggaagtgtggctgggcagcgtcgcggcgctgctggaaggattaggcttcggcgagcgcttcgtacgcaccgcgctgtttcgcctcaataaagaagagtggcttgatgttgtccgcatcggccggcgcagcttctatcgcctgagtgataaagggctgcgcctgacccggcgcgcggagcataaaatttatcgcgccagtgccccggaatgggacggtacctggctgctgctgctttcggaaggcctggagaaaaatgtgctcgccgacgttaaaaagcagctgctgtggcaggggtttggcgcgctggcgccgagcctgctggcctcgccgtcgcaaaagctggccgatgtccagtctctgctccacgaagcgggcgtcgccgaaaacgtcatctgttttgaagcccattcgccgctggcgctctcaagggcggcgctgcgcgaccgcgtagaggagtgctggcatctcaccgaacaaaatgagatgtacgaggcgtttatcgcattgttccgaccattactgccgctgctgcgcgacagcgagccgtcagagttgacgccggagcgctgtttccagatccaactgctccttatccatttctatcgccgggtggtgctcaaagacccgctgctgccggaagagctcctgccggcgcattgggcagggcaaaccgcccgccagctgtgtatcaatatttatcaacgcgtgagtcccggtgcgctggcgtttgtcagcgagaaaggtgagagctcggtgggcgagctcccggcgccgggtccgctctattatcagcgctttggcggtttgccgggcgcataa

SEQ ID NO: 211669 - DNA, 1317 bp, Klebsiella pneumoniae
atgataactactacaaaattagatccgattgaaaccgcatcgcgtgacgaactgcaggccctgcaaacccagcgcctgaaatggacgctgaagcatgcgtacgaaaatgtgccgatgtatcgccgcaaattcgacgccgccggcgtgcaccctgacgactttcgggaattaaacgatctacaaaaattcccctgcaccaccaaacaggatctgcgcgacaactatcccttcgataccttcgcggtgccgatggagcaggtggtgcgcattcacgcctcttccggcaccaccggcaaaccgacggtggtggggtatacgcaaaacgatattgataactgggccaatattgtcgcccgttcgctgcgcgcggccggtggttcagcaaaagataaaattcacgtcgcctacggctatggcctgtttaccggcggccttggcgcgcactacggcgcggaacgtttgggcgcgacggtgatcccgatgtccggcggacagaccgaaaaacaggcgcagctgatccgcgatttccagccggatatgatcatggtgacgccgtcctactgtctgaatctgattgaagagctggagcgccagatgggcggcgatgcccgcagctgttcattgcgggtcggcgtctttggcgctgagccgtggacgctggcgatgcgcgcggaaatcgagcgccggctggggatcaccgccctggatatttacggtttgtcggaagtcatgggaccgggcgtagcgatggagtgtctggaaaccgttgacggcccgactatctgggaagaccacttcttcccggaaatcgtcaacccggacgacggtacgccgctggaagatggcgaacatggtgagctgctgtttaccaccctgaccaaagaagcgctgccggtgatccgctatcgtacccgcgatctgacgcgcctgctgccgggaaccgcgcggaccatgcgccgcatggatcgcatcagcggacgcagcgacgatatgctgattatccgcggggttaacgtcttcccctcgcagctggaagaggagatcctcaagtttgaacacctggcgccgcactatcagttagaggtcaatcgccgcggtcatctggattcgctggcggtgcgcgttgagctgaaagagagcgggctggcgctgagtcatgaacaacgctgccagatttgccatcagttgcgtcaccgcattaagtcgatggtcgggatctccaccgatattactatcgtcaactgcggcagcattccgcgctcggaagggaaagcctgtcgggtattcgacctgcgaaaagcggtggttagcggttaa

SEQ ID NO: 211670 - DNA, 1206 bp, Klebsiella pneumoniae
atgcgcgacgcctttatttgtgacgggatccgtacgccgattggccgctacggcggcgcgctggccagtgtgcgcgccgacgacctggcggcgatcccgctgcgtgagctcctgagtcgtaatcccgggctcgacccggcagcaattgatgatgtgattttcggctgtgcgaatcaggccggggaagataaccgcaacgtagcgcacatggcgacgttgttggccggttacccgcataccgtgccgggcaccacgattaaccgcctgtgcggatcgggtctggatgccatcggctttgccgccagggcgatcaaagccggcgatgccgatctgctgattgccggcggcgtggaatcgatgtcgcgtgcgcctttcgtgatgggaaaagccagcgcgccgtaccagcgtcaggcggaactctttgataccacgattggctggcgttttgtgaacccgctcatggcgcaacacttcggaactgacagcatgccggaaacggccgagaatgtagctgaattgttaaatatcagccgagccgatcaggacgctttcgcctggcgcagccagcagcgcacggcgcaggcccagcgcgacggcattctggcgcaggagattgtgccggtgcagattgtcggccggaaaggggcggttagcgacgtgcgcgaggacgagcatccgcgcccggaaaccacgcttgagcagctggcgaaactgaaagcgccgttccgccagggcggcgtcattactgcgggcaatgcttcaggcgtcaacgatggcgccgcggcgctgatcatcgccagcgaacagcaggccgctatccaggggctcacgccgcgggcgcgtatcgtggcgatggcgacggcgggtgtcgaaccgcgcctgatgggactggggccggtaccggcggtgcgtaaagtgctggagcgggcgggactcaatattaacgatatggatctgattgagctgaatgaggccttcgccgcccaggcgctgggggtgctcagacagctcggcgtgccggacgatgcggcgcacgtgaatcccaacggcggcgccatcgcgttaggccatccgctgggcatgagcggcgcgcggttagcgctgagcgccagccttgagctgcaacgccggggcgggcgctatgcgctgtgtacgatgtgtattggcgtgggtcagggcattgccatgatcctcgagcgagtgtga

SEQ ID NO: 211671 - DNA, 423 bp, Klebsiella pneumoniae
atgagcaatgatccgtggcgcaacgcgcgcgtgatgtacgaaaaagatacctgcgccagaaagatggggatcgaacttatcgaaatggacgacggttttgcgcagatgagcatgaccgtctcggcggacatgcttaacggccatcaaacctgtcacggtggtcagctatttacgcttgccgataccgctttcgcctacgcctgtaacagccaggggctggcggcggtggcctcggcggcaagcattgattttcttcgtccggcgtttgccggcgaccggctggtcgccaccgccagagtcaaacagcagggcaagctgaccggcgtctacgacatcgaaattgttaatcaacagcaaaagattgtggccctgttccgcggcaaatcacaccgcatcggcggcacaatcacgggagacgtgtaa

SEQ ID NO: 211672 - DNA, 1422 bp, Klebsiella pneumoniae
atgacgacatccttagccaccgtggcggtgatcggcagcggcaccatgggggccggcatcgccgaagtggctgccgccgccgggcatccggtgcgtatttttgatattaaccctaaggctgtagacctggcgatagagggtatcgccgggcgtctggcgtcacgcgttgcgcggggcaaactggcgtcagagcaggctgatgcgctgctggcgcgcctgcatccggcccacgatttagccgcacttgccgacgcggatttagtgatcgaagcggcctctgaacggttggaagttaaaacggcgctgttcgcgcagctggcggcgatctgcgcgccgtcaacgctgttgaccagtaatacctcgtctatttcgattaccgctatcgccgccggggtcaaaaacccggagcgggtggccggactgcacttttttaatccggcgccggtgatgaagctggtcgaggtggtgagtggtcttgcgacctccaccgaagtggtggagcagctgtgccagtgcgtaagcggctgggggaaacagccggtgcgctgccgctcaacgcccggttttatcgttaaccgcgtagcgcgtccgttctacgctgaggcctggcgcgcgctggaagagcaggtcgccgccccggagattatcgatgccgctttgcgtgacggcggcggcttcccgatgggaccgctggcgttgacggacctgattggccaggacgtcaacttcgccgtgacctgttcggtgtttaacgccttctggcaggaccgccgctacctgccatcgctcctccagcaagagctggcgctggccgggcggctaggtaaaaagagcggccacggcgtctatcgctggcccgctgagacactgccggacgcggcgctgccgccggtaatgataggtgctgaatccgttaccgtcagaagtgacaacgtcactgaattagacgatgtcttgctgctggagactgaaggcgagaccgccctggcgctgagtattaagcatcaccgcccggtggtggtgtatgacctgtgcgccagcgatacggtggtgctggccgcagcggcaaccaacgcgcctgcggccactgataaggccgtgcattacttccagcagcagggcaagaaagtgctgcgtattgccgattatcccggcctgctggtgtggcgcacggtggcgatgctgattaacgaagcgctggatgcggtgcaaaaaggcgtcgccagcccgcaggatgtcgataccgcgatgcgccttggcgtcaactatccgcatggcccgctggcatggggagaacgccttggctggcggcgggtgctgcaactgctggagaacttgcaacaccattatggcgaggagcgctatcgcccctgttccctgttgcgccagaagacgctgatggagaagcaccatgagcaatga

SEQ ID NO: 211673 - DNA, 789 bp, Klebsiella pneumoniae
gtggaagctttcattctcagcgcagtggaacagggcgtcatgaccattaccctcaatcgcccggaccgcctcaacagttttaacgatctgatgcatcaccagctggcggaatgtctgaagcaggccgagcgcgatgatggcgtgcgctgcctgctgatcaccggcgccggccgcggtttttgcgccggccaggatttgaacgaccgcaatgtcgaccccagcggcccgccgccggatctcggcatgtcggtagaacgcttttacaacccgttagtgcgccgtctggcggcgctgccgaaaccggtcatctgcgcggttaacggcgtggccgccggcgcgggcgctaccctggcgctgggctgcgatatcgtgctggccgcgcgttcggccaaatttgtgatggcgttcagcaagctcggcctggtgccggactgcggcggcagctggttcctgccgcgggtggccggccgtgcgcgcgcgatggggctggcgctgctgggcgacagccttagcgcggaacaggccgctcagtgggggattatctggcaactggtggacgattcagaactggcggataccagtctgcaactggcgcgccatctggcggcgcaaccgacgtttggtcttgggctgattaaaaaggcgctgctggcctctgaaaccaacagtctcgacgcgcagctggacctggagcgcgattatcagcgtctggccgggcgcagcgatgattaccgcgaaggggtcagcgcgtttctggccaaacggccaccacagttcagcgggaaatag

SEQ ID NO: 211674 - DNA, 768 bp, Klebsiella pneumoniae
atgagcgacctgctgatccaccgtcatggccgggtgcttcagttgacgctgaaccgcccgcaggcccgcaacgcgctgaacaatgccttattaacccagattgccgaggcgctggaggcggcggcagttgatgacagcgtcggcgtctgcgttatcagcggtaacgcgcgttttttcgccgccggggctgacctcaatgaaatggcggaaaaagatctgcctgccaccctggatgatattcgcccacggttatgggggcgaatcgatgcttttactaagccgctcatcgcctcggtcaacggctacgcgctcggcgccggctgcgagctggctctgctgtgcgacctgattgtcgccggtgacaacgcccgctttggcctgccggaaattaccctcggcattatgccgggcgctggcggcacccagcggctgatccgcagcgttggcaaggcgctggccagccggatggtgctgagcggcgagagtattgacgcccgccaggcgcagcaggccgggctggtcagtgatatccatccggcggcgttaaccgatgagtatgccctgaaactggcaaccaccattgcccgccattcgccgctggcgctacgggcggcaaaacagtcgctgcgcctgtcgcaggaagtcagcccgcaggccggtctacaacaggagcgccagctgtttagcctgctgagcgccaccgaggaccgccgcgaaggcatcgacgccttcttacaaaaacgtaccccggaatttaaaggacgctaa

SEQ ID NO: 211675 - DNA, 1071 bp, Klebsiella pneumoniae
atgacgacgttctattcgcttaaggtggcgagagtcgagccggaaacccgcgatgcggtgaccatcacttttgcgatcccgcaagccctgcaggcggaatactgttttcgcccgggccagcatctgacgctaaaagcccgtctgggcggcgaagaactgcgccgctgttactccatttgtcacagccgcacgccaggcgaaattagcgtcgcggtcaaagccatcgacggcggacgcttctcgcgctacgcccagcacgatatccagcagggtatggagctggaggtgatggtgccgcaggggcatttcggttatcaaccgcaggccgaacggcagggagaatatctggcgattgccgccggctccgggatcacgccgatgatggcgatcattagcgcgacgctagcgaccgagccgcaaagccgctttacgctgatctacggcaaccgcagcagccatagcatgatgttccgccaggcgctggccgatttaaaagaccgctatccgcagcgcctgcaggtgatccacctgtttagccaggagtcgatggacagcgatctgctacaggggcgcattgacggcgacaaactgcgccagctcgctgaccatctgctggatttcagccgtttcgacgaggcctttatctgcggtccggcggcgatgatggacgaggcggaagcgacgttacgtgaacttggcgtagcggagaaatcgattcatctcgaacgctttaataccccaggcggcaatgtgaagcgggccgctggagtgcaggcggaagggcgcacggtgaccatccgccaggacgggcgcgatcggcttatcgccctcagcgccgaagacgacagcatcctggatgccgcattgcgtcagggcgccgatctgccgttcgcctgtaagggcggggtatgcgccacctgtaaatgcaaagtgctgcgcggtgaagtggcgatggccgccaattacagcctggaagcggatgagctggcggcgggctacgtgctgagctgccagtcattgccgaccagcggcgatgtggtggtcgactttgacgcgcgggggatggcatga

SEQ ID NO: 211676 - DNA, 498 bp, Klebsiella pneumoniae
atgcaacgtcttgccgatatcgctcctgcagaggttcgcaccatctggggattattaagcgcgatcccggatccggaagtgccagtactcaccatcaccgaccttggtatggtgcgcagcgtcgcgcgccatggcgacggctgggtgattggctttaccccgacctattcgggctgtccggcgacggagcatctgctgggggagatccgcacggtcatgagcgagcatggctttcagccggtacatatcgtcctgcagctggatccgccgtggaccaccgactggatgagtcaggatgcccgcgagcgcctgcgccagtacggcatcagcccgccccaggggcacgcctgccatgcggacatgcccgctgaggtgagctgtccgcgctgcggcagcgcccatacctcgctgattagcgaattcggttccacggcctgcaaagcgctctatcgctgcgacagctgccgggaaccttttgattactttaaatgtatttga

SEQ ID NO: 211677 - DNA, 756 bp, Klebsiella pneumoniae
atgaataaccctaaccccgtagccacctacgccctgcggcttggcgacaatggtctggttctggcccagcgtttaggcgcctggtgcggacatgctcccgagctcgagatcgatcttgcgctggccaatatcggcctcgacctgctcggccaggcgcgcaattttttaagctatgccgccgagcttaacggttgcggcgacgaagatacgctggcttttggccgcgatgagcgccggttcagcaacctgctgctggtggagcagccaaacggcaattttgccgacactatcgcccgccagttctttatcgacgtctggcatgtcgccctgttcagccggctggtgaacagccgcgacgcgcagctggcggccattgccgctaaagggctgaaagaggtgcgttaccaccagcgctttagccgcggctggctggagcgtctcggtaacggcaccgaattatcaaatcgcaaaatgcagcaggcggtcgacaatctgtggcgcttcaccggcgaactgttcctcgctgatgaagtggagctcagcctggttgagcagggcattgcggttgatccgcgtgaactgcaggccgaatggcaaagcgcggtacacacggcgcttctcgactccggcttacagatcccgcaggaagcggccttccgcagcggcggcaaacaggggctgcacagtgaacatctcggcccgctgctggcggagatgcagtatctgcagcgttcgcatcccggactgcagtggtaa

SEQ ID NO: 211678 - DNA, 288 bp, Klebsiella pneumoniae
atgagcaaagtttactggccgttatatgaagtgttcgttcgcagcaaacaggggttatcccatcgtcacgtcggcagtctgcacgctgccgatgatcaaatggcgctggagaatgcccgcgatgcctacacccgccgcagcgaaggctgctcaatttgggtggtgaaggccagcgaaatcgttgcttcgcagccggaagatcgcggcgaattcttcgacccggcggaaagcaaagtctaccgtcatccgactttctataccgtgccggacggcatggaacatatgtga

SEQ ID NO: 211679 - DNA, 930 bp, Klebsiella pneumoniae
gtgacagaagaacaacgctttgaccagcgcatcgcgcaggaaacggccatcgaaccgcaggactggatgccggatgcctaccgtaagaccttgattcggcagataggccagcacgcgcactcggagatcgtcggcatgctgccggaaggcaactggatcacccgcgcgccgacgctgcgccgcaaagcgatcctgttggctaaggtacaggatgaggctggacacgggctgtatctctatagcgccgcggaaacccttggctgcgcccgggaagacctgtatcagaagatgctcgacgggcagatgaaatactcctccatttttaactacccgaccctcagctgggcggatatcggcgtgatcggctggctggtcgatggcgcggccatcgtcaaccaggtggcgctgtgccggacctcctacggcccctatgcccgggcgatggtcaaaatctgcaaagaagagagctttcaccagcgtcagggttttgaagcctgcatggcgctggcgcagggcaatgaggcgcagcggcagatgctgcaggacgccattaaccgcttctggtggccggcgctgatgatgtttggccctaacgatgacaactcgccgaacagcgcccgcagcatggcgtggaaaatcaaactgcactccaacgacgagctacgtcagcgcttcgtcgacaataccgtgccgcaggtagagatcctcggtatgactgtcccggacccggatttgcagtttgatgaagccagcggccactaccgcttcggcgaaatcgactggcaggaatttaacgaggtgattagcggccgtggcatttgcaatcacgagcggttggccgccaagcgtaaggcctgggaagagggcgaatgggtgcgcgaagccgcgctggcccatgcgcaaaaacagcaggcccgcagcgcggcatga

SEQ ID NO: 211680 - DNA, 2046 bp, Klebsiella pneumoniae
atgcagcagttagccagctacttatccggcgcctggcagaccggccggggccgcgcccgtactatccatcacgccatcaccggcgcagcgctttgggaggtgaccagtgaaggcctggatatggcgcaggcgcgccgcttcgcgattgagcgcggtggcaaagccctgcaggcgatgacctttattgaacgcagcgcgatgctgaaagcggtggcgaaacacctgctggagcagaaagaccagttctacgccatctccgcgcaaaccggcgccactcgcgccgacagttgggtggatattgaaggcggtatcggtacccttttcacctatgccgggctcggtagtcgagaattaccggacgatatcctgtggccggaagacgagctcatcccgctctccaaacagggcggttttgccgcgcgtcatgtgctaacctcgaaatcaggcgtcgccgtccatatcaacgccttcaacttcccctgctggggaatgctggaaaaactggcgcccacgtggcttgccggtatgccggcgatcattaaaccggccaccgctaccgcccagctcacccaggcaatggtgaaagcgattgtcgacagcggcctggtgccggagggcgccatcagcctgatttgcggcggcgcgggcgagctgctcgaccacctcgatagccaggacgtggtgacctttaccgggtcagccgccaccggccagcagctacgggcgcaccctaacctggtagccaaatccattccctttaccatggaagcagattcactcaactgctgcgtgttaggcgaagacgtcactccggagcaaccggaattcgcgctgtttattcgggaagtggtccgcgagatgacggcgaaagccgggcaaaaatgtaccgctatccgcagaatcattgtgccactggctcagattaatgcggttagcgatgcactgatctcccgcctgcataaagtaaccgtcggtgaccctgcgcaggagggcgttaagatgggggccctggttaatagcgaacagcgtcaggacgtacaggagagcgtcaataagctgatagccgctggctgcgaagtactgctcggtggagaggcggatctcagcgcggccggcgcatttttcccgccgaccctgttgtactgctcacagccggatgaaacgccggcggttcacgccattgaagcttttggtccggtggcgacgctgatgccgtatcgtgaccgccagcatgcgctgacgctggcgcgcgccggcggcggcagtctggcggggacgctggtcaccgccagcggcgagctggcgcgcgagtttatcctcggcgccgcccgcgcccatggccgtattcagatactgaacgaggcgtcctcggtcgagtcaaccggccacggttcgccgctgccgcagctggtgcacggcggccccggccgcgctggcggcggagaagagcttggcgggctgcgttcggtgaaacactatatgcagcgtaccgcggtccagggcagcccaacgatgctggcgaccatcggtcaacagtgggtgcgcggcgcccaggtgaacgaagaccgtattcacccgttccgcaaatatttcgaagagattcagcctggcgacagcttattaaccccgcgccgaaccctgaccgaagcggatatcgttaacttcgcctgcctgagcggcgatcatttctacgcgcacatggacaaaatcgccgccgccgagtcgatttttggcgagcgggtggtccacggctatttcctgatctccgccgcggccgggctgttcgtcgatgccggcgtcgggccggttatcgccaactatgggatggaaaacctgcgctttattgagccggtcaaaccgggcgacaccattcaggttcgcctgacctgtaagcgtaaaacggtcaaacgtcagcgcagcgccgatgagaaagccaccggcgtggtggaatgggcggtggagattttcaaccagcaccagcaggcggtggcgctgtattccattctgaccctggtggcgcgtcaacacggagatttcccggcgtga

SEQ ID NO: 211681 - DNA, 2268 bp, Klebsiella pneumoniae
atggcaaacggcttgaaattttctcctcgtaaaaccgcgctggcgctggccgtggcggtggtttgcgcctggcaatcaccggtcttcgctcacggtagcgaagcccacatggtaccgctggataaaacgctgcaggaattcggcgctgatgtgcagtgggatgactacgcgcaaatgttcaccctgataaaagacggcgcttacgtcaaagtaaagcccggcgccaaaacggcgatcgtcaacggtaaatcccttgacctaccggtgcctgtggtaatgaaggaaggtaaagcctgggtttccgatacctttatcaacgatgtcttccagtccggtctcgatcagaccttccaggtggaaaagcgcccgcacccgttaaactcgctctcggcggcggaaatcagtgaagcggtgaccattgtcaaagccgcgccggagtttcagccgaatacccgctttactgagatttccttacacgagccggacaaggcggcggtatgggcctttgccctgcagggaacgccggtcgatgctccccgcactgccgatgtggtgatgctcgatggcaaacacgtcattgaagccgtggtcgatctgcaaaacaaaaaaatcctttcctggacgccgatcaaaggcgcccacgggatggtgctgctcgatgattttgtcagcgtgcagaacatcatcaataccagcagcgaattcgctgaggtgctgaaaaagcacggtattaccgatcctggcaaagtggtcaccaccccgctcaccgttggcttttttgatggcaaagatggcctgcagcaggatgcgcgtctgctgaaggtggtcagttatctggataccggcgacggcaactactgggcgcacccgattgaaaacctggtggcggtggtcgaccttgaagcgaagaaaatcatcaaaatcgaagaaggtccggtgatcccggtcccaatggagccccgtccgtatgatggtcgcgaccgcaacgccccggcggtgaaaccgctggagataaccgaaccggaaggcaaaaactacaccattaccggcgataccattcactggcagaactgggatttccacctgcgtcttaactcgcgcgtcggaccaattctgtcaacggtgacttacaacgataacggcacaaaacgccaggtgatgtatgaaggttccctcggcgggatgatcgtcccctacggcgacccggacgtcggctggtatttcaaagcctacctcgactccggcgattacggcatgggcaccctgacgtcgccgattgttcgcggtaaagatgcgccgtcaaatgcggtactgctggacgaaactatcgccgattacaccggcaaaccgaccacgattccaggcgcggtggccatattcgaacgctatgccgggcctgagtataagcacctggagatgggcaaacccaacgtcagcaccgaacgccgggaactggtggtacgctggatcagcaccgtcggcaactacgactatatctttgactgggtgttccacgacaacggcaccatcggtatcgatgccggcgccaccggcattgaagcggtgaaaggcgtgctggcgaagaccatgcatgaccccagtgccaaagaggatacccgctacggaacgttgatcgaccataatattgtcggcaccactcaccagcacatctataacttccgcctcgacctcgatgtggacggcgagaacaacaccctggtggcgatggatcctgaagtgaagcccaacaccgccggcggcccgcgcaccagcaccatgcaggtgaatcagtacacaatcgatagcgagcagaaagcggcgcagaaattcgacccgggcactatccgcctgctgagcaacaccagcaaagagaaccgcatgggcaacccggtctcataccagattatcccttacgccggcggcacgcacccggcggcgaccggtgccaaattcgccccggacgagtggatatatcatcgcctgagctttatggataaacagctgtgggtgacgcgctaccacccgacagagcgatatccggaagggaaatacccgaaccgttccgcccacgataccggcctgggccagtacgcgaaggatgatgagtcgctgactaaccacgatgacgtcgtgtggatcaccaccggcaccacccacgtggcgcgcgccgaagagtggccgatcatgccgaccgagtgggcgcacgcgctgctcaagccgtggaacttctttgacgaaacccctactctgggcgaaaagaaaaagtaa

SEQ ID NO: 211682 - DNA, 951 bp, Klebsiella pneumoniae
atgttcaacgacgccattgtttatgaccgctacgggccgccggccgccgtgctgaccctgaaacgcctgccgctggcgccgctggcgggcggacgggtgcgggtcaggatgcgctttgccccggtgaatccttcggatctgatccccgtgaccggcgcctatcgccaccgcacccgactgccggccgtcgccggctatgaaggccttggcgaggtggtcgccgcgccatacggcagccggttagccgcgggccagcgggtgctgcccctgcgcgggggcggcacctggcagcggtttatcgatctggatgagacctggctggtgccggtgccgccggcagttgacgatctgctggccgcccgcgggtatatcaatccgctgacggcgatgctgatgctcaagcgctggccggttgccggaaaacacctcgtgctgaccgcggcatcgtcctcctgcgccagtctgctggggcagtgggcgctggcgatgggcgcccgctcggtgagcgggattattcgctcgccgcagcatcgggcgcgcctggaacaggccgggatctatccgatcctcgataccgaccgggcgctgatggagaaggtcagccagcacagcgatctggtgtttgacgcggtgggcggcgaactggcgaatacgctgctgtcggtgctgcccgggtcgtcgaccctcatctcctatgggctgttatccgggcggccgctgacccagacgcgcggtagcgcgacggtgcgcaagtttcatctgcgggaggcgctgccgacactcagcgtggcggcgtggcgggcagcgttcgacgaaatctggcagcgcctgccaacgacctcccagccgccggcccagcgtatagcgttgaacgactggcgggcggcgattgccgccgccggccagccgggaagaggcggtaagatcctgctggatttcaccgctggttaa

SEQ ID NO: 211683 - DNA, 891 bp, Klebsiella pneumoniae
atgacagcatttcctaaggttgcgctaattggtcccggcgccatcggcaccacgattgccgccgccctgtttgagagggggagggcgccgatggtctgcgggcgtaccgcccattcggcgctggtgctgcgcactgacgagggtgagatcgtggtgcccggcccggtgcacaccgacccgatggcgatatccgcccccttcgacctggtctttgtcgcggtgaaaaccacccagacggaggccatcgccccctggctgacggccctgtgttcccctgacaccgtggtgtgcgtgctgcaaaacggcgttgagcagcgccagcagtttgcccccttgaccggcggcgcgacggtgctgccgtcggtggtctggttcccggcgcagcgcgatgccgatgcctctgtctggttgcgcgccacgccgcgcctgacgctgccggatctgccgggggcagagcgagtgcagcaggcgctggcgggaacccgctgcgcggtggacctggcggctgattttaccaccgttgcctggcgcaaactgttgcagaacgcggttgccggactgatggtgctgaccggacgacgcgccgggatgttcgcccgggaggacatcactgccctcggactggcttatctgcgcgaatgcctgcaggtggcgcgggcggaaggggccgccctgagcgacagcgtgccggaggagattatcgccggctttcatcgggcgcctgccgacttaagcacctctattctgatcgatcgcctcaatggccgaccgctggagtgggatattcgtaacggcgtggtgcagcgtcgcgggcgtcagcacggcattccgacgccgctcagcgatatcatcgtgccgctgctggcggcggccagcgatggcccgggctga

SEQ ID NO: 211684 - DNA, 1500 bp, Klebsiella pneumoniae
atgtccacctcacagatagcgctgcttgccagcgtccagcagtttttataccgtcagcatggcctgtatatcgacggcgccccctgcgccgcgcagagcgaaaaccggttaaccgtctgggatccggccaccgggcaggcgattgccaccaccgccgacgccagcccggcggatgtcgaccgggcggtgatgtccgcctggcgcgcttttgtcgatcgccgctgggccgggcgcaccccggctgaccgtgaacgcatcctgctgcgttttgccgatctggtggagcagcacggcgaagagctggcgcaactggaaaccctcgagcaggggaaatccattgccatctcccgcgcctttgaggtcggctgcaccctgaactggatgcgctacaccgcggggctgaccaccaagatcagcggccggacgctggacgtttcgatcccgttcccgcaaggggcgcgttaccaggcgtggaccaaaaaagagccggtcggggtggtggcgggcatcgttccgtggaatttcccgctgatgatcggcatgtggaaggtcatgccggccctggcggcgggctgttcgatcgtcatcaaaccctcggaaaccaccccgctgaccctgctgcgggtggcggagctggcgacccaggcgggcattcctgacggggtgttcaacgtggtcaccggcagcggcgccggctgcggcgcggcgctgaccgcccatccgcaggtggcgaaggttagctttaccggctcgacggcgaccgggaaacagattgcccgcgtggctgccgaccgcctgacccgcgtgacgctggagctgggtggcaagaatccggcgattgtgctcaaagacgccgacccccagtgggttattgaggggctgatgaccggaagcttcctcaatcaggggcaggtctgcgccgccagctcgcggatctacatcgaagcgccgctgtttgacaccctggtcagcggcttcgagcaggcggtgaaatcgctgcaggtggggcctgggatgcaggagacggcgcagatcaacccagtggtctcccgggcccactgcgacaaggtggcggcctacctcgaagaggctcgccagcagaaggcagaactcatcagcggcagcgccggaccagatgcgggagggtactatattccgccaacgctggtggtaaaccccgacgccggactgcgtctcagccgtgaggaggtttttggcccggtggtgaacctggtgcgagtggccgatggcgaggaggcgctgcgcctggccaacgacagcgattttggtctgaccgccagcgtctggacccgcgatctgacccaggccctgaactacaccgaccgtctgcaggcgggaacggtatgggtcaacagccataccctgattgacgccaacctgcctttcggcggcatgaagcagtctggtaccggccgcgatttcggccctgactggctcgacggctggtgcgaaaccaaatccgtctgcgtgcgctactag

SEQ ID NO: 211685 - DNA, 903 bp, Klebsiella pneumoniae
atgatgaccacggcagagggagggctggcgtatcagcgctggctggcgacgatcaatcaggtctgcggccatttcgccgcccggccgttggaggagagtttccacggcgagattgacgcccgctacgccggcagcctcaaggtcagtaccgtcaccgccgccggcgtcaatctctaccgcacgcgcaatgagataaaacgcgataacgacgcctggttctataccgtgtttcagctcgccggcgaagccatcctcgaacaggacgatcgccaggtgacgctggcggcaggcgatatcacgttaatcgacgccgcccgcccatgctccatcgtctggcagcagacctcgcgtcaggcctcgctgctgctgccgcgccagcgggtggcgcccacaggggacatcactaccgcctgccggctggacaaatctctgccaatggtccagctcagccagcgactgctgctggaaagcatgggcggcacgacgctctccgccagcgagagcgaagccgcgctggaggcgatcgcctgcctgttgcgcccggtgctgcatcagcgcgatcctgccccttcccggcgggaaaagcagtttcagaagattattgcgttaatcgatgcgtccattcagtcggagcatctgcgtccggagtggctggccagcgagacgggcatgtcggtacgcagcctgtaccggctgtttgccgatcaggggctggtggtggcgcagtatattaagaaccggcggttggatctgtgtgcccaggcgttacagaatgttcatgacgatgaaaagctggcggggatcggctaccgctggggcttcagcgaccacagccatttctccaccgcatttaagcagcgctttggcgtcaccccgggggaataccgcaagcgctgtcgctaa

SEQ ID NO: 211686 - DNA, 324 bp, Klebsiella pneumoniae; identical to SEQ ID NO: 138935

SEQ ID NO: 211687 - DNA, 186 bp, Klebsiella pneumoniae; identical to SEQ ID NO: 138934

SEQ ID NO: 211688 - DNA, 2640 bp, Klebsiella pneumoniae
atgaagggtaaatataaagccgccatcgcgctggtgttagttctggtgttattgccgctaaccctgctgttgacgctaacccactgggtgccgacgctggcgggcatctggctgcccgtgggcacgcgtatctctttgcaggagagcccgcgcctgacgcggtcggccctgctgatccccgatctgcgttatctggtgggcgactgtgaaatcgcccgggtgaccgatgcccgtctctcgcgtcccagccgctggcggctgcatattggccagctggagatcaacagcgcctgcctgagcaaactgccggccagcgatccctctcccggttcaccgcgcacgcttgccgaatggcaatcgatgttgccctatagctggttaaccattgacaatctgcggctgtcgccgtgggagaaatggcaggggcggctggtaatgtcattaacgcctgcgcagcaggatatcggctttgccgggaaggaactgagtctgcaggcgcgcctgcgcggccaggcgctcaccgtcagccagttcagcgcccggctgactgacgatcagccgccggtgaagctggtggggaccttccatctgccgctggtgccggatggtctgccggtcgacggccagatgcagggcaccttcgaattcccgcagactgcggaatggatcgatgctgagctcgagtggcagcacaatcgcggccagctgctggtcaccccgcggggtgaggtagagcctattctggacctgccgtgggagatcaccccggagcggatcaccatcagcgacggccgttggcgcacccgttacgaggcgtatccgctgcgcgggcgggtggcgctgtcggtgggtaactggcagcagggcaccgaacagatgatcgtcagcggtcgcctgaatgttctcaccgaggggcatgccgggaagggcaatgcggtactgaatattggtccgggcaagctgagcatggataacagcgatctgccgctgcggctcaccggtgaggccaagctgggggagatgatactatacgcggcgctgccggctcagctcagcgggccgctgatcagcccgcagctggcttttcaccccggtgcgttgctgcgctcgcgcgggcgggtgatcgacgcgctgaatattgacgaaatccgctggccgctggccggggttaaggtcactcagcagggcgtcgatggccgcctgcaggcgatccttcgcgcccatgagcagcagatgggcgactttacgctgcatctggacggtcaggcgagcgattttctgcccgacagcggccgctggcagtggcgctactggggcgagggacattttaccccgatgcaggcgcgctgggatgtgaagggcagcggggagtggcgcgacaatgctattaccctgagcagcctttccaccggcttcgataagcttgagtacggcacaatgcgggtcagcaccccgcgtctgaccctcgagcagccgatccgctggctgcgcgatgctgagcatccgcggttgaccggcgcgctgtcgctggacgccgccaaaaccaccttctccggcggcagctatctcccggcctcaacgctgaaattcgctctcgacggtcgggacccgacgtggttccagttcaccggcgccctgcatgccgaggctatcggtccggtgcgtctgtccgggcgctgggatggcgaacggctgcgcggccaggcgtggtggccaaaacagtcgctaacggtgttccagccgctggtgccgccggactggaagatgaacctgcgcgaaggcagtctctacgcgcaggtggccttctcggcggcagctgggcagggatttgaggcgggcggccatggcgtcctgaagggcggcagcgcctggatgccggataaccagatcaacggcgtcgacttcgtcctgccgttccgcttcagcgacggtcactggcagctgggcacccgccgcccggtctccctgcgcattggcgaaatcgtcaaccaggtcacagcgcgtaatctgacggcggacctgcagggcacctggccgtggagcgaggccaatccgctgcagctcagcgacgtcagcgtcgatctgttaggcgggaaactgacactgctgcagctgcgtatgccgcagcgcgacccggcgttgatccgcctgcagcatatctccagcagcgaactgacaagcgccgtcaaggtgaaacagttcgccatgtccggcgcggtgagcggcgcgctgccgctgtggctggagaataatcaatggatcatccacgacggctggctgcgcaatgacggaccgatgaccctgcggctggataaagacaccgccgatgcgctggtggcggataacgtctccgccggggcggcgattaactggctgcgctatatggaaatctcccgctcgtggacgcagattaacctcgataatctgggcgtgttgacgcttaaggccagcatcaacggcaccagccgggtggaagggaaaagtagtaccgtgcatttaaactacgctcatgaagagaatattttcgacctgtggcgcagtttgcgcttcggcgacaatttacaggcgtggctcgagcagaatgctacgctgcccgtacggcgctgtacggacggtaagacatgtaaggaacctaaatga

SEQ ID NO: 211689 - DNA, 501 bp, Klebsiella pneumoniae; identical to SEQ ID NO: 138858

SEQ ID NO: 211690 - DNA, 990 bp, Klebsiella pneumoniae
atgaaaatcgcggtttatagtacgaagcagtacgataaaaagtacctgcagcacgttaatgatgcatacggctttgaactggaattcttcgatttcctgctgacagcgaagactgccaaaaccgccaacggttgcgaagcggtatgtatcttcgtcaatgacgacggcagccgcccggtgctggaagagctgaaggcccacggggtgaaatatatcgccctgcgctgcgccgggtttaacaacgtcgaccttgaggcggcaaaggagcttggcctgcgcgtcgtgcgcgttccagcttactctccggaagcggtcgctgagcatgcgatcggtatgatgatgtcgctcaaccgccgcatccaccgcgcttaccagcgtacccgcgatgccaatttctccctcgaaggcctcaccggcttcaccatgtacggcaaaaccgccggggtgatcggcaccgggaaaattggcgtagcgatgttgcggatccttaaaggcttcggcatgcgcctgctggcgttcgacccgtacccaagcgccgccgcgctggagctgggggtagaatatgttgacctcgccacgctgtacaaggaatcggacgtgatctccctgcactgtccgctgaccgacgaaaactaccaccttctcaatcgcgaagccttcgatcagatgaaagacggggtgatggtgatcaacaccagccgcggcgccctgatcgactctcaggcggccatcgacgccctgaagcaccagaaaattggcgcgctggggctggacgtttatgagaacgaacgcgatctgttctttgaagacaaatccaacgacgtgatccaggacgatgtcttccgccgcctctccgcctgccataacgtgctgtttaccggccaccaggcgttcctcaccgccgaggcgctgatcagcatttcggagaccactctgggtaacctgcagcaggtcgccaacggcgaaacctgtccaaacgccatcgtctga

SEQ ID NO: 211691 - DNA, 441 bp, Klebsiella pneumoniae
atgaacaaatttgcggcgcttctggcggcaggtatgctgctgtccggctgtgtctataacagtaaggtgtccaccggtgcggaacagctgcagcatcatcgcttcgtgctgaccagcgtcaacggccaggcggtcaacgccagcgaccggccgctggagctaagcttcggtgagaagatggctattacgggcaagatgtatgtatccggcaatatgtgcaacggctttagcggggaaggtaaagtgtcggacggcgagctgaaggtcaaatcgctggcgatgacccggatgctgtgccacgatgcccagctcaataccctggatgcgacgatcgacaagatgctgcgcgagggtgcgcaggtcgatctgacggaaaaccagttgacgctggcgaccgccgaccagacgctggtctataagctcgccgacctgatgcactag

SEQ ID NO: 211692 - DNA, 264 bp, Klebsiella pneumoniae
atgcgagctgcgatgttagtaggatgtgcggcgctgttgctgtccgcgtgcagtagtgaacccgttcagcaggccacggcggcgcacgtcacgccgggaatgcgggcggcgatgagcgacgccggtcaggccaactgcgccatgataggcggctcgttatcggtggctcgtcagctcgatggttcggcgattggcatgtgcgcgctgccgaacggcaaacgctgcagcgagcaggcgctggcgggcggcagctgcggctactaa

SEQ ID NO: 211693 - DNA, 3528 bp, Klebsiella pneumoniae
atgattacgattgatggtaatggcgcggtcgcttccgtcgcgtttcgcaccagtgaagttatcgccatctacccgatcacgcccagttcaacgatggcggaacaggctgacgcctgggccggcaatgggctgaaaaacgtctggggcgatgttccccgcgtggtcgaaatgcagtcggaggcgggcgccattggcgccgtacatggcgcgctgcaaaccggcgccctctccacctcctttacctcatcgcagggcctgctgctgatgatccccacgctgtacaaactggccggccagctgatgccgtttgtgctgcacgtcgccgcccgcactgtcgctacccatgcgttgtctatcttcggcgaccattccgatgtcatggccgtccgccagaccgggtgcgccatgctgtgcgccagcagcgttcaggaagcgcaggatttcgcgctaatctcgcatatcgccaccctgcaaagccgggtgccgtttattcatttctttgatggtttccgtacttcgcacgaaatcaacaaaatcgccccgctggcggatgacactattcgcgccctgctgccgcaggataagatcgctgagcatcgccagcgcgcgctcaacccggaacacccggtgatccgcggaacctcggccaaccccgacacttacttccagtcccgggaagctaccaatccgtggtacgacgcggtgtatgaccatgtcgagaaagcgatggacgacttcgctgccgccaccggccgtcagtacaaaccgtttgagttttgcggccacccgcaggcagagcgcgtgatcgtcattatgggctcggccatcggcacctgtgaagaggtggtcgatgagttgctgagtcgcggcgagaaagtcggcgtgctaaaagtccgcctctatcgcccgttctccgccgcccacctgctggcggcactgccggagagcgcccgcgcggttgccgtactggatcgcaccaaagaacccggcgcgcttgccgaaccgctttacctcgacgtgatgaccgccctggcggaagcctttaaccgcggcgagcgcgagacgctaccgcgcactatcggcggccgctacggtctctcctccaaggagtttggtccggaatgcgtgctggcgatattcagtgaactgcaggccgcccagccgaagccgcgctttaccgtcgggatctatgatgacgtgaccaacctgtcgctgccgctgggcgaaaataccctgccggcagaggccaagctcgaggccctgttctacggcctcggcagcgatggcagcgtgtcagccaccaaaaacaacatcaaaatcatcggcaactcgaccccgtggttctcccagggctattttgtctatgactcgaagaaagcgggcggcctcaccgtctcgcatctgcgggtcagcgaaaaaccgattcgttcatcgtatctgatttcgcaggctgatttcgtcggctgccaccagctgcagtttatcgataaataccagatggccgagcggctgaagcccggcggcattttcctgctcaacacgccgtacagcgccgatgaggtctggtcccgcctgccccaggaagtccaggccaccctgaatcagaaaaaagcgcgtttttacgtggtcaacgcggcaaagatcgcccgcgaatgcagcctcggggcgcgcattaataccgtgatgcagatggcctttttccatttaacccagatcctgccgggtgatagcgcgctggcggaactgcaggcagccatcgccaaaagctacagcagtaaaggtcaggagctggtggagcgcaactggcaggcgctggccctggcccgtgaatcactggcggaagtaccgctccagccggtgaacgccagcagtccgaaccgcccgccggtggtctccgacgccgcgccggatttcgtcaaaacggtcaccgccgcgatgctggccgggctcggcgatgcgctgccggtctctgccctgccgccggacggcacctggcccatgggcaccacccgctgggagaaacgcaacatcgccgaagagatccccatctggaaggaagcgctgtgtactcagtgcaaccactgcgtcgccgcctgcccgcactcggcgatccgcgccaaagtggtcgccccggaagagatggagaacgcccctgccagcctgcattcgctggatgtgaaatcccgcgatatgcgcgggcagaaatacgttctgcaggtcgccccggaagactgcaccggctgcaacctgtgcgtcgaagtgtgcccggcaaaagaccgccagaccccggagatcaaggccatcaatatgatgtcccgcctggagcatgtggaagaggagaaggtcaattacgagtacttcctcaacctgccggaaatcgaccgcagcaaactggagcgcattgatattcgcacctcgcagctgattagcccgctgtttgaatactccggcgcctgctcgggctgtggcgaaacgccgtatatcaaactgctgacccagctgtacggcgaccgaatgctgattgccaatgccaccggctgctcctccatttacggcggcaacctgccctcgacaccgtacactaccgacgccaacggccgcggcccggcgtgggccaactcgctgtttgaggataacgccgaattcgggctcggcttccgcttgaccgtcgaccagcatcgccagcgcgtgatgcgcctgctgagcgaattcgccgataaactgccggcagagctgaacgcggcgctgcacgccgaggcgacgccggaagatcgccgtgaacaggtggcggccctgcgtcaggcgctggccggcgtggcgggtgctgaagagctgctgaccgatgccgacgcactggtggagaaatccgtctggctgatcggcggcgacggctgggcttacgatatcggcttcggcggcctggaccatgtactgagcctgacggaaaacgtcaatattctggtgctggacactcagtgttactccaacaccggcgggcaggcgtcaaaagccaccccgctgggagcagtgactaagtttggcgagcatggcaaacgcaaggcgcgtaaagatctgggcgtcagcatgatgatgtacggtcatgtttatgtggcgcaaatttcgctgggcgcgcagctgaaccagacggtaaaagcgattcaggaagcggaagcctatccggggccatcgctgatcatcgcctatagcccttgcgaagagcatggctacgatctggcgctcagccacgaccagatgcgtcagctgaccgccaccggcttctggccgctctaccgcttcgacccgcgtcgagcagatgaaggcaagatccccctggcgctagattcccgtccgccatcagacgcgctggccgagacgctgcttaatgagcaacgtttccgccgcctgaacgcccagcagcctgaagtggcggagcagctatggaaagacgccgccgccgatctgcagaagcgctatgacttcctcgcccagctggctggcaaagcggagaaatcgccaagcgaaggttaa

SEQ ID NO: 211694 - DNA, 1155 bp, Klebsiella pneumoniae
atgaaaagaaaagtactggccctcgttattccggctttattagccgccggtgccgcgcatgcggcggaaatttataataaagacgggaataaattagatctctatggcaaggtagatggtctgcattatttctccagcgactcgaaaaaagacggcgatcaaacttatttacgttttggctttaaaggcgaaacccagatcaacgatatgcttaccggctatggccagtgggaatataacgttcaggccaacaacaccgagacctccagcgatcaggcgtggacccgtctggcattcgccggtatcaaagtgggcgattacggctccttcgactacggtcgtaactacggcgtgctgtacgacgttgaaggctggaccgatatgctgccggagttcggcggcgactcctacacctatgcggataactttatggcaggccgcgccaacggcgtcgcaacctaccgcaacagcgatttcttcggtctggtggagggtctgaacttcgccctgcagtatcagggtaaaaacgaaggccagaacgcgcaggatatcaacgtcggcaccaataaccgcagcagcgacagcgatgttcgcttcgacaatggcgatggtttcggcctctccacttcctacgacttcggcatgggtatcagcgcggcggcagcttacacctcgtctgaccgtacaggcgaccagcaacactatactcacaccgaacgatacgccaaaggcgacaaagcggacgcctggaccgccggcctgaagtacgacgccaacgatatttacctggcgaccatgtactctgaaacccgcaatatgacgccatacggctctaccagcagtaccaacggtggcggtatcgccaataaaacgcaaaacttcgaagtcaccgcgcagtatcagttcgacttcggcctgcgtccggccatctcctacctgcagtccaaaggcaaagatctgtacaataacggccgctatgccgataaagatctggtcaaatatatggacgttggcgcgacctattacttcaaccgtaatatgtccacctatgttgattacaaaatcaacctgctggatggtaacgacaaattctacgaagacaacggtatctctaccgataacatcgtcgccctgggcctggtttaccagttctga

SEQ ID NO: 211695 - DNA, 213 bp, Klebsiella pneumoniae
atgcaccaccatccggtaaaatcttcccgaattatctccgtcgcctacgatgacgcctccgccacactggaaatctatttctatcaccagccgccattacaatataccggggtcccaccgcgtatttttcatgattttttacaggtggtgtcaaaaggccggtattatgacggggtgatcaaaggaaaatttcccgaacgcaagctacgttaa

SEQ ID NO: 211696 - DNA, 435 bp, Klebsiella pneumoniae
atgagcagaatgattcttgtccctatcgatatctctgataaagaatttactgaacgcattatcagtcacgttgaatcggaagcgcggattgacgacgccgaggtgcatttcctcaccgtgatcccttctctgccctattatgcctcactgggaatggcctataccgctgagcttcccggcatggacgagctgcgtgagggttctgaaacgcaattgaaagagatcgcgaagcagttctccatcccggaagaccggatgcattttcacgtcgcggaaggatcgccaaaagataaaatccttgcgctggccaagtcgctgccagccgacctggtgatcatcgcttcgcaccgaccggatatcacaacttatctgctgggctccaacgccgccgcggtggttcgtcacgccgagtgctcggtactggtggtccgctaa

SEQ ID NO: 211697 - DNA, 936 bp, Klebsiella pneumoniae
atgctgcaaaaccaagaaatcagtaaaaaagaaaagtacaacatcgataagctgcagaaacgtctgcgccgcaacgtcggtgaggcgattgccgacttcaatatgattgaagagggcgaccgcattatggtttgtctttcaggcggcaaggacagctataccatgctggagatcctgcgcaatctgcagaaaagcgcgcccatctccttctcgctggtggcggtgaacctcgatcagaagcagccagggttcccggagcatattctgccggcgtatctggagcagctgggggttgaatacaagattgtcgaagagaacacctacggcatcgtcaaagagaagatcccggaaggaaaaaccacctgctcgctgtgctctcgcctgcgtcgcggcatcctctatcgtaccgccaccgagctcggggcgaccaagatcgccctcggccatcatcgcgacgatatcctgcagacgctgtttttgaatatgttctacggcggcaaaatgaaagggatgccgccgaagctgatgagcgacgacggcaaacacatcgtcatccgcccgctggcctactgccgcgaaaaggacatcgagcgcttctcccaggccaaaggcttcccgattattccgtgcaacctgtgcggttcgcagccaaacctgcagcgccaggtgatcgccgatatgctccgcgactgggataagcgttatcctgggcgcattgaaaccatgttcagcgcgatgcagaacgtggtaccttcgcacctgagcgacgtcaatctgtttgattttaaaggtatcacccacggctcagaggtggtggatggtggcgatctggcgtttgaccgggaagatattcccctgcagcccgccggctggcagccggaagaagaagacgcccgtctcgatgagctgcgtctgaacgtagtggaagtgaaataa

SEQ ID NO: 211698 - DNA, 1374 bp, Klebsiella pneumoniae
gtgaccgctttttctaccctgactgttttacctgccgcccaattagccaaccttaacgagctgggttatctgtcgatgaccccggttcaggccgccgccctgccggcgatcctcgcggggaaagatgtgcgcgtgcaggcaaaaaccggcagcggaaaaacggccgcatttgggctgggtctgctgcagcatatcgatccggcgcgcttcgagacccagtcgctggtgttgtgcccgacccgcgagctggccgatcaggtcgccggcgagctgcgccgcctggcgcgctgcctgccgaacatcaagattctgatgctctgcggcgggcagccctttggcgcccagcgagattccctgcagcatgccccgcatattatcgtcgccaccccgggccgtctgctcgatcatctgcagaagggaacggtctcccttgacgcgctgcagaccctggtgatggacgaagcggaccgcatgctcgatatgggcttcagcgacgccattgatgaggtgatccgcttcgcaccggctgaccggcagacgctgctgttttctgctacctggccggcggcaatcgcggcgatcagcggccgggtgcagcgtaatccgcagaccattgagatcgacactgtcgacgcgctcccggcgattgaacagcagttctttgaagtttcccgccacggtaagattgccctgctgcagcgcctgctcagccagcatcagcccgcatcctgcgtggtgttctgcaataccaaacgcgattgccaggcggtctgcgatgcgctcaacgccgccgggcagagcgccttgtcgctgcatggtgaccttgagcagcgcgatcgcgatcagacgctggtgcgcttcgctaacggcagcgtccgggttctggtggcgaccgacgtcgctgcccgcggtctggacatcaaatccctggcgctggtggtgaatttcgagctggcctgggatccggaggtgcatgttcaccgcatcggccgtaccgcccgcgccggtgaacaagggctggccatcagcttctgtgcgccggaagaggcgcagcgcgccactattctggccgacatgctgcagctttccctgaactggctgccggcgccgacgggcaacaccatcgcgccgctgacggcggagatggcgacgctgtgtatcgacggcgggaaaaaggcgaaaatgcgcccgggagatgtgctgggagccctgaccggggatatgggctttgatggtgccgatatcggcaaaattaccgtccacccggcccacgtctatgtggcgatccgccagaatatggcgcagaaggcgtataagcagttacaaaatggcaagatcaaaggtaaatcctgccgcgtacgactgctgaagtaa

SEQ ID NO: 211699 - DNA, 984 bp, Klebsiella pneumoniae
gtggacgcgattaaaggctcggagttgcagataccggacgcgatcttcgcgtgggtgctcgacgggcaggggggcgttaagccgctcgccgatgacgatattatcgacaaagacaagccttgctggctgcatctcaactatacccatagcgacagcgccgactggctggcggccaccccgttgctgcccaataacgtacgcgatgccctggcgggagagagcacccggccgcgggtgacgcggatcggtgacggggcgctgatcaccctgcgctgtatcaatggcagtaccgatgagcggcccgaccagctggtggcgatgcgcctgtatatggatgagcggctgatcgtctccactcgtcagcgcaaagtgctggcgctggacgatgtgctgggcgacctgaaggaaggtaatggcccgacggacggcggcagctggctggtggaggtctgcgatgcgttgaccgatcatgccagcgagtttatcgaacaactgcacgatcgcattatcgacctggaagacgacctgctcgatcagcaggtgccgccgcgcggatttctcgcgctgctgcgtaagcagctgattgtgatgcgccgctatatggcgccgcagcgcgacgtttatgcccggctggccagcgagcggctgccgtggatgagtgacgatcagcggcggcgaatgcaggatatcgccgagcggctggggcgcggtctggatgagatcgacagctgtatcgcgcggacggcgatcatgagcgacgagatcgcccagattatgcaggagtcgctggcgcggcggacctataccatgtcattgatggcgatggtgtttctacccagcacctttttaaccggcctgttcggcgtcaacctcggcgggatccctggcaacagctggcatctggggtttagccttttctgcttgatgttagtcgttgtcatcggtggtgttgcgtggtggttacatcgcagtaaatggctgtaa

SEQ ID NO: 211700 - DNA, 744 bp, Klebsiella pneumoniae
atgcataagctcgccaggcaaaaacatattctcgacaggcttagcgaaaccggtcagctgagcatcagcgagctggttgcagagctgcaggtgtcggccgataccattcgccgcgatctgagcgacctggaacaacagggcgtgctgcagaaaagccacggcggggccatcgcccttaacgtcccggccatgacgcgccagggcagaaacgctcttctcacccagaccaagcagcgcctgggtcagcaggtcgccgcgcgcattccctctggctcgacgctgtttctcgacgccggaagcacgctgttggcggtggcagcccagctgaaagggccgttgaccgtgatcacggcatctctggatatcgctcagctgttcagcgaccgtgccgatatccagctgatcctgcttggcggccagtgggatagtaaacaacggctgttcgccggcagcgccaccctgtcgctggtcacccgctaccgggccgatatcgccattctcggcgcctgcgcgctccataccgggctggggctgagcgccagccaggaagctgatgccgacgttaaacgcgccatgctggccgccagcgccgagcactggctggtggcggaccgtaccaaactcaaccgctgcgaaccgtggcgggtggccgggctcagcgacattcaccatctttttcttgatcgtccctgggctgagctgggggatgaccccgccctctctgtacatattgctgacgcttaa

SEQ ID NO: 211701 - DNA, 1119 bp, Klebsiella pneumoniae
atgaccccgccctctctgtacatattgctgacgcttaacaacgtggagaacctgatgagtaacaatacgataaatatcgccctgattggctacggattcgtcggtaagaccttccacgcgccgcttatccgttcggtgccggggctgaacctggcgttcgtcgcttcccgcgatgaagagaaggtcaaacgcgatctgccggacgtcacggtgatcgcctccccggaagcagcggtccagcatccggacgttgacctggtggtcatcgcctcccctaacgccacgcacgccccgctggcccgcctggcgctgaacgccggcaaacatgtggtggtggataagccctttaccctcgatatgcaggaggcccgggagctgatcgccctggcggaggagaaacagcgtctgctctccgtcttccataaccgccgctgggacagcgactatctcgggatccgtcagatgattgagcaaggcaccctcggcgcggtgaaacacttcgagtcgcatttcgaccgcttccgcccggaagtccgcgtccgctggcgcgagcagaacgtcccgggcagcggcttgtggttcgacctggggccgcaccttatcgaccaggcgctgcagctatttggtttgccgcagtcggtgcaaggtaacatagccaccctgcgcgacggcgcggagatcaacgactgggcgcatgtggtattaaactacccggcgcataaagtgatcctgcactgcagcatgctggtcgcgggcggctcgtcgcgcttcaccgtgcacggcgataaaggtagcgttatcaaagcgcgggccgaccaacaggagagccagctgctggcgggcgtggtaccgggcagcgccggctggggccaggatgacgacccgctggttatctatgatgcctcgctgcaggcccacgcgcaggctaccccgcagggcgatcagcgccagtactatatgctgatccgcgatgcgctgaagggccagatcgccaatccggtgccgccggtggaagcgctggcggtgatggccgttctggaagcggcggtgcgctctgctgaaagtggtatggtgcagaccctggacctgtccgacgacgagcgcaacacgctgcgctaa

SEQ ID NO: 211702 - DNA, 195 bp, Klebsiella pneumoniae
atgtattacacgttaggagataccactctccatttttatcgctatcagtgcaaattttacgtcgcccactgggaagggggtaacgtgatgagcgaaaaatttaaatcgtttatcgaacagatcactgagaataccgggctggatgcgaaacgcgtcgagaccgccgcgcgcgattattttactaacgtggattaa

SEQ ID NO: 211703 - DNA, 747 bp, Klebsiella pneumoniae
atgaagcatgtgcacaagctggcctggataggcctgttcgtcaatattattatctgttttgtcgcgcgaaatttattacttgatgaaggacagctgaacttccatagtcgggcggacggcgtatggtcctggctggtgctggccctgtttattgccgtggtggttcaggcgatcagcataatgctgtcaggccgctacccttatctggccatcgtcctggcgtttgttggcggcatcgtgatggtgcccgccagcgtgatctttctggtgggtagtctgttcagcttgcaaacgcggattaacgccggatttacgccctggcgatcaaccacggcagtgggcgaggctgataaccagcagctattaacctttaatgcctcaggcttttatccccaaggggcgctggcgctcatcgccgggatcattattttaatgattggcatgggtataggcggagtatttattgccgctggtattgttgcgctgtgcaatggctatcgtctgcaaaatcgggtggtgattggcgtgagcggcgagtcgatgatatttacgccggggctctatgccgatacctacgttattcccttgcgggatgttgccgtagttgaacgcagcaataatgatgcgaaagttcggctgctgatccgttccagcggcagaagcttcacgttgcgtaaaaaactgctcgccggcgataaggttaatgacgccttcgccgccattctggcaaaactgactaccgtttaa

SEQ ID NO: 211704 - DNA, 1380 bp, Klebsiella pneumoniae
atgacaacgcagcaagagcatcagttaaaacgcgggttaaaaaaccgccacatccagttgatcgccctcgggggggcggtcggcaccggactgtttttaggtatcgcgcaaacgatccgtatggcaggcccgtcggtcctgctggggtacgccatcgccggggttatcgctttctttatcatgcgtcagcttggcgaaatggtggtagaggagccggtggcggggtcgttcagccatttcgccaaccgctactgggggcccttcgccgggtttatgtccggctggaattactgggtgttgtacgtgctggtaagcatggcggagctgacggcggtggggatctatattcagtactggtggccggaggtacccacctggctgtcggcggcgatcttcttcgtggcgatcaacgccatcaacctgacgcacgtcaaagtgtatggcgagctggagttttggttctcgattgtcaaagtggccgccatcatcagcatgatcgcctttggctgctatctgttatttagcggtcacggcggcccggcggcgacggtggccaacctgtggcaggacgggggatttttccctaacggcatcacgggcttggtgatggccatggcggtgatcatgttctccttcggcgggcttgagctggtggggatcaccgcggcggaagccgacgaaccgcataaaaccattcccaaagccaccaaccaggtgatctaccgtattctgctgttttacgtggggtcgctggcggtcctgctgtcactctacccgtggcggaacgtcgtggaagggggaagcccctttgtgctgatctttcacgccattgacagcaatattgtggccaacgccctcaatctggtggtgctcaccgccgcgctgtcggtctacaacagctgcgtctactgcaacagccggatgctgttcggcctggctcagcagggcaacgccccgcgtgcgctgctgcgggtgaaccaccgcgggatcccattgaccgccctggcggtatccgccgtcgccacggcgctttgcgtggtgattaactatgtgatgcccgggaaagcctttgccctgctgatggccctggtggtggccgccctggtcatcaactgggcgatgatctgcatcactcatcttaagttccgccgcgccatgcagcgggcggggaaggtaacggctttccagagtttcgcctatcccctgacaaactggctgtgtctgctgtttctcgccgcgatcctcggggtgatgtatctgacccccgacatccgcatctccgtctgcctgatcccggtatggctgctgatccttgctgcaggctatctgctgcgcaggaaaagcgcgccggcgccggtggcggcgcttgaggagcgttaa

SEQ ID NO: 211705 - DNA, 480 bp, Klebsiella pneumoniae
atgtacaacatcgacgactatgatctgaaaatacttaccctgctgcaggccaatggccgtttaaccaatcaggagctgagcgagcttatcggcctgtccgcttcccagtgttcgcgccgccgtatcgcccttgaacaggcacagcttatcctcggctaccatgcgcgtctggcgccggatgcagccgggcaggagatgcttggcctgattgaggtgcgtctgctgaatcacaccccgcaatgcgtggagagctttcatcagatgctcagtgaagtggacgccattctggacgcctggaaaaccaccggcgacgccgattatctgctgcgggtaacggtcccggacctgcccggtctgagccatttgatcagccatattctggcgcaaaacaaaggggtggcccatctgaaaaccgccgtcgtgctcaaccgccttaaagagaacggccagctgatgccgggcacgaccccgctgcgctga

SEQ ID NO: 211706 - DNA, 615 bp, Klebsiella pneumoniae
atggataatatcctttcccctgaaaaactgacccacacctggctggaggataccctggcgctgctgttcggcacgctgatgatctcctttggcattattttatttcgccaggccggtgccctgaccggcggaacggcaggtatggcctttctgatccactatgccacccacctgccgtttggcgtggtcttcttcgtcattaacctgccattctactggctctctgtccggcggatgggcgccgccttcacgctgaaaaccttctgcgcggtcggactggtgtccctgttctctgacctgcacggttactttatccatgtcgatcgcctgaatccctattacgccaccctcttcggcaacatcatggtcggcatcggctttgtggtgctgtttcgccataaagcgagcctcggcggcgttaatattctggccctctatctgcaggacaaaagcggcatccgcgccggtaaattccagatggtggttgacgcctgcatcgtcaccgcctcgctgtgggtagtgagcttgccgatgctgctggtctctatcctcggcgccgtgattttgaattcgattatcgccatgaaccaccgtcccggacgctacgcggtgtaa

SEQ ID NO: 211707 - DNA, 1200 bp, Klebsiella pneumoniae
gtgtttcagaacgttgacgcctatgcgggcgatcctatcctgtcgctgatggaagcctttcaacaggatccccgggcagacaaagttaacctcagcatcgggctgtactataacgagcaggccattattccccagctggaggcggtccgtcaggccgctgaccggctgcagagtcagcagcaaaaggccagcctttatctgccgatggaggggctggcgccctatcgccgcgcggtccagaccctgcagtttggcgacaatcatccggcgttgcgtgccggacgcatcgccaccatccagacactggggggctccggcgcgctaaaggtgggcgctgatttcctcaagcgctacttccccgactccgcggtctgggtcagcgatccaacctgggagaaccacgttgccatctttgccggcgccggctttgaggtacatacctatccctggttcgacagcgccacccgcggggtgaatttccccgctatgctcgccgccctccagcagctgccgccgcgcagcattgtgctgcttcacccttgctgccataacccgacgggggccgatctcacccgcgagcagtgggatcgcgtgattgaggtgctgatcggcagggagctgatcccattccttgatatcgcctaccagggcttcggccgcggactggacgaggatgcctatgccattcgcgccatcgccagcgccgggctgacggcgctggtcagcaactcgttttccaagatattttcgctgtatggcgagcgggttggcggcctgtcagtggtctgtgacaatgccgatatcgccgggcgcgtgctgggccagctgaaagccaccgtgcggcgcaactactccagcccgccggggtttggcgcccaggtggtgtcgcaggtgctcaacgatcccgagctgaatgccctgtggcaggaagaagtggaggccatgcgcacccgcatcagcgccatgcgcgtcgcgctggtgaaggccctgcaggcagccctgccggcgggggatttttcctatctgctgacccagcgcggcatgttcagttacaccggctttagcgccgatcaggtagacgttctgcgtcaagagcatggcatctatctgatcgccagcggtcgggtctgcgtggccgggctcaaccacggcaatattgcgcgggtagccagcgccttcgccgcggtctgcgcacgctag

SEQ ID NO: 211708 - DNA, 669 bp, Klebsiella pneumoniae
atgtttgatcttattgataccgccatcaccggcgatcagtttctgctggcgctgcatgacacgctgattatggtcgccgtctcgctgggctttggcgcgctgatcggcgtcccgctggggattgtgctggtggtttgccgtcccggcggcatcgtggccaacccggtggtgcatcaggcgctgaatccgctgattaacgtgctgcgctcgctgccgtttatcattttgctgattgtgatcctgccctttaccagactgctggtgggcaccactatcggcaccgcgggagccatcgtgccgctgatcgtctttgtcgccccctatattgcccgactagtggagagctcgttgctggaggtggatgaggggatcctcgaggccgcggacgccatgggcgcaacccccctgcagactgtctggcactttatgctgccggaggcggcggcatcgctgattctggcccttaccacggcgaccatcggcctgcttggtgcgaccgccatggcaggaacggtgggcggcggcggaattggcgacctggcgatcacctacggctatcagcgtttcgacgcctttgccaccctcaccaccgccctggtgctgattgttattgtccagcttattcagacgctggggacccgcctggctcgccggctgcgtcgcgattaa

SEQ ID NO: 211709 - DNA, 1026 bp, Klebsiella pneumoniae
atgaataacgcgatgatagaatttcgccacgtcagtaaaagcttttccaggaaaggacatccggttctggccttgcaggatattaatctcagcattgagcgaggcgatatttttggcattattggctacagcggggcaggaaaaagcaccttattacggctgattaatcgtctggaaacgcctggcgagggcgaggtactgttaaacggcgagccgctacaggcctgcagcggccagcgcctgcaggccatcaaaaaagatatcggcatgatctttcagaattttaatctgctgaattcgaaaaccgtttttcataacatcgccatcccgcttattttacaggggcgcgacaaggcctttatccaggcgcgggtggcggaactgctggcgttcgtcgatctgagcgacaaaatccacagctaccctaatgagctgtcgggcggacaaaagcagcgggtcggtattgcccgggcgctggccaccaacccgtcggtccttctatgcgatgaagccacctcggcgctcgacccccacactacggtgcagatcttactgcttttgcaggagattaatcgtcggtatggcatcaccatcgtactgatcccccatgagatgtcggtgatccagaaaatctgtcacaaggtggcggtgatgcaggcgggccgtatcgttgaacagggggcggtttttgatctctttgctcagccgcagcatccggtcactgccagtttcgtgcagtcggtggtgcacgaccgcctgccgcagcgggtggcgtcgttcctgcagcgcgataacggcgcccgggctttacgcctcgaatttgtcggcgcgacggcgcagcagccgattattaaccacctgatccgcgagtatgctgtcgaggtgaatatcctgtttgccagcatgtctgaagttcagggccggattctgggatttatgattgtgcagcttctcggcgagcctgacgaaaccgaacgcgccatcacccatctggtcgatgcaggagtgaaaatcacccatgtttga

SEQ ID NO: 211710 - DNA, 807 bp, Klebsiella pneumoniae
atgaacaagtcagttgcgcgcgggatcgctctcgccctgttgtcggccacctctttttatgccgccgccgacgctcatcttatccgcgtcggctttaaccccgggccgtataaagaacaatttgagaaaggcgtcgcgccctatttattgagtaaagggtataaaatcgaatataaggatttcagcgacggtattcaggtgaatgacgcggtagcccgcggcgatatcgaagcgaatattatgcagcatccggtatatctgaaagcaattaatgagcggctggggatcgataacgtgggcattgtgcaggtccccacgccgccgatggggctgtatggtgggaaactgaccaccctggggaccccggcggcgggcaccgtcgtgtcggtaccaaaccagccgtcaaatgaatatcgcgcggtactggtgctggagagccttggctgggtgaaaattaaaccagacagcgatccggccactttttcgcagcgtaacatcgtagataatccttacaaaattgtcctaaaagagatggataatgcccagcaggttcgcgctctgccggacgtcgactatggcctgattcagggcaattttgccgtctccagcggtatgtccctgacctcggcattaaagctggaagcagccaccagccattttattaatgtcgtgaccgtcgccggtaaaaatcagaaggcgcagtttgccaaagatattatcgatggctaccactcggccgagttcaaaaaatatattctcagccatccgcagtatgatggttacctgctgcctgactatttaaaatga

SEQ ID NO: 211711 - DNA, 1176 bp, Klebsiella pneumoniae
atgcctgattttactgcttcgccgctggtggacgccctggaagagaatttgttcagcctgctggaaaaactggccgcggaggtcaacaccgaagcgctgccgctgatcgatctttccagcggcagtccggatcaacccaccccgccggaagtaatcgactcgctgcagagcgctattcatcgtcgtgaaaaccatggctacccgtcgttctggggcaaaccacaggtccgcgaggcgatcgcccggttctatcgccgggagtatgatgtggaactcgatccgcacagcgaaatcgccgtgtttcaggggtcgcatatcggtataggcggcatcccgcgggcgctgctcagccccgggcaatacctcatctccaccgatccctgctatccgatttaccgctcggcggcgctgcagtcccaggcggcgttttatggcctgccgctcagggcggagaaccatttcctgccggattttaacgatcttccccgggaagtcgctgacaaggccgggctggtggtgcttaactatccgcataatccaaccggcgccctcgccacgccggcgctgttcgccagcgcgctgcagtttgctcgtcgtcaccaggtgccgatcctccatgattttgcctatgcggccatcggcagcgcggccagcgatgcgccgctgagcctcttctcccagcccgacgcgaaagcatggggagtggaaacctatactttttccaagacctttaatatggccggctggcgcttcggcttcgcggtcggcaacgcctcgattatccgggcgtttaaaaagctgcacacccatagctacagtacggtgtttggcgcgattcaggatgcggcgatcgccgcgctcaacctgccggccgaacggattacgcagctgacggcggtctatcatcaacgtcgggagtgggttctgcgtcgactggctgcgctgcgctggccggcgcgtgacgcacaaggcactttcttcctctggctcggcgtaccgcccggctaccgttcgcaggagtttgcccgtctgctgctgcaggaagcgcatattctggtggcgccgggcactggttttggcgcagggggggaaggatttattcgcatcagcctgaccgcaggggacgaggcgctgagcaacgcgctggaccgtcttgcccggctggcgctgttttag

SEQ ID NO: 211712 - DNA, 1035 bp, Klebsiella pneumoniae
atgtcgacgcagatgatgaaggccgttcaacagcacgcctttggcgggccggaagtcctgagctatgaggatgcgcccatgccggtcctgcaggccggtgaagtactggtacaggtgcacgcggtgggcgtgaacccgccggacagctatctgcgcgatggctatcaacagctgcccccggagtggcggcccgaggtccgctttcccttgatcctcgggaccgatctctccggggtggtggtggcgcgggcggatgacgtccgggaggtggcggtcggcgacgaagtgtatgctatggcgcgttttcccgaaggggcggcagggggcagccgcgcttacgccgagtacgttagcgtgccggtcagcgacctcgctcgcaaacccctaaccctgagccatcagcaggctgccgcggtgccgatgtcgctcctgaccgcctggcagttcatgatcgatcccgggcatgaggtggcgaatccgctgcagccggggccgcatcggccggtgccgctggcgggtaaacgcgtcctggtcaacggcgcggcagggggagtcggtcatttcgccatgcagttggcgaagtggcagggcgccgaggtgattgccgtcgccgcgggccgccatgaagcctttttacgtcagctcggcgcggatagcgttatcgactatacaaccaccgcagtggaagagacggtgcgtgacctggacctggtcattgatgcgccgggcgggccggccagcggccgttttttgcgtaccctgcgacccggcggcgcgctgtacccgatctttccgctcggctttgccggggcggaagaggcgcgacagcgcggagtgacggtctcaaccacccaggtacgctccagcggcgcgcagctcgcccggcttgccgacctgctggacgccggggtcatccaggttgcaattgacagcgttttcccccttgcgcaggtgcagatggcgcatgagcgagcagcgcaggggcatcttgagggcaaaatcgtgctgtcggtgatggactcgtcagccgggtaa

SEQ ID NO: 211713 - DNA, 549 bp, Klebsiella pneumoniae
atgagagctgatgccagaaaaaattatgacctgttgatcgaggtggcccgggacgtctttgtggagcaaggcgctgaggcctcgctgcgcgatatcgcccgccgggcgggcgtcggaatgggaaccctctatcgccactttcccaaccgcgacagcctgctggaagccgtgctccgcagccgctttgcggcgctaaccgcccgggctgagtcgcttctgctcgccgccgatcctgccgcggcgctgctggagtggctggccgagagcgtggcgtttacccatcagcatcgcgggatcatcgccccgctgatgagcgccatcgacgatcctgagtccgccctgcacagcgcctgcgttgccctgcgcgccgccggtacgtcgctgcttacccgcgcgcagcaggccgggctggcacggccagatctcagcggagaggagctgttcgatctgatcgccgcgcttgcctggctgcgggagcaaccgtcccatgccccgcgcgcagagcggattttagcggtgctggccgacgcgatcctgactgccggctag

SEQ ID NO: 211714 - DNA, 912 bp, Klebsiella pneumoniae
atgaataatgcgcaaaccgtgttggtttttggcgccaccggtcagcagggcggctcggtggcgcgggcgctgctgcaccgcggctggcgggttcgggcgctggtcagggatcctttctccgccggggccgctgcgctggcggcgcggggagccgagctggtggtgggtacctttgaagaccgggcggcaatgcggtcggcgatggccggggtcgacggcgtcttcagcgtccagcccagttcgccgggagggacggtgaccgatgagcaggaggtacgctacgggataaccatcgccgatctcgccgtcgagtgcggggtgaagcatctggtttacagctccggcagcgcgacgggggagacgccgaccggcgtagcgcattatgacaccaaagcggaaattgaacggcatattcgccgcctgccgctggcggcgaccatcgtgcggcccgccacctttatggagctgctggtgatgcctggttttggccttgatgaaggtcgttttcaattttttatgttgccggaggggagaatgcaggtgctggcggtggaggatatcggccatcttgtcgcggcggtttttgccgcgccggcgcggtttgccggcaagacgttcgagatcgccagcgacagcgtgaccggtcgtcagctggaggtgttattctccgcggcggcgggacggccgatcccctattcgcgattttccgacgaggtgctggccgccagtccttttctgcacaagctgaccgggctggtggacgacgggcggctggccgggcacgccgacctcgacgccctgcgccagctgcacccgcagctgcacaccttcgccggctggctggcaggccccggccgtcccgccttcgagcgggcgctgaccagcggggctcgctgggcgtttgatcgttaa

SEQ ID NO: 211715 - DNA, 867 bp, Klebsiella pneumoniae
atgcaaacttaccagacaggcgatagcctgattttcaaagtgccggagcgcgagatttccctgcagccggcggcgctctatccagaggcgttcccggtagcggaggcggaggccgttattcagccgattgcgctgtcaatccacagctgggtggtgcagaccccccacgatctgattgttatcgataccgccaccggcaatggtcgggagcgcggcggcaatccgctctatcatcaacttaacacgccgtatctggagaatctccgcgccgcgggggtgaacccggaggacgtgaccctggtgctactgactcacctgcataccgaccatgtcggatggaataccgtctggcaggacgatcgctgggtgccgctgtttcccaacgcccgctatctgtgctcggcaaaagagctgtcgcgggtgaaaaacagcgaacgctaccgggcgctgtggcttgacagcctgctgccggtgattgaggccggccagctggagaccgtcgatgtggcgacccggccgcgggtcggcggacggatcgactttattcccacccccggccacagtccggaccatgccgcgctgatcctcgccgccggtgatgactacgcctgtttctccggcgatcttctgcattccccgatccagtttgcccatccgcagtggaattcagcgttctgcggcgatccccggcaggcggaagtctcgcgacgggagatgatggcgtggggggcaagccatcatgctcaatggttcaccgggcattttgccgggccttcctgcggctggctggagaaggataagcaaggtgactatcgctggcgagaggccgggaaacaggctgcagataaggggaacagtgatgaataa

SEQ ID NO: 211716 - DNA, 924 bp, Klebsiella pneumoniae
atgaacaaaatcattgaaaatgattttagtcgtatcgatctgaatctgttgacagtcttgatggtgctgtaccgcgaagggagcgtcacccgcaccgcagaggtactgcatcttggccagccggctatcagcggggcgctgaaacggctgcgcgagatgtttgacgacccgctgttcgtccgcagcgccagaggcatgctgccgacgccgcgggcgcaagcgctgatgaccgacctgcagccgctgatggaaaacctgcattcggcgatgtttggcgccggggagtttgtcccggcgcgcgcgcagcagctttttcgcatcggcctcagcgactggagcgagcactggctgatgcccccgctgttacccgggctgatgcaggaggcgcccggagtctcactgcagtcgatagccgccgaccccttccaggttcgccagttgctggaggaggagcgcattgatgtcgcggtgtctgtcaacaaacagagccgtggggagatcgtcagcgagccggtgatgtccatgggagtcaccaccctgtggtcgccgcagcagatcccctgccgcggtccgctgtcggtgagcgactttgtcgcctgggaacacgtgatggtggcctatcgcgaaaccggccacggtgaaattgaccgccagctcgccagccagggactcgcgcggcgcgtgcgctttgccacgcagaatttctccacctttcccctgctgctgaccaccctgccgctgttcgccaccgtcccgcaggggctggcgcagcgctggcaggcgcagtatgcgctgcgcgcggacgctccgccggtagcgtatccggaatttacgctgtgcattttgcggcacaaacggcgggcgcaggatccggcgctgaactggctggtgacgaagttaaaacaggccatgcgcggccaataa

SEQ ID NO: 211717 - DNA, 906 bp, Klebsiella pneumoniae
atggacaaactggatgccatgcaggtctatgttgcggtcgtggatgcccacagcttcgcccgcgcggcggaggtgctcgggcagccgcgctccacggtatcgcgggtggtgaaggagctggaagccttgctcggggcgcagcttctccagcgcaccacccgcaagctcagcgtgacggcggagggtcgccggtattatgaggagtgtaaaaggctgctggccgagatggcggcgatggaagcctcctttcccgggcgctcggctcagcccgccgggcggttcaaggtagggatgccgcaatcccttgcccgccactgcattctgccgaggatcggcgagtttttgcagcagtatcccgacctggagctgatcctctgctcaagcgacaacgtggaagatattattcaggagggattcgactgcgtgatccgtaccgggcggatcgaagattccaccaccctggtggcgcgtcctctggcccgctaccgctggatggtcctcgcctcgccggcctggctcgcggcccacggccggccgcagagcatcgacgaactgcaccagcatcgggcggtgggctacctgaatcaccgtaccgggcggaccatcgactggcttttctccctcgatgaaggcgactgcgcgatccgcatgcgggagacactggtggtcgacgataccgatgcctacattcaggccggcattcaggggctgggcctgatccgcgtcgccagctatctggcgcaaccttatttgcagagcggggcgctggtcgcctgtctggagcaggccgcttctgatcttcccttgtcgctggtctatccgcaaaaccgctatctgccgccggcggtgcgcgcgttttatgactggagcaggcgcgtgctgcaacccccgcacagcgaggcctga

SEQ ID NO: 211718 - DNA, 930 bp, Klebsiella pneumoniae
atgaaaactgataattttaatcatgcggaaaaggtattggtgctgggagcgggacaactgggcgccgccgttctcgatgcgctggtgcctgcggtaatcgagcgccagggcacggtctcggtcatcgtctcgccggcggcctgggatgaagccggccagctgcggtcggcaaaccatcaggcgctggccgacgccggagccaccttcctcgccgtcgacatcgccggtagcgccatggagacgctggccgatcagtttcgcggattcaccaccgtgattaactgcatggggtttgtcgccggtccggggacacagctgaaaattacccgcgcggtgctggcggccggggtaccccgctattttccctggcagtttggcgtcaattacgatgtggtaggcaaaggcagcggtcagccggtctgggacgagcagtacgatgtccggaccctgctgcgcgcgcagcgggccacggagtgggtcattgtctccaccgggatgtttaccagctttctcttcgaaccagacttcgatgtagtgaatttatccaaccgaacccttcacgcccttggcagctgggatacccaggtgaccgtcacctcaccggcggatattggccgcctgaccacggcgatttatctgcatcagccgcggatcgtcaacgaggtggtgtttgttgccggcgaaacgacctcttaccggcagttggcggataccgtggagcgcgtaacgcagcagacgttcagcaaagccgtccacaccctgcccgccctgctggagcagctgcggacaaacccggatgacgccatgctgcgctatcgcgccgccttcgcccggggggatggcgtgtggtggccgatgggcgacacctggaatgcccgccaccagctgccgacccaggacattgccggctggctgcagaccgcgcgctga

SEQ ID NO: 211719 - DNA, 207 bp, Klebsiella pneumoniae
atgaacaagttaattccactgatcgtattgagttgtctgctgcccctggcggcaaatgccagaaccatcaccgccaccggcgataccctggaccacgcggagagcaaaatccgccagcatgccgcccgcgagggcgtgactacctatcgcatcactgaagcgcgaatgggcaacaaagtgcatatcacggcgaaaatcgcggactaa

SEQ ID NO: 211720 - DNA, 879 bp, Klebsiella pneumoniae
atgcgcgacgctctgttcgatctctgccgccggtttgccgatgctcatgtcgatagcagcggggtggcagttaccccggttcccggtattactctggtgcgggccctgcatcctggtgacctgcaggcggctatcgccaggccgctggtggccatgctgctccaggggcgtaagagcgtgaccaccggcctggcaagctttgactatggtccgggcgaggcgatggtgatcgccgcggatgttcccactaccagccagatcaccgaggccagtcagcgttttccctattacgcgctggtgctggagctggacctggctatcctgcgcgagctgcaggaggccgggccgtcagggccggatgaggcgccccgcgttggtatcgaaccgatgaacgccgatgttacggatgccgcttaccggctggcaaggctgtttgatcaaccgggggcgctggcggtgctgggggaaggtctgcggcgggagctgcattactggctgttgcagagtgtccatgggccggccatccgggcgctgggcgccgtagacagccattcggcgcggatccgccgggcggtggcgatgctgcgccgggattttatgcagccagtcagcgtcgacgcgctggccgacgccgccgggatgagcgtctctgtctttcaccgtcatttccgcgccatgaccacgctgtcgccgctgcagtttcagaagcagttacgcctgatccacgcccgccgcctgatgctggcggaagggatgagtattgcacaggctgccggggaggtgggctatatcagcgtgtcgcagttcacccgggaatacgctcgcctgtatggcgcgccgccgggccgcgatcgtcgacgggaaaaaatgagcgcctga

SEQ ID NO: 211721 - DNA, 756 bp, Klebsiella pneumoniae
atgactaaaattgcacttattaccggcgccaaccgcggccttggccgtcagaccgcactggatatcgcccgccagggtggggatgtcatcgtcacctaccgcggcagtctcgaacaggcggaagcggtggtcgccgacatccgcgccctgggccgcaaggccatcgccctgccgctggatatggcgcaaaccgccagcttcccggccttcgccgacagcctcggcagcgcgctggccagcgtctgggggcgggccactttcgaccacctgatcaataacgcagggcacggcgaattcgccccgctggccgaaacgcgcgaagcgcagttcgacgggctgtttaacgtccacgttaaaggggtatttttcctcgtacaaaccctgctgccgctgctggcagacggcgggcggatcgttaacttttcatccgggctgacccgcgtctcctatcctggcttctccgcctacgccgccgccaaagcggctgtggagatgctgagcgtgtacatggcccgcgagctgggcgggcgcggcatcaccgtcaataccatcgcccccggcgctatcgccaccgattttggcggtgggctggtgcgggacgacgcagaggtaaacgcgcagtttgccgccatgacggcgctgggacgggtgggcgttcccgaggatattgggccgatgatcgccagcctgctacgcgacgataaccgctgggtaaccgcccagcggatcgaggtgtcgggcggacaaaccatctga

SEQ ID NO: 211722 - DNA, 594 bp, Klebsiella pneumoniae
gtgaccactacaaaaccagggcgcactccgggacgtccccgccagtttgatgcggaacaggccattgaaacggcgcaacgcctcttccacgcgcgaggctacgacgcggtgagcgtggccgatctgacccacgctttcggcatcaaccccccgagcttttatgctgctttcggcaacaagctcgggctgtatacccgcgtcctgcagcgctacagccagaccggggccattcccatcgatgccctgctgcgagacgaccagccggtggcggcgtcgctcatcgccgtactgcaggaggcggctcgccgctatgtggccgatccggccgccgccggctgcctggtgctggagggggtacattgtcaggatgctgatgcccgggtggcggcaggcgaatggcatgctgcggcaagagccaaaatccagcagtatatcgcccgccatcgcccgcaggacgcgctgcgggtgactgactatatggatacgctgatgcttggcctgtcggcgaaagcgcgggaaggggatagtctgccgcgtcttctggagaccgtgcggctggcaggcctggcgctggagcgcatcctgccagcctga

SEQ ID NO: 211723 - DNA, 714 bp, Klebsiella pneumoniae
atgacagcgtttcacaacaaatcagtgctggttttaggcgggagtcggggaattggcgcggcgatcgtcaggcgttttgtcgccgatggcgcgtcggtggtgtttagctattccggttcgccggaagcggccgagcggctggcggcagagaccggcagcacggcggtgcaggcggacagcgccgatcgcgatgcggtgataagcctggtccgcgacagcggcccgctggacgtgttagtggtcaatgccgggatcgcgcttttcggtgacgctctcgagcaggacagcgatgccatcgatcgcctgttccgcatcaatattcacgccccctaccatgcctccgtcgaagcggcgcgccgcatgccggaaggcgggcgcattattgtcatcggctcagtcaatggcgatcgcatgccgttgccgggaatggcggcctatgcgctcagcaaatcggccctgcaggggctggcgcgcggcctggcgcgggattttggcccgcgcggcatcacggtcaacgtcgtccagcccggcccaattgataccgacgccaacccggggaacggcccgatgaaagagctgatgcacagctttatggccattaagcgccatggccgtccggaagaggtggcgggaatggtggcgtggctggccggtccggaggcgtcgtttgtcactggcgccatgcacaccatcgacggagcgtttggcgcctga

SEQ ID NO: 211724 - DNA, 495 bp, Klebsiella pneumoniae
gtgacagcgagggaacgtttttttaagaaactgcagcaacagcaaaatccgcggcggacagcggccctcgacgggtcggccgccgcggatatcgccaggtttcgtcagcagatggcggagctggctcagcagataagtcagtggtttgatggaaccggtattgaggtggtgatttcgacccgccatctccacgacctgagtacccttggctacagcctcaacagcggcatctgccgctacgatatcctggccattcgtctgcaaaacggcgagcgcagcgtcaatatcgtgccgcagcagctgttggatggcgtggaaaaggggatcgtgaccctgagtcttgaggcgcccgacggcgcgggatcccgggaggtgttttatctgagcctggccccggaggagggctggatgatccgcaaggcgcaccagcccccggaagcgcggcttatacttaccgaagatcgcttttttatggcggtagacagcctggcctga

SEQ ID NO: 211725 - DNA, 543 bp, Klebsiella pneumoniae
gtgttacgtataagtttgactaaaaccgcctgtctgctgcccctgcttgcgctttgcctgagcggatgcggactcacccagcgcgtctcggagggaacaaagtctgccttcaacgccgttttttataagaaaattaatacgctgcatctggactttaccgcgcgcgaagcgctcaacaccgatgccagagagaatcactcgctctctgaaccggtggtggtgcgcatctatcagcttaaagatcgccagacctttgaccggctggtttaccagcagctgctggaggagggggatattctgctcgccgccgatctcctcgccagtcgcgatgtggtgatcggtcccggaggggacgccagtctgaatatgccgctggaagcggaggcgacgttcgtggcggttgtcggcctgttccgccatccggacacacaaagaaatacctggaagcaggtgctggcgcgtgaggaattggatccggacaagccgcgcattttcaccgccgaacacaaccagctacggctcaggcctgaagcggcgaagtaa

SEQ ID NO: 211726 - DNA, 1086 bp, Klebsiella pneumoniae
atgggaagagaagcacagccgccgcattcccggctgaccccgcgactggaggccgacctgccgcggatcaatttttaccgcttctgccagcttctggaaaaacggcgtcccggccaaccactgatggggggaaccagccatccggctgacgatccggtgcgtttttacccgcatccgggaatgggatttcccgccagcgaactgaaagccgtggaatacgatgaggccgatgacagcaggccgccggtcattcgcaccacctttatggggttgtacggtgtcgattcgccgctcccgacggcatatctcgatgatatcgcccagcacagggaagggcatgaagcgctgcagggcttactggatatcttcagccaccggatcatgacgcagttttaccgcatctggcggaaatactcctggcccgccacctttgagcccggcggcaccgatcgtctctcgcagtcgctactgggcctggcggggctaggcatccccggcacgacgcagcatatcgcctcgccggcgtcgcgctttctggcgctaaccggcgtgctgcgtcagccgggcaaaacccagcaggggatccaggcgctggtcaccctgctggccccggagaccaccgtcagggtgagcccgtacagcctgcgtccggtggcgatcagccagccgctggggttttacggcgatgacgacttcttcctggacggcaatacgccgctgggtgacgaagcgatggatgccagcagccagctcctcgtcgcccttaccaccgacaatcccgcggaggcgcagggctggaagcctgacggcccgctgtttcgggactttctcatcctgctgcgggtatacctcggctggcgattccgggccaacatcaccctgaccgcgccgacccgactgctggctgtcccgccgctgggggacgagccgttctggctcggtatgaacggcgtgctgggcgtgggtgatggcgagagtgagggcgatattcctcagacctttaccaccgagctgggtacctatacgggcctgcagcctgccacctttctacaaggaaaccgacgtgttacgtataagtttgactaa

SEQ ID NO: 211727 - DNA, 1755 bp, Klebsiella pneumoniae
atggacgatttaaccctgcgttattacgacgctgaaatgcgctacctgctggaagcgggtgaagagtttgcccgcgctcatcctgagcaggcggcaatgctcaatctcgacaaagcgggcgctcgcgacccctttgtcgagcgtctgtttgaaggttttgccttcctgatgggccgcatgcgcgagaaactcgatgacgatctgcctgagctgaccgaaggcgtggtcagtctgctgtggccacattatttacgtaccattccctcgatgtcggtcgtggagttcacccccgactggccggaaatgaaagagccgatgacgatggccaaaggctttgaagtgctttcccggccgatcggtgaaaagggcacgcgctgccggtacaccaccaccaaagcgatcgctctgcagccgttatccctggaacgcgtccagctggccaccgatacggatggccggtcggtgatcacgctgcgctttacctgcagccagctgacggactggcgccgggtcgatctcagtcatatcccgctgtactgcaacgccgatgcgccgctggcctgcgccatgcacgaggcctttaccctcaatgtggcccggatgtggctgcgcatgcccgaagaggtggacagaaggccgctggacgggtatttcagcgcgctgggatttggcgaggatgacggcctctggcctgaagatggccgcagttttcgcggttatcagctgctgctggagtattttaccttccgcgaaaagttcatgttcatcgatctgcgcgggctggagacggtggcttttccggccggactggcgtggtttgaaatcgacgtcgtgctggcggaacgctgggaacatgacttccgcttcagcgaaaagcagctgcgcctgcactgcgtgccagtgatcaacctgtttccgctggagtccgatccgctgaccatcaattccctgcagaccgaatacccgctgcgcccgatgcgcgtgcaggacggccacaccgaaatttacaccgtcgattccgtgatctcctcacaccagcaggtttacgcgccgttctcaagttttcgccacaaaggcggcatgatgcgtcatgacgcggcggactattactatcatacccgggtgcgccgtggcccctccgggctgtacaacacctggcttatcgtcggcggagaagcctttgataatcataccgtaccggaagatgaaagcctgtcgctgaccctcaccggaaccaacggccagctgccgcgtcgcgcgctgcagagcaccgtgctcgatacggtgatgaaaaccacttccgccagtattgcagtgcgtaacctctgcgcgccgacgctgccgtgctatccccccgcccaggaccgttttcactggcgggtgctgagccatctgggcagcagttttctttccctgatggataacgcggaggtcctgcgcggcaccctggcgctgtatgaatggaccgacagcgagatgaatcgtcggcgtctggaagccatcctcgacgtgaagcaccgcgcaacagagcgctttgcacagggccatctggtgcgcggcgtgcagattgaagtcaccctcgacagtcacggctttgccggacgtggcgatatatgcctgtttggcgagatgcttagccgcttcttcgcgctctacaccgacatctacttgttcaaccgcctgattatcattctgcaaccaaccggagaacgactggaatgggaagagaagcacagccgccgcattcccggctga

SEQ ID NO: 211728 - DNA, 1134 bp, Klebsiella pneumoniae
atgaccactatgcaggtcattatcggggcgttattgctggcggaagccactttttccggcttggctgaagcatctcgccccgatctttccgggctatatcagatactggagaaccgcctggtgcaaagcggcggagcccacagtctggtgccgcagaccagccgcgaagaacacgatctgctaccccaacatacggacaccgcaccggtaatgcataccgtcacgtcaggtcgtgatttgctcgatcaggctaaggtgctggcgaaatatctgcgcgagtgtcccggcggatggctggcaggtcatcatctgatgaagagtgtgcgttgggatacgttaacggagttaccgccgctggatgcctccggccggacacggctattgcctcccaagcctgagagtaaagcccatcttaagcggttgtatttacagaaaagctggtcggaactgctggagcatacggacacgctgttggcgcaaggcgtcaaccatctgtggctggatgtgcagtggtacgcctggcaggcgctgctgaaactggatgctgacagtgtacgggccgatatcctgtgccgagatatgaaagggctattggctcgtctgccggggctggaaaccctggcgtttaacgatggtacgccattcgccgatgaagttacgctcaactggcttaacgaacgtgtcctggatgagatggccggatggcaagatgagccggtaatggcggcgaccaccgctgatgaggtgctgtcgctggagccagaagtgctcacccgcgcggacgatgaaggtattgagtcggcgctgaactggttacaggcgcagccgggctataccaccagccgcaatcggtggctgatgcgcttactgatggcgcgggtcagcgagcagtacggaaaaaatgaaatggcgctgcatctgctggcggaactcgacagccgcgcccgggaaatgacgctcgaacaatggaagccggagcttatctttgaggtcaaagcccgccgactccggctgctcagaggcaaggccgggcgcagtgaggcagaaaaaaatcgcttgctgccagaaatggagtcattgcttgccgggctcatcgctctggatcctgctcgcgccgcggtgctgtgcgcataa

SEQ ID NO: 211729 - DNA, 408 bp, Klebsiella pneumoniae
atgagcattttacaaaatttggttgccgccagtcagttggatgaaagcgcactgcgccagcaggcccggtcacgccaggcgcagtggcagtcctggcttgcgccagtcagtgacgcccaaccaaccggggacgatccgggctatgacgatgattttcagcgtatccgcgaggaggtcaataagatctccggcgtcgataccgaactgatttgccagctggcagaaaaactgctgactcagacctgcaaggatctgcgcgtgatcaccttttacgtgtgggcgcgtctgcagcgggatggtgaaaccggtctggcggagggcgttacgctgctggcggcaatgcttgagcggtttggggctatgctccatccccagcgtgaacgtagctgtaaatcagcgctggaatag

SEQ ID NO: 211730 - DNA, 3426 bp, Klebsiella pneumoniae
atggacaacgtcaataaacctgccgctatctctgtggcggctacggttatcgtctgtattgctgcggtcacgcttctggtgctcctgggcgggctggcatggtggctatgggcgatggatcgtgccacgcagtgggaaacgctgcgcccgcttatcgccacgggctttattatctgggggatggcactcagcctgctggtactggggtttatggcctttcgactgctgataaaagataaggttaagccttcagcagcgcctgtgcggcaacccaccaggcctgccgggggcgaagccctttatgccccgctgaaaaagcaccttcacgcacgttaccgcctgcactggcggcgcaaagtccgcctgcttttagtcaccggcgacgaggcggcaatcgaacaactggtgcctggcctgcgtcagcagcgctggctggagggccagcgtaccgttctgatttacggcggcagtctgctctccgagcccgacagtgagcaatatgccgcgctgcgcaagctgcgccacggtcgtcctctggatgggattgtgcgggtgatgccgtcgtctctcaccctgacgccgcagataagcgagagcgacctgcgcgggctggaaaaaatcagcgaactgctgggctatgccgccccggtctggttatggaaactgtgcgacagtgagtggccgcaggctgaccgcgcggagcaggcggtaggggttagcttcccgttgcgcgccactgaggaagatgtcgcccgtcagcttgcgcagatgttgccgacgctacgggagcaggggatgcaccagatcgcagcagatacccgccacgacttcctgctgcgtctggggcagcagcttatcgacggggagatcgcacaatggcgccggcagctggcgccgtggctgaccgcctcgcggcagcggcttgcgctgcgaggcctgatgtttagcctgccagagcctcgtaccgtagatccgtatcaggaagctgatgccctgcctgcgagccagcctcacctcctgacgcttcccgccacctggcaggggatcgtcgatgactgccgccgtttacgcgggcatcacgtgggaatggcatgggagcggggcctggcgtgcggtctgctggccatcttcggcctgtgggcggcgggactgctgctctcctttgccctcaattacagtcagattgcttcggtagcgggaaaagcccgcgacctggtggcccacccctccgtttctgactatcaactgacggccctccatgccctgcgcaatgaggccggccgtctcgtgcacgatgggcagaatggcgctccctggtatcggcgctttggtctggaccatcatcagcaactattagacgccgtcctgccctggtacggtgtggcgaatcatcgcctgatacgtgacccggccaatgccgcgttgcagcaggcgctcagcgcgctggtcaactccgcccccaatagcgaccaacgagcccagctggcgaaaccgggctatgaccagctgaaagcctggctgatgatggctcgtccggataaagccgatggcgcattttttgcgcagaccatgaaaacggtccagccgacgcgaatggggatctcgaccggtctgtggcaaagtctggcgccggatttgtgggccttttatctctccctgctgcccgagcggccagagtggaagatcatcccggatgcgcaacgggtgagtcagagccgtcaggttctgttgcagcagctaggtcgccgcaatgccgaaagcaccttatatgagaacatgctcaaatccgtgcgtcgtaattttgccgatgtatcgctggaagacatgaccagtggcaccgacgcgcgccggctgtttaccaccaatgaagtggtcccggggatgtttacccgccaggcatgggaaggcggcattcagcaggccattgataaggcagccagctcgcgccgggaggaaatcgactgggtgctgagcgattcgcgcaaaacgatgtcgacagacctgtcgccggaggcgctgaaagcgcgtctgacccgacgctacttcaccgatttcgccggcagctggctgaattttctcaacagtctgcgactcaacccagcgaccaccattgccgatgttaccgaccagctcacgctgataagcggtgtccgccagtcgccgctgattgccctgatgaatacccttgcctggcaggggcaggcggggcaacaaagggaggggctgtcggacagccttattaaatcggccaaagatctggtgggcgggaaagacaagccggtcatcgaccagtcggcagccggcccgcaggggcctctggatgacacgttcggaccactgctccagctgatggggaaaaacacgggcagcaacgtcatgtcggccgatagcaccctgagcctgcaaacctatctgacccgtatcacccgcgtgcgcctgcgcctgcagcaggttgcgaatgcctccgatccgcaggagatgatgcagaccctggcgcagaccgtcttcctggggaaaagcgtcgacctgaccgacacgcaacagtacggtagcctgatttcggcaagccttggcgaagagtggagtggcttcggtaatactctgtttgtgcagccgctgactcaggcctgggaaaccgtgcttctgccgtcggcggccagtctgaatgataaatggcgccgttcggtggtcgccaactggcacaccgcctttgacggacgctttccgtttgccgccagcaaaagcgatgcctccctgccgatgctggctgagtttgtgcgcaaagacagcgggcgaatcgaacgttttctcacgacggagctgaacggtgtcctgcataaagaaggcagtcaatgggtgccggataaggtcaacagtcacggcctggtctttaatccggcctttctgcgcgcgatcaaccagctaagccagctgtccgacattcttttcaccgacggcagccaggggatcagctttgagttacaggccaggcctgccccggaggttgtcgagacacagctgacgatagacggccaaaagttgcgttatttcaatcagatggccgactggcagactttccgctggccgggggagacgtataaacccggcactctgctgacctggaccaccgtcaatgcgggcacgcgtctgttcggtgactacagcggtacctggggctttattcgctggctggagcagggtaaacgccatccgctggatcgcagccagtggatgatgagcttctccgccccggatggccgcaccctgcagtgggtattgcgctcccagcttgggagcggcccgctggcgcttctggcgctccgcggattgaccctgccggatcagattttcactgtcgatgcggctgagagcgcacaggccctgacgacgggggtagggaatagtgacatggatgagatggaataa

SEQ ID NO: 211731 - DNA, 1140 bp, Klebsiella pneumoniae
gtgaggccggtaccggagtatcccccgtacggagacgcgcgaccgcctggtacggccaggtggctatcggcttcggccctgctggtcctgcttagcggcggggtcagcgctttacttgcctcgtcagaagggaaaagcgccctggccgccaccgggatcctgttggctctggtgctggcaggtaccggctggttgatccggctgctgtactaccgcatgagcgtgcataacgccaggttctatgaccaactggtggcatacgaacaacagcaatggtgggcggagcatcggcagccgatcgggttacaggaaggtctgttactggggcccatgggcaaaacgaccactgactggctgcgggtgctaagccgtcaccagcgtccgccagaggaagagaacgagggcggcggcagggcgctgcgagcgccatacctttcagtttctgaggctatcgcccgcgaaaaacggctggcggaactactggtgatggaatggcaacgacagcgcagtgaaagaacgcttacgccgccgctgcgttgctactggcagggaacggagctcgcctggcaggcgtttcgtgcacagatgaccctcactgttgcgcagatgacactaccctcacgcccggatgcctggcgtggggaggccagcctcgcggagatagcacacgctctggcggaagctgacccccatgacactgtgcttatcgccggatgtcaggtggttgtcgcccagccgggggccgtgcaacccgccggagagtctgcggtactgtggctcgccggacgggacggtccggtgcacctgaccaggggggaaacctattgcgcagaaaaaggggaggccctgactgctgtagccgctcgtgtgctggagcagaacgaactgagcggccccccggaagcctgtgcgctgttttttcagccgggactggaagcgctggcgcacagcggatgggatattaacctgtatcgccaggatgcctgttggggagacatcggcgagatggaaggcttgaccgttctgtcgctggcggcgatctacgccgcgcactaccaacaaccgtgtggctggctagcccgcgatcccttgaataccctcgcaattggaattgtaaaacctgatggacaacgtcaataa

SEQ ID NO: 211732 - DNA, 258 bp, Klebsiella pneumoniae
atgaataaagtcattcgcaaaggcgataccctgcgggagtatgggggcagggtgctgatggggcattatcagtgttttggtctggggttcgcctgcaagggcgacccggtcaagtgtaacaaacacggtatgacgaccattgctgaaggcagcgcacgaacaacgattgatggccagccggttgcgctgcacggtcatcgctgcgcctgcggctgcacgctggtcagctctaacccagactgcggggttgatcagtga

SEQ ID NO: 211733 - DNA, 2418 bp, Klebsiella pneumoniae
atgtccgaaataactgaaacccatgccgcctgggtcccgccgccgtttccgccgcagggacgtctgccgggccgggcgctgcaggttgggcagaactgccatcagcagaacagcgacgagcggcgctatcatcaggaactgtgcctggctgccggacggcgcgtggatccgccgtgctgcaagacgctgcatatcagtctgtttttcgatggtaccggcaataacttaaatcatgacttttttatcgcgaacccgaaacatccgaccaatatcgcccggctgtttcgggcgactattggaacgggtacggctggcggggtgccgtctgacggtcagagtgagctgtttgatgatgacgccgagggggacgggaaatattttaaattctatatgcctggcgttggcacccccttcccggaagtgaatgacccggactattccaccatgggtctggtgggggcagttaagggggaggatcggattaactgggcgctgctgcggataatcgatgtgctgatgtttagtgccaccaaaaaatggctgaccaccacagagagtcgtcgttcactgaaagaaatgagcaccagctggaaccggctgtggtttggcggcagccataaccgctatgaagagttcactcgtttgctgaatgatttggcctctgatttgaagcccctgattattcagcctgagccgggcaagccgaaactgacaggcatcaagctgtatgtctatggtttttcccgcggcgcggcagcggcgcgcacctttgtgcgctggctgagcgaactgctgcccccgccggcggcggagggtgaaaaaccgccgcagtgcctgcagacaggcgggatgcggctgcccgtcagcgtggagtttctcgggctgctggatacggtggcctccgtcggggtggcgcatgtggtgccggttgccgacgggcatatgtcctgggcagacggcacgatggagctgccggatgatgaaacctatggcgggctgataaaaaaatgtgttcatctggtctccgggcatgagcagcgtctctgctttccgctggactcggtgcggcgggcaaacggcaaatacccgccctgtgccactgaggtggtttacccggggatgcactcggatattggtggaggatatccgccgggggatcaagggaaagcgaatggtaaagatgatgcattattgctgtcgcagattcctttgaacgatatatataccgctgcttttagcgcaggggctccattaaaagtaccacaggatacgctgccagagttttttaaaaatgatgcctggagaaaaatgccattagatttgttagatgcgttttttgttgatgaggctctggtcaaccgcttcaatgcctggcgcgaactcactctgggccaaaccacgccgaaaacgttcgatcccgaagcagcctctcactacgaaccacctgccgccggcggcagtctggaaaccgtcattgctgagcagatggcctggatcaccgcctggcgcatcgaccgctatgccagaggctcgatgctgaaaacgcccttctatcagcgcgccaagaataccgacgcgctgcctgccgcgcgtaaggcggcagaagaggttcgtgatgaaaaacaggcggcggtgctcagggctcgccagaaccagatagcaaaccagccccctgacaggatggatgagctggttttgcagccgggcgtgaaggattttgacccaaagatggatcaaacccagctgttcgacgcggcgaaggagttcggtaaggattaccacgacggttaccgtattccggataacctggcgcagctggtgctggataccgtgctgcagccggtgattttcgttctcaataccgatgatgaagcgcaggaataccggcgcatgaagcgtgacggagaggcccgggtggtcgtcctgttcccagaggccggggaggccagcaacgcggaacagcctgccgggctggtgagggcgctgtttgatgaccagatacatgactcacgcgcctggtttatgtatgccgcgctcggcacgcgcgagatgtggaccggttacttccgctaccggatgatttacttcagcgagcgctgcagtaaaccgctctcgccgctggtgctcgccggagacctggtgggttttgcgaccgtgaccgcgggtgtcgtgctcagtttccggcaaaagcgcctgaccggcaagctggccgggctggctgcgacaggcgccgtgcgctcgctggaggtggcggtgctggacaagataaccggggaagcgctgccggagctgcccggaggggcgcagctgcgggcatttacccacgagccgggaaccgttgtcgcacagcaaaaggcgcggaaagcggaagagcagctggcgcgggggcaagccgcgctgccggccagctggctgtag

SEQ ID NO: 211734 - DNA, 531 bp, Klebsiella pneumoniae
atgaaatctgcattaatcagcccgctgctggcgggtctgctgctgttaaccggctgtgcacagccagccgcacaggccggaggcggcggtggcggcacaataaaagccatcaaccacacaaaatgggcaattaaccacttcagtgtcaacggccagtcgggcatcgattcaataggcccgttccaggggggaggtggcgggtgctgcttcagcgtgcccgcccgctggacgccgggtatgacggtgcgcgttgaatgggaaaccgggcagggttcatccgcgggtttcccggggtttgccgatgaggcgaaataccttgcctggaaaaaagggattgatgcccaaaaacgccagcacagccaaaccgttccgctgcccgactataacggccaggatgtgtgcggcattacggtgcactttttaccctgcgatgacgtgaaagtgaccaccagctgctggtcaccgagaaatgcgaattatccgataaaagagcccgtcaggatgaaggagcccgccgtatgtccgaaataa

SEQ ID NO: 211735 - DNA, 210 bp, Klebsiella pneumoniae
atgaaaaacgtaaaattactcgccgctgccggtatgctctccctggtctctttcgctagcttcgctcatccggtgagcgtgacagcagacaccctggacagcgcagaagcgaaaatcgcaaccattgcgaaagaacaaggcgcttcctatcacattaccgaagcgtacaccggcaaccaggtccatatgaccgccgagctgtctaaataa

SEQ ID NO: 211736 - DNA, 897 bp, Klebsiella pneumoniae
atggcttttctctcacgtaatctgattctcgacctgctgctcaccgcgctggcgcccgctatctgggggacgacctacatcgtcacctcccagtttcttccccctgaccgcccatttattgctgcgctgctgagggtgctgccggcaggtatcgccctgctgatctggagccgtcgttttccgcaacgcggcgaatgggcaaagctgatcgttaccggcatcttaaatatcggcgcgtttcaggcgctgttgtttatcgccgcctatcgcttacccggcgggctggcggcggtgatcggcgcgatccagccgctgctggtgatgctcctcgcctggtgtgtcgaccggcagcgctcgccctggctggcggtgttctccgccatcgccggcatactcggtatggccatgctgctgctgtcgccgcacaccgtactcgacccgctgggcatcggcgcggcgtttctcggggcgatcagtatggcgctgggcacctggctctcccggcgctgggcgctctccctgccgatcgtcgcgctgaccggctggcagctgacgatcggtggggtggtgctggccccggtggcgctgatcgttgaccctcctttgcatcaggtaacagtgctgcaggcggccggctatctgtggctgtgcctggcgggcgccatgctggcctatggcctgtggtttcgggggattggccgcctctcaccggtggccgtgtcggcgatgagtctgctgagcccggtgaccgccgtggtactgggatggatattcctcggacaaaagatccaggggatggcgctgatgggattgatcgtggtgctggcgagcgtgctgtctatccagcgcgcgctggcgcgtcaggcggcgggagcaaaaacgaaaaaagccccgtaa

SEQ ID NO: 211737 - DNA, 507 bp, Klebsiella pneumoniae
atggacaaatcaccgccgatcgacgccgtggatcgcatcctcgcccagtggcagcgggagcggccagacctcgactgcagccccatggggccgataggtcgcctgaaacgatgcgctatgctgctggagccgcaggtggaagtggcctttacgcgccacgatctggtgcgctgggagtttgacatgctggcgacgctgcggcgcgccggagcgcctttcgtactttcgcccacccagctcttctccacgctgatgattacctccggcaccatgacccatcgtctgaaggcgctggagaaacgcgggtttattacccgcctgcccaatccggaggatgcccgcagtatgctggtcgccctgacttccgccggacgcgaacggatcgatgccgcagtggaaacccacgtcgacaacgaacggcaactgctggcaggactcagtgacggtgaacgccagcagttggatcaggcgctgcgggtgttgatgcgactgctggaaacgggctaa

SEQ ID NO: 211738 - DNA, 957 bp, Klebsiella pneumoniae
atgacgactccgattgcgctccgcgactggcgcctgctggcggccgggtgcggcggccttctactgctggccgccgctatcaccttgcacagccactggggtgactttctccagtggtgtctcgccacccaaattaccctgcatcgctatctggtgatgtaccttctgttgctgaataaccatcagtacagcggcggtatctggctgctggtgggggcctttctctatggcgtgctgcacgccgtcggaccgggacacggtaaatttatcgtgacgacctacctgagcaccaatcaggagagcctgacggcggcgcgggtggtgccctttctcggcagcctgttacagggcgtcactgcgatactcttcgtctttattcttgcggtggggctgaatctggccgccggctatcttagcgccagccgctggtacgtcgagaagatcagcgccctgaccatcggcgtctttggggcttatgttatctttcgcgctctgcaaagcctgtggccgacaaaacaggtgattcgccgtctgacgccagcgcatcagcatgacgcctcgtgcggctgcggccatcacggcgtggggcaggatctgcagggcgctgactggaagacgcgccttggcgtggtgctggctatcggcgttcggccctgtagcggggcgatcatgattttattattcgccaatgcgttggggattgttagctggggcatcgccgcggtgatgagcatggcgctgggcaccgcgctctcgatcctcggtctgtcgctactggttcactatgcgcgccatcggacggtcaaacgattggccacgaatcaccgcccgcggccctggctggtaccgttggtgaagatcctcggcggtctggcgctgatcctctttgccgtgggattgtttttcagcgtggtgccgatcagcgccaacggcgactttatcgccgctggctgttag

SEQ ID NO: 211739 - DNA, 606 bp, Klebsiella pneumoniae
atgacgaataacgccgacataaaaaaaaggaacttcctgactcagaatgaaattgagtctttacttaaagcggccgataccggtccttatgctgcacgtaattattgcctgacgttactgtgcttcatccatggtctgcgcgccagcgagatctgtcgtctacgaatatcggatatcgaccttgctgcccgatgtgtttacatccatcggcttaaaaaagggttttcgactacccacccgttgctggataaagagatctacgccctaaagcgctggctggccattcgcagcagctggccgcaggccgccagcgaatggctgtttctctcccgcaaaggtaatcccctttcccgccaacagttttatcagattatcgcgtcctcagggggactggcagggctgccactggagatccacccgcacatgctgcggcactcctgtggctttgcgttggcgaatatggggatcgatacccgcttgatacaggattatctcgggcatcgcaatatccgccacaccgtctggtataccgccagcaatgcgggacgcttctatggcatctgggacaatccccgtgacaaacagcgatcgtcgctgatccaatag

SEQ ID NO: 211740 - DNA, 609 bp, Klebsiella pneumoniae
gtgaaccgacgtcgttttctaaccgccaaagaagttcaggccatgatgcaggctgctcgtcagggccctaccggcgaacgggactactgcctcattctgctggcctttcgccatggtatgcgcattagcgaactgctggatctgcattatcacgatctggatctccatgaagggcgggttaatgtgcggcgattaaagaatggtttttcgacgattcatccactgcgttttgatgagcgcgaggcgattgagcgctggagcctggtccgtgccggctggaaagcggcggacaaaacggacgcactgtttatctcccgccgcggcaccgcgctctcccgccagcaggcgtatcgtattattcgctctgccggggaaaatgcgggtaccgtcacgcacactcacccccatatgctgcgtcacgcctgcggctatgaactggctgaaagagggacagatacgcgtttgatacaggattatctaggacatcgtaatattcgtcacacagtacgttacaccgccagtaatgcggcacgtttcgctggcatctgggaaagaaataatcttttagaggaaaaagaccagaagacgaaaaatgaaataacagattga

SEQ ID NO: 211741 - DNA, 549 bp, Klebsiella pneumoniae
atgaaaatcaaaacactggcaatgattgttgtgtcagccctgtcactgagctccacggcagctctggccgataccaccacggtcaacggcgggaccgtgcattttaaaggagaagtcgttaatgcggcctgtgcggtggatgccggctctatcgatcaaaccgttcagttaggccaggtgcgttccgcgaaactggccacggcggggagcaccagttcggccgtcggtttcaacatccagctggatgattgcgacactacggtagccaccaaagcgtccgtcgccttcgccggtacggccatcgacagcagcaataccaccgttctggccctgcaaaactctgccgctggcagcgcaaccaacgtcggcgtgcagatcctcgacaataccggtacgccactggcactggacggcgccaccttcagtgctgcgaccacgctgaatgacggccccaacatcatcccgttccaggcacgttactacgcgaccggcgcagcgacggctggtatagcgaacgcggatgccacgttcaaagtgcagtacgagtaa

SEQ ID NO: 211742 - DNA, 537 bp, Klebsiella pneumoniae
atgcagggaatgaaatctggtctgctgctgctactgcctccgctggcgctggccggtaatcattggaacgtcacgctgccggggggcagcatgcgttttcagggcctgataatggcgagctcctgccacgtcgaagccggcgatcggcagatgacggtcaatctggggcagatcagcagtaatcgatttcatgctgtcggcgaagacagcaacccaatccctttcgcgattcatttacaggattgcagtacggcggtcagccagcatgtgggtgtgacctttcacggcgtggctgatggaaaaaaccccgacgtgctgtcggtgggtgaaggtccggggatcgccagtgggatcggtattgcgctattcgacagccagggccagcagctcccgctcaatcgtccaacggatcgctggatatcactctaccgcggacggacgacgctaaatttcgtcgccaaatatcgggcgaccggacgccaggtcaccggcggtgcagccaatgcccaggcctggttctcattgacctatcagtaa

SEQ ID NO: 211743 - DNA, 705 bp, Klebsiella pneumoniae; identical to SEQ ID NO: 137021

SEQ ID NO: 211744 - DNA, 2613 bp, Klebsiella pneumoniae
atgtcacatcggaaatatggactggatcatttaggttgccgaactgcccggcgcctggtatctccggcgctggcgctgtggctctgctcacagccgtttgccgcgcgggcggacctctattttaacccccgctttttagctgacgatccggcggcggtggctgacctgtcgggatttgaaaaaggccaggaggttccgccaggcacctatcgcgtcgatatttatctcaacaatggttttatgaccaccagggacgtcaccttccaggccgatgcccagggtcacggtctgtccccctgcctgacacgcggccagctggcgagcatgggtgtggataccggtcgggtgccgggcatggcgacgctggacagcacggcctgcgtgccgctgaccacgcttatcagcgaagctaccacgcgcttcgacgtcggacagcagcgcctgtacctcaccgtcccccaggcatttatgggtaaccatgcgcgcggctatattccgccggagctgtgggataacggtatcaccgccgggctgataaactataacttcacgggcaataacgcccataacaccacaggtggcagcagccgttacgcctatctgaatctacagagcggcctgaacattggcgcctggcgtctgcgcgataacagcacctggagctacagcagcggcggtagcacctcatccaacgagaatcgctggcagcacgttaacagctggcttgagcgggacatcacgcctctgcgttcgcgactcaccctaggggacagctacaccaacggcgatgtcttcgacgggatcaacttccgcggcgcccagctggcctccgacgacaatatgctaccggacagccagaaaggctttgcgccggtgatccacgggatcgcccgcggcacggcgcaggtgtcaatcaggcaaaacggctacgaaatctaccagagcacagtgccgccgggaccatttaccatcgacgatctctacgccgcgggcaatggcggcgatctgcaggtcacgatcaaagaagcggatggctcccgccaggtcttcagcgtgccctggtcaacggtgccggttctccagcgtgaaggccatacccgcttcgccctcaccgccggggagtaccgcagcggcaacagtcagcaggaaacgcccgattttttccagggcacggtcatgcatggcctgccggcaggctggacgctctacggcggcacccagctggcagaccgctatcgcgcctttaaccttggggtggggaaaaacatgggctatttcggcgccctgtcgctggatatcactcaggccaacgccaccctggctgacgacagcgaacatcaggggcagtcggtgcgttttctctataacaaatccctggatgagaccggcaccaacctgcagctggtgggctaccgctactctacccgcggctattataactttgccgataccacttaccgccggatgagcggctacagtgtggaaacccaggacggcgttatccaggtaaaaccgaaatttaccgactactacaatctggcttacagcaagcgcggcaaggtgcagctgagcgtgactcagcagttggggcgcaccgccaccctctatctcagcggtagccaccagacctactggggcaccgacgatgccgatgagcagctgcaggccggcctcaacgccgccgtggacgatatcaactggtcgctaagctacagcctgacaaaaaacgcctggcagcaggggcgcgatcaaatgctggcgatcaatatcaatatccccttcagccactggctgcgttccgacagccgctcggtctggcggcacgccagcgccagctacagcctgtcgcacgatctcaatggccgcatgaccaatctggcgggcctgtacggcaccctgctggaagacaacaacctcagctatagcatgcagaccggctatgccggcggcggcaacggcgacaacgggagcacaggctacaccgccctcaactaccgcggcggctacggcaacgccaacgtcggctacagccgcagcgatggctttaaacagctctattacggggtcagcggcggcgtgctggcgcacgccaacggcatcaccctgagccaaccgttaaacgataccgtggtgctggtgaaagcccccggcgccggcggcgtgaaagtggaaaaccagaccggggtacgcaccgactggcgcgggtatgccgtcctgccttatgccactgagtatcgtgaaaaccggatcgcgctggataccaacaccctggcggacaatgtcgaccttgacgatgcggtggtcagcgtggtgcccacccatggggcgattgtccgcgccaactttaacgcccaggtggggatgaagatcctgatgacgctgacccatcgcggcaaaccggtgccgtttggcgccctcgccaccggcgacagcaaccagagcggcagcatcgtcgcggacaacggccaggtctacctgagcgggatgccgctggcgggcaaagtgcgggtgaaatggggcgatggcccggacgctcagtgcgtggccgattaccgtctgccgccggagagccagcagcaggcgctcagtcagctttcggtcgcgtgccgctaa

SEQ ID NO: 211745 - DNA, 528 bp, Klebsiella pneumoniae
atgagaacactgcagtatctgctgggcgccctgttcaccctgggcgcaccggctgcgcttgccgccgatagcacgatcgccatcagcggctatgtccgcgataacgcctgcacggtagccggcgaatcgaaggattttactgtcgatttacaggataacgccgcgaagcagttttatgccgttggggcaacgacgccgccggtgccgttccgcatcgtgctgtcgccctgcggcacttccgtcaccgcggtgaaggtcggtttcaccggcgtggcggacagcgtcaacaccagcctgttaaaactcgatgccgggacctcggcggcggcaggaatgggggtggaaattctcgatcagcagcagtcccggctgccggtcaatgcgccgtcatccaccatgacctggaccacgctgaccccgggccagaccaatattctcaacttttacgcccggctgatggccactcaggtgcccgtcaccgccgggcatgtcaatgcgacagcgacattcaccctggaatttcagtaa

SEQ ID NO: 211746 - DNA, 501 bp, Klebsiella pneumoniae; identical to SEQ ID NO: 137025

SEQ ID NO: 211747 - DNA, 909 bp, Klebsiella pneumoniae
atgatgaaaaaaataatccccctgttcaccaccctgctgctgctgggctggtcgatgaacgcctggtcctttgcctgcaaaacggccaccggggcgacgattcccatcggcggcgggtcagccaacgtctactttaacctgaccccggcggtgaacgtcgggcaaaacctggtggtcgacctctccacgcagattttttgccataacgactatccggaaacgatcaccgactacgtgaccctgcagcgcggatccgcctatggcggtgtgctgtcgagtttttcaggcaccgtgaaatataacggcacctcttacccgttcccgaccaccacggaaaccgcgcgggtgatttatgattcacggaccgataaaccctggccggccgtcctgtatctgacgccggtgagcactgccggtggagtggccatcaccgcaggatcgttaatcgcggtgctgatcctgcatcagaccaacaactacaatagcgactccttccagttcatctggaacatttacgccaacaacgacgtggtggtccccaccggcggctgcgatgtctccgcccgcgatgtcaccgtcaccctccccgactacccgggatcgatggccgtgccgctcaccgtccactgcgcgcaaagccagcagctggggtattacctctccggcaccaccgcggacagcgccaacgcgatcttcaccaataccgcctccgcctcgccggcgcaggggataggcgttcagctgacgcgcaacggcagcgccgtcccggcgaacagcacggtctcgctgggcaccgtcggcacctcgccggtcaacctcggcctgacggccacctatgcccggaccacaggccaggttaccgccggcaacgtgcagtcgatcatcggcatcacctttgtctatcaatga

SEQ ID NO: 211748 - DNA, 1323 bp, Klebsiella pneumoniae
atgatgaccgattatatcctctcgccctgctcgctggccgcccgcgggttgagccagctgatgctgaacgccgcgaagcggcccgttgagctgccggtcgagggcgtgtccctgcgcgaactggccgccgtgaagcggatcgtagtgtatctccctgacgatcccctgtggatgctcaccacgctgcgccaggcggcaaggctactcgacgaggccttgccgccgttaccgatgttgattctgagccgcagcccggccatctggctgtggcaaacgctgctctatcaggtgagtcatccggatcgtctgcgcaacgtccatactgcccccgccgatctgtcctgcgcggagctggcccatcggctggagaatgcgccgcggcttgagcggcttgccagcgaagccgccctgatccacggaaaacgggtcgtcgggttgacccacgccgagctcaaggtgatcctcgccctgctgcaagggcagacgataggcgagcaggcccaacgtctcggattgagccagaaaacgctctacacccagcggctggctggggtgaaaaagctggtggaatgtcatccgcatctggccccccgctttccgcgcacgctgctgccgcgctcacccgcaaacgcactgacggcgtttgaacaggaatgggtacaagcgattcacgatcgccaggtcttcccggtttttcaacctatcgtcgatagtcgctcacagctacagggggtggagatcctgatccgctggcgccaccgcggccaggtacttcacccccagacctttctaccgcacttccgcgccgactacacctggctactgcttacggcctttgttctgcaggaggccgtgcagaatattaatgagtatccaggcaccttctatttttcggtcaacataccctcctcactcgccgacagtgacagcctgctgcggatggtggaagccgctcgccagcagcttcggcagccagagggcgtggcaaggctggtgctggaatatgctgaaactatcgattttcgccatcagagccgctccgccgcccacgtggcgcagctgcaacgtgctggcgtgcgcgtgatgctggacgactgcttttctcaggggagcgttatctttccggcgcgtcgactgcacttcaatgcgtataaactggatatgagcatcgtcaacgacgcccagcacgatccgaaggcgcttgcgctaataaaaagcctggcctactactgccagttaagcgacagtcgctgtgtggcggaaggggtggattcactggcgaaatttacgcagttaaaatcgctggggattgatcgcttctag

SEQ ID NO: 211749 - DNA, 273 bp, Klebsiella pneumoniae; identical to SEQ ID NO: 137028

SEQ ID NO: 211750 - DNA, 231 bp, Klebsiella pneumoniae; identical to SEQ ID NO: 137029

SEQ ID NO: 211751 - DNA, 273 bp, Klebsiella pneumoniae; identical to SEQ ID NO: 137030

SEQ ID NO: 211752 - DNA, 1026 bp, Klebsiella pneumoniae
atgacaacttcccgcacttccctgttacgcaaaaagtggcctctgctggcgctggtccttgccgccatcctggcgctgatcctcgttatctggcagttgcaaacctcgccggagaccaatgacgcctatgtctatgccgataccatcgatgtagtgcccgaggtcagcggacgcatcgtggagatgcccattcgcgataaccagcgggtgagaaaaggcgatctgttgttccgcatcgacccccgcccctatcaggcaatgctcgatgacgcgaaagcccggctgacgaccctcgacgcgcagatcatgctgacccagcgcactatcaaagcgcaggagtataacgcccagtcggtggcggccgccgtcgagcgcgccagagcgctggttaagcagaccacctccacgcgtatccgccttgagccgctggtgccgcaggggttcgcttcccaggaagatctcgatcaggcgcgcaccgctgagaaagcggcgcgggcggagctggaggccacgctgctgcaggccaaacaggcctcggcggccgtgaccggcgtggatgccatggtggcgcaacgcgccggggtcctggcgcaaatcgccctcgctgaactgcatctggaatttaccgaagtgcgcgcgccgttcaacggcgtggtggtggcgctgaaaaccaccgtcggccagtacgcctcggcgctgaagccggtcttcaccctgcttgatgacgaccgctggtatgtgatcgcgaacttccgcgaaaccgacctgaacaacgtgcgccccggcgtggcggcgcggatcaccgtgatgaccaaccacaaccggacctttaacggggtggtggattcggtcggctccggggtcctgcccgaaggtgggagcgtcatcgaagggctgccgctgatccagaaaagcattaactgggtccacgtctcgcagcgcttcccggtgaaaatcgccgtcagcgatcccgacccggaactgttccgcatgggcgcctcggccagcgccgtgctgcagccgtag

SEQ ID NO: 211753 - DNA, 1938 bp, Klebsiella pneumoniae
atgtttcctctcgcccattttttacgccaggaactgcgcgacgcgccgggacgcgccagctacacgctgcgcctgacgctaagctgcgcggtgctcatcaccctgtttatgaccctgcagatccctttcctggccgttgcgctgatcgtcgtgttctacgtcagccagcctaacgtgttgatgattaagctggtcagcgtggtcttttttgtcaccgtcaccgtggcgctcggcggcgtgctgctgatcatcaagtggacctatgactacccgctgatccgcctggcggcctccgtggcgctctttttctgcgccctctatctgatgcgggtgctgggcaagctgggactggcctttttcgtggtggcgctggcggtgatttacgctcagaccttcccgtcgatgaccagccagagcgagatcctggtgcggctgctgctttggctgtgggtggcgattaacaccgcgatcctcgtcaccctgctggtcaacgcctgctttcagcaggcctttcccggtaaccagtttaaggcgcgcctggccgggatgctgcacgaggtcgcccggcggctggcggccccggacgctgaagcgccaccgaccttcggcgagaccgccgcgcagttcaatcagctgcagtcgctgttcgcccaggccagccgggcgacaccggagatcgccgccgatcccctggcctggcgctcgcggctggccgccactttgcgctgctaccagctggcggccctgctgcaagcagacgaggcggatagtgacgatcgccagcagctgtcgcaggcggtacttcagctgaagaacgcccttagcgaggagccgtttgacggcgctattcctcccctgacgctcagcggtcgcggcgtcaatcgcgctgttctgcaggagatggctaccactctgcagcggctggcgcagggtgagccggttgccctgccgcagggtgaggtggagaaggcgcccctgctggcgccggacgcctggcgcaacccggcatatctccattttgcgctcaagaccctgctggcgaccctaatctgctatgtcttctataccgctgccgactggcagggtctacataccattatgctgagctgcgtgatcgtcgcccagcccgggctgggcgccacgatgcaaaagacatggctgcgcatcggcggggcgctgctcgcctccctgctggcgctgctgttaatcgtctttgtccagccctggaccgattcgctgacgggcctgctggcgatgtccctgccggtgctggcgctggcggcgtggattgccgccggctcggagcgtatcgcctacgccgggatccagattggtttcacctttgcgctggcctttctcagctggtttgctccgctgacgaacctcaccgagctccgggatcgggtgctgggcatcctgctcggggtgctggtctcctccattgttcatttgtatctctggccggacagcgaagcgccgcagctgaaaacccgccttgcggcactctatcgccggctggcggactgcctcgccgccccgaaggaggcggttccgctggctcccctgcttgtcgccttcaccgacagcgaagcgctgatccaccgggttcgcgccgaaccgctgggcacgtatgctcacccctggccccaggcgaaagactggccgatgcgcgccaccctcgcccaggccgaggagatcgcccgcctcagcgaaggctaccgactcaacgccgcgccgggagacccgaccctggcccgctgcgccgaacagctgcggcgctacgctgaacgtatcgaacaggaggcgacggcgcctggcgaacagctgaccgccgaactgactaacccctttggcccggcgctggccgccgcgctggccgccctgcccgactgggggccgacaccgatagcgactgagcaacaggctaaaacgtcatga

SEQ ID NO: 211754 - DNA, 1449 bp, Klebsiella pneumoniae
atgatgatccttcctttctccgcgcgcctgcgcggcactctttttaccctgacgctgacgttgctcagcggctgcgcgctgatccaggatgagcctgcccaggtcgccatcgtcaatccgcagcaggcccagctggcgcaggtgatccacctggcgaacagcgactggccggccgcccgctggtgggaggcctatgatgatcctcagctcaatatgctgatcaaccgggcgctgcagaactcgccgaccatgcaggccgcccggctgcgcatctcccagtcgcagtccacggtggaactcgcccggtcggcgatgggcctgcaggctaccgccgtcgcggcgcaaaaccgcctgcggatcaccgacaaatcctttagctggccctactcatactccctgccggtggataaaaacggcccctggtatacgctgaataccgttggcgtcggggcgcagctgaatatcgatctctggggggccgatcgcgcccgggtcgccgccgctattggcgagaaaaacgcccggctggcggagaccgccggcattgagctcgacatcgccagcagcgtggcgcagctctatttcgccatgcaggcgacgttccagaaaatcgcgctgctgcaggagctggagggcattgcccgattctcggtggaagcccacgagcaccggacccggcgcggtctggaagacagtgtggatgtggccaacgcccaggccgaacagctcgccgctcgccagcagatcattagcgccgaggggatgctgacccagtatcgtgaaaccctgcgggcgctgatcggcgccgatgcgcagagcatgccggccatccatccggtggcgctgccggcgctccaggagacgctgccgccgtcgctctctttcgagctgctggcccgccgtccggacctgcaggcgctgcgcggctacgtcaccgcctccctgagccaggtcgatgcggcgaaagcggccttctacccccattttgatatcaaagcgttctggggctataacgccctgagcgtcggggatctgtttaagtcctctttccagcagatcaacctgctgcccgggctgtatctgccgatcttcgacggcggccgtctgaacgctaatctgcagtcggtacgcaccgccagcaacatcctgatcaaacagtacaaccaggcggtgctggatgcggttcgcgatgtcgccatcagctccagccagcttaacgacctgaatcagcagcgcgcgctgcagcagctaaaagtcaccgcggcgcagaccaccaccgatagcgctcgcgctcattatcagcgcggcctcctcagccgctacgccgccgaagaagcccgccgggcggtcctcgcccagcagctgttgctgctggacattgaggcccagcggctaagcaccgacattaccctgatcaaagccctgggcggcggctatcgagggcagtaa

SEQ ID NO: 211755 - DNA, 300 bp, Klebsiella pneumoniae
atgccagcagtcattgataaagcattggatttcatcggtggtatgaatacgtctgagccagtaccacagtctatggatgaaagtaccgcgaagggaattctcaaatatttaaaagaactgggcgtacccgccaccccggccgacgtcgctgcgcgcggccaacagcagggctggagcgctgggtttaccgacaaagtggcggagtgggctgaacgggtcgccgccggcgaacggctggtgattaagcatccggaattcttttccacctatatgcgggaagagctgcgcgccctggtgtaa

SEQ ID NO: 211756 - DNA, 1554 bp, Klebsiella pneumoniae
atgcattcctctgttaataaaaacgaaagccgtacctttttcggccatccttatccgctgggctccctgttcttcactgaaatgtgggagcgcttctcgttttacggcatccgtcctttactgatcctgtttatggcggcgacagtgtacgacggcggcatgggcctggcgcgagagaacgcctcggcgatcgttgggatttttgccggcagtatgtatctggccgcgctgcctggcggctggctggcggataactggcttggccaacaacgcgccgtctggtacggctctatcctgatcgccctggggcacctgtcgatcgctctgtcagcatggctgggcaacgatctgttctttatcggtctgatgtttatcgtcctgggttccgggttgtttaaaacctgtatctcggtgatggtcggcaccctgtataaaaagggcgacgcgcgccgcgacggtggtttttcgctgttttacatggggatcaacatcggctcgtttatcgcgccattgatctctggctggcttatcaaatcgcatggctggcactggggcttcggcatcggggggatcgggatgctggtggcgctgatcattttccgtgtctttgccgtaccgtcgatgaagcgctatgacgcggaggttggcctcgattccacctggaacagcccggtggcgaaaaagaatggcgttggagcgtggctgctggcgctggctctgggagtggcggtgctggtcacgcttatcagcctgggcacgatcgtgattaacccggtggcggtggccagcgtgctggtctatgtaattgccgcctccgtggcgctctatttcatctggctgttcgtcttcgccggactcaaccgtaaagagcgggcgcgcctgctggtatgctttattttgctggtctcggcggcctttttctggtccgcgtttgaacagaaaccgacctccttcaacctgtttgctaacgactataccaaccggatgatcggcgattttgagatccccgcggtctggttccagtcgattaacgccttgtttatcattctcctcgcgccggtattcagctgggcgtggcctgcgctggcgcgtaaaaacgttcgtccgggcagtatgaccaaattcgtgattggcatcctgtgcgcagcggcgggctttggcctgatgatgctggcggcgcagaacgttctgagcaacggcggggccggtgtgtcgccgctgtggctggtgggcagcatcctgatgctgacgctcggtgaactgtgcctcagcccgattgggctggcgaccatgactctgctggcgccggagagaatgcgcggccagatgatggggctgtggttttgcgccagcgcgctgggtaacctggcggcgggcctgatcggcggtcatgtgaaggccgatcagctgtcgttgctgccggacctcttcgcccgctgctccatcgcattgctgatctgcgccgccgtgctggccgtgctgattgtcccggtccgccggatgctggagaacagtcggtccagcgccgcgcaaaaatccctcagcaacgcctga

SEQ ID NO: 211757 - DNA, 423 bp, Klebsiella pneumoniae
atgagcatcaccatttaccataaccctgactgcggcacctcgcgtaatacgctggcgctgatccgtaacagcggcgccgagcccaccgttatctattatctggagacgccgccgtcgggtgatgagctgcgccagctgctcgccgcgatggggatcccggtgcgcgcgctgctgcggaaaaacgtcgaaccctacgacgcgctgggcctggcggaagaccggtttactgacgaccagataatcgactttatgcttcagcatccgatcctgattaaccgtccgatcgtaacgacgccgcagggcacccgactctgccgcccgtcagaggtggtgctggagatcctgacggcgccacaaaaaggcgcattcgtgaaggaggacggtgagccagtcattgatgccgcagggcagcgtgtgaaatag

SEQ ID NO: 211758 - DNA, 1293 bp, Klebsiella pneumoniae
atgttgctggcaggtacgatttttatcctgaccctggtgctggtgatctggcagccgcgggggttagggatcggctggagcgcggcatttggcgcggcgctggcgctggccaccggtggcgtacaggtagccgatatcccggtggtatggcatatcgtctggaatgcgaccgccacctttatcgccgttatcattatcagcctgctgcttgatgagtctggctttttcgaatgggccgcgctgcacgtttcccgctggggaagaggccggggtcgtctgctgtttacctggattatcctgctcggcgcggctgtggcggcgctgtttgccaacgatggggcggcgctgatcctcacgccaatcgtgattgccatgctgcgagcgctggggttcagcaagggaacgatgctggcctttgtcatggccgccggatttattgccgataccgccagcctgccgctggtggtgtcgaatctggtgaatatcgtttcggcagatttctttgccatcggcttcagggagtacgcttcggtgatggtgccggtcgatctcgcggcgatcctcaccaccctggcgatgctgcacctgttctttcgcaaggatatcccgccggcctgggatatggcgttactaaaagcgccggccacggcgataaaagatccagcgacgttccgcaccggctggggcgtgctgctgctgttgctggctggctttttcgtccttgaaccgctggggatcccggtcagcgccatcgcggcgctcggcgccgggatcctgtttgctgtcgcgaagcgcgggcgggtaattaacaccggcaaggtgctgcgcggcgccccgtggcagatagtgatcttctcgctgggaatgtatctggtggtgtatggtctgcgaaacgccgggttaacggattatctgaccacggtgctgaacatgctggcggagcgcggcctctgggccgcgacgctgggcaccggtatcctgtcggccttcctctcttcaataatgaataatatgcccagcgtactggtcggcgccctgtcgattgatggcagcacggcaacagggacgatcaaagaggccatgatttatgccaacgtcatcggctgcgatctggggcccaagatcacgccaattggtagcctggccacgctgctgtggctgcatgtgctggcgcagaagcacatcaccatcggttgggggtattatttccgctgcggcatcaccatgaccctgccggtgctgcttgtgacgctggccgcgctggcgctgcgtctctccttcaaccagccatga

SEQ ID NO: 211759 - DNA, 330 bp, Klebsiella pneumoniae
atgtctttattgcccctgcaactgttcaaaaacctcgccgatgaaactcggctggggatcgtattgctgctcaaggcgcgtggagagctgtgcgtgtgcgatctctgtacggcgctcgcccagtcccagcccaagatctcccgccatctggcgatgctccgtgagagcggattgctgctggatcgtaaacagggtaagtgggtccattaccgcctctctccgcagatgccggcctgggcggcgcaggtgattgagcaggcctggctcagtcagcaggaggatgtgcggctgatgatcagcagactggctggcgggccgggttgccggtaa

SEQ ID NO: 211760 - DNA, 294 bp, Klebsiella pneumoniae; identical to SEQ ID NO: 138650

SEQ ID NO: 211761 - DNA, 573 bp, Klebsiella pneumoniae
atgcagccgtactttcactggatcaatgaacctgccgagtggcgccgcgattccgacggcctgacggtggtcactaataagcataccgacttctggcgccatacctggtatggcttcgagcgcttctctggccatctctatgccgcagaagtggcgggcgattttaccctgcaggcaaaaatctgtgcggatttcaccacgctttacgaccaggccgggctgatgatgatggccgacgagcagacctggctgaaggcgggaattgaattcaatgacgatgccccggccatcggcagcgtactgacgctaacccactccgactgggccaccgggcttttccccggcgacccgcgcaccttctggctgcggctgacccgcaagggcgacgcgttaaggctgcagtattcaaccgacggcgagcgctggccgctgctgcggctcggctactttccgccaggcccggtgaaagcgggcgtcatgtgctgctcaccggagcgtggcggactggcggttgcgtttcaggatattcagctttccccgccgctggacaaagcgctgcacgatctgagctga

SEQ ID NO: 211762 - DNA, 927 bp, Klebsiella pneumoniae
atgaataacgcgctttataatcagatacgcatctttcagagcattgcgcgcgagggcaatatctcggccgccgcgcgcaagctcgaaatcacgccgccgtcggtcagcaatgcgctcaggctgctggaggagcatattggccaccccctttttgtgcgcactacccggcgtatcgagctgacggaaaccgggcaacagctgctggagcagaccgccgcggcggtggagacactggaaaagtcgctggaaatcatccgcgaccagaatcaggagccctccggggcagtgagaataaccctctcgcgctttgcctacctgcttattctcaaaccggcgatggcggcattttgtcagcaatatccggggatccagctggaaatatcggtctatgacggtaccgtcaatattattgaagaacgtttcgaccttgggatccgctttggcgatattctcgaaggcggcgtggtcgcccgcccgttaatgaagccgtttcgtgaagggctatacgcctcctctgcctatcttgccgaatatggcgtgcccgcgatgcctgccgatctccatcatcaccggctgattggctatcgctttattaccaacaaccgcatcctgccgctgatcctcaatgaccacggcgagcagctcaccgtcgagatgcccggacagttaatcagcaatgatattgacgtcatggccgacggtattcgccacggactggggattggccgtttatttgaaccaatcctgcaattacagcccgatcgtgagcagtttattcccgtgatggaggactactggaaaacctatccgccggtttatctctattacccaaaaaacgcgggcagaacgaaaagggtgaaagccctgattgatttcctgataatgcatgccgcggatgatgcagagaaagtcgggtcttcccgctag

SEQ ID NO: 211763 - DNA, 309 bp, Klebsiella pneumoniae
atgcgaattttatgtctggatatccctgcccccggcgcgacgctggaacactatgcgccgcaccttaccgcagaagccctgcacgcctggggactgtacaagtcaggctttattcgcgacatctatttccgtcaggatcgacccggcgtcgctattttcctcgagtgcgacaccgtggaagaggcgaataatgtcatggccgaatttccgctggcaaaagcgggtctattaaccttcgagtgtattccactcggctcgtttattagctgggaaaatctcttctctgctgaatttaaacatcaggagtaa

SEQ ID NO: 211764 - DNA, 558 bp, Klebsiella pneumoniae
atggctcatattcttgtcgtttccgggcatccggatcttaaccattccatcgccaacgccaccatcctcgatgagctggcgaccgccctgcctgatgcggaaatccgtcgtctggactggctctatccggacggcaaattcaacatcgccgctgagcaggaaagcctgctgcaggcggatgtgattgtctggcagtttccctttagctggtatgggctgcccgggttaatgaaacagtggctggacgaggtatttgtccacggcttcgcccatggctcaacggcgaaactgggtggtaaaaagctgatcctctccttcaccacgggagcgccacaggcgctctataccgctgacggtttctttggccatgccattgaggagtatctccttcccttcgagaccacggccaggctgtgcaatcttgagctgctggcgccggtttatacctgcggtattagctacgccgaccgggatgcctacaaaatcgctcagcaaaaaacgcttgcccgggaacacgcggccagactgatcgcgcagcttaaaactctggtggaataa

SEQ ID NO: 211765 - DNA, 1020 bp, Klebsiella pneumoniae
atgcagtatacccggctcgggaagagtgacttactggtctcccgtatctgcatgggatgtatggggtttggcgatccgtcaacgggtcagcatcgctggacgctggacgaaacagccagccgggacatcatccgccacgctctggaacagggcatcaatttttacgataccgccatcgcctatcagaacggctccagcgaacggtacgttggccgggcgctgcgggagatggcaaaacgcgaggaggtggtgctggccaccaagtttctgccacgaaccgctgcccagattgccgaggggatcagcggaaaacaggcgatagcccgctcgcttgaccagagtctgcgaaacctcgggatggactacatcgacctctacatctaccacatctgggattacaacaccccggttatcgacgtgctggaggcgctgcacaccgcagtgaccgccggcaaggtgcgcgcgattggcatttccaattgctatgcctggcagttggcgaaggtgaacgcccttgccgaacgcgaagggctgacatcctttgtttctgtgcagagccactacaacctgattatgcgtgaagatgaacgagagctgttcgggctgtgcgcggaagagggtatcgccatgactccctatagcgcgctggccagcggccgtctctcccgcttagaaggccacacgcggcgagcggtggaagatgattatgcccggggcaaatacgacggcacggcagagcaggaccggatcattattgcccgcgtcgccgaacttgccgaacggcatcaggtctccatgaccgaaatttcgctggcctggctgctgactaaagtcaccgccccggtgatcggcgccacgcaaaagcatcatgttgacggcgcggtcaacgctgtagcccttcaactgagcccggaagacatccgttatctggaagaagcctaccagccgcacgttctcacaggcgtgatggcgcaaaacacgccgcaagccaaagaccatcatcaggtgtggacgcggtaa

SEQ ID NO: 211766 - DNA, 804 bp, Klebsiella pneumoniae
atgaaaaacgtgattgccgcggcagccttgtcgcttgtgctgtctgattttacttatgcccacgaacaaagagatgaagctatgatgaaaattaccccttccacccttgcggacgctgatattcaagcggtctccccggcgctggcgcgcttcggccgcgaggccatcagcaacgacctctggcaacgtgacgccctgtccgcccgcgaccgtagcatcgtgaccgtagcgatgctgattgcccgcaaccagccaggcgagctgaagcactatattgccgttgcgctcgatagcggcgtgacgccagcggaagtgtcagagatcattactcacctcgccttctacgctggctggcccaatgcgatgtcagccgtcagcgtcgctaaaaccatctttgaagccaggggcgtgacggcagaggccctgcccgccgcctcgccaacgctgctgccactcaatgaacaggtagagaaacagcgtgcagacaccgtggaaaaaaatgtcggccccatttcgcctggcctggttaaatttaccgccgacccgctgtttctcgacctctggcaacggcccgcgcttacgccccgcgacagaagtctggtgacggtcagcgcgttaatcgccgccggacagagcgcgcagattggctaccacctaaacagagctatggataatgggctttcggctgaagaggccggagaagtagtcgcccaggcggcgttctacgcgggatggccaaatgcgtttaccgccgccccggtggtcggtgaggtattacgatcgcgcgagagcaaaactgaataa

SEQ ID NO: 211767 - DNA, 930 bp, Klebsiella pneumoniae
atgtctgatcccgattttaatttgctggtagctctcgacgtattgctgagtgaagcgagtgtcgcaggtgcggctcgtcgtctgaacctcagcacttcggccatgagccggacattaagcaggttacgcgatgtcacaggagacccgatcctggtacgcgccgggcgtaacatggtactgaccccgtgggccgaagcgacccgggatcgcgccaggcgtgcagtgcacgatgccagggcggtattacagccctcaactgaaacgttcagcgcgcaaaatctggcgcgtctttttaccatcagggcaaacgatggttttgtggtggcgtttgggcctgcgcttatagcagcggttgccgacgcagcgccggacgtctgtatacgcttcgcgcctaagccggaaaaaacgtcgcgctatcttcgggaagggctggttgatctggagattggcgttcagagtaatatggggccagaaatacggctgcaacgactgtttgaggatcggtttgttggcgtcgtccgtaaagggcacccgctggctaagcaggctgaaataggcgtgagtgattatgtcgcctggggccatgtggtagcgtcacccgagggcgcgttgcacggatccgttgacgatgcgctggccgaactggggacaaaacgtaaaattgcaagcgtcgtaccgggatttccgacagcactttccgtggcgctggaatcggatcttatcgccatgatacccgcactctatttactcaatcagcaggtaacggaccaggtacaccttttcgagctgccgttcaaaagccgtcgtattacggtatcgcagatgtggcacccaagaatggaacgcgaccccggtcaccgctggctgagagagcaaattcttgcgatatgcggtgtggcccggtcagtcatgactaaggagcctgtatag

SEQ ID NO: 211768 - DNA, 1389 bp, Klebsiella pneumoniae
atgacgctcttttccagtcaacccggcgacgaaggactgcctggcccggcgcgcgcacgggtgatggccgcaataatgaccaccaccttaatgggcgtgtttgatggcaccatgatcaacattgccctgccctccatggctcaggagatgcaggtacctgccagtattgccgtctggttcgccaacgggtatctgctggcggctgcgatgacgctggcgatattcgcggcgcttgcggcccgtctgggttatcgccccgtatttctggcgggcctgacgacctttaccctgacatcactgggttgtgcgctggcgaataagcccgaagtgcttatcggtatgcgcgtacttcaggggatcggcggcgcggcgacgctgagtattgcccccgcaatactcaggtccgtatttcccggacgcttacttggccgcattctggggttccatgccctgctcattgcctcgagctccgctatcggcccggtattgggcggtacgatccttcacactcttagctggcaatggctgtttgcgataaacattcttcccggcaccctcgccttactgctggcggtcagagcgctgccgcgggatgcgatccgtatgcaggcgcccttcgacaccgtgggcgccatattgtcggcgctgctgttgggttcgacgatcatggcggcgaacagcctacagaacgctacttctcaattcggcagcctttgctggatggctctcgctgcgctgagcggcatggcttttatctggcaaatccgccgcacgggtcatcccttactgccgccgagcatgtttaaaaatgaacgttttaccctcgcggccttcacgtcgatggttgcttttgtcagccaggggatcacctttattgcgctacccttcctgtttcagagcgaatacggctacagtccggtagtgtctgccctgctgtttacgccgtggccattagggatcgtgctgattgcgccgcatgcaggccgttgggcggacacgatatcagccccggcgatatccaccctggggctggtgatatttgtcgtcggtttgatcctgctggcgacgttacccgccagaccttcaatgtgggatatctgcctgcgaagtctggtatgcggaatagggtttggctgctttcagagtcccaataaccgggaaatgctctcaaacgttattcgtgagcacgcgagttatgcgtccggtgttttatccattatgcgcactttcgggcagtgcctgggagccgccgccgtagccgttctgctggcagcagatgaaaggtcaattcatgttgcgctgtggagcgccgccgcggcctctgcggtatcggtcgtcgtcagcgcgagccggttgcgtaaaatcactcatcctgcggaaacaggataa

SEQ ID NO: 211769 - DNA, 714 bp, Klebsiella pneumoniae
atgatgaaacgcttttatatgacactgatgctggcggcaagcctggtgctggccggctgctccagcacctccgattccggtggcacctacaccgttaaacgcggcgataccctgtacggcatctcccgcaccaccggcaccagcgttcgcgatctggcccgcctgaataacatctccccgccttacaccattgaggtggggcagaagctgaagcttaacggcagcagttcaacgaagacaacgaagaaaaaatcttcctctacgcgcaccgcggcggtcacgccttcgtccgcggtacctcagtcctcctggccgccggtgggacagcgctgctggcgctggccgaccagcggcaaagtggtcctgccttattccaccgccgatggcggcaataaaggcattgatatcgccggaacccgcggccagccggtgtatgccgccggggcgggcaaggtggtctacgtcggcaatcagctgcgcggctatggcaacctgatcatgattaagcacagcgaggattacatcaccgcctatgcccacaacgataagctaatggtgaataatggccagagcgtgaaggccggccagcaaattgccaccatgggcagtacggatgccgactcagtgcggctgcatttccagatccgctaccgggcgacagccatcgatccgctgcgttacctgccgccgcagggaagtaaacctaagtgctaa

SEQ ID NO: 211770 - DNA, 555 bp, Klebsiella pneumoniae
atggccggggaacacgtcattttgctggatgagcaggatcagcctgccggtatgctggagaagtatgccgcccatacgtttgatacccctttacatctcgcgttttcctgctggctgtttaaccagcagggtcagttactggtcactcgccgttcgttgggcaaaaaagcctggcccggggtatggaccaactcggtctgcggacacccccagcagggcgagaccttcgagcaggccgtcacgcgccgctgtcgcttcgaactcggtgtggagatctctgatatcgcgccggttcacccggccttccgctaccgggcggtcgccccaaacggtatcgttgagaacgaagtgtgcccggtatatgccgcgcgcgtggtaagcgaagtgcagcctaacgacgatgaagtcatggactatcagtgggttgacctggcaaccatgttaagcgcgctggccgccacgccgtgggcgttcagcccgtggatggtgctggaagcggaaaatcgggacgcccgccaggcgctgaccgactttgttgcgcgtctgcgcgggtaa

SEQ ID NO: 211771 - DNA, 1518 bp, Klebsiella pneumoniae
atgtctgaacaacaagcacagggcgctgacgcggcaattgaccttaataatgaactgaaaacccgtcgcgagaagctggctgcgctgcgtgagcagggcgtcgcattcccgaacgatttccgtcgtgaccatacctctgaccaactgcacgctgacttcgatggcaaagaaaacgaagagctggaagcgctgaacgttgaagtggccgttgctggccgcatgatgacccgtcgtatcatgggtaaagcctccttcgtgaccctgcaggacgtaggcggccgcatccagctgtacgtggcgcgtgatgacctggcggaaggcgtttataacgaccagttcaaaaagtgggacctcggcgacatcatcgccgcccgcggtaagttgttcaagaccaaaaccggtgagctctctatccactgcaccgagctgcgtctgttgactaaagctctgcgcccgctgccggacaaattccacggcctgcaggatcaggaagcgcgttaccgtcagcgttacctggacctgatttccaacgatgaatctcgtaagaccttcaaagtgcgttcgcagatcctggcgggcatccgtcagttcatggttggccgcggctttatggaagtagaaaccccgatgatgcaggtgatcccgggcggcgcttccgcgcgtccgttcatcacccatcataacgcgctggatctggacatgtacctgcgtatcgcgccggaactgtacctcaagcgtctggtggttggcggcttcgaacgcgtcttcgagatcaaccgtaacttccgtaacgaagggatctccgttcgtcataacccagagttcaccatgatggaactctacatggcttatgcggattacaaagatctgatcgagctgaccgaatctctgttccgcaccctggcgcaggacatcctcggcaataccgaagtgccttacggcgaccaggtgttcgacttcggcaagccgtttgaaaaactgaccatgcgcgaagcgatcaagaaataccgtccggaaaccgagatggcggatctggataactttgattccgcgaaagcgatcgctgaatctatcggcatcaaagtggagaagagctggggtctgggccgtatcgtgaccgagatcttcgaagaagtggcggaagcgcacctgatccagccgaccttcatcaccgaatacccggcggaagtttctccgctggcgcgccgtaacgacgtcaacccggaaatcaccgaccgctttgaattcttcattggcggccgtgagatcggtaacggctttagcgagctgaacgacgccgaagaccaggcgcagcgcttccaggatcaggttgatgcgaaagccgcaggcgacgacgaagcaatgttctatgacgaagactatgtcaccgcgctggaacacggcctgccgccgaccgctggtctgggtatcggtatcgaccgtatggtcatgctgttcaccaacagccacaccatccgcgacgttattctgttcccggcgatgcgtccgcagaaataa

SEQ ID NO: 211772 - DNA, 963 bp, Klebsiella pneumoniae
gtgtggaacgaacccgaacgcgcccaggcgctgggtaaagagcgttcttccctggaagccatcgtagataccctggatcagatgtcccaggggctggaagacgttgccggcctgctggatctggccgtggaagcggatgacgaagagacctttaacgaagccgtcgccgagctggataccctggaagagaagctggcgcagcttgagttccgccgcatgttctccggcgaatacgacagcgccgattgctaccttgacattcaggccggttccggcggcaccgaagcccaggactgggccagcatgctgatgcgcatgtacctgcgctgggcggaagcgcgcggctttaagaccgaaatcatcgaagaatccgaaggtgaagtcgcggggattaaatccgtgaccattaagatcattggcgattacgcctacggctggctgcgtacggaaaccggcgttcatcgtctggtgcgtaagagcccgttcgattccggcggccgccgtcatacctccttcagctccgcgttcgtttacccggaagtggaagacgatatcgatatcgaaattaacccggccgacctgcgcattgacgtataccgcgcctccggcgccggtggtcagcacgttaaccgtacggaatccgcggtgcgtattacccatatcccgaccggattggtgacgcagtgccagaacgaccgttcgcagcacaaaaataaagaccaggccatgaagcagatgaaagcaaagctttatgaactggagatgcagaagaaaaatgccgagaagcaggcgatggaagacaacaagtccgatatcggctggggcagccagatccgctcttacgtgctggatgactcgcgtattaaagatctgcgtaccggggtggaaacccgcaacactcaggcggtgctcgatggcagcctggaccaatttatcgaagcaagtttgaaagcagggttatga

SEQ ID NO: 211773 - DNA, 1734 bp, Klebsiella pneumoniae
gtgaaacaacagatacaactacgccgccgcgaggcgattgacggcgtcgaactccccgccgacctgccgccgctgctgcagcggctatatgccagccgcggggtgcgcagcgcgcaggagctggagcgcagcgtcaaaggcatgctcccctggacgcagctcaccggcgttgaaaaagcggtcgagatgctgcatgacgcgttccagaaagggttgcacatcgtggtggtcggtgattttgacgccgacggcgccaccagcaccgcgctcagcgtgttggccctgcgcgcgctgggttacggcaacgtctcctatctggtgccgaaccgctttgaagacggctacggtttaagcccggaagtggtcgatcaggcccatgctcgcggcgcgcagatgatcatgaccgtcgacaacgggatctcgtcccatgccggcgtcgatcatgcccatgcgctggggatcccggtgctggtgaccgatcaccatctgccgggcgagacgctgccggcggcggaagctatcgttaatcccaacctgcgcgattgcgacttcccgtcaaaatcactggccggggtgggggtggcgttttatctgatgctggcgctgcgcacttttctgcgcgataaaggctggttcgacgctcgcggcatccccgcgccgaaccttgccgagctgctggatctggtggcgctaggcaccgtcgcggacgtcgtgccgctggatgctaataaccgtatcctcacctggcaggggttaagccgcattcgcgccggcaaatgtcggcccggtattaaggcgctgctggaaattgccaaccgcgatccgcaaaagctggcggccagcgacctcggtttcgccctcgggccgcgcctgaacgcggcgggacggctggacgacatgtcggtcggcgtcgcgctgctgctgtgcgacaacatcggcgaagcgcgggtgctggccaacgagctcgatgcgcttaatcagacgcgcaaagagattgagcaggggatgcaggcggaagcgctaacgctctgtcagcagctggagcgcagcgccgataccctgcccggcgggctggcgatgtaccatccgcaatggcatcaaggggtagtcggcattctcgcctcgcggattaaggagcgcttccatcgcccggttatcgcttttgcgcctaccggcgacggcacgctgaaaggctccggccgttccattcaggggttgcatatgcgcgatgcgctggagcgccttgatacgctttatcccgggctaatcctgaagttcggcggccacgcgatggcggcgggcttatcgctggaggaggcgcgttttgaagagtttcaacagcgcttcggcgagctggtgaccgaatggctggatcctgcgctgttgcagggcgaggtggtttccgatggcccgctggcggcggcggagatgagcatggaagtggcgcagatgctgcgcgacgccgggccgtgggggcagatgttcccggaaccgctgtttgacggtcgttttcgcctgctgcagcagcggctggtgggcgagcgtcacctgaaggtgatggtcgaaccggttgacggcgggccgctgctggacggtatcgccttcaacgtggatacttccatctggccggataacggcgtgcgtgaagtccagttagcctacaagctcgacatcaacgagttccgcggcaaccgtagcctgcagctgatcatcgatcacctctggccaaattga

SEQ ID NO: 211774 - DNA, 714 bp, Klebsiella pneumoniae
atgaaaaaaggtttattgatgttcaccctgctggcggcctccctttcaggagcggcgcacgccgatagcgcggcaattaaacagtcgctggcgaagctgggtgtgcagagcaccgatattcaaccatcgccggtttccgggatgagcacggtgctgaccgacagcggcgtgctgtacgtgaccgacgacggcaaacatatcatccaggggccgatgtacgacgtgagcggcgcgcagccggtcaacgtcaccaaccagctgctgctgggtaagctgaacgcgctgagcaatgagatgattgtctacaaagcgccgaaggagcagcacgtcatcaccgtcttcaccgatattacctgcggctactgtcataaactgcacgagcagatgagcgactacaacgcgctggggatcaccgtgcgttatctggccttcccgcgccaggggctgcaaagccaggccgagcaggatatgaaagcgatctggtgtgcgaaagatcgcaacaaagcgctggatgacgccatgaatggtaaaggcgtgcagccggcgagctgcagcgtagatatcgccaaacattacaccctcggcgtgcagatgggcgtcaacggtacgccggcgatggtcctcagtaacggcatggtgctgccgggctatcaggggccgaaagagctgaaggcgttccttgatgagcacaaaaaacagacaagcggtaactga

SEQ ID NO: 211775 - DNA, 897 bp, Klebsiella pneumoniae; identical to SEQ ID NO: 137768

SEQ ID NO: 211776 - DNA, 522 bp, Klebsiella pneumoniae
atgaatataggtctgttttacggctccagtacctgctacaccgaaatggccgcggagaaaatccgcgatatcatcggccccgaactggtgacgctgcacaatctgaaagatgactcccccgcgctgatgagccagtacgacgtactgatccttggcatcccgacctgggatttcggcgaaattcaggaagactgggaagcggtctgggatcagctggacaccctgaacctcgagggaaagatcgtcgcgctgtacggcatgggcgatcagctgggctacggcgaatggttccttgacgcgctcggcatgctgcatgacaagctggcgaccaggggcgtgaagtttgtcggctactggccaaccgaaggctatgagttcaccagcccgaaaccggtgatcgccgatggccaactgttcgttggcctggcgctggatgaaaccaaccagtacgacctgagcgacgagcgcatccagagctggtgcgagcagatcctcggcgaaatggccgaacacttttcctga

SEQ ID NO: 211777 - DNA, 411 bp, Klebsiella pneumoniae; identical to SEQ ID NO: 137770

SEQ ID NO: 211778 - DNA, 267 bp, Klebsiella pneumoniae; identical to SEQ ID NO: 137771

SEQ ID NO: 211779 - DNA, 984 bp, Klebsiella pneumoniae
atggcttttacaccttttcctccgcgtcagccttcctcttccgctcgtctgccgttaacgctgatgaccctggatgactgggcgctggcgacaattagcgggccggacagcgaaaaatatctgcaggggcagattaccgccgatgtgagtcatctcaccgatgcccagcatctgcttgccgcccactgtgatgccaaaggcaagatgtggagcaacctgcgcgtattccgtcgcgagggcggcttcgcgtggattgagcgccgcagcctgcgcgacgcgcagctgaccgagctgaaaaaatatgccgtcttctccaaagtcaccattgccgccaacgacgatctggttctgctgggagtagccggcttccaggcgcgcgccgcgctggcgccgctgttcgccgccttgcccgacgctgccaccccggtggtcagcgaaggcgccaccagcctgctgtggtttgaacacccgggcgagcgcttcctgctggtgaccgatgtcgacaccgccaaccgcgtcaccgacgcgttgcgcggcgaagcgcagtttaacaacagccaacagtggctggcgctgaatattgaagccggcctgccggttatcgacagcgctaacagcgggcagttcattccgcaggccaccaacctgcaggcgctgggcggcatcagcttcaaaaaaggctgctacaccggccaggaaatggtcgcgagggcgaaattccgcggcgccaataagcgcgcgctgtggacgctgtcagggaccgccagccgggtgccggaagccggggaagacctggagctgaagatgggcgacaactggcgccgcaccggtacggtgctggcagccgtacagctggatgacggaagcctgatggtccaggtagtgatgaataacgacatggaaccggacagcgtgttccgtgtacgcgacgatgccggcagcctgagcatcaaaccattgccgtattcgctggaagaaaattaa

SEQ ID NO: 211780 - DNA, 660 bp, Klebsiella pneumoniae
atggttcgcaaaccattaatcactcagggatattctctggcagaggaagttgccaacagcatcagccacgggatcgggctggtgttcggtatcgtcggccttgtgttgctgctggtgcaggcggcagatacaaacgccagcgcgacggcgatcgccagctacagcctgtacggcggcagcatgattatgctgttcctcgcttccacgctctatcacgcgatcccgcatcagcgggcgaaacagtggctgaagaaattcgaccactgcgccatctatttgctgattgccgggacctacacgccgtttttgctggtggggttgaattcaccgctggcgaaggggctgatgatcgtcatctggagcctggcgctgctggggatcctgtttaagctgaccatcgcgcaccgctttaaaattttgtcgctggtgacctatctgaccatggggtggctgtcgcttatcgtggtctatcagctggcggtgaagctggcggtgggcggggtaacgctgctggcggttggcggggtggtgtactcgctgggggtcatcttctacgtctgcaaacgtattccttataaccacgctatctggcacggcttcgtgctcggcggcagcgtgtgtcacttcctggcgatttatctttacatcggccagtcctga

SEQ ID NO: 211781 - DNA, 312 bp, Klebsiella pneumoniae; identical to SEQ ID NO: 137774

SEQ ID NO: 211782 - DNA, 729 bp, Klebsiella pneumoniae; identical to SEQ ID NO: 137775

SEQ ID NO: 211783 - DNA, 1434 bp, Klebsiella pneumoniae
atgaaaaaattaacccttccgaaagattttttatggggcggcgcggtcgccgcgcatcaggttgaaggcggctgggatcagggcggcaaaggccccagcatctgcgatgtgttgaccggcggggcgcacggcgtgccgcgcgaaatcacccaccaggtcgaagcgggaaaatactacccgaaccacgaagccgtcgacttctacggtcgctacaaagaagacatcaaactgttcgccgagatgggcttcaaatgcttccgcacctctatcgcctggacccgcatcttcccgcagggtgacgaaacccagccgaatgaagagggactgaagttctacgacgacatgttcgacgagctgctgaaatacaacatcgagccggtgatcactctctcccacttcgagatgcccctgcacctggtgcagcagtatggcggctggaccaaccgcaaagtggtcgatttctttgtgcgctttgccgaagtggtcttcgagcgctataagcacaaagtgaaatactggatgacctttaacgagatcaacaaccagcgcaactggcgcgcgccgctgttcggctactgctgctccggggtggtctataccgagcatgacaatccggaagagaccatgtaccaggtgctgcaccaccagttcgtggccagcgcgctggcggtgaaagcggcgcggcgcatcaacccggacatgcaggtcggctgcatgctggcgatggtcgccctctacccttactcctgcaaaccggaagatgtcatgttcgcccaggagtcgatgcgcgagcgctacgtctttaccgacgtccagctgcgcggttactacccgagctatgtgttgaatgaatgggaacgccgcggcttcaacatcaggatggaagacggcgacgcgcagatcctgcgcgaaggtacctgcgcctatctcggcttcagctactacatgaccaacgcggtgaaagccgagggcggcactggcgacgccatttccggtttcgaaggcagcgtgccgaacccgcacgtcaaagcttccgactggggctggcagattgacccggtcggcctgcgctattctctgtgtgaactgtatgagcgttatcagaagccgctgtttatcgtggaaaacggctttggcgcctacgacaaagtagaagccgacggcagcatcaacgatgactaccgcatcgactacctgcgcgcccacatcgaagagatgatcaaagcggtcacttatgacggcgtcgatctgctgggctataccccatggggctgcatcgactgcgtctccttcaccaccgggcagtacagcaaacgctacggcttcatctacgtcaacaaacacgacgatggcaccggcgatatgtcccgctcgcgcaagaagagctttaactggtacaaagaggtcatcgccagcaacggtgagaacctgtaa

SEQ ID NO: 211784 - DNA, 360 bp, Klebsiella pneumoniae
atgattaagcgacaacgcaaagccattctttttgtcctcctggcctgtctggtagtgctaacctgcaccgcccagcggatggccgggatgcacgcgctggtcatgaacctcaccgccgacagcccgtcgctacagcaaaaccaggatcaggtcgaggcgccggtcacgccgtgcgagctcagcgccaagtcgctgatggccgttccgccgatgctgtttgaaggggcgctgttggctatcaccctgctgctggcggtgctggcggcgatcccgccgcgtatcgaacgccagtggcctccccgcgttatctccccaccccgattgcgggtgcatctgcgattatgcatcttccgtgagtga

SEQ ID NO: 211785 - DNA, 2010 bp, Klebsiella pneumoniae
atgtatatggtattcaggcgactactggtctgcctgctttggctatggctgcccgtcagccaggccgccgacagcggctggctgcgcgccgccgacaatcaacacgccagcgtccgcctgcgggcgcaaaccgaaagcaatggcgacactcgcctgcttttagacgtagcgctggaaaagggctggaaaacctactggcgctcgccaggggaaggcggcatcgcgccggctatcgcctggcacacgccgctggaggtgaactggcgctggccgacgccgcagcgcttcgacgtcgcgggcatttccactcagggctatcacggcgacgtcagctttccgatgacgctgcgcgggaagataccgccgacgcttagcggcgtcctgacgctctctacctgcagcaatgtctgtattctcactgactatcccttttcgctggatatgacgactccggcgggggagcgatttaattatgattttacccgcgcgatgggcacactgccgctgcgcgatggcctgacttcgcaactgaccgccagctacgtcagcggcaaactgacggtgaccgcccgccgcgatgccggctggcagcagccagcgctgtttatcgacagcatggaggatgtcgatttcggtaagccgagctttaccagccgcggcgctacgttgaccgccaccgtaccagtcaccgacagctggggcgaagcggcgccggacctgagcggcaaaacgctgtcgctggtgctggccgatagcggtcaggcgcaggaaagccaaatcgccgtcgccgccggcagcgccgcgccggggctggcgttaggctgggtgctgctgatggcgctggccggcgggcttattctcaacgtcatgccctgcgtgctgccggtgctggcgatgaagctcggctcgctggtgcaaaccgaaggtcgcgaacgcggcgcggtgcggcggcagttcctcgcctcggtgtgcgggatcgtcgtctcgttcctggcgctggcgctgatgatgaccgcgctacgcctggggaatcaggcgctcggctggggcatccagttccagaacccgtggtttatcggcgcgatggcgctggtgatggtgctgttcggcgccagtttattggggctgttcgaaatccgcctatcctccagcgccagcactttcctcgccaccaggggcggcaacggcttaatgggccatttctggcagggcgccttcgccaccctgctggcgacgccctgtaccgcgccgttcctcggtaccgccgtgtcggtggcgctggtggcgcccctgccgctgctgtggggcattttcttcgccatggggatcggcatgagcctgccgtggctgctgatcgttgcctggccgggtctggcgcaacgactgccacgcccgggccgctggatgaatcatctgcgggtggtgctggggctaatgatgcttggttcagcgctatggctggtcagcctgctgacgatccacatcggccgtacgccggtgcttaccctgctggtgattctggccatcgccctgctagtggccaccgcctggcgctaccgctggcggacggcgctacgcgcgggcgctctggccatcgtggtggcgggcgccgtcgcctttgtcgcccaacaggacggccagggcccgcgccgcgaccgggttaactggcagccgctcagcgagcaggctatcgccagcgccctggcggagcataagcgggtatttattgatgtcaccgccgactggtgcgtgacctgtaaagccaataaatacaacgtgctgctgcgcgacgacgtccagcaggcgctgttagcgccagacgtagtcgccctgcgcggcgactggagccgcccctccgctgacattagccagtttttaaccgctcgcggcagcgccgcggtgccgtttaaccagatttacggaccggaattgccgcagggacagattctgcctgcgctgttagaccgcgaacaccttctcgccaccctgtccgccgctaaaggaaaataa

SEQ ID NO: 211786 - DNA, 612 bp, Klebsiella pneumoniae
atgagagctatcaccgccttattactgctgtgcgtatcggccttcagcttcgccgccccggcggaagaaccacaatcgaacggtaatgaccagttagcccagctgctgtttaacgatccgaatagcccgcgcaccggcgcgaaagagccaaaactcacaatcgtctcgtttaccgattacaactgcccttactgcaaacagtttgatccgctgctggaaaaaatcgtccacgataatccggacatccagctcatcgttaagctgctgccgtttaaagggcagagttcggtgaatgccgctaaaaccgcgctctccacctggcgtcagcagcccgataaattctgggcgctgcatcagcggctgatggcgaaaaaaggctatcacgatgacgccagtatcgccgccgcgcagaagaaaaccgccaccgatagtgtaaaaatcgatgacaagaccatggattcgctgaagatgaacctgattttgtcgcaggtgctgaatattcagggcaccccggcgaccatcatcggcgatcagatggtggccggcgcgatccctgctgatgagctggaggggctggtgaaagagcagctggcgaaagcccgtggccagtaa

SEQ ID NO: 211787 - DNA, 504 bp, Klebsiella pneumoniae
gtggccagtaaaatcaggcgctggctgcgcgagctggcggtgtggctgctgattggcgcggcggtgagcctggcggtggattattttcgccagcccgcgctgccgcaaaacgtcagcgccacatcgctgcagacactcgacggcaggacgctggatctgcatgccatgagccagcaaaagccgctgctgctgtacgtctgggcgacctggtgcggagtttgtcgctataccacgccgtcggtggcatcgcttgccgcggacagcggcaatgtgctgacggtagccctgcgttccggcgataacgtcacgctggagaagtggctgaccaggaagaaactggcgctgccgacggtgaatgatccaagcggccagctggcgcggcagtgggatatccaggtaacgccaacgctggtggtcatttctcaaggcgaggtaaagtcggttaccaccggctggaccagcggctggggaatgcgcctgcggctgtggctggcctcctggtag

SEQ ID NO: 211788 - DNA, 744 bp, Klebsiella pneumoniae
atgggaatagctcttattagcggcgcgagccgcggcataggccgggcgacggcgctgctgctggcgcaggaagggtataccgtggcggtcaattaccatcacaacattaacgccgccaccgaggtggtgaataccattgtggcgtctggcggcaaagccacggcgctgcgggcggacatcagcgatgaagcgcaggtgatggcgatgtttgaggcgatcgaccgcatgggcgagccgctgacggcgctggtcaacaacgccgggatcctgtttacccagtgtacggtggagagcctgagcgccgagcgtattaaccgcgtgctggccaccaacgtcaccggttacttcctctgctgtcgtgaggcggtaaagcgtatgtcacatcggcatggcggcaagggcggggcgatagttaacgtgtcgtcggcggcctcgcgccttggcgcgccgggggagtacgttgactatgccgcgtcgaaaggggcggtagataccctgaccaccgggctggcgctggaggtggcggcgcaggggatccgggtcaacggcgtgcgtccggggctgatttataccgagatgcacgcctccggcggtgagccgggacgcgtggatcgagtgaaaggttcgctaccgatgcagcgcggcggcctgccggaagaggtcgctcaggccattgcctggctgctgagcgacaaagcgtcgtatgtgacgggtagcttccttgaactggcgggcgggaaataa

SEQ ID NO: 211789 - DNA, 2874 bp, Klebsiella pneumoniae
atgactcagactttaagtcagcttgaaaaccgcgacgcctttattgaacgtcacattggcccggacgctcagcaacagcaagagatgctgaagaccgtcggcgcggattcgcttaacgccctgatcggccagattgtgccgcaggatatccagctggcgaccccaccgcaggtgggcgacgcgactaccgaattcgccgcgctggcggagctgaaggcgattgccagtcgcaacaagcgcttcaagtcttacatcggcatgggctataccgccgtgcagctgccgccggtcattcagcgcaacatgctggaaaacccgggctggtataccgcctataccccttaccagccggaagtatcccagggccgtctggagtcgctgctcaacttccagcaggtcactctggatctgaccgggttggatatcgcttccgcttcgctgcttgatgaagccaccgccgccgccgaagcgatggcgatggccaaacgcgtcagtaaactgaagagcgccaaccgcttcttcgttgccgccgacgtccatccgcaaaccctggacgtggtgcgcacccgcgcggaaaccttcggtttcgacgtcatcgtcgatgacgccgacaaagtgctcgatcaccaggatgtcttcggcgtgctgctgcagcaggtgggcaccaccggcgaaatccacgattacagcaaactgatcgccgagctgaaagcgcgcaaagtgattgtcagcgtcgctgccgactttatggcgctggtgctgctgacggcgccgggcaagcagggcgcggatatcgtcttcggttccgcccaacgcttcggcgtgccgatgggctacggcggcccgcacgcagccttcttcgcggcgaaagatgaattcaaacgctccatgccgggccggattatcggcgtatcgaaagatgcggcggggaataccgcgctgcgcatggcgatgcagactcgcgagcagcacatccgccgtgagaaagcgaactccaacatttgtacctcgcaggttctgctggccaacatcgccagcctgtacgcggtattccacggcccggcgggtctgaaacgtatcgctggccgcattcatcgtctgaccgacattctggccgacggcctgcagaagaaagggctgaagctgcgccatgcccactacttcgacaccctgtgcgtcgaagtggcggataaagccgcggtgctggcgcgtgccgaagccctgcagattaacctgcgcagcgatattcacggcgcggtgggcattacgctcgatgaagcgaccacccgcgaagatgtgctgaacctgttccgcgccatcgtcggcgacgatcacggtctggatatcgataccctggataaagacgtggcgctggatagccgttcgatcccggcggcgatgctgcgcgacgatgcgatcctcacccatccggtgtttaaccgctaccatagcgaaaccgagatgatgcgctacatgcacgccctggagcgtaaagatctggcgctgaaccaggcgatgatcccgctgggctcctgcaccatgaaactgaacgccgcggcggagatgatcccgatcacctggccggaattcgccgagctgcacccgttctgcccggtcgagcaggcggaagggtatcagcagatgatcgcccagctttccgactggctggtgaaactgaccggctatgacgccgtctgcatgcagccgaactccggcgcgcagggtgaatatgctggtctgctggcgattcgccattatcacgagagccgcaacgaaggccatcgcgatatctgcctgatccctagctccgcgcacggcaccaacccggcttccgcgcagatggcgggtatgcaggtagtggtcgttgcctgtgataaaaacggcaacatcgatctcgccgatctgcgtgaaaaagcagagcaggcgggggccaatctctcctgcatcatggtcacctatccgtcgacccacggcgtgtatgaagagaccattcgcgaagtgtgcgagatcgtgcaccagtttggcggccaggtttatctcgacggcgccaacatgaacgcccaggtcgggatcacctctccgggctttatcggcgccgacgtttcgcacctcaacctgcataaaacgttctgcattccgcacggcggcggcggcccgggcatgggcccaatcggcgtgaaagcgcacctggcgccgttcgtgccgggccacagcgtggtacagattgaaggtatgctgacccgccagggcgcggtttccgccgcgccgttcggcagcgcgtccattttgccgatcagctggatgtatatccgcatgatgggcgcggaagggctgaagcaggcgagccagaacgcgatccttaacgccaactacatcgctacccggctgaaagacgcctacccggtgctctacaccggtcgcgatggtcgcgtagcgcacgaatgtattctcgatattcgtccgctgaaagaagagaccggcattagcgagctggatatcgccaagcgcctgatcgactttggcttccatgccccgaccatgtctttcccggtagcggggacgctgatggttgagccgacggaatcggaaagcaaggtcgagctggaccgctttatcgacgcgatgctggcgatccgcgcggaaatcgaccgcgtcaaagccggcgaatggccgttggaggataaccctctggtgaacgcgccgcacacccagggcgagctggtgggcgagtggaaccatccgtacagccgcgagctggcggtattcccggctgggttgcacaacaagtactggccgacggtgaaacgtctggatgatgtctacggcgaccgcaacctgttctgctcctgcgtgccgatgagcgaataccagtaa

SEQ ID NO: 211790 - DNA, 390 bp, Klebsiella pneumoniae
atgagcaacgtaccagcagaactgaaatacagcaaagaacacgagtggctgcgtaaagaagcggacggcacctataccgtagggatcaccgagcacgcgcaggagctgcttggcgatatggttttcgttgacctgccggaagtgggcgccaccgttgaagcgggcgccgattgcgcggttgccgaatccgtgaaggcggcctccgatatctacgcgccgattagcggtgaaatcgttgccgtcaacgaagagctgaacgactctccggaactggtcaacagcgacccgtatactgacggctggatcttcaagatcaaagccagcgacgaagcgcaggttgccgcgctgctggatgccgccgcgtatgaagctttactggaagacgaataa

SEQ ID NO: 211791 - DNA, 1095 bp, Klebsiella pneumoniae
atggctcaacagactccgttgtatgaacaacacacgctgtgcggcgcgcgcatggtggatttccatggctggatgatgccgctgcattacgggtcccagattgatgagcaccatgcggtgcgcggcgatgcagggatgttcgatgtgtcgcatatgaccatcgtcgatttccacggcagccggatccgcgagttcttgcgctatttgctggccaacgatgtggcgaagctcaccaccccaggcaaagcgctctacaccggcatgctgaccgcctccgccggcgtcatcgacgacctgattgtctatttcctttctgaagattatttccgcctcgttgttaactccgccacccgcgaaaaagacctcgcctggatctccgaacaagctgaaccttacggccttgaaattaccgttcgcgacgatctgtcgctgatcgcggtgcagggcccccaggcgaaagcgaaggcggcgacgctgtttaccgacgctcagcgtcaggccgtggaaggcatgaagccgttcttcggcgtgcaggccggcgacctgtttatcgccaccaccggctataccggcgaagcgggttatgaaattgcgatgccgaacgagcaggcggctgatttctggcgcggtctgctggacgctggcgttaagccgtgcggtcttggggcgcgcgacaccctgcgcctggaggccgggatgaacctgtacggccaggagatggacgaaggcgtttccccgctggcggcgaacatgggctggactatcgcctgggagcccgccgatcgtaacttcatcggccgcgaagcgctggagatgcagcgcgaaaaaggcaccgagcagctggttggcctggtgatgaccgagaaaggcgtcctgcgcggtggtctgccggtccgttttaccgatagcgacggtaatcaaaaagaaggcattatcaccagcggcaccttctcgccgacgctgggctacagcatcgcgctggctcgcgtgccggccgggattggcgacaccgcggtggtgcaaatccgtaaccgtgaaatgccggtaaaagtgactaaacctggttttgtacgcaatggcaaagccattgtgtga

SEQ ID NO: 211792 - DNA, 1203 bp, Klebsiella pneumoniae
gtgcaaagtgttgatgttgccattgttggcggtggaatggtggggctggcggtagcctgcggtctacagggtagcggcctgcgcgtcgcagtgctggagaaagcagagccgcgaccgctggccgccgatgcgccgccggcgctgcgcgtttcggcaattaatgccgccagcgaaaagctgctgacgaagctggacgtctggcgcgagatcgtcgcccagcgggccagctgctatcacggtatggaagtatgggataaagacagctttggccacattagcttcgatgaccagagcatgggctttagccaccttggctatattatcgaaaatgccgtagtgcatcatgcattgtggcagaaggcgcagcgttgcgctgacgttaccctgctggctccggcggaacttcagcaggtggcgtggggcgagaatgaagcctttctcagcctgcaggacggcagcatgctgaccgcgcggctggtgatcggcgccgatggtgccaattcatggctgcgcaataaagccgatattccgctgaccttctgggattaccatcatcatgcgctggtggcgaccatccgtaccgctgagccgcatcaggcggtggcccgccaggcgttccatggcgacgggatcctcgccttcctgccgctcagcgatccgcacctgtgctcgatcgtctggtcgctatcgccgggggaagcgcagcggatgcagcaggctgatgaaaccaccttcaaccaggcgctgaatatcgcgttcgataatcgccttggcctctgccagctggcaagtgaacgtgaagttttcccgctgaccggccgctatgcccgtcagtttgccgcccaccggctggcgctggtcggcgatgccgcgcataccatccatccgctggccgggcagggggtcaacctcggttttatggatgccgccgagcttattgacgagctgaagcgcctgcacgctcagggcaaagatatcggccagcatctttatctgcgccgctacgagcgcagccgcaagcacagcgcggcgctgatgctggcgggcatgcagggcttccgcgaaatgttctccgggagccatccggcgaagaaatttcttcgcgatgtgggactcaaactggccgatacgctgcctggcgtgaaaccgcagctgattcgccaggcgatgggcctcaacgatctgcctgcctggttacgttaa

SEQ ID NO: 211793 - DNA, 1179 bp, Klebsiella pneumoniae
atgagcgtgctgatcgtcgggggcgggatgaccggcgcgacgctcgcgctggccatctcccgtttgactggcggcgcgctgccggtccacctcattgaagcgcaggatccgcattcttcacgccaccctggctttgacgaccgggcgatcgccctggctgcgggcacctgccagcagctggcgcgtatcggtatctggcaacgcctcgccgaacgcgcgacgcccatccagcgagtacacgtcagcgaccgcggtcatgccgggtttgtgaatctggcggccgcggattatggcctgtcggcgctgggccaggtggttgaactccacgatgtcggccagcggctgtttggtctgctgcgcgaggcgccgggcgtcacgctgcactgtccggcgaaagtggaagcggtcagtcgcagccaggagagcgtcagccttacgcttgagggcggcgaaatcattaacggtaagctgctggtggcggcggacggttcccgttcggcactgggcgcccgctgcggcatcagctggcagcagcagccgtatgagcagatagcgatcattgctaacgtcagcaccgcgttgccccacgaaggtcgcgccttcgagcgctttaccgagcatggcccgctggcgatgctgccgatgtcgcaagggcgctgctcgctggtgtggtgtcatccgcagtcgcgccgcgatgaggtgcagagctggtctgacgaacgcttttgtcaggagctgcagcaggcgttcggctggcggctggggcgtattacccacgccgggaaacgcagcgtctatccgctggccctcaccaccgccagccgcgcggtgtcgcaccgcctggcgctggtcggcaatgcggcgcagacgctgcacccgatcgccgggcagggctttaatctcggcctgcgcgatgtgatgagcctggcggaattactcgctgacgcccatctcagcggcgaagatgtcggtcattatccgctgctgtgccgctatcaggcgcgcagggcaggggataaagccgccaccatcggcgtgaccgatgggctggtgcatctgtttgccaaccgttgggcgccgctggtggcggggcgcaacgtcggtctgatggcgatggaattatttaccccggcgcgcgatgcgctggcgcagcgtaccctcggttgggttccccgttaa

SEQ ID NO: 211794 - DNA, 1317 bp, Klebsiella pneumoniae
atgactcagcaggaatttctatcgcgtcgccagacgctgttggcgcagatgcagccaggcagcgcggcgctgattttcgccgcaccggaagcggtgcgcagtgcagattcggaatatccctaccggcagaacagcgatttctggtacttcaccggctttaacgaaccggaagcgctgctggtgttgattaaaagcgatgaaacccacaaccatagcgtgctgttcaaccgggttcgcgatctgaccgctgagatctggtttggacgccgtctgggccaggaggccgcgccggcgaagcttggcgtcgaccgggcgctggcgttcagcgaaatcaaccagcagctgtatcagctgctcaacggtctggacgcgatctacttcgcccagggtgaatatgcctatgccgatgagattgtgttcaacgccctcgaaaaactgcgcaaaggctcgcgccagaatctgcaggcgccgaactcggttatcgactggcggcccattgtgcatgagatgcgcctgtttaaatccgcggaagagcttgccgtgatgcgccgcgccggggagatcaccgcgctggcccatacccgggcgatggaaaaatgccgccctggcatgttcgaatatcagctggaaggtgaaattctccatgaattcaaccgccacggggcacgtttcccctcctataacaccatcgttggcggcggcgaaaacggctgtattctgcactacaccgaaaacgaatctgaactgcgcgacggcgatttagtcctgattgacgccggctgcgagtatcgcggctatgccggggacattacccgcaccttcccggtaaacggtaaatttacccagccgcagcgcgagatctacgacattgtgctcgaatcgctggagaccgcgctgaaactctatcggccgggcacctcgatctgtcaggtcaaccaggaagtggtgcgcattatgattaccggcctggtgcggctggggatcctgaaaggcgagattgacgagcttatcgccaacaacgcccaccgcccgtactttatgcatggcctgagccactggctgggtctggatgtgcacgatgtcggtaattacgacaccgaccgttcgcgcgtcctggagccgggaatggtgctgaccgtcgagccaggactgtatatcgccaccgatgccgacgtgccggcgcagtatcgcggcatcggcatccgtattgaagatgacatcgtgattaccgaagacggtaacgaaaatctcaccgccggcgtggtgaagaaggcggatgagatcgaggcgctgatggcggcggcgcgccagtcatga

SEQ ID NO: 211795 - DNA, 585 bp, Klebsiella pneumoniae
atgcgcatgtctatacagaacgaaatgcctggttacaacgatgtagaccagttactgaaccaacaaggggtaggtctcaccccggccgaaatgcacggtttgatcagcggattgctgtgcggcggcaacacggacagcagctggcagccgctggtgcacgacctgaccaacgaaggtctcgcctttggccatgaactggctcaggcgctgcgtaacatgcattccgccatcagcgattcactggatgacgacggtttcctctttcaactgtatctgccggaaggcgatgcggtgagcgtctttgaccgtgccgacgccctcgccggttgggtcaaccacttcctgcttggtcttggcgttagccagccgaagctggataaagtgaaggatgaaaccggggaagcgattgacgatctgcgtaatattgcccagctgggctacgatgaagacgaagatcaggaagagctggagatgtctctggaggagattatcgagtatgtccgcgttgccgcactgctgtgccacgacacctttgcccgtcagcagccaaccgcaccggaagtccgcaaaccgacattacactaa

SEQ ID NO: 211796 - DNA, 330 bp, Klebsiella pneumoniae; identical to SEQ ID NO: 138508

SEQ ID NO: 211797 - DNA, 597 bp, Klebsiella pneumoniae
atgactatacagcccgataccctgctctcccgtcagcatattcgccagcagatccgcgatcgtcgacgcgcactcagcccggagcaacagcgcctgtttgcccaacaggccgccgagcggatgatggcctggccgccggtagttctcgcccacaacgtggcgctgtttctctcctttgacggcgagctggacacccagccgctgatcgaccagctctggcgcgccggcaagcgggtatatctcccggtgctgcatccctttagccccggcaatctgctgtttttacactaccatccgcagagccaactgatcgtgaatcgcctgaagatccgcgaaccgaagctcgatgtgcgggatgtgctgccgctggctgaactcgatgtgctggtgaccccgctggtggccttcgatgtcagtggccaacggctgggaatgggcggcggtttttacgaccggacgctgcaaaactggcagcagtatcgcctgcagccggtgggctacgcgcacgactgccagcaggtggatagcctgccgagcgaagagtgggatatcccgctgccggcggtcatcaccccgggaaaaacctggtgttggtag

SEQ ID NO: 211798 - DNA, 1233 bp, Klebsiella pneumoniae
atggctaaggtatcactggaaaaagacaagattaaatttctgctggttgaaggtgtgcatcaaaaggcaatcgatagccttcgcgcagcgggttacaccaacattgaatttcataaaggcgcgctggattcagaacagctgaaagcgtcgatccgtgatgcccatttcatcggcctgcgttcccgtacccatctgactgaagagattttcgccgcagcggaaaaactggttgccgtcggttgcttctgcatcgggaccaaccaggtcgatctgaacgccgctgcgaagcgcggtattccggtgtttaacgcgccgttctctaacacccgctcggtggccgagttggtgatcggcgaactgctgctgatgctgcgcggcgtgccggaagccaacgccaaagcgcaccgcggggtgtggaacaagcaggcggtcggcagcttcgaagcgcgtggtaaaaagctgggcatcatcggttacggccacatcggtacccagcttggcattctggcggaatcgctgggaatgcacgtcttcttctatgatattgaaaacaaactgccgctcggcaacgccactcaggtacagcatctctccgacctgctgaacatgagcgatgtggtcagcctgcacgtgccggaaaacgcctctaccaaaaatatgatgggcgcggaagaactggcgctgatgaagccgggcgcgctgctgatcaacgcctcccgcggtaccgtggtggacattccggcgctatgcgatgcgctggccagtaagcatctggccggggcggctatcgacgtcttcccgactgaacctgcgaccaacagcgaccccttcacttcgccgctgtgcgagtttgataacgtgatcctcacaccgcatatcggtggctccactcaggaagcgcaggagaacatcggtctggaagtagctggcaagctggcgaaatactctgacaacgggtcaaccctgtcggcagttaacttcccggaagtttctctaccgctgcacggcggccgccgtctgctgcatatccatgagaaccgaccgggcgtcctgaccgcaatcaaccaaatcttcgccgcgcagagcatcaacattgctgcccagtatctgcaaacgtcgccgcagatgggctacgtggtgattgatattgaagcggaggaagatgttgcccagcaggcgctgcaggcaatgaaagcgatcccggggactatccgcgcccgtctgctgttctaa

SEQ ID NO: 211799 - DNA, 660 bp, Klebsiella pneumoniae
atgacgcaggatgaactgaaaaaagcggtaggttgggcagcactgcaatatgtacagccagggactattgtcggcgtaggcaccggctcgacggcggcccattttattgacgcgctgggcaccatgaaggggcagatcgaaggggcggtttccagctccgacgcctccaccgagaagctgaaaagcctcgggatcaccgtcttcgatcttaacagcgtcgatcgcctggggatctatgttgacggcgcggatgagatcaacggccatatgcagatgatcaaaggcggcggcgcggcgctgacccgtgaaaagatcatcgcctcggtcgcggataaatttatctgcatcgccgacgcctccaagcaggtcgatattctgggcaagttcccgctgccggtggaagtcattccgatggcgcgcagcgccgtggcgcgtcagctggtcaagctgggcggccgtccagagtaccgtcagggcgtggtgaccgataacggcaacgtgatccttgacgtgcacggcctggaaattctcgatgcgatcgcgctggaaaacgcgatcaacggtattcctggcgttgtcaccgtggggctgttcgccaaccgtggcgccgacgtggcgctgattggtactgccgacggcgtgaagaccatcgtaaaatag

SEQ ID NO: 211800 - DNA, 894 bp, Klebsiella pneumoniae
atgaaacgaccggactacaggacactacaagcgctggatgcggtgattagggaacgaggatttgagcgcgccgcgcagaagctatgtattacccagtccgccgtctcacagcgtattaagcagctggaaaatatgttcggccagccgctgctggtgcgtaccgtgccgccgcgccccaccgagcaaggacagaaactgctggctctgttgcgccaggttgaactgctggaggaagagtggctgggcgatgaacaaaccggctcgacgccgctgctgctgtcgctggcggtgaacgccgacagtctggcgacctggctgctgccggcgctggccaacgttctgtcagactcccctattcgtctcaacctgcaggtggaagatgaaacccgcacccaggagcgcctgcgccgtggcgaagtagtgggcgcagtgagtatccagccgcaggcgctgccaagctgcctggtggatcagctgggggcgctcgattacctgtttgtcgcatcaaaagagtttgcgcaacgctatttcccgaatggcgtgacgcgttcggcgctgcttaaggcgccagtcgtcgccttcgaccatctggacgatatgcatcaggcgttcctgcagcaaaacttcgacctgccgccgggcagcgtcccctgccacatcgtcaactcgtcggaagctttcgtgcagctggcgcgccagggcaccacctgctgtatgatcccgcatctgcagatcgaaaaagagctcaacagcggcgaacttatcgatctcaccccgggcctgttccagcgccgcatgctctactggcaccgcttcgccccggaaagccgcatgatgcgccgggtgaccgatgcgctcattgactacggacacaaggtgctgcgtcaggattaa

SEQ ID NO: 211801 - DNA, 768 bp, Klebsiella pneumoniae
gtgaagttaaaagtcttagccctggcggcaacactcggattgaccacgatggcggcacaggccagcgaattgccggatggcccgcacattgtgacttcaggcacagcaagcgttgccgcggttccggacatcgccaccctggcgatcgaagtgaacgtgtcggcaaaagacgccgcgtcggcaaaaaaacaggctgacgatcgcgttgcgcaatatctctctttcctcgaaaagagcggtattgctaaaaaggacatcaactcggcgaatctgcgtacccagcctgattacgactatcagaacgggaaaagcattctgaaaggctatcgcgcggtgcgcacagtggaagtgaccttgcgccagctggataaactcaacggtctgctggatggcgccctgaaagcgggtctcaacgagattcgctccgtctcgctgggcgttgcgcaaccggacgcctacaaagataaagcgcgtaaagcggcgatcgacgacgccgtgcatcaggcgcaggagctggccgcaggcttccacagcaagctgggtccggtgtacagcgtgcgctaccatgtctccaactatcagccgagcccgatggttcgcatgatgaaggctgctgacgctgcgccggtttctgcccaggaaacctacgagcaggcgactatccagtttgacgaccaggtcgatgtagtctttgagctgcagccggcgcaagccgctgctccagccaccccggcgaaaccggcggaaacgccgaaaccggcccagtaa

SEQ ID NO: 211802 - DNA, 636 bp, Klebsiella pneumoniae
atgtttacttattactttcaggggcttgccctgggagcggctatgatattgccgcttggcccacaaaatgcctttgtgataaatcaggggatccgtcgtcagtatcatctgatgattgccctgctatgcgcggtcagcgacttgctgttaatctgcgctggcattttcggcggtagcgcactgctgatgcaatccccgtggctgctggcgctagtgacctggggcggcgtggcctttttgctgtggtatggcttcggcgcattgaaaacggcgttcagtcagagtcttgaactcgccaatgcagaggtaatgcagcaggggcgctggaaaatcattatcaccatgctggcggtgacctggcttaacccgcacgtttatctggacacctttgtggtgttaggcagtctgggaggtcagctggcggtggagccgaagcgctggtttgcgctagggaccattagcgcctctttcctgtggttctttggcctggcgctgttagccgcctggctggcgccgcgactgcgtaccgccagagcccagcggatcatcaatattgtggtcggcgccgtcatgtggtttattgcgtttcagctggcaagagaaggcgtcagccatatccaggcgttgcttaactaa

SEQ ID NO: 211803 - DNA, 858 bp, Klebsiella pneumoniae
atggaagatttgaacgttgtcgatagcatcaaccacgccgggacgtggctggcacgcaatcaggagctgctgctgagctatgccgtcaacatcgtcgcggctatcgctatcctgatcgtcgggatgatcgtggcgcgcgtcgtctctaataccgtcaaccgcctgatgctggcgcgtaaaattgacgctaccgtggccgattttctctctgcgctggtgcgctatgcggttatcgcctttacgctgattgccgccctggggcgggtaggcgtgcagaccgcctcggtgattgcggtgctgggtgctgccggtttggcggtgggtttagcgctgcagggatcgctgtcgaaccttgccgcaggcgtactgctggtgatgttccgcccgttccgcgctggcgagtatgtcgaccttggcggcgtggcaggtacggtgttgaacgtgcagattttctccaccaccctgcgtaccgcggacggtaaggtagtggtggtcccgaacgggaaaatcatcgccggcaatatcattaacttctcccgggagcctgcgcgtcgcaatgagtttattatcggcgtcgcttacgatgctgatatcgacaaggtaaagcagctgctgacctcgattatcgaatctgacgatcgaattctgcgcgatcgggaaatgaccgttcgtctgaacgaactcggcgcctcgtcggtgaacttcgtggtgcgcgtgtggagcaaaagcagcgatctgcaaaacgtctactgggatatcctcgagcgtatcaagcgtgaatttgacgccaacggcatcagcttcccttacccgcagatggatgttcatgtggtgcgcctgccggaaaaagcagagtaa

SEQ ID NO: 211804 - DNA, 1080 bp, Klebsiella pneumoniae
atgtctaaaatttttgatttcgtaaaaccgggcgtcatcactggcgacgacgttcagaaagtgttccaggtagcgaaagaaaacaactttgcactgccggcggtaaactgcgtaggtactgattccatcaacgccgttctggaagctgcagcgaaagttcgctctccggttatcgttcagttctctaacggcggcgcagcgttcatcgcaggtaaaggcgtgaaaactgacgttcctcagggtgctgctatcctcggcgctatctctggcgcccaccacgtgcaccagatggctgaacactacggcgtgccggttatcctgcacactgaccactgcgcgaagaaactgctgccgtggatcgacggcctgctggacgccggtgaaaaacacttcgccgctactggcaaaccgctgttctcttcccacatgatcgacctgtctgaagagtccctgcacgaaaacatcgagatctgctccaagtacctggctcgcatgtccaaaatgggcatgaccctggaaatcgaactgggctgcaccggcggtgaagaagacggcgtggataacagccacatggacgcttccgccctgtacacccagccggaagacgtggattacgcctacaccgagctgagcaaaatcagcccgcgtttcaccatcgccgcttccttcggtaacgtacacggcgtgtacaaaccaggtaacgtagttctgaccccgaccatcctgcgcgactctcaggaatatgtttccaagaaacacaacctgccgcacaacagcctgaacttcgtgttccacggcggttccggttcttccgctcaggaaatcaaagactccgtcagctacggcgtggtgaaaatgaacattgataccgacacccaatgggcaacctgggacggtatcctgcagtattacaaagcgaacgaagcttacctgcagggccagctgggcaacccgaaaggcgaagaccagccgaacaagaaatactacgacccgcgcgtatggctgcgtgctgcccagacttccatggtgactcgtctggagcaggcatttaaagagctgaacgcgatcgacgttctgtaa

SEQ ID NO: 211805 - DNA, 1164 bp, Klebsiella pneumoniae
atgtctgtaattaagatgaccgatctggatctggctggtaaacgcgtttttatccgtgcggatctgaacgtaccagttaaagacgggaaagtaaccagcgacgcacgtatccgtgcatctctgccgaccattgaactggcgctgaagcagggcgcgaaagtcatggttacttctcacctgggtcgtccgaccgaaggcgagtacaacgaagaattctctctgctgccggttgttaattacctgaaagacaaactgtccaacccggtacgcctggttaaagactacctggacggcgtggaagtggctgccggtgaactggtggtgctggaaaacgttcgcttcaacaaaggcgagaaaaaagacgacgaagaactgtctaagaaatacgctgcgctgtgcgacgtgttcgtgatggacgctttcggtactgcgcaccgcgcgcaggcttccacccacggcatcggcaaatttgctgacgtggcgtgcgcaggcccgctgctggccgctgaactggacgcgctgggtaaagcgctgaaagagccagctcgtccgatggtcgctatcgttggtggttctaaagtgtccaccaaactgaccgttctggattccctgtctaaaatcgctgaccagctgatcgtgggcggcggtatcgctaacaccttcgttgccgctcagggccacaacgtcggtaaatccctgtacgaagcagatctggttgatgaagccaagcgcctgctgggcacctgcgatatcccggttccgaccgacgttcgcgtagcgaccgagttctccgaaaccgcaacggcaaccctgaagtctgttaacgacatcaaagatgacgagcagattctggaccttggcgacgtttccgcacagaaactggctgaaatcctgaagaacgccaaaaccatcctgtggaacggcccggttggcgtattcgaattccctaacttccgtaaagggactgaaatcgtggctaacgctatcgcggacagcgaaggtttctccatcgccggcggcggtgacaccctggcagcgatcgacctgttcggcatcgctgacaaaatttcctacatctccactggcggcggcgcattccttgaattcgtcgaaggcaaagtcctgccggcagtagcgatgctcgaagagcgcgctaagcagtaa

SEQ ID NO: 211806 - DNA, 1029 bp, Klebsiella pneumoniae
atgaccattcgcatcgcgattaatggcttcggtcgcattggacgcaacgtggttcgtgctctatatgaatccgggcgtcgtgcggaaatcaccgtggtggcaatcaatgagctggcggatgccgcgggcatcgcgcatttattgaaatatgacaccagccatggccgtttcgcctgggatgtccgtcaggagcgcgagcagctgtttgttggcgacgatgccatccgtctgctgcatgagccgaccattgcggcgttgccctggcgcgaactggcggtggacgtcgtgcttgactgtaccggcgtatacgggagtcgtgaacacggtgaagcccatcttcaggcgggggcgaaaaaagtgctcttttcccaccccggcggcaacgacctcgacgcgacggtggtgtacggcgtaaatcaggatgaacttcgcgccgggcatcgcattgtctccaacgcctcctgcaccaccaactgcattattccgatcattaaactgctcgatgacgcctatggcattgagtccggcaccgtcaccaccattcactcggcgatgcatgaccagcaggtgattgacgcttatcatccggatctgcggcgtacccgcgcggccagccagtcgatcattccggtggataccaaactggcggcagggatcacccgtatttttccgcaatttaacgaccgttttgaagcgattgccgtgcgggtgccgacgattaacgtgacggcaattgacctgagcgtgacggtgaaaaaaccggtaaaagcatgtgaagtcaaccagttgctgcaaaaagcagcacaaggtgcatttcatggtatagttgactatacggaattaccgttggtctcgacagattttaaccacgatccgcacagcgccatcgtcgatggtacgcaaacccgggtcagtggcgcgcatctgatcaaaacgctggtctggtgcgataacgaatggggctttgctaaccgaatgctcgacacgacgttagcgatggcggctattggtttcaggttcgacgcgtaa

SEQ ID NO: 211807 - DNA, 1992 bp, Klebsiella pneumoniae
atgtcctcacgtaaagagcttgctaacgctattcgtgcgctgagcatggacgctgtacagaaagccaaatccggccacccgggggccccgatgggtatggctgacattgccgaagtgctgtggcgtgatttcctgaaccataacccgaacaatccggcctgggctgaccgtgaccgttttgtgttgtcaaatggccatggttcgatgctgatttacagcctgctgcacctcactggctacgatctgccgattgaagagctgaaaaacttccgccagctgcactccaaaaccccgggtcacccggaagtcggctacaccgcaggcgtggaaaccaccaccggtccgctgggccagggtatcgctaacgcggtcgggatggctatcgccgagaaaaccctggcggcgcagttcaaccgtccgggacacgatatcgtcgaccactacacctacgccttcatgggcgacggctgcatgatggaaggcatttctcacgaagtgtgctccctggccggtaccctgaaactgggtaaactggtggcgttctatgatgacaacggcatctctatcgacggccacgttgaaggctggttcaccgatgacaccgcgaaacgctttgaagcctacggctggcacgtggtgcgcggcgtggacggtcacgacgctgacgccatcaaacgcgcggtagaagaagcgcgggcggtcaccgacaaaccgtccctgctgatgtgcaagaccatcatcggtttcggttcgccgaacaaagccggcacccacgactcccacggcgcgccgctgggcgacgccgaaatcgccctgacccgcgaagcgctgggctggaaacacgcgccgtttgacatcccgtctgacatctatgcccagtgggatgccaaagaagccggccaggcgaaagaagccgcatggaacgagaagtttgcggcttacgccaaagccttcccgcaggaagcagccgaattcacccgccgtatgaaaggcgagatgccgtctgacttcgacgcgaaagctaacgagttcatcgcgaagctgcaggccaacccggcgaaaatcgccagccgtaaagcctcgcagaacgccatcgaagctttcggcccgctgctgccggaattcctcggcggctccgcagatctcgcgccgtccaacctgaccctgtggtctggctctaagccgatcaacgaagacgctgccgggaactacatccactacggcgtgcgcgagttcggtatgaccgctatcgccaacggtatcgcgctgcacggcggcttcctgccgtacacctccaccttcctgatgttcgtggaatacgcgcgtaacgcggtacgtatggccgcgctgatgaaacagcgtcaggtgatggtctacacccacgactcgatcggtctgggcgaagacggcccgactcaccagccggtagagcaggtggcttccctgcgcgtgaccccgaacatgtccacctggcgtccgtgtgaccaggttgaatccgcgattgcgtggaaatatggcgtggagcgtcaggacggcccgaccgcgctgatcctctcccgtcagaacctggcgcagcaggagcgtaccgcagagcagctggcgaacgtggcccgcggcggttatgtgctgaaagattgcgccggccagccggagctgatcttcatcgccaccggttcagaagtggagctggcggttgccgcatgggacaaactgactgccgaaggcgtgaaggcgcgcgtggtttccatgccgtccaccgacgcgttcgacaagcaggatgcggcttatcgcgaatccgtactgccgaaagacgtgaccgcgcgcgttgccgtggaagcgggtatcgctgactactggttcaaatacgttggcctgaacggcgctatcgttggcatgaccaccttcggtgagtctgcgccggctgagcagctgttcgaggagttcggcttcaccgttgataacgtggttgctaaagcgaaagcgctgctgtaa

SEQ ID NO: 211808 - DNA, 759 bp, Klebsiella pneumoniae
atgaaaattcgctcaaccgtacttgctcttgggatcgcagcaaccctcaccggatgtcagaacatggactccaacggtctgctcagctcaggcgccgaagccttccaggcatactctctcagcgacgcgcaggtgaaaaccttaagcgaccaggcctgtaaagagatggacgccaaagcgaaaatcgccccggccaacagtgaatacagccagcggctgaacaaaatcgcggctgcgctgggcgataacatcaatggtcagcccgtgaactacaaggtctatgagaccaaggatgtcaacgccttcgccatggccaacggctgcatccgcgtctacagcgggctgatggatctgatgaacgataatgaagtcgaggcggtgatcggccacgaaatgggccacgtcgcgctgggccacgtgaagaaaggcatgcaggtcgccctgggtaccaacgctgtgcgtgcggcggcggcctccgcgggcggtatcgtcggtagcctgtcgcagtctcagttgggcgatctgggcgaaaaactggtgaactcgcagttctcccagcgtcaggaatcggaagcggatgactactcttacgacctgctgcgtaagcgcggtatcaatccgtcgggactggccaccagcttcgagaaactggccaagctggaagccggccgtcagagctctatgtttgacgatcacccggcatcggaagcccgcgcgcagcatattcgcgatcgcatgaaggccgacggcattaaataa

SEQ ID NO: 211809 - DNA, 1269 bp, Klebsiella pneumoniae
gtgaaaaaagaattaccattaatcgcacttggcattattgccgccgcgccggctttcgccagccaacaatctaccagtcagggctttattgaagacagccacctggatctctttttacgtaacgcttatatcaaacgcgattatcgcgatggtttgccggataaagccgaatggggtcagggtatcatcgcgaccttcgagtccggctttactcaagggccggtcggcttcggcgttgacggcattgcgcagtacgccgtgcgcctcgacggcggccgcggccgcagcggcgcgggcggtatcgactttttcgcccaggatgatgatggccgcgcaaagtccgatttagcaaaatttggcgctaccgctaaaatgcgcttctcgaataccgtcctcagctacggtagccagcgcccgatgctgcctatcgtctacgccgatgactcgcggctgctgtacgagagctataccggtaccatgctgacctcaagagaaatcgacggtctggaaattaacgccggttatctcaccgatcagcagcgcaaaagcgacgacagccacaatagcggcctgaagagcctgacctttggcggcgccagctatcaattcaacgaccagcttagcggcgcgctttacgcttcgcacgtcgaagacgtgctgaataagcagtatctcggcctgaactacaagcagccgttcgccaccgaccagcagctgattgttgacttcaacggctataactcgcgcttaaatcaagaatatgccgacgccaatggcaccgggcgcagcaacagcatctggagccttgccgccagctatatctgggatattcacacctttaaggtcgcttaccagcaaagcagcggcagcaccggctaccattatggcggctaccagaaccagggcggcgtcggcgatggcggcaacaccatctggctggctaactcctactggtcagattttaacggcgaggatgaacgttcctggcaggcctcctatggcctggattttgccggactgggcgtaccgggcctgagctggaccaccgcctacgttcgcggggataacattaaaaccgccgagaccagcaacggtaaagaacacgaatggttcaaccaggtgcagtaccaggtgcaaaacggcatggcgaaagatttgaaattgagactccgctattcggtgctgcgcgtttccagcaacgccagcgactataacgtcagcgggaatgaagtgcggttctacgtcgaatatccgtttgacgtgttttaa

SEQ ID NO: 211810 - DNA, 1641 bp, Klebsiella pneumoniae
atgagcgaaatgataaccgtcggcgatgccatcgccagaacgctggagcagtatcacgttgaagccatttatggcgtcatttctatccataacctgccgatcgccgatgccgtcggccagcgggaaaaaatccgctttgttccggcgcgcggtgaagcgggctcggtgaccatggctgacgcccacggccgtttttcagggctcggcgtggcgctgaccagtaccggcgcgggtgcgggtaatgcggtcggcgcgctggttgaggcgatgaacgccggtacgccgctgctgcacctgaccggacaggtcgaaaaagcctggctggacgccgacaccggtttcattcatgaaacccgcgatcagttgaccttcctgaaagccagttcgaagcgcgcttaccgcattagcaacgccaaccaggcggtggctatcctgcataaggcgattcaggaggcgcagacgccgccgtgcggcccggtctcggtggagatcccaatcgacattcagagcgccaaaattccgctttcactgctgaccgcgccgctgaaacgcgctccggcggttgagccggaagcgtcgctggtcgatgcgctgtgggcgcagcttaagcaggcgaagcagccgctgctgtggcttggcggcggcgcgttagagagcggcgaggcggtgaagacgctggcggatgccggggtgacggtgatttccagtacccacggccgcggcattctggcggacagccatcgcgccagcctgcgcgcgtttcataattctccctcggttgaagcgctgatttcacaatgtgatttcacacttgttgccggttcccggctgcgcagcaacgaaacgcgctcgtggacgctggaactgcccacgccgcgggtgcagattgatattgacccggcggcggccagccgtaactacttgatggacaataccctggtggcggattgccgggcgctattagcggcgctggcagagcgggtgcagggccggatatggggcgatgcgcgttgggatagccaacttaaagaggcggtagaggcggcggagcaggggctgcgcgaccagtgcggcgattacgctaaattgaatgacgcgattgcgcaggcgctgcccgatgacggcatcctggtgcgcgatattaccgtttctggcagcctgtggggcagccgtctgttccgcgctcacggcccgctgatgaatatccattctctggccggagccatcggtatggggctaccgatggcggtgggtaccgcgattgccaatccgcaacgtaaagtggtcggcctggtcggcgacggcggcctgagcctcaaccttggcgaactggcgaccctggcgcaggagaaggccaatgtgacgctgttgattatgaatgacggcggctacggcgtaatgcgtggtattcaggataagtattttggcggccgccagtattacaacgagctgcacacgccagacttttccctgctggcgcaggcgatgggtctgcaggcgtggagcgtggatcgggctgaggatttccaggcggtgatgaccgaagcgctggcgatgccggggccatcggtggtggaagtgaagatgggccagattggcgcgctgcgctttgccggcccgccgcagaagacgctgtattaa

SEQ ID NO: 211811 - DNA, 1470 bp, Klebsiella pneumoniae
atggacgaattagacatttttatcggcggtcagtggcgtcgcggcggcggcaatttgatgcacagccagtttccggcggatggcgctattaacgcggcgctgcatgcggcaagcctcgatgatttacaggaggcgatcgactgtgccgaccgcgcctggcgggagccaacgtggcgggcgatgctgccgcatcagcgggcgaagatcctgcataaagtcgccgatctgattgaagcacagcttgatgagctcacccaaaagcagagccgcgataatggtaaaccgctggcggaagcgcgagggctggtgatgagcgcggcggggacggcacgctattttgccgccgcctgtgaactgctggaaggcgagctgccgacgccgcggcaggcagatctattgaccctgagccgctatgagccgctgggcgtggtggcggcgatcaccccgtggaactcgccgatcgccagcgaaatgcagaaggtggccccggcgatcgccgccggaaatgcggtgatcctcaaaccggcggaagccacgccgctcatggcgctggagctggcgaagatctttgagcaggccggtttacccgccggactgctgagcgtgctgccgggtaaaggatcgattataggcgatgcgctggcccgccatcctaaggtgcgcaaaatttcctttaccggcggcaccaccaccggacgtcacctggcgcatgtggcggcggaaaagctgatcccggcgtcactggagctgggcggcaaatcaccgaccatcgtgctggaagatgccgatatcgaacaggcggcgcggggcatctgctacggcattttcagctccggcggccaggcctgtattgccggctcgcggctgtttgttcatgacaaagtgtatccgcaattaatggcccgcctgctggagttaacccaagggctgcgggttggccatccgttcagcgctggcacccacgtcgggccgctgatcaacgataaacaccggcagagcgtgctggagtacgtcgagctggcgaaacgcgaaggcggcagcgtgctatgcggcggcgagatcccggcggatccggcgctggcggcaggcagctatttcctgccgaccatcattgaagggctgaacaatcaggcccgcgtttgccaggaagagatcttcggaccggttctggtggcgatgcgttttcacgatgaagcggcgctgatccgcgaggccaatgattcggtcttcggactggcggcggggatctggacgcgcgataccggccgcgcgctgcgtctgagcgaacaactggaagccggtacggtgtggatcaacacctacaaagttttctccatttcgaccccgtttgggggctttaaagagagcggtctgggccgcgaaaaagggatccaggggctgaaagcctggatgcaacaaaagagcatttatctggcgacgggtaatagcgtcaaccactggtgcgactga

SEQ ID NO: 211812 - DNA, 765 bp, Klebsiella pneumoniae
atgaaaaaggtcatgttaattggctatggcgcgatggcccaggcggtgattgaacgcctgccgccgcaggtgagggtggagtggatcgtggcgcgcgaatcgcatcacgcagcgatctgcctgcagtttggtcaagcggtgacgccgcttaccgatccgctgcaatgcggtgggacgccggatctggtgctggaatgcgccagtcagcaggcggtcgcgcaatacggcgaagcggtactggcgcgcggctggcatctggcggtgatctcgaccggtgcgttggcggacagcgaactggaacagcgtttacgtcaggcgggcggcaagttgacgctgctggctggcgcggtggccggaatagatggcctggcggcggcgaaagagggggggcttgaacgagtgacctatcggtcgcgcaaaagcccggccagctggcgcggcagctatgccgaacagcttatcgacctcagcgcggtcaatgaagcgaaaattttcttcgaaggcagcgcccgcgaggcggcgcggctattcccggcaaatgccaacgtggcggcaaccatcgcgctgggcggtatcggccttgacgcgacccgagtacagctgatggtcgatccggcgacgcaacgcaacacccatacgctacacgccgaaggattgttcggcgagtttcacctggagctgagcggcctgccgctcgccagcaatccgaaaacatcgaccctcgcggcactgagcgcggtacgcgcctgccgtgaactggcataa

SEQ ID NO: 211813 - DNA, 795 bp, Klebsiella pneumoniae
atgaatgcacaaattgaaggacgcgtcgcggtagtcaccggcggttcgtcaggaatcggctttgaaacgctgcgcctgctgctgggcgaaggggcgaaagtcgccttttgcggccgcaacccggatcggcttgccagcgcccatgcggcgttgcaaaacgaatatccagaaggtgaggtgttctcctggcgctgtgacgtactgaacgaagcggaagttgaggcgttcgccgccgcggtcgccgcgcgtttcggcggcgtcgatatgctgattaataacgccggccagggctatgtcgcccacttcgccgatacgccacgtgaggcctggctgcacgaagccgaactgaaactgttcggcgtgattaacccggtaaaggcctttcagtccctgctagaggcgtcggatatcgcctcgattacctgtgtgaactcgctgctggctctgcagccggaagagcacatgatcgccacctctgccgcccgcgccgcgctgctcaatatgacgctgactctgtcgaaagagctggtggataaaggtattcgtgtgaattccattctgctggggatggtggagtccgggcagtggcagcgccgttttgagagccgaagcgataagagccagagttggcagcagtggaccgccgatatcgcccgtaagcgggggatcccgatggcgcgtctcggtaagccgcaggagccagcgcaagcgctgctattcctcgcttcgccgctggcctcctttaccaccggcgcggcgctggacgtttccggcggtttctgtcgccatctgtaa

SEQ ID NO: 211814 - DNA, 771 bp, Klebsiella pneumoniae
atgacggggtttcgtgaacaaggaagcggtattccgctgacgctgctgcacggcatcagttccggcgcggcctcctggcataaacagatggcgctgcccggctaccgcgtgctggcctgggatatgcccggttatggcgaaagcccgatgctggcggcgacgccggcggatgccggcgattacgccgacgcgctggcgcgaatgctggaccgcgctggagtagagcaaaccatactggtcggccattcgctgggcgcgctggtggcggccgccttcgccgcgaaatacccgcagagggtgctttacctggtgctcgccgacgtcgcgcagggctacggccaggcggaagccgcacagcgggaaaaagtctggcaggggcgtcaacagcagatagcgctgggcggcgaggcgatggcccaggggcgggcggcaaaactgctgcgccctggcgcgcgcgaagccgatgtggcgacggtggcggcggggatgcgcaggctacgccgcgacggttatctcgccgcggcctggatgctggcccatgacgacattcaccgttggctcgccgactatcgcggtcgtctctccgtgtggtgtggcgagcaggatgccattacccaaccggagttagtgcagggagtggcgctgcgttacggcgccccttacatcgccatccctcaggctggacatgccagctatctcgataacgaaatcttttttaatcaacagcttttacgcataggggaagaggtgcgcgatgaatgcacaaattga

SEQ ID NO: 211815 - DNA, 531 bp, Klebsiella pneumoniae
atgactgattcaaccgtaactgcaaaacaaagtttgaaacctgaccatttgacgatggaagagtgggtggagtcgcgtatcgcgcgctttgaaggccgcaaatatgactggaatgcgctgaaattccaggccgatttcgatccgaaatatcgccgcgcgcagatgcgctacatcggcaccggcgccaccggcgtcgccagtgataccaacaccgttccggccgagcacttcaccttttccaccatggtgttgccgtccaaatgtgaaggcccgctgcacctgcatgatgacgtagaagaggtgttcttcatgctcaaagggcagatcactctgatgattcaggacggcgacaactataccgaaaccgtgctgcgcgaacgcgatctgatctcggtgccgcctggaatttaccgcggtttgtttaaccacggcgaagaagaggcgctgatgtgcgtgatgctcggcacccataagccgcatattccgacctacccggaagatcatccgctggcaaaagtaaaacgtaactaa

SEQ ID NO: 211816 - DNA, 1257 bp, Klebsiella pneumoniae
atgaccacattagagaccaacgccgcgcctgcagaggcgagcggcgagggcgtccgcacgcctgaaaaagcagttcgttgggccattccgctgtcgctgctggcctgcgtgctgctggcttttttcgacaaaatcagtatcgccgcgctgttttccgatagtcacttccagcaggcgatgggcatcgatttcgacaccacccggttgggcattctgatgagtgcctttttgctgagttacggcttctcgtcagtgttattaagcggccttggcgaccggattgcgccgctgcgtctgctgactggaatgatggtggtgtggtgcatcctgatggtgatcatgggcttcacccacaactacgcgctgatggtgacgctgcgcatcctgttgggcattgctgaagggccgctgtttccgttggcgttcgccgtggtgcgccacaccttcccgcagcggctacaggcccgcgccaccatgctgtggctgctcggcacgccggttggcgcggcgctgggtttcccgctgtcaatttggctactcaataccttcggctggcagagcacatttttcgtgatggcgatgctgacgataccggtgctgatttttgtacgcatcgggctgcgcggcgtgcaactggaggcgagagcgagcagcgataaaacctcgcaggaagcgcgccgcagcgcgcgtcgcgagctctttgtgagtccgcatttttggatgatctgcatcttcaacatcgcctttctcgcctatctgtgggggatcaacggctggctgccgggctacctgattaaaggcaaaggcattcatctggaacacgccggctggctgtcgtcgatgccatttatcgccatgttgctaggcgaaattatcggcgcctggctgtccgaccacgtcgataggcgcgccgccgcctgctttatttccctggcaggcgcgggtattggcctggcggcagtgatgcatttcaccacgccgctgccggtaatcgcggcgatgagctttagcacctttatgtggggcaccggcgcgccaaacattttcgcgctgctggctaaagcgacccatccacgggtcagcgccacggcgggtggaattttcaacgggctgggaaactttgccggggcgctatcgccggcggtgatgggcgcgcttatcgccttcacccatagcatggattccgggctgatttttctggcggtgatggcggcggtgggctgcgccctgttactgccgctgctgagacgctactga

SEQ ID NO: 211817 - DNA, 1197 bp, Klebsiella pneumoniae
atgacggcgcggatagtcattatcggcggtggccaggctggcggctgggcagcgaaaacgctgcgtgatgaagggtttagcggcgagatttgcgtggttgccgaagagcaatgggatttttacgaacgtccgccgctgtcgaaagcggcattgctggaggccgaaccggcgctgccgcggttattcagcgccgaggtgcagcaggcactggatttgcgctggtaccgcccgctgcgcgcgaaatcgatcgaccggcaaaataaaaccctggcgctgagcaacggcgaaacgctggcgtacgacctactgctgatcgccaccggcggccgcgcgcggctgccgtccgaggcctgggggcagcatcctcaggtatataccctgcgccactggcaggacgcgcagcgtctgaagcagcggttggcatcggcaacgcggctggcgatcgtcggcggcggctggattggcctcgaaatcgccgcctcggcgcgcaaaagcggcgtagccgtgaccctttatgaacagcagccggcgctgtgcatgcgctcggtcagtatggaggtctcgcaggcgctggatgagttgcatcgcgggcagggcgttgatattcgccgcggctgcggcgcgctggagctggaagatgataacggcttgccgacgctgcactgcgacggccagcgggaaaccttcgatgcggtagtggtggggatcggcgtcgatctgaatctcgaactggcgcgcgatgccgggctcactgtcgatcgcgggattgtcgttaatgcccaagggcgcagtaacgatccggcgattttcgccgctggcgatgtcgcccagcaccatcagtacggtctgtgcattcagtcgtgggcctttgcgcaaaatcaggccatcgcgacagcgaaagcgatgctcgatccacaggccagcggctacgacgaggcgccgtggctgtggtcagatcaatacgatcgcaatgtccagatcctcgggatcccgcaagcgggcagccggaccattgtgcgtgacgagccgcagggcgcgatctacttctccctgaatgccgatggacgcttaactcagctggtggccttcaataatgcacgtatcgtgaagctggcgaagcgctggatggcggcgggaagggatctctctaacgtcccgctcgctgacccgactttctcgctgatgtcattgcgataa

SEQ ID NO: 211818 - DNA, 927 bp, Klebsiella pneumoniae
atgagtattaccggaattgaaaagctggaatttggcgtagacgacctgaaccacagcgctaaattcatgcgcgattttggcctgaccggcgacgccagcggccgcgcgtttaccaccctcagcggcgcgcgggtcgaacttaacccgaccgatgccgccgacctgccgccagcctttgaggcgggcaacactctgcgtcgcatgacctggggcgtggcggatcgggcggcgctggatgcgctacgcccgaagctggaacgccagcccgctttccgtgaaatcgacggtgcgctggaatgccgcgatcccaacggtatgacgctgcgggtgcaggttagccagcaaacggcggttgaactgaacgttgaaccgatcaaccagtggggcgatgtgcgtcgcatcgacactccgagcccggtatacgaccgcgcgcagcccattaacatcggccacgtcgtattctttgttgaagagctggcggcggtggaaagtttctatcgcgaagtactcggctttcaggtgtcagaccgctacatcaatcgcgcggtgttcctgcgctgcggcgtgcgcggcggacaccataacctcttcttattgcagttgcccaaccgcaagcgcgggctaaaccacgtcgcgtttaccgtgcgggatattcatgaagtgatcggcggcggcattgcgatgaataaaaacgcgtggagcacgtttatcggtcccggccgccatccggtctcctcggcctacttctggtatgtcaacagcccgaccggcggcgcttttgagtactacaccaacgatgactatctgacggaaaactggcagccgcgcgagcttgagcattcactcgtgtcctttaccgaatgggcggtggaaggcggtatcgatcacgatacccgtcgccagcagaaaaaaccggaggcggtatga

SEQ ID NO: 211819 - DNA, 789 bp, Klebsiella pneumoniae
atggcgaacgatcaggaagtgaagtatctggtgcccggtcttgagcgcggtttacaactgctgctggcgtttggcgaacagcatcgcgatctgacctttgccgagctgcatcggctggtggatatgccgaaagcgaccgcctatcgcgtggtgcagacgctggaatatatgggctttcttgagcgcaacgcccgcgccaataccttttcgctgggcatgaacgtactgcgtctgggctttgaatatatcgcctcactggatgtcgctcaggtgggtcagccggtcatcgagcaactacgcgatatcagcaagtgcagcagccatctggcgatccgcgacggccgcgacatcatctacatcgcccgcgtcagcgccgccggttcgcgtatcaaccaggtcagcgtcggaacgcggctaccggtgcactgcacctcgcttggccgcatgctgctgaccgatgtttcccgcagcgagtttgaacaattgttcccgaatgaacgtctgccgggcaatacgccgggccagctgtacgaccgcgaagcgctgtggcagatggtgcagcaggataaagcccgcggctacgtgattggcgaatcgttctatcgccacggcatctcatcgattgtctatccggtctttgaccgcagcggccgggtggcggcggtcgtcagcattctggtgccgtcggacgagatcccgcaaagcgatcgcgaacggttgcagaacgacgtcagtatggcagcggacaaaatttccggcttcctcggatatttgccacaggcaagttaa

SEQ ID NO: 211820 - DNA, 750 bp, Klebsiella pneumoniae
atgaacggcctgctaaacggtaaacgtattgtcgtcaccggtgcggcgcgcggtctcgggtaccactttgccgaagcctgcgccgctcagggcgcgacggtggtgatgtgcgacatcctgcagggagagctggcggaaagcgctcatcgcctgcagcggaagggctatcaggtcgaatctcacgccatcgatcttgccagtcaagcatcgatcgagcaggtcttcagcgccatcggcgcgcaggggtctatcgatggcttagtcaataacgcagcgatggccaccggcgtcggcggaaaaaatatgatcgattacgatccggatctgtgggatcgggtaatgacggtcaacgttaaaggcacctggttggtgacccgcgcggcggtaccgctgctgcgcgaaggggcggcgatcgtcaacgtcgcttcggataccgcactgtggggcgcgccgcggctgatggcctatgtcgccagtaagggcgcggtgattgcgatgacccgctctatggcccgcgagctgggtgaaaagcggatccgtatcaacgccatcgcgccgggactgacccgcgttgaggccacggaatacgttccagccgagcgtcatcaactgtatgagaacggccgcgcgctcagcggcgcgcagcagccggaagatgtcaccggcagcgtggtctggctgctgagcgatctttcgcgctttatcaccggccagctgatcccggtcaacggcggttttgtctttaactaa

SEQ ID NO: 211821 - DNA, 1023 bp, Klebsiella pneumoniae
atgacgacaacggtacaaaactatcttgataaaggactgcgcggcctgtggtatccggtgctggcgagctgggaagtgcagtctgcgccggtaggcattacccgtctcggcgagcagatcgtggtctggcggaataaagatggccaggtgcaggccctggaagaccgctgcccgcatcgcggcgcacgcctgtcaatgggctggaacttaggcgatcgtatcgcctgctggtatcacggcgtggaagtcgccggcaacggcgaagtcaaagacgtcccggcggtggatcgctgcccgctggtcggccagcagtgcgtgcgcagctacagcgtgcacgaagcgcacggggcaatcttcctgtggtttggcgtcaccgccgatcagcagcctgatgaattgagcttccctgaggaactagccgatagcgaaaaatacagtaacttcctgtgcaccgcggcgtggaaatgcaactaccagtacgcgctggaaaacgtgatggacccgatgcacggtacctatctgcactcgtcatcgcactcgatggcggaaggcgatcgcaaagccgatatggtcctgcagccgacgaaaaccggctttatcttcgagaaaaaagggcagagcggcgttaactttgactgggttgaactgggcaacagcggcgcctactggatgcgtctgtctattccgtacaaaaagcgtttcgggccgggcggccacttctggatcgtcggcatggtggttccggaagataacgataactgtcgcgtcttcttctggcgcatccgcggcgttcagggctggcagcgcgatctgtggcgctttatgtaccgcaaccgtctggaaaaactgcactgggaagtactggaacaggatcgcgtggtgctggaaagtctggcgccgaacgcccgcgatcatgaatacctttatcaacatgacgtcggtctgtcccgcctgcgccgcatgatgcagaaagcggcgaaagagcagttagcgctccgcgaagcgcagcagggtgccgcctga

SEQ ID NO: 211822 - DNA, 309 bp, Klebsiella pneumoniae
atgagcgaatccctggacttcaacccggcgctaccggaaagccgccagtttacgccaccggcggaaggcggaaacggcaatatccataagcctggcgactatcacaatctgatttggcaaacccgcagccgggtgccggaaaactgggaactgcagcttatcgccaccctggaaacgttgttcgagcagggcgcggaaagtctcggtgaactggtgaacggcctcaatggcgtcaggatgcatgaccaacagggcgaaccgtggagcgaaagcagcttccaggcatttttacaggttaacggctactga

SEQ ID NO: 211823 - DNA, 324 bp, Klebsiella pneumoniae; identical to SEQ ID NO: 138474

SEQ ID NO: 211824 - DNA, 1221 bp, Klebsiella pneumoniae
atggcggcaagatggcaaggggtaatagcattacttttgttaataattatttcctacgtcgatcgggtaaatatctcggtgatgatccttaacccggaattcgctgcccattttcagttaaatgaaaacagaatgttacaaggtatgctaatgacatgctttcttctgggttatggtttttcggcattattattaaccccagttatagaaagtagatggcattatcgtcagggactcttaagcagcattgctatatgggcgctggtgtgcgccatttccccgctactcggctcactgctgggaatgttgatcgcgcgcatcgttcttggcgtggcggaggggccgctgttctctctgaaaacgcgctttatcaacgacaacttcgccgctgatgaaataggcaagccgaatgcgctgaccgcccttggcgtatcgttggggctggcggtaggcttcccgctggtcacttggctgatggtgcacgttggctggatcggctccttctacgcgctggcgctgcttaacctgctgctcggcggcggattaatctggcggtttctccccgcgccacaagtaacctcacagcgcgcgaagccgggtttcaggcagactttcgccctcgcctggcgtacaccgctgctaggctggatcctgctggtagaaatcgccacgctcagctatctgtgggggagtagcgcctggttgcccgcctggctgcgcgacgagcaccacttctcgctacagactaccggcctgctggcggctgtcccctttctgttaagcctcggctcaaagtttcttggcggcgtgctcctcgacaaaatgcgcccggagcaggcgccgctgctgtttattatcggcggcctactcaccgccggttctgtgctggcgctgatgctcagccagcagccggcgatgctggcgctgtttatgctggcggcgaacgttttctggggattacagggggcagcgatccccgcggtggttcagcatcacgccccgcgcgaagcggtgggcagcgcctatgggatcattaacggcattggcaatatttgcgcggcgtttattccgctgctgatgggagtggtgatgaaatcggtgggatcggtcagttcaggtttttccgttctggtggcatcgcagctgattacgctgtgcgccggcggcgcactgctgctgcgtatgcgtcgcgcagcagcagtaaacgcgtctataccctaa

SEQ ID NO: 211825 - DNA, 921 bp, Klebsiella pneumoniae
atgagcactttaggtcatcaatacgataactccctggtatccaatgcctttggctttctgcgtttgccaatgaactttatgccgtatgaaagcgatgcggactgggtcatcaccggcgtgccgttcgatatggcgacctccgggcgcgcgggcggccgtcatggcccggcggcgatccgtcaggtttccactaaccttgcctgggagcacaaccgtttcccgtggaacttcgatatgcgcgagcgcctgaacgtggtggactgcggggatctggtgtacgccttcggcgacgcgcgcgaaatgagcgagaagctgcaggctcacgccgagaagctgctggcggccggcaaacgtatgctctcctttggcggcgaccacttcgttaccctgccgctgctgcgcgcccatgccaagcactttggtaaaatggcgctggtgcacttcgatgctcacaccgatacctacgccaacggctgcgagttcgaccacggcaccatgttctataccgcgccgaacgaagggcttatcgatccgaaccactccgtacagatcgggatccgcaccgagttcgacaaagacaatggctttacggtgctcgacgccggccaggttaacgaccgcagcgttgatgacgtgattgcccaggtgaagcagatcgtcggcgacatgccggtgtacctgacctttgatatcgactgtctggatccggcgtttgcgccaggcaccggtaccccggttatcggtgggctgacctccgaccgcgcgatcaagctggtgcgcggcctgaaggacctgaacatcgtcgggatggacgtggtggaagtcgccccggcctacgatcagtccgaaattaccgctctggcggcggcgaccctggcgctggagatgctgtacatccaggcggcgaaaaagggcgaataa

SEQ ID NO: 211826 - DNA, 1977 bp, Klebsiella pneumoniae
atgtctgacgacatgtctatggtttcgccttcgtcagcaggcgaacacggtgtactacgttccatgcaggaggtagcgatgagctcccaggaagccagcaagatgctgcgtacttataatattgcctggtggggcaataactattatgacgtcaacgaactgggccacatcagcgtttgcccggatccggacgtcccggaagcgcgcgttgacctcgcggaattagtcaaagcgcgtgaagcgcaagggcagcgcttgccggcgctgttctgcttcccgcagatcctgcagcaccgcctgcgctcgatcaacgccgccttcaaacgcgcgcgtgaatcgtatggctataacggcgattacttcctcgtctacccgatcaaggttaaccagcaccgtcgcgtgattgaatcgctgatccattccggcgagccgctgggcctggaagccggttcgaaagcggaactgatggccgtgctggcgcacgccgggatgacccgcagcgtcatcgtctgtaatggttataaagaccgcgaatatatccgtctggcgctggtgggcgagaagatgggccacaaggtctatctggtcattgagaagatgtccgagatcgctatcgtactggaagaggccgagcgcctgaacgtggtgccgcgccttggcgtacgtgcgcgtctggcctcgcagggctccggtaaatggcagtcctccggcggcgagaagtccaagttcggcctcgcagcgacccaggtgctgcaactggtcgaaattctgcgcgaggcaggccatcttgagagcctgcaactgctgcacttccacctcggttcgcagatggctaacattcgcgatatcgccaccggcgtgcgtgaatcggtgcgtttctacgtcgaactacataagctgggtgtcaacattcagtgcttcgacgtcggcggcggcctgggcgtggactatgaaggcacccgctcgcagtccgattgctcggtgaactacggtctgaacgaatacgccaacaatatcatctgggcgatcggcgatgcctgcgaagagaatggcctgccgcacccgacggtgatcaccgagtccggccgcgcggtgaccgcgcaccataccgtgctggtttccaacatcatcggcgttgagcgtaacgaatacaccgaggcgaccccgccggcggaagacgctgcgcgtccgctgcagagcatgtgggaaacctggctggagatgcacgagaccggcaaccgccgctcgctgcgcgaatggctgcacgacagccagatggacctgcacgatatccacatcggctactcctcaggcaccttcaacctgcaggagcgcgcgtgggcggaacagctgtatctgaacatgtgccatgaggtgcagaagcagctcgacccgagcaaccgcgcccatcgtcccatcatcgatgagctgcaggagcgaatggcggataaaatctacgtcaacttctcgttgttccagtcgatgccggatgcctgggggatcgatcagctgttcccggtgatgccgctggaagggctgaacaagtcgccggagcgccgcgcggtgctgctggacatcacctgcgattccgatggcgccatcgatcactacgtggacggcgacgggatcgccaccaccatgccgatgccggaatacgacccggagaacccgccgatgctgggcttcttcatggttggcgcctatcaggagatcctcggcaacatgcacaacctgttcggcgataccgaggcggtggacgtgttcgtcttccctgacggcagcgttgaggttgagctgtccgacgagggcgataccgtagcggatatgctgcagtatgtgcagctggatccgaacacgctgctgacccagttccgcgatcaggtgaaaaataccggtctggacgacgcgctgcagcagcagttcctcgaggagttcgaggcgggactgtacggctatacttatctggaagacgagtag

SEQ ID NO: 211827 - DNA, 1155 bp, Klebsiella pneumoniae
atggcaaaacacctttttacgtctgagtccgtatcagaagggcatcctgacaaaattgctgaccaaatctccgatgccgtgctggatgcgatcctcgagcaggatccgaaagcgcgtgtcgcatgtgaaacctatgtcaaaaccggcatggtgctggtaggcggcgaaatcaccaccagcgcatgggttgatatcgaagagatcacccgcaacaccgtccgcgaaattggctacgtgcattccgatatgggctttgacgccaactcgtgcgccgtactgagcgccattggtaaacagtctccggacattaaccagggcgttgaccgtgccgatccgctggaacagggcgccggcgaccaggggctgatgtttggctacgccactaacgaaaccgacgtgctgatgccggcgccggtgacttacgctcaccgtctggtgcagcgtcaggctgaagtgcgtaaaaacggcaccctgccgtggctgcgcccggatgcgaaaagccaggtgaccttccagtatgacgacggcaaaatcgtcggcatcgacgcggtcgttctgtcgactcagcacgcggaagatatcgatcagaaatccctgcaggaagcagtgatggaagagatcatcaagccgattctgccgaccgaatggctcaacgcgtccaccaaattcttcatcaacccgaccggccgtttcgttattggcggcccgatgggcgactgcggtctgaccggtcgtaagatcatcgttgatacctacggcggcatggctcgccacggcggcggcgcgttctccggtaaagatccatctaaagttgaccgttccgcagcctacgcggcgcgctatgtggcgaagaacatcgttgccgcaggcctggccgatcgttgcgaaattcaggtttcctacgctatcggcgttgcagaaccgacgtccatcatggtggaaacctttggcaccgagaaagtgccttctgaacagctgaccctgctggtgcgcgagttcttcgacctgcgtccatacggcctgattcagatgctggatctgctgcacccgatctacaaagaaaccgcagcctacggtcactttggtcgcgaacatttcccatgggaaaaaaccgacaaagcggcgctgctgcgggaagcggccggtctgaaataa

SEQ ID NO: 211828 - DNA, 1395 bp, Klebsiella pneumoniae
atgcctgacaacaaaaaacaagggcgttcgaacaagactatgacgttcttcgtctgtttcctcgccgcgctggctggcctgctgttcggccttgatatcggtgttattgcgggtgccttaccctttattgccaatgagttccagatttccgcccacacccaagagtgggtggtcagctccatgatgttcggggctgccgtcggcgcggtcggcagcggctggctctctttcaaactgggccggaaaaagagcctgatgatcggcgcaatcctcttcgtcgccggttcgctgttctctgccgccgcgccaaacgtcgagatcctgctggtttcccgtgtgctgctcggcctggcggtgggcgtcgcctcatatacggctccgctgtatctgtcggaaatcgccccagaaaaaattcgcggcagtatgatttccatgtaccagctgatgatcaccatcgggatccttggcgcctatctctctgacaccgctttcagctacagcggcgcatggcgctggatgctcggggttatcatcattccggcggtattgctgctgatcggcgttatcttcctgccggacagcccgcgctggttcgccgccaaacgtcgctttgtcgatgcggaacgcgtgctgctgcgcctgcgcgatactagcgccgaagcgaaacgcgagctcgatgaaatccgtgaaagcctgaaggtaaaacagtccggctggtcgctgtttaaagacaacagcaacttccgccgcgcggtgttcctcggcatcctgctgcaggtgatgcaacagttcaccgggatgaacgtcatcatgtactacgcgccgaagatttttgagctggcgggttatgccaacaccactgagcaaatgtgggggacagtgatcgtcggtctgactaacgtgctggccacctttatcgccatcggtctggtcgaccgctggggccgtaaaccgacgctgatccttggctttatcgtgatggccgcgggtatgggcgtcttgggtaccatgatgcacatcggcattcactcctctaccgcgcagtacatcgccgtcctgatgctgctgatgttcatcgtcggtttcgccatgagcgccggcccgctgatttgggtactgtgctccgaaatccagccgctgaaaggccgcgacttcggtatcacctgctccacagcgaccaactggattgccaacatgattgtcggcgccaccttcctgaccatgctcaactcgctgggcagcgccaataccttctgggtgtacggcggtctgaacgtgctgtttatcctgctgacgctgtggctgatcccggaaaccaaaaacgtctcgctggaacatattgaacgtaacctgatgcagggtcgtccactgcgcgagatcggtgcccgcgattaa

SEQ ID NO: 211829 - DNA, 459 bp, Klebsiella pneumoniae
atgcgcagcctgcgggagcatctcgccaatgcgaatcgcaagctggaacgccgctatgcggaaccgacgctggtctaccagcagcgtggtacttccgccggcaccgcctggctggagaaaaacgaaattcgtttaaacccggtgctactgctggaaaatcagcgtgagtttatcgatgaagtggtgccgcatgagctggcgcacctgctggtctggcagcatttcggccgcgtcgcgccgcacgggaaagagtggaaatggatgatggagagcgtccttggcgttcccgcgcgtcgcacccaccgctttgaactcgcttcggtccgccagaacaccttcccctatcgctgtcgctgtcagcagcaccagctcaccgtccgtcgccataaccgggtggttcgcggcgaggccacctaccgctgcgttcgctgcggcgatctgctggtggctgaaaaataa

SEQ ID NO: 211830 - DNA, 708 bp, Klebsiella pneumoniae
atgtcccgtatgcatgttttagccgtagcggtattgagcgcggcagtcagtggtccgcttgcggccgctggtattaatagtttttcccaggccaaagccgctggcgtcaaagtgaatgccgacgttccgggcgatttttattgcggctgtaaaatcgactggcaggggaaaaaaggcgttatcgatttggaatcctgcggctataaagtgcgtaaaaatgagaaccgcgccagccgggttgaatgggagcacgtagtgccggcatggcagttcggccatcagcgtcagtgctggcaggagggtggacgtaaaaactgcgccaaagatccggaataccgcaagatggaaagcgatatgcacaacctgcagccggcggtgggagaagtgaatggcgatcgcggcaactttatgtacagccagtggaacggcggtgaaggccagtacggccagtgcacaatgaaggtcgattttaaagataaaatcgccgagccccctgcccgcgctcgcggcgccatcgcccgcacctacttctatatgcgcgaccgctatcagctgaatctttcccgccagcaaactcagctgtttaccgcctggaataaacagtacccggtcaccgcctgggaatgtgaacgtgatgagcgcatcgcgaaagtgcagggcaaccataatccgtatgtccagcaggcttgccaggcgcaaaagagctaa

SEQ ID NO: 211831 - DNA, 732 bp, Klebsiella pneumoniae; identical to SEQ ID NO: 137953

SEQ ID NO: 211832 - DNA, 951 bp, Klebsiella pneumoniae
atgatcaagctcggcatcgtgatggatcccatcgcaaccatcaacatcaagaaagacaccagcttcgctatgttgctggaggcgcagcgtcgcggctatgaactccattatatggagatgaacgacctctatttgatcaacggcgaagcccgcgcccggacgcgcacgctgagcgtcgaacagaactacgataaatggtatgacttcaccggcgagcaggatctgccgctggcggaccttgacgtcatcctgatgcgtaaggatccgccgtttgataccgaatttatttatgccacctacatcctggagcgggcggaagagaaaggcacgcttatcgtcaacaagccgcagagtctgcgcgactgtaacgagaagctgttcaccgcctggttctctgaactgactccggaaacgttggtcacccgcaataaagcccagctgaaagccttctgggaaaagcacggcgatatcatcatgaaaccgctcgacggcatgggcggcgcctctattttccgggttaaagccggcgatccaaaccttggggtgattgccgagacgctgaccgaactgggcagccgctactgcatggcgcagaactatctgccggccattaaagatggcgacaagcgcgtgttggtagtggatggagagcccgtgccttactgcctggcgcgaattccgcagggtggcgagacccgcggcaatctggccgccggcggccgcggcgaagcccgcccgttgaccgaaagcgactgggaaatcgcccgccgcgtcggcccgacgctgaaggccaaaggccttatcttcgtcggcctggatatcatcggcgaccgtctgacggaaattaacgtcaccagccccacctgcgtacgcgaaatcgaagccgccttcccggatatttcgatcaccggtatgctgatggacgctatcgaaagacgtatcgataaataa

SEQ ID NO: 211833 - DNA, 564 bp, Klebsiella pneumoniae; identical to SEQ ID NO: 137951

SEQ ID NO: 211834 - DNA, 417 bp, Klebsiella pneumoniae
atgagcggaacctttctcggctttgactttggcaccaaaagcatcggcgtggcggtgggacaacgcatcaccgcgaccgcacgaccattaccggcgctgaaggcgcaggatggtaaaccggactggaacgtcatcgaaaaactgcttaaagagtggcagcctgaggcggtaatcgtcggcctgccgctcaatatggacggcaccgagcaaccgctgacggcgcgcgcgcgtaatttcgccaataaaattcatggccgctttggcgtcgcgatccttctccacgatgaacggctgagtacggttgaggcccgcgcgggcctgtttgaacacggcggctaccgggcgctgaataaaggcagcgtcgattcagcctctgccgtagtcatactggaaagctacttcgagcagagcttttaa

SEQ ID NO: 211835 - DNA, 654 bp, Klebsiella pneumoniae
gtgattaatttaaatggaaattcatcatcttctcgtcaggtaacctttattacccacccgtctattcaaagcaaagcctttgccagctatctgagcgaaaccctgatggcaccggtggttttacaaaatattaataaaccgctggcgcagcgtttggcaaaagattctgtaatattatttgatattgcagtgtcaaataagaaattaaacggggtgtggcgggatattattcgcctgcaggcagataatcctcgtttgttgattattaatagcgcacaaaagtatgagctatacgaaatggcgcagtggccggctttatatggcgtgttccgtcatgacgatgatgaatcgcgcttaattgagggcgttaaggccgtgctgaacggcgagcagacggctgaattgagcgtgatgcacccggcgatgtacgctgcggaccatgcatcgactccagtagagaactcgccgctgaccgagcgggaatgcgagatcctcaacgaactgcgctgcggcgcgacgaacctggatatcgcccgcgcgctgtttatcagcgagaacacggtgcggacgcacctgtacaatgtgtttcgtaaactgagcgtgaaaaatcgcacccaggcggtgagctgggctaacgaacatctgcgccactaa

SEQ ID NO: 211836 - DNA, 981 bp, Klebsiella pneumoniae
atgaagctggaagaaatcgtagcccttagtgtaaagcataatgtctccgatctacacctgtgcaattccgccgcaccacgctggcggcggcagggcaggctgcagcccgcgccctttcccgcgccggatattgcgaatttactcaacgactggctcgatgccgcacagttactgcactggcaggaacacggccagattgactttgcgctgaccctggcctgcggtgcgcggctgcgcgccagcgccttcgcccatacgcgtgggatatcgctggtgctgcgcctccttcctgaacagtgcccgcgtctggacacgctcggcgccccgcctgcgctgagcgaactgctggcggaagagagtggtttgctgttggtcaccggagcgacgggcagcggcaagtcgaccaccctggcggcaatggtggggcacctcaatcagcatcttgatggccatattctgacgcttgaagatccggtggaatttattcatcacagcgagcgctgtctgatccagcagcgggaagttggccgtcactgtccttcgttcgccgcggcgctccgcgtggcgctgcgccaggatccggatgtgatcctgctcggggagctacgcgatagcgaaaccattcgcctggcgttaaccgcggcggagaccgggcacctggtaatggcgacattacatacccgcggcgcggcgccggcggtggagagattaatcgatgtctttccggcggaggagaaagatcaggttcgtagccagcttgccggaagcctgtgcgcggtactggcgcaaaaattgttacctgcacgtcagggcgggagagttgcgctatacgagcttctggtcaacacgccagcggtggcgaatttgatccgtgaaggaaaagtacatcaattgcctggtgtgatgcagaccgggatgcaggccggaatgttgacctttacccagagttttcagcaatgtgtcgctgcaggcgcgctataa

SEQ ID NO: 211837 - DNA, 702 bp, Klebsiella pneumoniae
atgaacgatattgcgcataacctggcacaggtccgggacaaaatctccggtgctgccgccctatgcgggcgtgcgccagaagaagtgacattgcttgcagtgagtaaaacgaaacctgcgagcgcgatcgaagaagccattgcggcaggccagcgggcatttggtgaaaactacgtccaggagggcgtggagaagattaaccatttccagcaggctggcgtcagcgggctgcagtggcactttattggccccctgcagtccaacaaaagtcggttggtggcagagcattttgactggtgccacaccgtcgatcggctgaaaatcgccacccgcctgaacgagcagcgcccggcgcatttgccgccgctgaaggtgctgattcaaattaacatcagcgatgagcagagcaaatccggcatcccgctggaagcgctcgacggcttagcggcggagatcgctgagttacctcatctggaactgcgcggcctgatggccatccccgcgcctgagtcagaatatgtaaggcagtttgccgtcgcccggcaaatggcggtagcatttgcgcgattaaaaacgcggtaccccacggtcgatacgttgtctctgggaatgtcggacgatatggaagccgcaatcgcggcgggaagcacgatggtgcgcatcggtacagccatttttggtgcgcgcgactacagcaaataa

SEQ ID NO: 211838 - DNA, 567 bp, Klebsiella pneumoniae
atgaagacgttgactttcctgctttcaacggtcattgagctttacacgatggtcgtgttgttacgcgtctggatgcagtgggcgcgctgcgacttttacaatccgttttcgcagtttgtggtgaaagccacgcagccgattgtcggaccgctgcgccggattatcccggcaatggggccgattgacagcgcctcgctgctggtggcatttattctctgcgtcatcaaagcgatcgtgctgtttatggtgatcaccttccagccgatcatctggatctccgctctgcttattctgctgaaaaccatcggctcgttgatcttctgggtactgctattgatggcgatcatgagctgggtcagccagggccgtagcccggtggagtatgtgctgatgcagctggcggacccgctgctgcgccctatccgcaacctgctgccgtcgatgggcggtatcgatttctcgccgatggtgctggtactgctgttgtacgtaatcaatatgggcatcgccgaagtgctgcaggccaccggtaatgtactgctgccggggctgtggatggcgctatga

SEQ ID NO: 211839 - DNA, 291 bp, Klebsiella pneumoniae
atgagtgccgttgaaacctgcgctgacgggctggtgttgaggctgtacattcagcctaaggccagccgcgatagcatcgtgggcgtacatggcgacgagcttaaagtcgccattaccgccccgcccgttgatggccaggccaatgcccacctggtgaaatttctcgccaaacagttccgcgtcgccaaaagccaggtactgattgaaaaaggcgagctgggccgccataagcaagttaaaatcatcgccccacaacagatcccgactgcggtcgcggcgctaactgaataa

SEQ ID NO: 211840 - DNA, 594 bp, Klebsiella pneumoniae
atgcaaaaagtcgtcctcgctaccggcaacgccggcaaagtgcgcgaactggcctcgctgctggaagattttggtctcgatatcgtcgctcagaccgagctgggcgtggactctgcggaagagaccggcctgaccttcattgaaaacgcgattctgaaagcgcgccacgcggcgcagatcaccggcctgccggccatcgccgacgattccggtctggccgtcgatgctcttggcggcgcgccgggtatttactccgcacgctattccggcgtcgatgccagcgaccagcagaatcttgagaagctgctcgacgcgttaaaggacgtgccggacgaccagcgtcaggcccagttccactgcgtgctggtctatctgcgccatgccgaggatcccacgccgctggtgtgccacggcagctggcctggggtaatcacccgacaagccgccggtcatggcggcttcggttacgacccgatcttcttcgtcccgtcagaagggaaaaccgcggccgaactgagccgtgaagaaaagagcgccatttcccatcgcgggcaggcgctgaaactgttactggaagcattacgtaatggctaa

SEQ ID NO: 211841 - DNA, 1137 bp, Klebsiella pneumoniae
atggctaatttgccgccgctgagtctctatatccatattccctggtgcgtgcagaaatgcccgtactgtgattttaattcgcatgcgctgaaaggcgaggtgccgcatgatgactacgtccagcatctgctgaacgatctgcaggctgatgcgcaatatgcccagggacgggaaataggcactatttttatcggcggcggaacgccgagcctgctgtccggcccggccatgcaaaccctgctggatggcgtccgcgcctgcctgccgctggccgccggggcggaaatcaccatggaagccaacccgggtaccgtggaggccgatcgcttcgttgattatcagcgcgccggggtgaaccgcatctccatcggcgtacaaagctttagcgaaccgaagctgcagcgcctggggcggatccacggcccggaggaggccaagcgcgcagcacgtctcgccagcggcctcggcttgcgcagcttcaacctcgacctgatgcacggtctgccggaccagtcgctggaggaggcgctggacgatctgcgtcaggcgattgccctcaacccgccgcacctgtcgtggtaccagctgaccattgagccgaacaccttgttcggctcccggccgccggtgctgccggatgacgacgcgctatgggatattttcgagcaggggcatcagctgctgagcgccgccggctatcagcagtacgagacgtccgcctatgctaagccaggcttccagtgtcagcataatctcaactactggcgctttggcgactacctcggcatcggctgcggcgcgcacggcaagatcaccttccctgacggacgcattctgcgaaccgccaaaacccgccacccgcgcgggtatatggaaggccgttaccttgagcgtcagcatgatgtggaagaagcggataaaccgtttgagttctttatgaaccgttttcgcctgctggaggccgcgccgcgcgctgaatttagccgctataccggacttgaggaagcggcgatccgcccgcagctggacgcggcgatagcccagggctacctgcaggaagacgagcagaactggcagattaccgagcacggtaagctgttcctgaattccctgcttgagttgtttctgaacgagtaa

SEQ ID NO: 211842 - DNA, 717 bp, Klebsiella pneumoniae
atgcgtaaaacgctgctggcggtggcgctctccgtcaccgctttgtctgcccatgcggactaccagtgtagcgtcacgccgcgtgacgatgtgatcctcagcccgcagcaggtgcaggtgaaaggggaaaacggcgatctggtgataaagccggacggcaatctgacctttaacggcaaggcctatgcgctcagcgccgcccagcgcgaacaggcgcaggattatcaggccagcctgcgcagcagcctgccgtggattgacgaaggcgcgcgttcgcgagtcgaaaaaagccgcaaggcgctggataaaatcattaccgaacaggttggcgccaacagcagcatgcacggtcgcctgaccaaactggacgcgcagctgaaagaacagatgaaccgcataattgagcgccgcagcgatggcctgaccttccactataaagccatcgaccaggtacgcgccgatggccagcagctggtgaatcaggcgatgggcggcattctgcaggacagcattaacgagatgggcgccaaagcggtgctcaaaggcggcggtaatccgttacagggcattcttggcagcctcggcggcctgcaaacggcgattcaggaggaatggaaaaaccaggaggccgatttccagcagtttggtaaggacgtctgcagccgggtggtatcgctggaggacagccgcaaagcgctggttggctcgctgaaataa

SEQ ID NO: 211843 - DNA, 327 bp, Klebsiella pneumoniae; identical to SEQ ID NO: 137733

SEQ ID NO: 211844 - DNA, 720 bp, Klebsiella pneumoniae
atgaaaaacgacgtcatctctccggaattcgatgaaaacggtcgcccgctgcgccggattcgtagcttcgtccgtcgccagggccgcctgacgaaagggcagcagcatgcgctggataacatttggccggtgatgggcgttgaattcaacgatgcgccgctcgatttcgccgccctgtttggccgtgacgcgccggtcaccttagaaattggcttcgggatgggcgcctcgctggtggcgatggcgaaagccaaaccggaacagaatttcctcggcattgaagtacactccccgggcgttggcgcttgtctggcttctgcggaagaagaaggcgtacaaaacctgcgcgtaatgtgtcacgatgcggtggaagtgctgcataccatgatcccggataactcgctgaatatggtgcaactgtttttccctgatccgtggcataaagcgcgtcataataaacgtcgtatcgtgcagccgcctttcgctgagctggtgaaaagcaagttgaagctcggcggcgtcttccatatggcgaccgactgggaagcctatgccgtgcatatgctggaagtcatgtcctcgctggaaggctatcgtaaccagtcggcaagcaacgattacgtaccgcgcccggaatcgcgcccggtaaccaaatttgaacagcgtggccatcgtctcggccacggcgtatgggacttaatgttcgagagggtgaaataa

SEQ ID NO: 211845 - DNA, 1059 bp, Klebsiella pneumoniae
ttgacttttctcgccacgcaattttcagcccaggttctggactggtacgacaaatacgggcgtaaaaccctgccctggcaaatcgccaagacgccctacaaagtatggctctccgaagtgatgttgcaacaaacccaggtgaccacggtaatcccctattttgaacgctttatggcgcgtttccccacggtggtggatctcgccaacgcgccgctggatgaagtgctgcatctgtggaccggtctgggctactatgcccgggcgcgcaacttacataaagccgcgcagcaagtcgccacactgcacggcggcgaattcccccggacctttgacgaagtggcggcgctgcccggcgtcgggcgctcaacggcgggggcgattttatccctttcgctcggtcagcattatccgattctcgacggcaacgtgaagcgcgtgctcgcccgctgctatgctgtcagcggctggccggggaaaaaagaggtggaaaaacggctgtgggacatcagcgaagaggtcaccccggcagagggcgtcgagcgcttcaaccaggcgatgatggatctcggggcaatggtttgcacccgctcgaagccgaagtgcgagctgtgtccgctgagcaacggctgcgtggcctacgcgaaccattcatgggcggaatatccgggcaaaaaaccgaagcagaccctcccggaacgcaccggctacttcctgctgatgcagcacggcgacgaggtgtttctttcccagcgtccgccggtgggtctgtggggcgggttgttctgttttccgcagtttgcagacgaagcggagctacgcgagtggctggcgcagcgccagataaaggccgataatctgacgcaattaaccgcttttcgccacactttcagccatttccacctggatattgtgccgatgtggcttacagtgcactcatctggcgcatgcatggatgaaggcaacgcactctggtataacttagcgcagccgccgtcggtcggtctggcggcccccgtggagcgcttgttgcaacagctaaaagccggagcgccggtataa

SEQ ID NO: 211846 - DNA, 276 bp, Klebsiella pneumoniae; identical to SEQ ID NO: 137730

SEQ ID NO: 211847 - DNA, 1086 bp, Klebsiella pneumoniae
atgatgaaaaaatacttagcgctcgcgctgattgcgccgttgctcgtttcgtgttccagctccaataaaaaaggcgccgaatacaacgaggcctgggtcaaggacacgaacggattcgatattttgatgggccagttcgcccacaacatcgagaacatttgggggtacaacgaagtcctgctcgccgggccaaaggactacgtcaagtacaccgaccagtatcaaacccgcagccacatcaacttcgatgaagggacgatcaccgtcgagaccattgccggcaccgaccctcgcggacgactgcgccaggctatcgtcaaaaccctgttgatgggcgatgaccccaactccattgacctctattccgatgtcgatgacatccagatctccaaagagccgttcctctatggccaggtggtggataacaccggggcgtcgattcgctgggagtggcgcgccgcgcgctttgccgactatctgctgcaaacccgtctgaagagccgcaacaacggcctgcgcgtggtctacagcatcaccattaacctggtgccgaaccacctcgacaaacgtgcgcataaatacctcggcatggtgcgtcaggcctcgcgtaagtatggggttgatgagtcgctgatcctcgcgattatgcagaccgaatcctcctttaacccctatgcggtcagccatgccgacgccatggggctgatgcaggtggtccagcacagcgccggcagagacgtcttccgctcccagggtaaatccggcctgccaagccgcagctatctgtttgacccggcgaataacatcgacaccggtaccgcctacctggcgatgctgaacaatgtttacctcgccggcatcgataaccccacctcgcgtcgctacgcggtgatcactgcctataacggcggcgccggcagcgtactgcgggtcttctccagcgataaagtgcaggcggccaatattatcaacagcatggcgccaggggacgtctaccagacgctgaccacccgccatccgtcggcggaatcgcgccgctatctgtacaaagttaatacggcgcagaaaagctaccgccgtaaatag

SEQ ID NO: 211848 - DNA, 1254 bp, Klebsiella pneumoniae
atgaatcttaagctgcagctcaaaatactgtcgttcctgcagttctgcctttgggggagctggctcaccacgcttggctcgtacatgtttgtcacgctgaagtttgacggcgcggcaatcggcgcagtgtatagctcgctcggtatcgccgcggtgttgatgccgacgctgctcggcatcgtcgccgataagtggatcagcgccaaatgggtatacgccatctgccacctggtcggcgcgttaacgctgtacctcgcggcgcaggtcaccacgccgggcgagatgttcctcgtgatcctgcttaactcgctggcctacatgccgacgcttggcttgatcaataccatctcctactaccgcctgcagtcggcggggctggatattgtcaccgatttcccgccaattcgtatctggggcaccatcggctttatcctcgccatgtggggcgtgagcttctccggctttgaactgagccatatgcagctgtacattggcgcgacgctgtcggtcctgctgactctgttcaccctgacgctgccgcatattccggtcgccaacgcccagcgcaatcaaagctgggcggagatgctcggcctgaacgcttttgcgctgtttaaaaacaagcgtatggctatcttctttatcttctcgatgatgctcggcgccgagctgcaaatcactaacatgttcggtaacaccttcctgcacagcttcgataaagatccgctgtttgccggcagctttatcgtcgagcacgcgtcagtgctgatgtcgatttcgcagatttccgaaacgctgtttatcctgaccatcccattcttccttagccgctacggcattaagaatgtgatgcttatcagtattgtggcgtggatgctgcgcttcggcctgttcgcctttggcgacccgacgccgttcggcactgtactgctggtgctgtcgatgatcgtctacggctgcgccttcgacttctttaacatctccggttcggtgttcgttgagaaagaggtgcgcccggaaatccgcgccagcgctcaggggatgttcctgatgatgaccaacggcttcggctgtattctcggcgggatggtgagcggcaaagtcgtcgaacactttaccgtcgaggggatcactgactggcagagcgtgtggctgattttcgccggctattcgctggtgctggcctttgccttcgtggcgctgttcaaatacaaacacgtcagacaaccgaccgccgcccagcagagcgtgtga

SEQ ID NO: 211849 - DNA, 2139 bp, Klebsiella pneumoniae
atgaaatccatgcacattgccgccagctgcgagctggtcacccgcttgtccacccaccgtcgcgttgtggcgctggacagtaccgattttaccgatgtggcggcagtcgtcatctccgtggccgacagtcgcagcggcatccttactctcctcaggcgtagcggatttaacctgccggtctacctgctgagtgagacggcggtcgacaagccggagggggtgcaggcggtgatcgccggtaaagatcaggagtggctggagctggaggcggcggcctgtgattatgaagcgcgtctactgccgccgtttttcaataccctgacccagtacgtcgagatggataacagcacctttgcctgtccggggcatcagcacggggcgtttttcaaaaagcaccctgcaggccgtcagttctatgacttttttggcgaaaatgtctttcgcgccgacatgtgcaacgccgatgtgaaattaggcgatctgctgatccacgaaggatcggccaagcacgcgcagaagttcgctgcgaaggtgttcaacgcggataaaacctacttcgtcctcaacggcacctcggcggccaacaaagtcgtgaccaacgcgctgttgacccgcggcgatctggtgctgttcgatcgcaacaaccacaagtcaaaccatcacggggcgctgatccaggcgggggcgacgcctgtttacctggaagccgcgcgcaatccgttcggctttatcggcggcattgacgagcgctgctttgatgagcattacctgcgggatctcatccgcgaagcggcgcctgagaaagccaatgcctcccgcccgtttcgtctggcggtgatccagctggggacctacgacggcacggtctataacgcccgccaggtggtggataagatcggccacctctgcgattacatcctgttcgactcggcgtgggtgggctatgagcagtttatcccaatgatggccgactgctcgccgctgctgctggagctgacccccgacgatccgggtatttttgtcacccagtccgtgcacaagcagcaggccggcttctcacagacgtcgcagatccataaaaaggataaccatctgcgcggccaggcgcgtttctgtccgcacaagcggctgaataacgcctttatgctgcatgcctccaccagcccgttctatccgctgtttgccgcgctggacgtcaacgccaaaattcatgaaggtgagagcggccgccgcctgtgggccgagtgtgtggcgctgggcatcgaggcgcgcaaagcgatcatcgctaactgcaagatgatccagccctttattccgccgacggtggcggggcgcccgtggcaggatcacccgaccgaggcgatcgcccgggagcgccgcttcttcagcttcgaacccgacgcgcgctggcatggttttgaaggctacgcggacgaccagtattttgtcgacccgtgcaagctgctgctgaccaccccgggcatcgacgcggagagtggggagtacagtgagttcggcattccggcgactattctggcgcattatctgcgtgaaaacggcatcgtgccggagaagtgcgatctcaactcgattctgttcctgctgacgccggcggaaagtgccgaaaaaatggcgcagctggtagcgatgctcgggcagtttgaacagcatattgaagcggatacgccgctggccgatgtgttgccgaccatctataacaaatatccggtgcgttatcgcgactataccctgcgcgagctgtgccaggagatgcacgatctgtacgttagctttgacgtgaagagcctgcaaaaagagatgttccgtaaacggagcttcccaagggtggtgatgaatccccaggatgccaaccacgagtttattcgcggcaacgttgagctggtgcgtctgagcgaggcggaaggccgcgtcgcggcggagggggcgctgccgtatccgccgggcgtgctgtgcgtggtgcccggcgaggtctggggcggcgccgtgctgcgctatttcctcgcgctggaagagggggtcaatatgctgcctggcttctcgccggagctgcagggggtttacagcgagacggatccggacggcattaagcggctgtatggctacgtgctgaagggataa

SEQ ID NO: 211850 - DNA, 714 bp, Klebsiella pneumoniae
gtggttacaggaccttttattaacgccagcgcggtgctggtcggcggtgtgctgggcgccttactcagccaacggttgccggaacggatccgcaccgcaatgacctctatttttggcctggcgtcattgggcatcggcattttactggtcattaagtgcgccaatctgccggtgatggtgctgtcgaccctggtagggacgctgctcggcgaaatatgcaatatggaaaaaggcatcaatacgctggtcagtaaactccagcagttgatgtcagcgaaaggcaagaaaaaggcttcggctcatgagtcttatattcagagctatgtggcgattatcgtcctgttctgcgccagcggcaccggcgtcttcggcgccatgcgcgaagggatgaccggcgacgccagcattctgattgccaaagcgtttctcgactttttcaccgccaccatcttcgcctgcaccctgggcattgccgtcgccgccatcagcgtaccgatgctgcttatccagctgactcttgcagcctgcgcggcgatcattatgccgcttaccacgccgatgatgctggcggatttcagcgccgtcggcggcatgctgctggtggccaccgggctgcgcatctgcgggataaaaatgtttgccgtagtgaatatgctgcctgcgctggtgctggcgatgccgatttccgcggcctggacgctgttttttgcctga

SEQ ID NO: 211851 - DNA, 948 bp, Klebsiella pneumoniae
atggatgaattgttaacatttgaagttcttctggagaagtatttttacgctaaaacattacggcctgacacgcagtggagttattgcaaggtagtaagaacgtttacgaagtttgcgaaagtattacctggggaggtcagtgccgatttggtgctgaggtggaaagaagaagtattaaaagtgcaggggctgaaggttcgtacctggaataacaaggttgcccatatgcgtgcgttgttcaactttgctatcaagaaaaaactattccaggaagagaacccgtttaatggcgttgtggcttgcccgggcgttaaacgtaaaaaaacactttctgacagtcagcttgaaacggtctatcgggttatgcagcagcagaggggaagggagcaatccggcgatcgttatcgtaatgcattggctccagcatggttctggactgccgtgctggatatcttgcgctatacggccatacgccagaatcagttcttacatatcagaattagcgatgtcgattttgattcgcactgcattcacttacggcttgagggggctaaaaatcaccgtgaacatcaggtgccgattatctccgccctgcgtccatcgcttgaggagttggtcagtcaggtgacaaaagcgggggcaatgccacatgagcagctatttaacatcgcctggtttgatttcaggagaaaggcaaattatcaggatggtatgacgaaagttcctctacggtcctttttccgtcggttgtcccgggagtgtggttttctggttagccctcatcgtttccgtcataccatcgcgacaaagctgatgcgtacgccggaacgtaatctgcaaacggtgaaaaccttgctggggcacgttagtctggcgtcaacgctggaatatgtggaggtgaatatcgaaagcctgaaggcgacgctggagcaggagttaagatggtga

SEQ ID NO: 211852 - DNA, 1290 bp, Klebsiella pneumoniae
atgctcaatactctatttttctggcgtgacaaggcgcatccgccggaacccttatccgataaccgttcacctgtgcctgcgggttattttgctccggccagcgtagaggagttgttgggcacacctctacgtcagcaatatctgcaaacgctgtgggattactcttctctgcccagaaacctgtatcagcagtattacctgactcctctggagcagtgtgtactactaatgcagcagtttccggtagcggagcagggggcgtatgcgtaccccggtgggatggtcgattgttttcttaaaacgctggcaaacgcggtgaaactgtcaaaaagctacatgttgccgccgggtgctgaccctgaagatcaggcgacgcagggggctgcgtggtctgcggttattgtctgggcgaccatgtttagcgtgttggacaatttggcgcatctccacgttgaacaggagaacgggcaggtctggtcgccggttgcaggcgttctggataaaccctaccgcttccgctttgtgccagaaactcagccggaaaaggtatatggccacagcgccatgctggctttcaggctgctgccggaagaggggctgcgttggctgattcgatggcccgacgcgttaaaggcgctttcgatgtttcttgccgggtatcgggcgcaatcaggcgtagtaggggcaatagttttacaagccggggagggcagcgataaaacgccgccagtcacaccatccgcgttgccagaagcttgtcctgattcagcttttgacgattacgccactttcttacaacaggcaccgccgccctgtgaatatgttgaaaatattcccgatgatttaccgtcttttatggagaatgtggaaggagccgatctttcttctgaaccggcattgtgccgctttcatcctgctggtgagttgtttattgactggctcagacaatctatacagcagaaaaaaacgatagccaatgagccggatggtcacgtatatgtgatcgcgggggctgtattcctgaaaactccgtcaatttttcataggtttatggcggaacagagggaggcactgcgaccattaaaaatagacaactggcgtgatgttcagcgccagtttgaaaaaataaatctgcacaggcggcagcgcgggggagcaaatgtataccagtgccgtaatagggagagccagaaggtttatcacggctatcttgtacctgcgaaagaaatttatggcgcagcaacagtgccagcagataccccgttattagaagttagctctttgaactaa

SEQ ID NO: 211853 - DNA, 981 bp, Klebsiella pneumoniae
atgaagaaatcgacctctcgttctcaacgcgttgagcgtacagacctgtaccaacaggtgaccgatcgcattgttgccgcgctggaaaaaggcgtaccgccctggcgcaagccgtggcgctcggtggagaaatatgcctccagcccgtttccggttaatgccgcgacggggggtcactacaacggcgttaatatcatgctgttgtggctggcagcggaagagaagggctaccgttccaatcgctggctcacctataagcaggcgcaggcagtcggtgggcaggttcgtaaaggtgaaagcagcagtctcggcgttatcttcaaaccgtttgaaaagcaggcggaagataaaagcggcagtaagctgtttgacgccgatggcaaaccggttatggaatcccgggttatggctaaatcgctgtacctgttcaacgttgaacagtgcgatagtttaccagaatccgtcgttggggtgactgccgttcctttgtcgcaggaggatgtggataccgtcagtacgccggtgtttaatcgcattcttgatatgctgaatgcctccggcgtaaaggctacatcgtttagccagaaccgggcattttaccgtccatccaccgatgagattgtattaccagcagtcggtcagtttttttctgatgctgattattgggcgacattgttgcatgagctggttcacgccagcggccatgccaaacggctaaaccgcgagggcatcacgtcttcattgagtcggtttggcgatccgatttatgcgtttgaagagcttatcgcagagctgggtagcgcttttctctgtgccgaactgggcgtttatggtgaggtgcaacatgaaagctactttgcctcatggctgaagacgctgaaagaggacaaacacgctattttccgggccagccgtcaggcgcgcgaggcctgtgaatttttacttaaccttgctcaggatgtgcgccgttcagtggcctga

SEQ ID NO: 211854 - DNA, 606 bp, Klebsiella pneumoniae
atgctgcgtttttatggttctgacctgaaggccatcgtgacggaatctataacgaccgataaatctgtcgttctggctaaggatcacggcgtttatttgatggttgacggcggtgaacaacgcgatgatggccgggtaaggcatttggcctatgctgacggctgccatcccgatcttgacccggaatgggtctcgatggcccgcatactggtcggcggcgatagctttgaagaaaggataccgctgacggaaggcgggatcgtggacatcatcaccaaaccctaccagctgtccattatgctgaaggcgcagaggctggcgatgttcattaccggctggcaaaactgtgtacccgtcgcggagtaccgtcatctgacggacagaataaacgttatggctcaggcacacttcactgcctgccgaagccagaaagagctgaaaagctggcgcatgatggcgcagcggctgcttgttgacgttgccgttgttggctgcaaacgggcaaaagctgatgaccatcactgttttcttatcgcatgcaggcaactgcaaaagcagttcgagcgggtaacgaccgaaggcgttattcaggccgtcgccatttga

SEQ ID NO: 211855 - DNA, 348 bp, Klebsiella pneumoniae
atgatcgcgttatcgtttgagccacagcctgttgttcaggatctttatgacttagccaatgcagagggggagctgttatccgttgccgccaaaatgcgtttaggaattgatgaggaacgcgatgaggacggttttaccgataacgaatatgtccttaccgacattgcttatcagctggcgcaggctttagtttttggccgttttactcattcagccagtgaaccgttattacatgacgttctggcgcttggagagaaggtgaacagggaagcctgggctcattatttctataccgggaacgcagatgcaaagtgctctctggcactggaagcgataggatatttatag

SEQ ID NO: 211856 - DNA, 399 bp, Klebsiella pneumoniae
atgacagatttcactatcacacaggtcgattttgatcgcctgctcgatcagaacgatgaagaacaggcggtacgtctgttttgttttgaacaattactttaccgctgggcagaccggctaagctgcgagtatcagggcgggctttggctggggatgaagttatccaacggcggcttttatgcttatccggccacgtctcagaactggagcatatcggcggaaaattactatcagggcacgatggactccgacacgtttggtattacggcttcgctttacgctctctgcgagctggcgaaccgtactgaagccgatgaggacatcgaaacctattatgcgttgcgcaattacgccttaatgcattcatgtactaacgccattatggcggccattgactaa

SEQ ID NO: 211857 - DNA, 279 bp, Klebsiella pneumoniae
atgaacacctatgaaatgttatccatctcgattacgtctcccgcctgggaagctgcggtcgacttttccagctctgttgaaagcgctatcgccagccaaaaccggttggttaaggaagcgctgaacgtctgggagcatcggcagaacagtgaaacggggcaggtgacgttccagctgatcgtttttactcgtactgggggaagcgtcactgcacacatcgagaaatttacggttaagcgcgttggctgctgccttatggtgtcattagccaccgcctga

SEQ ID NO: 211858 - DNA, 954 bp, Klebsiella pneumoniae
atggaaaattctattagctttatggcaagagatggcgttatttctttagatacgtttcttaaaacacgtaaatttaagaatggaatgggcatcatatttctcgacagaaacgtcgtgagccctgtaaccagtaatagtttaaaagacaaattctcatcattaaagcattaccgtttctctgtcattctttcggcaatggaaggaaagaacaagcgattaccgacccatgaagaatatattgaagaatatcaaaaatcatccgagaagataggactagcattcggggaggatcgggtagacagggaaaagatagaatctttttattatgcagtgaaaggcgagtatgaatcacacattaatgccgaatataaattcctcgcgcaatccattgagattctaaaagataaaaccctaactgaaaaagcagagaaaatcatagaactaacgcacagcatttcaaaagagcacccatcaaagatgaacccgcttctgatattgcttgtattttgtcatttatacaaaggacgcggaagacatttcatagacaaactgttaaaagttaacaagcaagaacctttagaacaaaagcttcataatgttatcagcgacctaatgatcattacattagttctaatatctattagcagcgagaagaaatatattgcagaagctgatgccaataatggtaaggtaaaacatccagacggtagttctgtaacactaaattttaaacatcgctttgtattctgtagtgctgacgctgcattactcgaattttatatgttgtatatagaactgcatgaacacttacatgttatatttcgacatcaaaaaagaatattaaatggcgcaatagagccaagattacatagcgtttgtgccaaattattcccgggagcgaccaaggaagaggcagcaaaattactcaatgaaatacactcgtatattttataa

SEQ ID NO: 211859 - DNA, 894 bp, Klebsiella pneumoniae
atgtctaaattgagtaaaagcctgtcgacgttggcccggcaggccgggggcagttttaaaaccgtggctgacagaatgaaaatcgccgatcgcatggcggagagaatgctgaatctgaatattcagatccgggacgtcaggcatattaaaactcatcacgttgagctgtatattcgcagccgtctggcggaaagcatttcaaagcgcacgttgcagaatgaaatggcggcgctacgggcgatatttaacgtagccggaaggtcgaaactggccgatcccgcccatgagtgtttaagcaatagcgcgcttgggttgtccggggccagtcgtgacggaacgaaggtggctatttccgacgagcgttatcaggccgtattttctgtaattaagatcaaggatgaaggcgtcgcggctgcggtgcagctttcccgctgcctggggttaagaacggaagaggccgtgcagtcagccaagtcattgcgtacctggcagcaggccttattacgcggcgatgagcgcgtacgagttgtttttggcaccaaaggcggcaagcccagagatacgacggttgtcgatcgtgagaaaacgcttcaggccgtgaatcatgcgcttaaaatagcaatgaataataacggcaagctggtcgataaacccaatctccattccgccatcgatcgctatcggaatatcgttaaggacgcagggctaacgggaaagatttctccgcatagtttgcgctatgcctattcccgcgaggcgacggaatatcatatgcagagaggttttagcaaaaaggaagccgaagcgttggtttctatggatttggggcacggggacgggcgcgggcattatgtggcgcgagtttataacaaaggagagcctcatgacgattag

SEQ ID NO: 211860 - DNA, 1191 bp, Klebsiella pneumoniae
atgacagataacacaaccgaagaattaaaagaaattttccagaaaatcagtaagaaagtcgttaaactaattccttacctgacaattttgtcaggcttaatggtatggagttatttaaataacatcggcagactagatttactgatagattccttttccattaatatcggattagtatctttattaatatccgctgtagtattatctctcgcaatagccataacactcatcctacccagttcgatactcatttttcactcctcaatgtttcctaatataattaacaaaccaatatctataccatggttaggttgggggttttctactttattcttgatgttaacatttcttccacacattccatctataacaaaaataatatcaccaccttcagcatcattaatctttatcataatagcagtaatatcatttatcattttcttggttatttcatggtacagtggtgatttcaaaaacaacgatttatttaaaatagctaaaaatgtcggtaaagcactaatagaaacatttactacagtattcgccacattatcaattgccatccccattacatttttattaaaagacagcactggggaaaaaaccacatcactactcatagcactggctttcatgatcgcatttgctctatcatcttttcttcccgcaatagtttattatcgcaatataaaaaacacatcatcaaacaatgaaagcaaaagcatcattccattagcaaaaaacttatctatagcagtcattataacgataactatcacgtcccttctgttccccaatgtaacgactaccttaatgaatagctctctttactctatcggagtcattgataataaaaatcattattttctaatagatggagaaaaatacaagccagatatgttcccacagaatacatggaagacgtcgacaaccgataaaatcggaccagacttctttatctacgggataagaatgttctccgccgggaataaaaatttgatttgtccagatagcgttggttccttcaaaagggaaattaatggaacaaactatgatttaatcacttcctctgataatgaagataacgcaaaaaaactaaaagatatgaccaagatctgtgtcgttttagacagcgacaatgcacaacaatgggatacttttttcgaaaataacgttcaaaacaaaggataa

SEQ ID NO: 211861 - DNA, 261 bp, Klebsiella pneumoniae
atggaaaacaacgactggcatccggcagacatcatcgccgggctaagaaagaagggaacatcgcttgccgcagtttcacgcagcgcaggcctgtcgagttccacactggcaaacgcgctgctccgcccgtggccgaaaggcgaaaagcttattgccgatgcgctgagcatctcaccggaaataatctggcccagccgctattttgacagtgaaggcaaactactcgcgcgccagataaggagtggaagaaccaacaaataa

SEQ ID NO: 211862 - DNA, 171 bp, Klebsiella pneumoniae
atgctgttcgtttataaaccagctgacatcttattctgcggtatcgtttcgttcaacgtctgcatgttgatgaacggggtagatgcagaggagggcggtgtactgtgttattggctaataattcttacgttatttgttggttcttccactccttatctggcgcgcgagtag

SEQ ID NO: 211863 - DNA, 456 bp, Klebsiella pneumoniae
atgaaaggaacggtgaagtggtttagtcaggaaaagggatatggctttattaccgcagaaggtaatcaggattatttctttggcgtcagagatgttatcggcgctgttctgcccgccactggctctcaggtcacatttaccccggccaccggacccaaagggccaaaagcgattgaaatcaccattctttcgcagcctgagcacaccgctccggataacaaaatcaagtgcccccactgcgcccgccaaataatccctcgcttagtcacctacaaaggtgaatcggaaaagtccttatgccctttctgtggcggcaccgtaaaagattttacaggcacatcaatactggatgatctcggcgatatattctggggaatgataagaaacattgccgttgccattatcgacaccgccacggccattgttattgagatcaaaaaaagtaagaaaaaatag

SEQ ID NO: 211864 - DNA, 246 bp, Klebsiella pneumoniae
atgtcatcaatatattcatctgaatatcaacttgttataaagaatcttcgcgagataagaataaagaaaggcattactcaggaaagactggcgcaggcgttgaaacgcccacaatcttttgttgccaaggtggaaagtggcgaaagaaggttagatgtgattgagtttgcctatatcgcggggctgctggggattgaaccggctccgctgctacaaaagattctggtaaaggtcgcgccgctctga

SEQ ID NO: 211865 - DNA, 252 bp, Klebsiella pneumoniae
atggacttacaagactggcatccggcggacatcatcgccgggctcaaaaagaaaggaacatcacttgccgccgtttcacgaagtgcaggcctgtctagctccacgctggcaaacgcgctgctccgcccgtggccgaaaggcgagaagcttattgccgatgcgatgggcatctcaccggaaataatctggcccagccgttattttgatgaggtcggaaatcccgttcatcgccacacgcgttcaaaaatctga

SEQ ID NO: 211866 - DNA, 300 bp, Klebsiella pneumoniae
atgagtgaagaaaagtttaacccgcaggatattgaagagatcctctctcgcccgccgtcttccgacagccacaaagtcaagaaaggcgatattcccgaaatcgccaaaagcatcggcattggggccatagaaatcgtcaaagcgcttccgattcttgcgttcggcgcgctgtctatttccactaagcacaccccgataacaaaagcaggctatcgggatggctcggaaggatatggctattatgatgaaacaggtctgaggaatcgtacttttgaccccagccaatcagacgataaataa

SEQ ID NO: 211867 - DNA, 1530 bp, Klebsiella pneumoniae
atgagtgccgacagctatctggagtacttcctcatcctactgggctggatcctgaataacgccatctggaaaacgctgctttcaaccggcctgtttgcgttgcctattgcgggtaaagtggtggcgacctggttacgaactcgcgaagagggggacgatgagggcaataagggcacgctggcgctggtgcgcatcgagcacgttatttacgtggccttcgttgtgctgatgttttgcgtgacgccggtcgttaatgtggatgtcaacaccatcaagttcaataaggaacgcagcgcccagtgcggcgtgaacatcccgctcccccagaagtcgggctatgccacgctgattaatgactttgacggtaaaacggccatggtaccggtgtggtggtacatgatccacagcctgtcaaaaggcgtaacgcacgcgacgatcgccggtattccctgcggtgataacctgcgtcagctacgtttcgacgtgcagcacacgcagataaaggatccgatcctgctggaagaggtgcaggacttcgctaatcagtgctatgccaaagcctatttccggctgaagtcgaccaacgcccagctttcggacgcgaccattaattccgtcggctggattggctctgactactttctttcgacgtcagggtattacgactattacacctccaccaaaccgcgttcgcagtggccctacgatgcgaatcgggatgatggttatcccgacgtagggcggggcggttaccctacctgtaagcagtggtggaacactccgaccgtcggtctgaagacgcgggtgatgtccagctacaatgacatcacgactcgcgcgctaaagaagaagtttggcaacgagtgggaagagatcgcgttgcgctgggtggtcagcccgaaaaatgcctcgctctccggcgacggcgaaacctatatgatggggaataacgcctcggcgggtacattcagctttgtgtccagcgcgctgggaagcctgggcgtcgctgccgggcaggtggtggcgctgcccggattcgatattctcaaatataccctgccgatggtgcaggcgctgctggagatggcgctggtgattgtcattcctctggtgctgatgttcagcgtctattcgcccaaggctgtggtgacggtgtcgttcgccatgtttgccctgatgttcctgacgttctggtgggagtttgcgggctggctggatgaccgcctgatcgacatcgtctacagcgggctggataatgtcgacggcgggaacccggtgccttttgctgactttgccggttcaacgacggacggctgggtgatgaacctggtgatgggaacgatgtatctggtgtttccggcgttctggattggtgcgctgagttgggcgggaattaaggtcggtggtgaagtggcggggtcgctgcaaaaaggcgcaggtaaggcgcaatcagcaggagaaaaagggggcgaggttgcgtcagacgtcgccggagctgcgatgacaaagggaaaatcgatgatgaaataa

SEQ ID NO: 211868 - DNA, 342 bp, Klebsiella pneumoniae
atgatggtttccggaagaaagatactctggcgcagcattcgcctgagcgggaaagtgttactggccatcgtcggctcgctcgctctggcgttagggatcagttggctgggcgttcgctatgccggaagcctgacggcgtttcgcgtctggctggatgacgccgccccctggctgctggtctggcgattggcgttgtatgggctgatcgccgggctgtggtttcagcgggtgcgcctctggttgcttcagcaaaccggcaaccttgccgccgttcgccgcatcgagtggttgatggcggggatgacgctcatggttgaactgaatatttacgcggggagctga

SEQ ID NO: 211869 - DNA, 1422 bp, Klebsiella pneumoniae
atgatcagaatgacgatgtttcaacgcatgtttctcgccagcctggtgctgtgcagcgcttcagccagcgcggtggatttaccggcgttttccatgaacagctcaggcaatgacaccagtcgtcaggtgcagggcggtattaacgacgatctctattacgccatcggcggcgggacggtggtgtccaacccgcccagcggcaaccggctgaataaaattggcatgggcgttggctggaatgccgacctgatgtgtggaaattttgacgtcaaaaccacggtaaaaaatcagctcaacggcctgaccagcggctttaaagacatgatgggggacgtgatcagcagtgcgaccggcgcggtcgccagcctgcccgcgatggttatccagcgcgccaatcccggcctgtacgagctgttaaccaacggcacgcttcaggccaacgcttactttgataaggcgcagttgaactgtcaggccatgtcgaagaagctggcggatcacaccctgtccgggccgtgggtgcaggccgccgttggggaggagtatcagaacgccctgagtgggacgagcgacgcggtgaaggccgatcagcaactgagcaaatcaacgggaaccgagggcgtctcctgggtcggcggcaaaaagcgtggcggtaaagggcaggccgcgatccggccaacgcacgatattgccagggccgggtacaacatcctcaataagcaggcggcggacagcagcgcatccattagtgaaagcgcctgtaacggcgcgctgtgccgcaaatataaaaacggcgatgaagcggctcaggtggtcgccagcgtgttaggcgatcgctctattcgcacctgtaaatccggcaatgagtgcgccagcggcgggctggagaacgaacccggcaccacgacgccgggaaccggcttcacgccgatgctcgatgagacaacccagaagaattacgaggttctggtcgagctggtgaacggttcattgccggtcaatgcggctaatctggcgaagctgaaaaccggcgacctcacggtgacgcgcggcgttgttcaggcgctaaaggatgacccggacaacaccgctctggtgcaacgtctggcaagcgagctggcgatggcggatacggtggcgaccgcgttcggtatgcgccggatgctgaccgccgggcagtcggaacctcacgttgcggagcagcaggaagcgctgacggaagccgagcgccggctggagtttctggaccgggaaattgtggcgctgaagaacgagatggagctgcgcaagcagatcagcaacaacaccattgttacagcgctgtcgcgacagacccagcgcggccttgagaacagcgcccgccaaaaaaatcccgatgccgatgaagccgtacagcagctggggacggaggtggcgccatga

SEQ ID NO: 211870 - DNA, 942 bp, Klebsiella pneumoniae
atgaagcatcggtttgcttatccactggccgcgctgctgatggcgggaagcgccgtacccgcatccgcctcgctgaccacgccccaacttgtcgccagcgccgcgtgcccggactgcattgactatcgggtagtgggtgtttgttactggctgctgtgtaccccgtttggttgcagcgtcaagacgtcggtaaaagtacgtcactttatcccgcaggtggtggtgtcggcctatcgccagccgggcgataacccgtggcgtgaggtcgcgatgctgagccgcagcgcattaggcgggctggctgacggtggcggtgagaatcagcaaaagcgcggccagcgtaaagacaatgtgcgctaccgcagcgtggacgcgatcggccatcccgccgccagccttatcggtcagcagacctccggctattcctgcaagggagccgccaccgcttggcagccgtatttcctgagcaatctggatgcgctgatgtggcgcaccggtttgccggaaagtgtttacccggaggcgctcaccccggggcggcgggaaatcggcgcaaccactgccgggaacatgtggggcaacgtctatccccgttccggctttgtcacacagacggacgactataaggccgctgccgtgacggctcaacgtgcggcagacatcattacccgccccgggcagatccacgtttatcggacgctgaaggccaacgcttccgctggctactggccgcccgatccggtgacggaaaacaccggcacccgcaaccataagtggcagcgcctcgctccgaaggtgtccatgtcctgcgccgcgtttcccgaccgcgcgttttcctatgccgaagacggcaactatgcttgggcgctgtggcagccctttgcctgctgcaaaaagcgcggccagacgtttcttttcagcaccgatattggtggctattaa

SEQ ID NO: 211871 - DNA, 396 bp, Klebsiella pneumoniae
atgcaacgactactcatcataattgcatcactggtgctggccgggcaggcctgtgccgacgtggttttgtacaccgaccgccatcaccctccgctagataacgatccgcaggtcacggtggtctggctggatgcgccggacacggcgcagcagcagattttcggcaatctggcgcttgagcccgacaaagcggagcggcaggcaaaggtgttgcctcagtcgccgaactgggcacgtcagcaggcgcggatcgtcgatgcctggcagggcgtactgaaggcctggcaactggacattcgcaaggtgcccgccgtggtgtttgacgatcgcgatgtggtgtacggcaccacggatattcagcgtgcggcggcgctgcgcgcagggagcaggccatga

SEQ ID NO: 211872 - DNA, 1599 bp, Klebsiella pneumoniae
atggcacttaaagccttccccagagttaaagtaagaaaagattataatggtaaggttgtggcaataaaaaagaagctatcaggttatgatgacgcttcttttataacgatgatgtacgatcattttcaaaccattttaaaaccagaacttgggatttcttctaatttcccatggtgttgcttcttagcattaaaatggaaattatcggaaccgcttaaacgaaatgtatctccaatgaataaaagagatttcatcgatattgttaataggatatataatcttcagaatgaggtttctggtttttttgatgataagaaggtactgcttagtctcaggcgtatgatcattaatcaacagctgtatcaagctcctatgaaactagagttaaatacactagcaagacaatactattggtattgtaattatgatggtggctattttgataaggttttccaggaaacgcatggaataacattggaatcttattataaaataagtgcttattttgcaatgatgtcatgtattgataatggtaaagagtcggaatacattccagttaggttgtatttaatacatttaattccaatgtttggtactgatattgtgaagaaatacctagacttagtttcagtgaaatggaatgaactgagagggtttatgtcagggttcaaagatataaaacaacgagaaagtgaatactaccttgacccgccaatgatgatgaaaccttttattttgatagatgaaggattaatcatattaagcaaacatctcctgagagcatctctgtcctctttggttccaactttattaaaagataaacatggttccagttataaagatagatttgcgaaagtaatggagtcatatattggttcgatattaaacgaattaccatcaaaaattatttccgaaaaggaaattatcagcatctataaacaaaatgaagtacagtcaaaaactgtcgattttattgttagagaggatgtaggtactgtttatattgattccaaagcgatagagcctgataaaataataaagcactccaattctgctaaatctatcaaggaaaggttggcaaatagtttcattaaaggtgtgattcaaggtatggattgtgcttataatatgaatgaaatagataaaaaagaaaaatgtataaaggactctttgattattatcacacacatggatcattatattcctacaggtaagatgatagaggatgtgctggatggttcattttttggtatgtttgaaaataaatatggtgaattacctatcaacaaaaacagaatatactatatgacaatcgatgagttcgagtttatgattgaggtctgttgtaataaaaatgtatcaataacgtcgattattgatagttgttctgataatgatgcggcaacgagttctcaaaaatttaatgttatgatgcatcttcatcaattatctccagaaggaatttctgacagaaaagtgattgttgaaaatagagattacttattcgacgacttgattaattccatgcaaaagtcttcatctttgtgggatggtcgtgtaaaagagtacttggcagtaagaaaatatcttcaaagctaa

SEQ ID NO: 211873 - DNA, 1011 bp, Klebsiella pneumoniae
atggcagaaaaggctatatatttttctagctataacgagatagaaaagcgggcatctttcaattctgagcaagaaattagtccagataattttaaatcactggtaggaatgtatcgttttgatgagaatgtgatttgtcaggttcgcacaaaaaaaggaatttgccatcaaaaacacaaaaatggctggcttggaataactaatgatggagtggaagcccttataggagggcattgcgcttcagaatattttaaagcagataattcatttaggttagagaaaaaaagagttgaaagtgagattgaacggagattagctgtagaaaaacttcgcggatatatttttggtgaaaaagattaccctaatgaagttgcatgtctcaggactaatcttatttctgcaagaaagattcttgatagtttttataaatcattccctaattctgttttacgatttatagatgatgcccagagaaatcaaaactggattattaatgtagatgttggtactgaaatacaaagaactatcaaaaaagatggtgaggaagaagttatcactttctatgaatggactcccgatactattggtcgactaaaacccattattcctaccagagatataatcagtttaattaataaagtcaaggaattagcggaatcatatggtgaggtttgcgcccaaaatattgatgatataaaaacaccaaagctaaaaaaatatgttgagaggctttctgaaaaagaggattatgcaactctttatgataaatataaagctttgatagaggattttatcaaacctggaaatctggattcattaatatacgtatgtgatgatgaagaggaacaatttttgacagtgaaagcgatcatgtcaatgactggagcaaaggtatcttcggatggtcatataaaattgcgtttgcgtcgtatacatgatcgctataaacaacagttcaatggtaaaaaaattaggaaaaatcaaaaatcttctctgtataaacataggtga

SEQ ID NO: 211874 - DNA, 294 bp, Klebsiella pneumoniae
atggctacgacccctatccaaactgacctgtcatccgaaaaacctgttaaaacccagcggcgctacaccgtcggctatcttcccggtcggggcgatgccagcacaccttctctacacctgagcggaaaatggcttaaggacgccggttttgaaaccggaaccggcgttactgtgaagattgccggagactgcattgtgcttatccctgataacgacgaaatacatgagctgcgtaagcaacttcagcagataaagcaggccttcatcgggctcaaaggagaggttgaggggtaa

SEQ ID NO: 211875 - DNA, 1116 bp, Klebsiella pneumoniae
atgtcagacttaccaaagaatatccaagttatatttgataacaacccaatgctcaaggaactaatcccgaatccagttttggcctcaggatcatcttttatcgttgcttttaatgataaactagcactgagcacaaaaaactctgaaaaagacgatatttataaagttgtctttaagaaagattcatctcgagatttaatggccattaatagtggcgaattaaagggattgctcactactacttgtatagagaaaggtaaaattagtgatgtggcaggtttagaaaaaatagaaatagataataaaaatgaacttatgcccacattgttaggcataagtctttatagttctattcaagccagtctatcctatatatctcaactctttactgatataagaaaccaccaaattatcgaggaacaagccagatttgaaagaatttctgaaacaatagtagatagttttagaagcatacctgatatttcattagatcgttcgatgagggatgtttatttaacgcgaatcgttaaaaacaatgacgattgttttgaactgtatgcttcacaaagaatacaattcgcaaagcttttgcaatcagagccagaatactattctaccggttacaaccattattacaatagcaacaacggccaacgattttatcctgatcgtttttttataaataacgtattaacacatcctgtattcgcagtctttgaacgattagtcgctggcagaatttgtgaaattgttattagcggtaacttttccgatagcaatattcaaagacacaaagatttcatatatagaatccaaaccaagctagaagaacttatgaaataccggttatgtgctttcgaacgcttcactatggaacaaaaaaacatcatcgatgaagatttaaatttaactggccatgaccgaaaagaattagaaaaaaacctagccgaacacattaatttcgttaaagaaattaatgagaaaatattttcactattaaaaaacaagcttgatggatttaacgtactaacacaccttatggatcaagatgagataactatatatatccttgatggaaaattattaataaataacttcaagtcaaccccaaattaa

SEQ ID NO: 211876 - DNA, 1368 bp, Klebsiella pneumoniae
atggaaaaaatagtaataaaaaacttagatataaaaagattcaatgcattagctgcacagtcaagaagccctgcagcagcatacatgagtgaggaacttgaatggtacgcagattccgacgaaattgtattgggtattgttctcagagacacaatagatagcgattttgttggaattattttagggagagatgagggggacaggttccgcgctttcgatgttaaggcatcaataccaacccaagaagaagcaagagtttgggtacatggtggtatcaaatggtatgctggaaaaggggagagaacgttccctcagggcgatgaaagcaaaggtttagatttatttactcctgtagttccagtagcaaagcaacatccatactttgccaaattagcccaagaagattcttttataccagccaaggcaataataaatcaattaatgccccattatactgatattgatggtaattttgttgagcagtttcaaagctcaggttttgacgcccgactctgggagttatacctaaatacatatctcaatgaagagcagctttttttagatagagaatatcatgccccggatttcttagttcaaaagtatggaatcaaagtagcaatcgaagcagtaattgttggtagaaaagaaagtaatccaatatctttttttcaagatgaaccaaagtttttaactccatcagagataaaggaaaagctcaaagatgaaatgcctattaaatttggtagccctctatttagcaagctcagaaaagaatactggaagcttgaccatgtaaagggaaatgcacttatattcgcaattgctgacttccatgatgatcaatctatgcaatggagctcaaatgctttgataagttatctttatggtgtaaagcatgaatttacccgagataaagatggccagctaattatctcacctttgaaaattgaaaaacatcaagtaggaaataaaactataccctctggttattttttccaggatgaagctgagaacatcagtgcggtgttattctcatcaagtggaacaatatcaaaatttaatcgcattggtcgacaggctggctatggccctgaaaatattatcatgcatcgctttggtacttgccatgatcatgatcctaacgcatttctccccaagcaatttgcttatacagttaccactaattctaacgaaacatggggtgagggattatctatgtttcacaatcctaacgctaagcatcccgtacctgaagcgctatttccatcaattgctcaccattactatgacaatggtcaaattgtcagccacttacctgaatttcatccttattcgtcaatgacaataaatatgaaaattgaggcatga

SEQ ID NO: 211877 - DNA, 705 bp, Klebsiella pneumoniae
atggcaactacttgggaagattatcaagaagaagctgcatcattcttcagatctcttggtcttgaagcaacaactaatgttagagttaacggcattaggacgcaccatgacattgatgttttggttaaatcccatcatgcaggatttgatattatatggcttgtagagtgtaagcattggaaaaacccagtttcgaaacttcacgttctagctttgcgtgaaatagtcactgaaataggtgcagatcgaggaatattactgtctgaatcaggttttcaaagcggagctattgaggctgccaacctaacaaatgtccatataacatcacttgcagaattgagtttatctgccagtaaagatatatattccatgcgattgcgcgagctctataaccaagttgaaatctgtaatgaacgttattggaatatacctaaagatgagagaattaagtatggtcttcgacctgaagttggagcaattaactattcagccccccgtgtagtcgagctatgcagagatttattttctcgttcatttagaggtgtatatccctttgaatgtgaagatccagggaaatttctcttcccacacaccccccgaatttttaaatctcctgaggaagttgtaaaggctataaaacccttaatttcagaacttgaggaaaaattaaatgaatgtgagcgccagatcaacatcattaaataa

SEQ ID NO: 211878 - DNA, 2775 bp, Klebsiella pneumoniae
atgtttagcctgtttacgcgtgaaaaggcggcggcacctgtgccgcaggctgaagagaaggcggtactcaaaccgtcgttgaggaaatcgggcaagctgaaaatctcggatgagcaagcgcgctaccatcgtgaaccgccattgattgactacttgccctgggttgaatatctgccgtccagccagagcattttgctggatgacggcgtgtcggtgggcgcggtgttcgacgtgctgccggtcggttcggaagggcgtacggcggagcgcctggaggagatccgtgacgtcattgaagacgccattcaggacagctttgacgagcgggatacttgcccgtgggtgatccagttcttctgtcaggatgaaacagacgtcaccgcctatctggacaggctgcgcggttacatcaagccctgggcgcaggggagcgccttcaccgaggactacctgcgggagattgaaggccacatgcgcgggatcgccgtaccgcaagggctgtttattgataagaccgtcaccggcgcgccgtggcgtggtcagcagcggcgtacccgcatggtggtctatcgctatgtcgaccccgcccagcgcgatccgtattcacccgaaacggcgctgagtcaggtgtgcgagcggctggtttccgccctgaacggcgcgggcgtggtggcggaacgccagagtggggagcagatccacgcctggctgctgcgctggtttaaccccgacccgcagtgggtggaaaaggaggtgctctaccgcaccgcccgccatcacgacaacccacataacgcactgccgctgatgaccgacttcagcgaatccttatggtttacgccgccgcgctcggatgcggaaaacggcgtctggtggtttgacgaacagcctcaccgggcggtaactatcgatcgcctgcgtcgcccccctgcggtgggacatctgaccggggagacccgcaagggtgacaacatcaatgccctgatggacctcatgccggaaggcaccgtgatgtgcatgaccattgtggtgcaggcacaggacgtgctggaagagcgttttacccatctggcaaaaaacgcgattggcgaaaacgtggaatcgtcccgggtgcgggaagatgcggccattgccaagtcgtttctgggcgagcggcacaagctctatcacggcagcatgacgtttttgctaacggctccggatctgccgcagctccagtcgcgccagcgcgagctgaacgcagtattgctgaacgccggtttacagcccacccggggcgaatacgaggttgcgccgctgaatgggtacctgcgcgccatgccgatgtgctttaacccggcccgggataagcaccattggtatacccgcctgacctttgtccagcatctggcgaacctgtcaccgctgttcgggcgggataccggcaccggcaacccgggattcaccttctttaatcgcggcggcgcgccgctcacgttcgatccgctgaacagcaatgaccgtaccaagaacgcccatatggcgattttcgggccgacgggctccggcaagtcggccacgctcaacagcctgttttcccagttaatggcgatccaccggccccggttgttcatcgctgaagccgggaacagctttggcctgtttgccgattactgcggtgagctggggctgacggtgaacaaaatcagcatcaagccgggctgcgggatttctctggccccgtttgctgatgcgcacaagctgattgagcagccggtggtccccgtcagtgaaagcgagcttagcgacggcattgatattgacgacgttgacggtgaagaggacggcgacgaggagcgcgacattctgggggagctggagatcgccgcccgcctgatgatcaccggtggggaggagaaggaagaggccaggctggaacgcgccgatcgcggcatgatgcgtgaggccattctggcggcggcgcaacaggcctgggacgaaggcaggcagatgatcaccggcgaccttcagtcggcgttttatcagtttgcccgcgatcccgcccgccccgccgaacggcaggtacgcgctcagaatatgggggagtcgctcggcgtgtttatgcagggctttctgggtgagctgtttaatcgcccgggcgagaactggccggaagcggacgtgacgctgattgacctcggcacgctggcgcgtgaaggctatgaagcgccgctggcggtagcctatatttcgctggtgaacaccatcaataatctggcggaacgcgatcagttcgacgatcgggaaatcgtgttcgccaccgatgaggcccatatgatcaccaccaacccgttgctggctccctacgtggtgaaggtggtcaagatgtggcgaaagctgggagcatggctttggctggcgacgcagaaccttgatgacttccccaatgcggcgaaaaagatgctcaacatgatcgagtggtggctgtgcctggtgatgccgccggaagaggtggagcagatagcgcgctttaaaaagctgacggaggagcagaaggccatgctgctgtcggccaataaagcgaagcactgctataccgagggtgtggtgctcgccagccggattgaggcgctgtttcgcgccgtgccgcccagcctgtatctggcgctggggatgacggagaaagaggagaaggcgcagcgcagggcgttgatgaatgaatacggtattagcgagttgggggccgcgaagcgggttgcccggcagatggatgaattgcgggggatccttcgctag

SEQ ID NO: 211879 - DNA, 399 bp, Klebsiella pneumoniae
atgatgcccagaatatatttactgctggccgcgctatggctggccggatgcagtacgtcaaaagagcaattacttcccccgggggattccaccatgctggatctgtggcagcaaaaaagcggctcgccgcagatgaccgcagaagcgcgcgccgtactgcgccgcgacctgaatgacgtcgagcggaacgcgcagccggcagtggcggaaagctacagccgggatgctaacagcgagatccagcagcaatttcctcgcttgcccaatcccgatctggtgatgtatgtcttcccacatatgacggtaggcaacgtgccggtaccgggctacagcacggtatttcctttctacagccaggtgcagtatgccctgccgggtgaacgagtgggagcgctgtga

SEQ ID NO: 211880 - DNA, 1482 bp, Klebsiella pneumoniae
atgcaggtgaagtcaaacacgttgttaaagatggcggtgcccgcctgtctgtttatcgccattgccattggggtgaagtcctgcggttcacgttcacagcctgcggcgacgcagacaggggatagcgtggtcgcggttctgacgcaggaagagctgaaggcgttgggtgtggaaggggatacgcctcaggacacgttgcgcacgctggttggccggatgcggacgatccagaataagcaggtcgaactggatcgagacaataaagcgctggcggaagagaacgccagactggcgcagggggaaagtggtctggataaccgcatcagtgcggcggtggcaaaggcgcaaaaagaggcggaacaaaaggccgaaggggtaaaggaagagcagcgccagttgagcaaagccctcgatgagctgaaggaaagactgctgaacggcggcgcaggcggttcgtctgccggggcgaacggcgatttacccgttggccttgggctgggagccggagatgagccgcctgcaccggccagtggcgagggcatggtctggattgagccgcaggatgcgatgcagatgagccgtgacggcaaaatgacgctggccgacgtttccgcatcaggaaccggcggcgcgcttcagttccccagccgtttctccagtctggaggataacgagatcacccgccagaaggccgaactggcgcgtaacgcgaaaaatgagcgcggcattgaggacgcggcgacgccggtgtatacgctgccggaaaactcaacgctggtaggcagccaggccatgacggccttgctggggcgggtaccgattgacggtaaagtcaccgacccttacccgttcaaagtgctgatcggcaaagataacctgacggcaaacggcatccagttgcctgacgtggaaggggcgattgtctcaggaacggcaaccggcgactggacgctctcctgcgtgcggggcgatgtgcaaagcatcaccttcgttttcagcgacggtacggttcgtaccgttcccagcccggctaaatcgaccgacggcagcgataacaaaaaccgcagcggcggcagcatcggctggctgtcggatgagcatggcgttccgtgtctggccggtgagcgtaaatccaatgcctccacctatttaccgaccctgtttgccctgtccggcgcgacggcagcggcggaagcaatggcggaaggggaaatgacctcctccacggaggggactgacgtaacccggacgttaacgggagatgccggaacctatgcgctgggtaaggcggtgtccggcgggatgcaggaaaccaccaactgggtacgccagcgctacggccagacgtttgacgctatctatgtgccacccggcctgcgcgtggcggtacatatcacccgccaactgccgattgactatgaagagcagggccgcagggtcaaatacgatgcggccgtcggcccgcagcagcatctggattaa

SEQ ID NO: 211881 - DNA, 846 bp, Klebsiella pneumoniae
atgaagcgactgttattaagcctcgcgctgctggctccctgcgccgttcaggccgtggagctcatgaaatgggagcgcattccactgcctgtcccgctgaacgtcgggcaggagcggattgtgtttgttgataagaacgtgcgggtaggcttccccgcaaccctgaacggaaagatgcgcatccagagcagcggcggcgcggtctaccttcaggcggaggaggcattccccgtgacccgcttgcagttgcaggatctggaaaacggcgagctgatcctgctggacgtcagcgcccaggacggaaaagccgcgctggagccggtcaggctggtttactccggggaagtcgcgacggcgagcgccagccataagggagccgtgtcagggcgtgacgccagcggtgaaagggaaaacggcgcggctggtcaaggcgaagtaaagctctccgcgcctttaccggtacagctgacgcgctacgcggcgcagcatctgtatgccccgctgcgcacggtggaggccgtgcccggtatttctcctgtctcccttaagcctgccgtcatcacctctctgctgccctcggaacctgtcgaaaccaaaacgctcgccgcatgggccgcgagcggatacagcgtggtcgccgtccggctgaagaaccagagcgataagccagtggtgcttgaccctcgccgcttacaggggcgtttttacagcgccacatttcaacaccgttggttaggtgcgcaggggacgccggaggataccactctgctgtatctggttttcacagggcggcctgaaaacgccttcttgcccagtgcggtgatggcgaaaaagggaggtcgatga

SEQ ID NO: 211882 - DNA, 654 bp, Klebsiella pneumoniae
gtgagccgtttcaaaaatgcccttaacgcccgcgatgcgcatatctggacgctgcgcggaacctgcgttttgctgattctggtgtgcctggtgctggccctgggctggatgaacgcgccgcgcaacctcactatccatcagccgccggacctgcgcagcggcagcacccgcccctggtgggaagtgccgcccagcacggtatacgcgtttggcttctacgtatttcagcagttgaacagttggccgaaggatggtgaacaggattatccggccagaattaagtctctttccccttacctgaccccggaatgccagacgttactggaggacgacgcgcgcaagcgcaacttctccggcgaactgcgcgagcgggtgcgcggtatctatgaaatccccggacgaggttaccgcggcgatcgggtggagattgtcgatcgcgaccattgggttatccggctcgacctcaccgccgatgagtattaccacaacgaaccggtcaaacgcgcgttagttcgctatccgctgaaggtggtgcgctgggacgtcaatccggaactgaacccgtttggcctggcgctggactgctttgccgcgatgccgcagcgcctggaagccgccccggtcgatgtgcctgagaagaaggggatattttga

SEQ ID NO: 211883 - DNA, 372 bp, Klebsiella pneumoniae
atggcgacgattcagttcatgcctgacaggctcaacgctgaaccggtcgttttccgggggttcaccacccccgaattaggtttgaccgcgttgttcagcacgctggcaggcatcgttatctccctgccgttcctgtttttttcctgggtcatgatcccaacgattgccctcattttgccgctactggtgattgtcttcggcggcaaagtgctggcgcggatcaagcgcggcaagccggaaaactacctttatcgtcgccttgaagcggcgctcgtccagtgggggctgggcaatccccggctaattctggtgtcgcgccgctggtcgctgcggcggagcagggcggtgatacagctggaggtgaacctgtga

SEQ ID NO: 211884 - DNA, 354 bp, Klebsiella pneumoniae
atgaacgcactttttttacgcgccaggaagacggtctgtaccgcactggttttaggactctcttccccggcgctggccgatttgccgacggtcgaaggcccgaagtcgaaaaccgacggcacgttctatggaaagatcgccggttatatcaatgacggtctggtgttgggcgggttagtggtcgccgccgtggcctttatcgtggtggcgatgagctgcgtgtccacgtttgccgaagtccgggatggcaaggcgacttggggcaagtttggtgccatggtggccgtgggtgtggtactgattgtcgccgtgatctggcttgccaacgaagccgccaccatcgtggccggataa

SEQ ID NO: 211885 - DNA, 237 bp, Klebsiella pneumoniae
atgacccacgaacaggagcaggcgtttcgcgcctcgaccaacaacgccgacccgaatctcctcaatctgctgtttatcggcacgctggtcgccgtgctgtttctgtgggccgcgtttgcctttgtcaccgtctatcgcggctgggaagcagggaacgtgtcggaaaagaccgtcctgtcgtttgtcattcgcgtcgtcgtcctgttggtggtcagcctgtttttatttgcaagttaa

SEQ ID NO: 211886 - DNA, 318 bp, Klebsiella pneumoniae
atgcgcatgacgaaagtccgggcgctttgtctgtcgggggccttattcaccgtgcttccctgtgcgcagggcagtgaaaaggatgaactggcgttagtcatgaaacagctagaccagcttcaggccagtctggagcgggcgaaggtcgtcgcagtacaggaacacacatcacaccgcttttattttgactacccgcaggccactgatgatatcgcgaaaatcaaacgcggcatctcaacctatcttgagccttcccgcgctcagccggtactgccgcaggatatcagcggccagtaccaacgcgagggggagcaatga

SEQ ID NO: 211887 - DNA, 804 bp, Klebsiella pneumoniae
atgaaaatagtggggcttaatcttcagggatatcacgttacaatcgatcactcgcatcgccattggctcattacaacgcctgaaggaaacccaacccgtgaacgggtgggaaacctcactatttattccatgttcagaaggcaaaaagcgcccgccagccttaaccgtgaccgtaaacaacgcaagctgggcgataattgtcccttgatttatgctttgaagggaaaagaggggctgacaacggacttttccagcataaaggcattaagccagagctttaacgccatactggaagccattgctcaggcagagcctgatggttacgacctgatcgtttctatgccatccgcccacaacattagccacattgtagggaaaagattctcacgctatttcaacgcgccgcattttaaagatctgctgcggaaaattacggttgaagaggcttttattcttctcgatcgtgcgaatattgatgtaactgacgtaaagtcgcttcagtaccagctaagaagacaaaaaaatgaagtgggttatcagggcgctttttcactaaaaggtatcccaacggagcacagggccgttttcccgccgataacgatcaataccgctttaacgatgcatctcaacgcacacagaatattaattacggatgatctgctggcgaccggaacaacgctggaaaccgcagctagtcttctggggacgctctgcccgggcgcatcggttcaggccgcctgtctgttcagttcgatgggtagactgactcgcggtactctcaagaaaaggaagttcaggggctga

SEQ ID NO: 211888 - DNA, 477 bp, Klebsiella pneumoniae
atgtctggcaagtatacccctgagacattgctgcccgcattgaggctttttattgaggcaagaaacaaggctaatgccgctggcttccctgataacggcggcgctattcattcagtggaacgcatcattgatgttctttgtatccgcgttaaatatgggcttacccatgtcaataatttaaaaaaaatgccgaccgcagaatgcagtatcggagcatacgaagcccgccaacgtggcgatgcacatttattacgcattgaacacgtcatgccgcaacgcgcgtttgcaaaaaagataattgatattgttgaagagggggctaccgatgaggaaatcattgctttcatcgaacagaactatcgactggtgcttttaaatactgaagaaaccagtatgttgaatcttaagaatagatctcgaatctcgccagaccggctgggtgaggcaggaatcgtcatgtatcagggctcggcctga

SEQ ID NO: 211889 - DNA, 759 bp, Klebsiella pneumoniae
atggcgcagcccggggcttcaaccactgccccacgccagcaggaggttccccggcgtccgccggggctgctatcgaacgtgttctggcactggccctggcagctagttggcatgttactcgtgtcgctgattttcagcctgatcgttgagtatgtcggcattgccttcttctggcctgaagaaggagccctgcacagcaaagcggtcatggagacggaaagccggtatttctctgaagaattcacccgcagcctgctgctgtctgacccggtggtgacggtagagtgttggctgacgctggcgtatcagtggctgtttgtggacagcggttttctgggctggttgaatgccccccacgcagatcaaggcaacgactttacccggacgctaaacggcggcgcggcctggctgctggtgaagctgcgggagtatctgctggcgacggtgtacgtgacgctggtttttcttattcgggtcacaattttggtgctgtctgtgccgctgtttgtgatggtggcagcgatcggcatcgtggacggcctggttcggcgcgatttgcgccgctacggcgcggcgtatgagagcagctttatctatcaccacgccaagcgctggattaaaccggcgacctgtttaccctgcgttatctacctgtcgatgccgtttgcggtatatcccaatattcttctgctgcctgcggcgctgctgctggggttggtgatttcgttgacgaccggggcgtttaagaagtatttgtga

SEQ ID NO: 211890 - DNA, 264 bp, Klebsiella pneumoniae
atgaaacgttaccagatttgcgccgtgatggtctccgcgctagggcacccggccctgttacctgacgcggcaaagcagattttaatgcaccacgtctgcaccacgcccagagcagccgaaattatcgcagcgttaaatgacgcgggaatagacgcctgccgggaagaggatatgtgctcatctaatagcgtcgggatttggatcaccgttgacgcgcatacggtattgcttcagtgccagcttgaagtgctggaggtgcattga

SEQ ID NO: 211891 - DNA, 2100 bp, Klebsiella pneumoniae
gtgagcgatcgctatgtgattgaagccctgctgcgaccggcggttgaactgaataccgccgtggtatccgcctgcgccagctatgtttgcgttaccgcgccgtgggcgattgctttagcgcccagcgttagctacgtgatggccggagcgctggggatattcgcgattaagcgcacccgcgaagggctgcgggtacttcgctatcgccgtaatatccggcgcttaccccgctacgtgatgaccagccgtcaggtgccagtgagccagatgaagctgttcctgggaaaaggctttttatgggagcagcggcacacgcagcgcctgctggatacgttacgcccggaggtcgccagatacgtaaacccttcctgggtttatcaggcggcgcggcgggttgaacaacgtcaggaatatcgttttccgaccctgtgccggttactggcaagcgagagcgcgtttaatccggtaaggcctctgccgcctgtgggcggtttaccggcgctgcacggcattgagctggatgaaaccaatgtgctgatggacctgcgcgagcgggtcgggcatttactggtgttgggcaccacccgggtagggaagacgcgcctggctgagttactgattactcaggatattcgccggggagacgtggtgattgtgttcgaccccaaaggggatgccgacctgctgaaaaggatgtacgcggagtgccagcgcgccgggcgcggcgatgagtttcacgtctttcatctgggctggccggatatctctgcgcgctacaatgctgtgggaaggttcggcagagtttcggaagtagcgagtcgggtcgccgggcagctcagcgatgcggggaactccgccgcgtttaaagaatttgcctggcgctttgtcaatatcatcgcacgggcgctggtcgcgctgggacaacgtccggacttcgcgctgatccagcgctacgttaacaaccccggcgatctgtttgaacactattgcgaaagctggctgagccagcaccatcccgacctgtggttgacgatagaaaacctgacggcgacgctgacggagcgtgatgttccccgtcatatggaagggcgctccctgcgtgtggtggcgattgaacatgtgctgggtagcgacgccggaaagcgggtgtatgacccggttctggacgggctgcgttcctcggtgcgctatgaccagaagtactacgacaaaattgtggcttcgctgctgccgctgctggaaaagctgacctccgggaagacggcgcagctcatctctccgaactacagtgacctgaacgacccacgcccgatctttgactggcagcaggttatccgcaaaaagggcgtggtgtacgtcggcctggatgcgctctccgatcctgaagtggctgcggcggtaggtaacagcatgtttgctgatttggtgtcggtggcgggctatatctataagttcggcattaatgacggcctgccgcagcagagcggcggcaacacaccgatcagcctccactgtgacgaattcagtgaattaatgggggacgagttcattcctctgattaataaagggggcggcgcggggatccagatcacggcctacacccaaacgctgccggatatcgaggcgaaaatcggtaactccgccaaagcggcgcaggtggtgggtaacttcaatagtctggttatgctgcgggtccgccatacggaaaccgctgagctactgacccgacaactgccggaagtggaggtgtataccaaaacgctggtttccggcgtgactgacatttccaatcccgatcagggcagcgacttcaccagtaacgttcaggacagggtcagcagcgtgcgaacgccgctgataacgcccgccaacgttattaatttgccaaaagggcaggcgtttgcgctgcttgaaggcgggcggctctggaaattaaggatgccgcttccagcagcaggcgatgatgcctttatgccggagagcatcagccagatcgccggatatatgcagaaaaactaccgcaccggggatgagtggtggtcaggcggcgcgatgccgggcgaccgcatgattgaagaggcagaaggagaggaagaatga

SEQ ID NO: 211892 - DNA, 513 bp, Klebsiella pneumoniae
atgaagagcatttaccttttgggactctgttgcctgtttggcaatgcgcacgccgggctgaacgttattgccgatttgggcggggaacctgccgcaccttattttgacggcattaataatcagcccaatgaatttgaatcaccaaacccgccggaggcggctgtattgcccgctgcacccgcgtcactggcatcggtattgccaatatccacgcctgaattaacgcccggcagcgtagaggcccgccgcctcggtttaccagggatgcagccgatatttttgttgggtaacgatccgctgtcccgccgttggctggatgaacgaaaggaatcgctgcggcagctgcgggccgttgggctagtggtcaatatcgaggacgaagcggcgtttggcgagctgcaaacgctggccggtgatatcgagctgctgccggtatccggcagcgatctggcgaagcggctggggttgcaacactacccggtattcatcagcgaaaagggaattgaacaatga

SEQ ID NO: 211893 - DNA, 570 bp, Klebsiella pneumoniae
atggttgcccgtcgcgttctgatgttcctgctattgtttcccccgttggcctgcgcacagtcgattccatccggctaccgtcagattgcggaacaggaaaacgtacctgccgaagcgctgtactcgctggcgctgaccgaatcggccaaaaagctggcccatggcgttcgtccgtggccgtggaccatcaacgttgccggaatcgggtatcgttatgccagccgtgatgaggcctatcaggcgttgctggggtttatccggcgctatcccctgaagcgaatcgatgtgggtgtcgctcaggttaatctgggctggaacggcagccggttttcatcgtattggcacgcctttgacccctacaccaatctgcgcgtcgcggcgcggatcctacgcgaatgctacgacgcccaaccgggaagctggatgcaggccgccggttgttaccatcatcctgcgggcggcaagccggcccgcgtctataaagcggttgttcaacgccatctgaatactctgaacccggtaaagcccacggcggtgagctgggtagagccgaagagaaaaacaccatga

SEQ ID NO: 211894 - DNA, 618 bp, Klebsiella pneumoniae
gtggccggaaagcttgagcaggcgaacacccgtaaaagcgctcagacatggggactgaccgacgaggagtggcaacgctatcaggcgttaatgaatggacggcgcggcgtattctctcccgatctggacccgattacggcgctgggcattgaagccagaacggcggaagagcgccgccgctttgccgaactgtccgtccagcaggactttaagcgcgtggaggccgagctggcgtttcagcgggaggtcgacgcggcgtggaaacggctttacccccatattctgccgattggcgcaggtatgggcagcgcgccagctcagccccggagtcatggccgtctggcgctgtttgtcaaagcggactgcccgccctgtgataaaacgctgacgaagctgctcgccagccagaagccgtttgatatttatctggtcggtagcgaaggccaggacgcgaaggtacgtgagtgggcgagcaggcggcatattcccgctgaacgcgtaaaaacgcgggcgattacgctcaaccatgacgctggtcgctggctgaagttaggcaaaggccaaatgcccgtggtgctggaacagggggaaaacggatggttgcccgtcgcgttctga

SEQ ID NO: 211895 - DNA, 741 bp, Klebsiella pneumoniae
atggaagaaaaagaacccaaaagggcgggtaagccgtttcctctgcgcaaagcgggatgtctggcgatggtgatcgtactcggtgcgtcgtctgcctttttgtggacgcagcagctgcgcctgatgcagtcctccgctgcgttggagcagcagtggcagacgttagcgcagcaacaggcccagtttgaacaacgcattgctggggtagaaacgcgtcaacagcagacagaaccgccgaagccgttggttagcgcggtgactcaggaacagttaacgcaagcgctcgcggaaaatcggcaggaagtgaaccagcagcacgcccaattacagcagcaaatgacgtcggtaacgcagcgcgttgaggtgctggagcagcgcgacggggcgctgtccggccagtggctggaactgaagcaacagatggccgatcttctcgccgggcgtaagagtgcgcttgctccatcatcatcgtcagcggtagcaaatcccctgaaaaagccggttaagaagacggctgccaaagtgatttcatccgcatccgcaccgtttgttttgaatggcgttgagtatcgaggcggggcgcgctttgtttccgttactccccgacaggccagcagtctggaacaggttcgcttactaacccccggcgagtcgtttagcggctggatgttgctgaccatcgactcccgtcaggccacctttcgcacggcggggcgcacgctgacgctcagcgttcattaa

SEQ ID NO: 211896 - DNA, 570 bp, Klebsiella pneumoniae
atgaaatatcaccggtatttgctctgcgtgataggggttattgtgattggcggctgcgcgccaaagcaaaagttacaacaaccagcgttatccctttccagtacgctaaacagcaacgttcagtctgcggctgatgatgtttaccagcgcgaaaacgcgccgcaggtggtgcgctacgatcgctacctgctggttagtaccgatcccagcgccgcccagcgcgcgccgctggaacaaatcattgatatccgcattcccgcatcgctgacgccgaccgtagctgatgccatgcgctacgccttaaaacagtcgggttacagcctctgcgccgtcacttcatccaatgccgttctgtataaccagtctctcccggcggtgcattaccagctcggccctatgcggctgaacacggcgctacaggtcatggcgggtagcgcctggcaactggaagctgacgacgtacagcgtattgtctgccatagcctgagggacgggtaccagctgccaaaggctgaaacatcgccctctcgtttcctcaccaaaccaacgttgaaagggaacgcatcataa

SEQ ID NO: 211897 - DNA, 453 bp, Klebsiella pneumoniae
atgtctaatgaaactaattacttcaatctgcacgtaacgggtctgggttatttgaacaacgtcagagaagttcaaacccgcaacggcagtatgctgtgctgctcaattaatgcgttaactggcgcaacggataatccgggctacacccgttttgatattatggtcgtcggcaaggagtcctctgaactcattctgcgctgccagaaggctattgcagaggaaaagaaggtgttgcttggctttcggctcagcaatctttctgccgatgttttcacgctgacaaaaggtgaacacgccggtgaagttcgccccagtcttaaagcccggttaattaaggttaactggatcaagattgggtctgagatggtttataaagaagaaaaaccggaaccgagcgtgccctctgcaccggacgttccttccccgaaacagtttggtgataaccagttttaa

SEQ ID NO: 211898 - DNA, 723 bp, Klebsiella pneumoniae
atgtcggaaaactcaaagcctcaacaccccacgccgggcgcgctgcgctccgaactgcgtatagaacttcatacccgctacgctatctccctatggcaaggccgtcgctcttcagagggcaagtcggccatcatggggatgccgcgcttcttccagcttgctggccgaatcaatcaggactccctgacggataacccttgggcggatgcgacgatgctgcatctggagaagctgatcggcgcatcgcatcagcaaatgcagacattgctggatgaagtcgatgcgctttttgctgacatgcccggctccgtcaagctaacggactgtatcgcggaaacgccgctcaacgtggcagtacacagccacacgccgattggctatcgctgcgtctatttgctggttggattcgatcagctggccctgcgggtgtttcaggcgcatttttttgggctcatcagcacccagactaagcaacaatatctctccagcgccggttatgcgatcaggcgaatttacggggcggctcagcgctatcgctccgtcgccgtcacgcgcgccgacgtactggcgaataacgatacggcgcagcaagccattgctgcgttaggcgaagtgtcggcatccgttgtcagcggtcaggctcgatcgggcttttctccggccctgaattcacccgctttaactgttgcgatcggcggtaaaaaggggaaaaggcatggttaa

SEQ ID NO: 211899 - DNA, 1065 bp, Klebsiella pneumoniae
atgaaactagctgaagaccccagctatccccttatcttgagattacagtcactgctggaacaaatcccaattattgaaaaggtaaaaataataggagatggtcccagcatggatgagggtgttgactaccttatccaggtccggatagataaaacaacttacgtgcttgcctgcgaaacaaaaaacaatggccagcctagatttgtgcgctcagcgattaaaacccttcggtcttatatgtatggcagagaggagattcttactcctgtcctcctcgctccctatttgtccgccgattcccgacagatttgtcaggaaaataatatcgcatttctggacatggagggtaatgcacaactccagtttggaggagtttatatcgatcatcgtatgcccggtaaacccgtgcctgaaaaacgtgggcttcgtacaatgtttagcccgaagtcagctcaagtgttgcgtatgatgcttaatgaccccctgagaacctggaaagtcaccgaactgtcggaagaaggaaaggtaagtcttggccatgccagtaatgtgcgtaaaaatttgttggaaagggaatgggctgtcattagcagcgaaggacttaccctgaacaagccgggggcacttgtgaatgagtggcgggataactatcgcccaattcaaggaaagaagaaaaatttttatacacctttgcacggcaacgcgctggagtctcaattacgcaacttactgggttgtgatgaagtgcaaggatctgcaattttggcctcattttctgccgcccagtggctgtccccttatggtcgtaccgggatgcattttttctttgccgacgagaaaggaatggagaggctgatatcaggccttaagttaagcacaacatcaaagggcgccaatgtaactataacggtccccaacgatgaaggtatattccttgatgctatcgagccagcaccgggaattgtcactacaggtgttatacagacctaccttgatctcacagttcagggggaacggggacaagaagccgctgaacaccttcgaaatgaatggatggaatggtaa

SEQ ID NO: 211900 - DNA, 864 bp, Klebsiella pneumoniae
atgacaacaagagaacctcagtcagctgctgactatgaagatcggacaacggctgccgttaaatccgttctgatagagataggacagatcctgggcagttacaaaggaaaattcactgttattggaggagcggtaccttggctgcttcttaacaatgacgatatgccgcatgtcggcacgcttgatattgatttggatctggattcaacagcgctgggcgatggtgaatacgccactttggtggaaagtttgcagggttgcgggtatgaacagcgagagggcgtcaccagagcatttcagctagtgcgtactattcctgcgtctgacgatggccctgccattgatattatcatcgattttctccgccccagagatgctgaactcgttaaaaatgccccacccttaataagtaatttcgccgtgcagcgcgcagacggtgccgatcttgcgctcaaattctatgagatggtggccattagtggtgccatgccagagggtggcaaaaatacagtggaaatagcagtgtgctcaataccggcgctgctggccatgaaaggatatgccctcaatggtcggcataaacaaaaagattcttatgatatttattactgcgttcgtaactatgaggatgggccggaagcgcttgctcaagagtgcctccctatacttgctgaagaaagtggggccatcggatacggatacattgcacaaaaattcgacgaggtggaaggttatggtccaaccagcgtcagaaagtttgttgaagagacgaaactacttggggaaagaactcccgaacagtggcaacaagatgcatttggtcaggtagatctctggttacgtgctcttaacttaagatcttag

SEQ ID NO: 211901 - DNA, 756 bp, Klebsiella pneumoniae
atgggacattatgatatacaacaggtatgcttgaatggtcatcaggtaactgccaactatagtagctcacctgaattcaggagagatttctgcgctacttgtggggaaaaaacgattacgcgatgcccttcatgtaatcaccatattcctggtgagtatcaggttagtggcgctttttacgtagggacgacagatactccggaatattgtgagcattgcggagctgctttcccttggacagaaaagaagtcaaaactaatttcatcttcattgaaagcatcctctgtctctaatgactattttggtctggttaaaaagatctgttctcggtttcatctggtcgctaaccaactgaagactagacatagtaatcgagagtctttagttattagcgacgaatatgatgttcaagatttacttcatgcccttttacatatttactttgacgatattcgaccagaagaatggacgccaaactatgcgggcggtagttcgcgcgtcgattttttattgaaaaatgaagggatcattatcgaggtcaagaaaacgcgcgcaaccttaaaagcaaaagatatcgggagtgagttgttgattgattctcagcgttatcgttcccatcctgactgtaaaaagctgctgtgttttgtgtacgatcccgatggttggatagctaaccccagagggttggaaaacgaccttaacaaaagtgaagatgattttgaaatagtgacgctcattgtgcccaaaggatattga

SEQ ID NO: 211902 - DNA, 1329 bp, Klebsiella pneumoniae
atgttaaaacattcattggcaatagcaacgtgcttggctttttccagttcagtcatgggtaatgaagcaaatttgttatataccaacacgatgcaattcccttataagcataatgctgatggatatatggtctttgacattcatggaaagttagtggttccgcctgaggggcattttgatacgctaaactatatggcggagcgatggctggctttttctggggaaaatttatatatatatgatgaatctggcaagctaattattaaacgcactggtcaagatcccgtatatttaggaggtgatcttctatccatccgtgtcgatacaggtaaacgtatattgattaacaataacggtgtcaatctttctgaaaatacgtttgatgacattcgtccttttaatcctgatatagctgtagctaaaattggcgtttacgataaacataaaaaaattgattatcgttacggctatataaatactcatggagaatgggtgattcctgcaacatatactgctgcgagtgattttaacaatggttttgctgtagtatctagagacgaaaaacaaataataataaatgcatcaggcgatataactactattgtacccaataaaataaaaatggaacctttgaataatgggtattggttgaaaacatttttgaaaaatagtaaaggaaaacaaatatctattagtaatgaaattataaaaaataaagatgaggttgtggttaaaaatgtcaatcctgtacttgttgccaaagattctttttatctctcaggtgcttataagaatgaatattatggattgctaaatactgattcaggaacagtcattcccaagcttaaaactagtgattttgataaggctaatgataccataagctatatagcaaatatcagcaatggtgacctgttttggttaaaaagacgttattcctatagattatataattcacaaggcttaatgcaattagagggatattataatgatgtcaagcctttttatggtgaccatgcttgggtcgtacttccaaatgaaagtaattgggttttaattgattattttggtaatgttgttagtgaagcttgggggaagattgaaaccattgcttatggtaataatatcatcacctatgcatataaagatgatgatgatcggaccatgtatattttagattcatctggagatgttgattacattgaaaggaagtatgatatttggcaggaaagaaagtgtgataaaaccatctctgtgttatatgatgataaaaatagagttatttggccaaaagatcctttaattgaatgtttaaatgggttggattga

SEQ ID NO: 211903 - DNA, 876 bp, Klebsiella pneumoniae
atgaacggtacaaaaatcaatgcatcaaaatatacgccgcagctccctcactggagccaagatctcagcaaatggaataacagcgcttccgttatgcaagccctgaatagtgatagcgataagctgaagcacaatgaaacattgctatttgtgaatgatgattattgcgaaatctcgcgccgccgtcccaatgctcgatatcaccacctgttattccaggtattgactggtcttatggctctatccgtgctgtccttcgtgattttttttctgtgtaccatagatatcggagaaattattaagggctacaccgattcagatcgcaaggggagaggtatcttagtattggcactcgttacctttatcgcattactcattattagccttaccgcctttaactacttcctgttcgcccccaaagattatccattacgtttcaaccgtaaaacaggtaaggtttacgtctatgattacgttaacctgcacgtctggcatttggcggaaacgctcaccgcgctatttaaattcccttttttcctccctacgcgcccagtagaaaaagtttttgactggcaagatattcaagctgttgaaacatactatatgaccagtattaaaggcgtgaataagactactcgcagcatttactgcgtagtatgtgcacccggcaccacacagatagtagacaggttcatgctaagcattactggagatggcctcagcgcaacgccttaccgacagtgggtatgggtttgcagttacatgtctttcaacgatacccaactggataatactctggtgaatcgggataatttctggggtagacccgttgtctggtcagataaattcgccaaagagtcagcacgcagtaaatga

SEQ ID NO: 211904 - DNA, 1218 bp, Klebsiella pneumoniae
gtggcgtttcccgtagacggcgttatccagttcacgctgaataagatgaatgaacgcatccggcagcatgcggaaggtgcgccggtgaacgagcaaagtggcttaatctttatggggaacgtgcatgacgccgttccccggcggctttttctggatagccgtctttccgcattggataagatggcatgggtcatgatccgtttatatgcgcaaagtaacgaaggagccgtctttcccacctatgacgagctacagcttcagcttgcctctccccatgcggggaaggcgtcgcgggaaacggtaagccgcgcgttattaatgctgaggcttactggttggctaagcctgtgtaaacgcgtgcgcgacgcttccggacgcattcgcggcaatatctacgcccagcacgatgagccgctcagcgcgcatgatgccgaggttttcgatccgggctggctggatgctgtagaagaggcctgccgacacggcaatcggacggttcgcctgacggcgctagcggttcttcagtcgctaaaatccgatagtgcaatgcgtcaccgtcattcgcgagtcgccataattgaagtgcgcctttcgggctaccagtcacctcaggcgatggcaaactctcgccgtgagcaggatgaactgacgcatgcacaaaaccgaactcagtcagaatcacccggttcggaaaccgaactcagtacccaaatgggagaaaataagccgggttcggatcccgaactaagccgaaaaacaaggggttgcgacccagttcggaaaccgaaccgttacgtaatacgtacttctacacagtgtgtagaaaaaaatacgtataccgcgcctgcgcacgacccggagcagcggctgcgttggccgaccgatctcttggcgacgatcactaccgcagagcgggatgctctggagccgcagcttctggcgctacccgagcaactgggccaagagttgctgagcgatgtaggaaaacgcctgcaaagcggcgaagtacgcaacgcggcggcctacctgattggcacgctgaagcgggcgaagcaggggcagtttaatcgcctgctaaaggggaatgaggctccgatggcccctgagtccactggagccgagtcagcttcatccttcgccgctgagcgagccggaagggccagccctgacgccgtcgctggcgtgatggcgaagctgagggagatgtatactcagtga

SEQ ID NO: 211905 - DNA, 585 bp, Klebsiella pneumoniae
atgacgtgggaggggaaaaccatgattgcaggtatagcgaccaacgccctgttgacgcaactgataatggaactgaagtccggcagtatccgccgctgcgaggcgctgggtatgaccatggaagagattcaggcgttgaaccggctcagcatcgaggatttgcattacctgatcagcacgccggtatccattctgaccgtgtgcatcaaccacgccaatctcaaaatgctgatggaacaggcgcagcgggaacggcagcgcgctcagcggatcgatcgtgcgctggcgctgggtggttctattgaactgatgcagcgctacttcggtttaacgcctgcggaagtcagcacccgacgccgtttaagcggcatcgaaacccggcaggggcgttgccataaccctacggaagaagaagagctggccgtctgggaacagtggaaagccgcacagattagcaatctggcttcgctggaggcgctggatgtgatgatgttgattgcagaacaacatgacatttccctcacggtcatctggacgttggcgaaaagctggatggaactctctccgtcaatggggagggcatag

SEQ ID NO: 211906 - DNA, 1623 bp, Klebsiella pneumoniae
atgaaaagcagcaatatgaaggcggcgttactgaaacgggggagggaaccggctgcggttgggaacgtagccgtattgccggttgctgaaatgccaatggtgctgatgctggagcaactgcgcccaaacccggataacccacgcacaacccgcaatcctaaatacgaagagatcaagtcatctatccatgcccgtggtctggattcggttccgaaagtgaccaaaaaccctgacagcgccgaagatgtttatatattcagcgatggcgggaatacccgctacgctattttgtccgagctgtatcaggaaaccggcgacgaacgttttcgccgcattcagtgcatattcaagccatggccgggacgtctgaaatgcgttatcggccatctggcggaaaacgagatgcgcggcgatctctcgtttatcgaaaaggcgctgggcgttgctaaagcacgctccatttatgaagagcaatttgaacgtaaagtcacccagcaagaacttgcggatctcctgaccggagagggctaccgggttacgcagtctaatatcagccgtatggaatatgcggtcacgcaccttttccctcacttatcttcgctgttctatatggggttgagtcggacgcaagtgctcccgttaatcaatctctacagcgcggcggaaaagggctggaaggtgctgtgtcaggaaagcgctgtactcccgttagccccatcgtttgaggtggtttttgccagtgcctgtagcaggctggagctgacggctcttaccgattactcgctggagtacctgaaagatgagttaatgggtgagctcgtgaaagcgctgccggatcccacaatcacctgggaccgttggctgattgagttggatccggcagagcagcagcgtcggcagctttttggcagccctgaacaaacttatgtgcctgagcctgaggggccgccagagcacgcgccgccaccctcaccatcaaaatcacgcgggccgcagtcacctcccgcaacggcggaaaataaggctcccgcaacgcaggaggtactgaatgagagaggggaagggtgttttcccgatcttcaccctgctgctggcgtcgagttgcagccggacatgtttggcggtgagcccgttttgtccggtgaagcatttgccgaagcatcaccgggcgtgtccgagccgtcaggcgcatttcaaaccagtgtcagctccattgcttttgccgctgccgggctggaaccggtagcggatatctggcatatcccgtcattgcaggacgatattgaacatctacaggatatggcgtttcggctggcgttcgagcttgccgaagcgctggagatcggcgaactggtgattgaggataaatcgcccctgagttccggctttcgcattatcgacgagcctatgtacagcgcccattcgggcaggcagcttctttccctcttttcttccgacagcaccgcgctggcggcatctgcattctctatgttggtcgtgggagcgcctgaagtggggggcgaacctctgctggacgatatcgcggtagtgaaatatttccgcctgatacggatcctgcgccgcctgcatgagttacagcggctgaccgggggaggtgaataa

SEQ ID NO: 211907 - DNA, 1368 bp, Klebsiella pneumoniae
atgaataatgcccagcgccttttaccccctcattctattgagtctgaacaatccgttcttggcggcctgatgctggataacgatcgttgggatgacatcgcgacgatcgtttccgccgataatttttacgtccgcccgcatcaactcatttttaacgctatgcatgacctgctgatgcaggggaagcccgtcgatctgatcacgcttagcgaacatctcgaacagcggggagttttggaacaggtcggcggcttcgcttatctggctgaaatgtcgaagaacacaccttccgcagcgaatatcgttgcgtatgcggagtacgtcgccagttatggccgtcagcgccagcttttagcgttggggcacgatattgttggtcaggccggggatgtgcgtaccgacgtggcaatgctgattgatgatatcgagcagcgtctgtttgcgatagccgagcagcatgaacagggcggcgtagccgatctgccggaggcttacggccagtttctcgataagctggaacaacgttgtcagagccagacgtcagtaacgggaacgcctaccggatttcaggatcttgatgaagtaaccagcggtctccagcccggggatctggttttactggcagggcgtccgtcaatggggaaaaccgcgcttgggttagcgctatgcgaagccgcacttaacgtaaacgctgggccggtgcaggttttcagtctggaaatgccggtcgatcagcttctggcgcgctttaccgcaatgctggggcgtgttccgcttcagcatattcgcagtggcgatctgtccgaaaatgaatggggacgtataagcagtgcggcaagctgcctgctgtcatggaaagatcgactactgattgatgacagtagttatttaacgccgactatgctgcgctcccgggttcgcaagtcggtacgccagttcggacaccctgcgctgattctggtggattatcttcagcttatgcgtagtcccgggcaggaaaatcgcacgcttgagatagccgagatttcccgggcgctgaagtcgctggcgaaagaaatgcgttgcccggtcgtggcgctgtcgcagttaaatcgcgacttggaaaaacgcgccaacaagcggcctaataacggcgacctgcgtgattctggcgcactggagcaggatgccgacctgattatgtttgtttatcgggacgaagtgtatgacccgcaaacgatggataaaggtactgctgaaatcatcatcggcaagcagcgcaatggaccggtagacacggtaaaagtacgctatcaggccgatattacccgttttgaagactttccttccggtgcttacagcttgggttacgggaggactgctgaatga

SEQ ID NO: 211908 - DNA, 387 bp, Klebsiella pneumoniae
atgatgcgccagtcttatctccctctttttcgtgcatgttgtcagtgtacctatcccgaccctgcattaaggacagacgagatcatcgtgttctttgaggctgaagatcgcgtgcgggcatctaaaaaaatagttcgtctgttggcggatctatggggatgcagagagtcattcgtcgaagtctggaatcttgaagacgagcatgagctggtactgtcgagcgttaacgtcagtgtgtcaaggtactggatgatgcttgaaattggttccgggccatccgggccagtctatattgacgtgaagcgcgatggctatccgcttttgttggtatctccccgcaagttacaacagttgtatcaggcgttgggggaggtaccccatgaataa

SEQ ID NO: 211909 - DNA, 873 bp, Klebsiella pneumoniae
atgcaagttatatcaatcatttcaactaaaggcggtgagggtaaatctactcacgcggctaacctttctggatttttggccgacgctggcctaaagactttgctgatagacggcgactacgcgcagcctacggcatcaagctactattctctgcgctatgaagcgccctgtggtctgtatgaacttctcatgcagacagtcgatctgaacgccccagagcaaattatttcccataccagcgtgagcaatctggacttgatcgtctctaacgatccccacgaacagcttaaaacctcaatgatgcacgcgccggatgggcggatccgcttacgtaatttgctccagcacccgctgtttaatgcttatgatgtcgtggtgatcgattcacagggcgcgcgctctattatgctggagctggtattactggcgaccaaccatacggcgttagccatgataaagccggtggtaccggacgttcgggagtttctgcgcggcacgatcccgttgctggaagggttactgccatatcggggattcggtattgtattgccgccggtaaaggtgttggttaactgtatggactacaccaccttggcaaaagacgcgctggaggcgctcagtaacatcattgccgaaggatcttatagcagcgcagatatttccgttagcctgctcgatacccatatttacgatctggacgtctacaaaaccgggcacagtctggggcagcctgctcatcgccttgaataccacaccgatcgcaagagcctgcctgccgcacgcacgatgcatgatttagcctgcgagcttttccctgaatgggtggaacggtttgcctcagttcttcaggttcagccaaaaggggataaatga

SEQ ID NO: 211910 - DNA, 1146 bp, Klebsiella pneumoniae
atggcacagggcttacctgtttccaatgtcgttaacgttgacgtcatcatgtcaccggtagcggcaacggggcgaaacttcggtgcgctcctcattctgggaacctctaccgttattccggttaccgagcgcattcgccagtattcggccattgaagatatcggcgatgattttggcgctgactccccggaatacgaagcagcgaccatcttcttttcacaatcaccaaaacccacgctggtctatatcggccgttgggcgaagacgctggcggaaggagaggccggggcggtggaaaccttgctacaggccgttaatgcctgccttcagtataccaactggtacgggctggcaattgccgacagcgccgatctggttgaggctgacgtgatttccgttgctgctgctattgaggcatccagcttaagccgcattctggccgttaccactgctgatgtgaatgtgctggtctcggggaataccgacaacatcggctataagctgaaagccgccggctacagccgtacgttctggcagtacagctccagcagcaaatacgccgctatctcggcatttggccgtgcgtttacggtgaatttcaccggcaacaacaccacgatcaccctgaagttcaaaaccgagccgggcgtgacgcacgaaacgctgacgaccgcacaggcgtccgctattgatgctattaacggtaacgtctacgtctactacgccaacgatacagcgattatccagcagggtgtgatggcgaacggtgatttctttgatgagcggcatggcctggactggctgcagaactacgttcagaccaatctctataacctgctttacacctcggccaccaaaatcccgcagaccgacgcaggcgtaacccggttaatgaccaacgtcgaagcctcactggatcaggcggtaaataacggcctcattgctccgggtgtctggaacggtggcccgattggccagattgaatccggggataccctgaccaagggttactacgtctacgccgacgcggtagctaaccaggctcaatccgacagggaagcgcgtaagtcgccggtaattcaggcggcgatcaagctggctggcgctattcattatggcgacgtgcagatcaacgtggtccgttaa

SEQ ID NO: 211911 - DNA, 441 bp, Klebsiella pneumoniae
gtgacagggctggctgccacgctggtttacccacgctggactgacccgcaaaagcagatacccaaaaacggcaccacctggtgcgcgttcggtatcaccggcattcaggaggacttcaacccggcgtacgtgcagggcgaagagaacaccgaacagtggtcgcatgagaccgtgagcctgatcttgtgcttctatggcccgcaggggctggcaatggccacgcgctttcgtgacggtctgctggtctcgcagaacaatgacgagctcaaccgctctggcctgacatttctgcagcatgggcggatcctcaatctgcccgaactcatcaataaccagtgggtgcgccggtacgatatcagcgttgacctgcgccgcaaaatcatccgccagtacggcattcaatcgctggtcgacgcgccagtgcaattttttggagattaa

SEQ ID NO: 211912 - DNA, 387 bp, Klebsiella pneumoniae
atgccgtttctcgatgtgacggatgttctgcttgatccggactttgtcgacctgtctctggtgtgttatcgacaggtgcagacagtggacgaagataattttccaaccaataccgtgcaggctattccgttctctggtgtcgtaaccgtcgaccgttcactggaagcgaagcgtatggccgccggacagaacatcaacggggccattctcatcgtgacgcagttcaggctgactcaggggcaacccggattagatgccgatatcgtaacctaccgcgggcgagattatcgtgtgacgtttgtcgacccgtatacggcgtacggtgccgggttcgttcaggcgcattgcgagcttctggaattcgacgggggaacgccaattgagtaa

SEQ ID NO: 211913 - DNA, 507 bp, Klebsiella pneumoniae
atgaaaagcgggctcacaattcgggaagacaattacagcagcgttctggatgcgctgaagcagctgtcaggcactgatgtgctggttggtatcccggcaggtcctccgcgcgatgatgcgccgctgagcaacgctgagctggggtatctccagtccaccggggcaaccgtagagatagacggtgagaccgttactctgccgccaaggccatttctggacatgggtattgaggattcccgggataaaacgacagagcgtttaaagctggccgctcagtctgcgcttgaaggtaaggcagatgtggcgtcgatgcatcttgaagccgcaggccagattgcgcgtgatgcctcaaaggctgtcattgaggcaggcgatcgtctgaccccactatctgaaaaaaccatcaagaagcgcagagaaatgaagcctcccattccaggcgataagccgttgcgtgcccgcggattcctgttcagagcgattcagtatgtcgtgaggaaagaataa

SEQ ID NO: 211914 - DNA, 420 bp, Klebsiella pneumoniae
atggcaagaaatcaaagtctgccgacgcctgagcagttcagggcaacctttccgcagttcgctgacgatacaaagtaccccacgccaatgattcaggctcgactgaatcttgctgatgccatgctgagtgagtcgcgctttggcgtggatatctttccctacatcgtcgggctgtatgttgcgcactacatgtacctttacgccgccgatatgcgtggtgtagctgtgggtactgctggtggcataaatagcggcatacagaccgcgaaatcagtggataaggtttcagccagttatgacgcaagcgcaaccctggaccctaatgccggtttctggaacaactcccgttacggatcggagttctgggaatacctgatgatgtttggtgccggtgcggttcaactggggacgccggaatga

SEQ ID NO: 211915 - DNA, 282 bp, Klebsiella pneumoniae
atgaaaaagatttacgtactctccccgtttaacttcaacgacggcaaagagcaaaagcatttcccggttggcttccacgacgtcgatgacacggttgctgatcactggttcgtaaaagcgcactgttctccggatggcgaagcgccagcggtcgcagaagacccgcgcattgctgagctggaagcaaaaatcgccgagaaagacgcgcgtattgctgaactcgaagcgcaattgccggagactaccaataatggcaagaaatcaaagtctgccgacgcctga

SEQ ID NO: 211916 - DNA, 942 bp, Klebsiella pneumoniae
atgccaatgacatttgaccaggcgacagtcgacggcactggtgcctttcttgtccatgagctggagcgtctcgatcagacactgaatctgccgctggtgaatttcacctggtcgcgcgatatccagttgcgtgaagacgtgtctattgctgatgagatcagctcgttcactaacaccacttttgctgctgccggtacgccgaatgctaacggtaaaaactggcttagcaaagccgcgaccgcgatggctggacttaacgtcgacatcgcaaaaactggcttcccgctcacactgtggggtatggagcttggctggaccgttcctgaattgcaggcagctgcgcaggttggtcgcccgatcgacacgcagaagtacgacggcatgcagctgaagtggaacatggacacggacgagcaggtttatatcggcgattccggtctgaacgttaaaggcctgctgaacctgacgcaggtaacgccgaccaacgccgcgaagacctgggcgacctccaccgctgacgaaatccgggcgagcattaatgccgggttgagtgctgcgtgggccaactcagcttactccatggtaccgacggacatgctgatcccgccggagcagttctctctgctggcaagcaccatcgtatccagcgctggtaaccagtccctgctgacctatctggaaaccaacaccatcgcataccaccagaacgggcgtcctctgaacatccgtccggtgaaatgggcgaaaggtcgtggcgtgtcgaactctgatcgcatgatgttctacaccaacgacaagaaatacgttcgcttcccgatggttccgctgatgagcgtgccgatccagtatcgcggcctgtatcagctcgtaacctattacggcaagctgggtgcagtagagccggtttatccggaaactctggcctacgtcgacggcatctaa

SEQ ID NO: 211917 - DNA, 495 bp, Klebsiella pneumoniae
atgggtaatacatttctttaccggatgccagcgggcatcgccggggcaatttctcgtccgcaggatctgacggttgaacctcaactgctggactcctccaaccttttccccgcttacggccttggcggcaagatttcctccgggaaatttgtgccaatcgctgcgagcgatacagcgtcggtgctggtgggcatttatgttcgtccgtatccgaccgccagccagccggataaagtccagcaggtaggcagcggtaaaaacttcaccggagattgcctggtacgtggttacgtcacggtaaacatcggcgcggatgcatccagcgttgctctgcatggcccggtctacatgcgagtggccacaccatccgcctcaagccctctcggcgcgttccttgccgccgctgatggctcgaataccgtccagatcactaacgcttacttcaatggccctggcgacaccagcggcaacattgagctggccttcaatatttaa

SEQ ID NO: 211918 - DNA, 1203 bp, Klebsiella pneumoniae
atgaaatatttctttaaaacccgcctgggtaatacccgctttcaacttgctgatgggtctgtcctgtttaaggacgtcccgatcgcaaggactggtgagcaggagtacgacgccacagagcggcctgagcttgtcccaaacgacagagggaaggtcatcgtacgccggatgccagaagaggtgttcagcgagcgagccatggcgtcattcgaaggaatggcagtcactatcggccatccgcgagattttgacgggcagatcatctttgttacccctgataactggcgccagctggctcacgggcacatccagaacgtacgacgtggcacggacgataaaatcgatctgctgctggctgatgtcatcgtcaaaaccccggaagccctgcaggccattgatgatggtgatgacgaggtcagctgcgggtacgacgccgattacgaacagatttcacctggtctcgcaaagcaatctgcgattaccgctaaccatctggcccttgtccctaacgggcgggccggtttccgttgtgcaataggggattctatgccaagcactactaaaaactggtttacccggctcctgaaggcccgtaaaaccggggacgctgccgaaatggcaagtctcattgataacccgcctgatgatgtcacgggcgataacgatgtatcgacctctatgacacccggcggagtggtcatcaaccttgcaccgcaaaatccgcttcccggcccggcattgcctggtactggcgatggtgaggaagaaattcctgcatggggtaaggcgctgattgaggcggtggccaaactcacgcctgcggcagctgctcctggtaccggcgatgccgaggatgaagaggagaaaaaggaagaggagggtaaggttaccggcgatgccgcttatcgtgccgatctgattcagccaggcatccagttgccagaaaaggcgaagccgacagcattcaagcgccaggtgcttgcctctgccgatcaatctctggttcgctctattgtcggtgatgccgatatcagcaagctgaaaaaagccacggtagatatggctttcacggctgtttctgagctggcgaaaaaccgcaataccaaaaccgtcgacagcctgcaaacgcagactgccaccactgttaaaaccattgccggtatgaatcaggccgcgcaggaattctggtctaaacgaggctaa

SEQ ID NO: 211919 - DNA, 1452 bp, Klebsiella pneumoniae
atggcgaagaaaacaggacgagtcgccacggcggattcgtacgataactttgttgcccgtgtcggtatgcagcagcctaatcagcatgccgcatcgacctacagggcgaactataccagccgcaaccgcctgctcatcgagtgggcttatcgttcctcctggattattggcgccgcagtcgattcgaaagcggacgatatgaccaaaaagggcgtgcggatcaccagtgagattgacccgaaacgtcgtggcattctggaatcacggttcgatgagcttcagctttgggattgcatcaacgagacgctgaaatggtcccggctgtatggcggggcggtggcactgattctgattgaaggtcaggcaccgctgacgccgctggtgctggataaggttggcaagggcagctttaaaggtctggctgtacttgaccgctggatgattaacccacagctcaccaggcgcattaaggcacttggtcctaacctcggcaagcctgaattctatgacatcgtgacaacggcgcaggggctgcctgcgtggactgttcaccacagccgcctgatccgcatggatggtgtgaaactgccgtatcagcagaaaatcaccgaaaacgaatgggggatgtccattgtcgagcgcatcttcgatcgcctgacttcctacgatagcaccagcgtcggcgccgcccagcttgcctacaaggcacatctgcgaacggcaaagattaaaaagctgcgtgaaattatcgccacaggcggtaaagcgtttgaggcgcttatcaagaatatggagatggtccgccagtaccagacgaacgagggtatgtccctgtttgattcggaggacgaatttgaaacacattcctattctttcgcagggctgtctgacctgcttagcgagtttaaagaggatatcgcgggtgctgttggcattcctcttgtccgtctgttccgccagtcaccgaagggtttttcaaccggtgacgctgacctcgcgaactactacgacgacgtgggagcgcttcaggagcgagatttacggcctcacatccgcctgttattcgatgtactgcatcgctcagagtttggcgagccgttgccgcaagatttcacctttgagtttaaccccctgtggcagatgagcgacaccgatcgctccacggtggcaaccaacacaactaccgctcttgcaaccgcggtgcgtgatttgggcatgtcgccggctgctgctctgactgatttgcgcgagctgtctgacgttaccggcatcggtgcttcaattagcgatgaggatatccagaatgcggcgaaacagtggcaggagactgaatctgaaaccagccctccgccgccgatcggaggtccagtatcagaaaagcctactggcgatagtcgaccagataaatcaaatcgtcacgggttcctacgatggttcacaggcaagcgctga

SEQ ID NO: 211920 - DNA, 1401 bp, Klebsiella pneumoniae
atgacttctactctgacatccaaaccgacgctgaatccggtcctgcgtagcttctggacgacgcaggcgcgtaacaaagtgctttatggtggccggtcatcgtcaaagtcatgggatgctgctggcatcgccatattcctgtcaaataaatacagcctgcgcttttgttgtgcgcgtcagatccagaacaaaattgaagagtcggtgtataccctgctcaaaattcagattgaccgctttggcctgcggcatcgtttccgcattctgaacaacaaaatcattaaccgggtgaccgggtctgaattcgtgttttatgggctctggcgcaacattgaagagattaagtctctggaaggtatcagcgttctgtggcttgaagaggcccacgcgctgacggagtaccagtggaagatactggagcctaccatccgtaaagagggctcagagtgctggtttatctttaaccccggactggtgactgatttcgtttggcgtaactttgtggtcgatccgccagaagatacgctgatacgcaaaatcaactacgatgaaaacccctttttgtccgacacgatgctgaaggttatcgaagccgctaagcgccgggatccggatgggtttaagcacgtctacgaaggcgtgccagagtcggatgatgatgcggccattatcaagctgtcatggattgaggcggctgttgatgcccacaaaatcctgaatttcgagccaagcgggcgtaagcgtattggcttcgacgtcgccgatagcggcgccgataagtgcgctaacgtctatcgtcacggctccgtcgtgtattgggcggatgagtggaaggcgaaagaagacgaattgctgaagagctgccagcgtacgtatcaggcagcactggagcgcgatgctgatatcgtctacgactcaatcggcgttggggcatctgctggcgcgaaattctcagaaattaatgaggatcgtaagcgcgaaaacatgaatgcatcccgcatcaattatcagcgattcaatgcaggcgctggtgtgaatgagccggactacgaatatagtgggatcccgaacaaggattttttcgccaacctcaaagcgcaagcctggtggctggtagcggatcgcttccgtaacaccttcaacgcggtaaagaacggcgagcagtacccggtagatgagctgattagcattgactcatcctgcccgctgctggaaaagctcaagctggaacttaccaccccgcaccgtgattttgacaaaaacggtcgcgtgatggtggaaagcaagaaagacctcgccaagcgtgacgtaccatcgccgaacgtggccgacgcgttcatcatggcgtttgctccaaccgatacggcaatggatatctgggaagcgctgggaaacagctaa

SEQ ID NO: 211921 - DNA, 753 bp, Klebsiella pneumoniae
atggcaacaccggactgggaggccatcgaatcggcataccgggccggagtccttagtctccgtgatataggcgataaatacggcgttactgaaggggctatcaggaagagggctaaaaagtttgattgggtacgcaaggccagtacgcaggtacgcaaaaatggtacgcaaaagagtaaggcgcgtaccagcgaaaagcctgccagctctggccgtacgcaaccaaaagccgaacctccaccagatacgaaaccgatacgcggggtgcgtaccgatccgccgactaacccatttcaacccggcaaccagcaggcgttaaaacacggtggttatgcccgccgtcttctgcttaaagatgaggtcattgaagacgcgaaagcgttgacactcgaagacgaattatttcgccttcgggctaacaaccttgtcgccgcagagaatattggccggtggttgaccaagctggatgatgctgaaggggaccaggaaagaaaggtgctgatggaaaatatcagcgccgccgagaaggcgatgatgcgcaataccgttcgtattgagtccatcgtcggcacgcttgcgacggtaggcaaaatatttgctgatacagactatcgcaaggctgctactgataaggtgtcgctggaggccgatcgtcttcgccgtgatgctggtattgatgatggcaacggagagcgtgacctcaatgacttctactctgacatccaaaccgacgctgaatccggtcctgcgtag

SEQ ID NO: 211922 - DNA, 357 bp, Klebsiella pneumoniae
atgcctttgccgattggctacaacataaggtgtgacatgaaaaacggtatttacttcgtaaccttcagcagcaataaccatgatgttggacaaggcactgtagtagtaaaagacaatgccatcaacggtggtgatttcgggttcacttaccaaggccatattcagggcgatacattagatttgcatgtttctcagcataatcctcaggcggtgaatgtcattcaaggtgtaaatgactacacgatggaaatgagcattgtagaagtgcaggggggttaccttttatcaggggccgttaaaggaattcctcaagctcggcttagggtaagtgcaaaattcattggtgagttggtttag

SEQ ID NO: 211923 - DNA, 324 bp, Klebsiella pneumoniae
atgccaaagagcagatcgcactggacgcatcgggagccgcggcggatatcaaagtggctgttgcgaatgatgattgcgctcccgctggtattcctgctggcgcagttaagcggttgcagcaatacaaagacagtttacgtcaccgttccggtagtgccgctaccctccagcctgacagctgaaacgccttatcctgatataccggacaagatgacgtggggccagagccttgatttaaacgtcagtctgctatcagcgctggggcagtgcaaccgggataaggccgacatacgtcggtctgaaatatttagagggaaaaattag

SEQ ID NO: 211924 - DNA, 531 bp, Klebsiella pneumoniae
atggctaacctgaaaacgaaactcagttcggccatgctggcgcttatcgctgctggcgcttcagctcccgttcttatggaccagttcctgaatgagaaagagggcaaaagcctcacgtcataccgcgatggcgccggcatatggacgatatgtcgtggagttacccaggtagatggaagacctgtaacccagggaatgaagttaacccaggccaaatgcgatcaggttaatgccgtcgagcgcaataaggcgctggcatgggtagatcagaatgtgcgtgttcctctgacaccccctcaaaaggtcgggattgccagtttctgcccctataacatcgggcccggtaaatgctttccttccaccttctaccgcaagctgaatgccggtgaccggaaaggcgcctgcgctgaaattcgccggtggatttttgatggcggaaaagattgccgcgtgcgttcgaacaattgttacggccaggtctctcgtcgtgatcaggaaagcgcactggcatgttgggggatagatgaatga

SEQ ID NO: 211925 - DNA, 249 bp, Klebsiella pneumoniae
atgaaaatgcctgacaaaatcttttcggcggcctcgtactgctcgtcaggcggcctgatatgcaccgggctggcaaggacctatgactggtttcatggccttgactggaattttattgccctggccagtggcgtgataatcggtgtagcgacttatctgaccaatctctactttaagcgccgctggacgaagatgtatcagcaatccctcgatcgtggctatggtggcccgccaccgcaggatgaatag

SEQ ID NO: 211926 - DNA, 783 bp, Klebsiella pneumoniae
atgaaactggaagcctccctcaaacactttagccctcagggcatgcatatcaccgacgacgcgaaaagcacatccccgaatcgcctgaatggcacagacattatgaccgggatcggtgtgaccagcagcagggcacgcttcggcctggccgctttcttcggaaaggctggtatcagcaaaacggatgaacagcttgcaattcaggcgctggcgcagtttgccatcaaaaacgctcctaaaaatgtccgcaaagccgccggtgacaagctcggcacctgcatgttgacgctggcacaatttgcttttgcggagtactcacgttcggcggccaccagcgcaacgtgtcacagctgcagcggaaccggctttatttccagccatgaagatgtaattaagcaccctggtattttcgatgcagacggtgtcgaggtgaaggccccaaagattagaaatgaactggtgaaaagggtctgtggagtgtgtggaggaaagaaagtgatccatgcgcgatgcaggtgtggtggtaaaggggaggtgttagatcgcaaagcgaccaaagaacttggcgcaccggttttcaaaacatgtgagcgctgctctggaaatggcttctctgttgtaccctcagcgacggttcaccgcgccattctgaagcgtctcccggatctccatcagtcttcgtggtcacgcaactggaaaccgttctatgaggggctggtggacatgctgcgtcagggggagcgtcaggctgcagtagaatttgagaaagcgacaagttattaa

SEQ ID NO: 211927 - DNA, 477 bp, Klebsiella pneumoniae
atgatgaacaataacaatctgcaacataaccaattcttcaccatcgaacaggacttttcgcctgagaaaattactgatgctgagcgccttgttatggagcgcttcagtcatatttatgcaaactgggccgatgaaaaaaacttaagtcgtgaggcggaagaacttcgcgtaagagaaattaaaggttttaaaaacatcctcctctctccctggacattaagcgatgtaaccattgaatgggattactgggaatccgtacttcgtcacaggtataaaacacaaaatggcgatggctacgtccagattatctgggatcggcgcgggtggctcactgaccttttgtgcgccatgaaaccagttacccgggctgaagcattaacagtctgcaagtggttactggcatgtgactattttgaggaacgggattcgctgtttgatcgcattattttgaacctggtcggggagtgcgaagaatga

SEQ ID NO: 211928 - DNA, 963 bp, Klebsiella pneumoniae
atgaaaacagcagaagcagcaaaaggccggtggtcagaaatttttgaatattacgggctgccgcctatcaccgggaaaaaccattacaagggagaatgtccggtctgtaaggcgcgggggaagtatcgcgttgatgaccgtgacggtcagggtacatggatctgtgtatgcggtagcggtgacgggatgaagctgctgaccctgacccagtcaaaaagcttttccgccatctgcgcagaagtggaccagctcatcgggaataactatcagcgcatcaacgtgccttctaacagttcggcggcgcggcagcgccagcgagtcatcagtaagttttccaagttgctcgatttacggggaactagcgcggctggttaccttcttcaacgtgggataagtcgcctgccggcagaaggcatccgtttttgtgaccgccaacgccatgcggggcgcgtttatcaagctctgtatgccctggctaccgatgacaaagctgagctttgttacctgcaccagacgctgctggacggcgacaggaaggcagatattgatagcgccaaacgtcttaagtcgcttcaagaggacagctatctggatcacgcccgctctgtggccattcgcatgtttccggtatcaacgacgatcggcattgccgaaggtatcgaaacagcactctcctgttatcaggtttatggcgtcaacacctgggcggtaatcaacagcgggtttatgaagaaattccgggtcccggcaggtgtgaagcatctgattatttttgccgacatggacaagcactctgcaactggacatgccgcggcgttcgagtgcgcccacgcaaacctgctggcgaaaaacgacctggtgaaagtcagcatacgctggccggataacggagatttcaatgatatgcttatgaacggcgatcaggttcgtgaacaagttttctataaaaaggtggcagcatga

SEQ ID NO: 211929 - DNA, 1659 bp, Klebsiella pneumoniae; identical to SEQ ID NO: 190053

SEQ ID NO: 211930 - DNA, 222 bp, Klebsiella pneumoniae
atgagtggaatcaagagccttagacgcaaagcaaaggtaactcagggagagctggccgcgctgattgatagctcccagggggccgttagccactacgaaacaggaagaaggattcctgatgttgcagtcggaaagcggatcgtcagcgcgtttaaacagcttggcctgaatacaagtttggacgaggtattttcagatgatgttgcacgggatgaggcctga

SEQ ID NO: 211931 - DNA, 669 bp, Klebsiella pneumoniae
atggctatgaaacagagatggcaggacctggccaaaaccaggatgaaagaagtcggcatgactcaagaacagctggcagaggcgctcggcataacgcagggcgggctgggccattggttaaacgccagacgtgaaccgaacttagaggttatagctaagatttttaacatattgaaaatgcccggcttcgtagtaaatgctgacggcactatcagcgactcaagagccgatcacaatgtaagttttaatagcattaacgaatccaagggaagctaccctgttataagctgggttagcgctggagattggatggaagctgtagaaccgtaccaccgtagagcgatagatcgatggtatgacaccaccgttgaatgctctgaggattcgttctggttagacgtcagaggcgattccatgacatcaccagcagggctgagcataccggaagggatggcgatacttgtcgatccccaagtggaagcaatcaacggaaaattggttgtagcgaaacttgacggtgacaatgaagccactttcaaaaagcttgttatcgatgccggtcaaagatttctcaaacccctcaacccccaatacccaataatccctatcaatggcaattgccgtattatcggggttgtagtcgacgcaaaaatcaccaacctcccataa

SEQ ID NO: 211932 - DNA, 315 bp, Klebsiella pneumoniae
atgagtacagagaaattttttcaactggtaactatacctgattaccgtttctcttccgataaagagcaatgtcaaaacattgatttcgacaaaattgctactgattgcgatacaaaaacaatatctattttgcaagccatcaatcatataggggttagcataatgagtgaggcagaagaaaagagattaaataaagataaaataatgatgctttctagtgtggttgcagacctcgctgaattagcaatagcaacaaataaaatagctaactcagcaacatattcttccggttataaggatgctaaaaatgtctga

SEQ ID NO: 211933 - DNA, 189 bp, Klebsiella pneumoniae
atgtctgatatcactttgcaaaaagcagcatcaaaggcttaccaggctgagattgtggcgaggatgcttgagaactaccctcataaactgaccgactcagacgtggaatctgtcgcctcacttttggctgatctgattgggccagttgcagcgtaccttattgaggaagagtctaaaaacccggcttaa

SEQ ID NO: 211934 - DNA, 255 bp, Klebsiella pneumoniae
atgaataaccagcaaacaatgctctatcagggtgtgctgatcccccgccccgtgttgaacgtggatctgcatgtcctccctgattttaccgggcgggtagtcttgcacatcgagaacgggagggtgatatgcgaccgccagctgttcgacgacgagcacatttgcacactggccacgtttatcgaaatggcccgcgacgcggggttgaggatcgaggaggaagctggtggcactgacagcgatacgaattcctga

SEQ ID NO: 211935 - DNA, 219 bp, Klebsiella pneumoniae
gtggcactgacagcgatacgaattcctgagagggttcacctgcaggcgctgcaggtcctgctgcggtatcggcgccggcggatattcccgcggcgaatgcgccgcaccggctacctcagcctgaaggttaacccacgctggcgcctgttatcgaaagacgatggccggaactgggaagttatgagtcatgaaacctataaccgggagaaagacaaatga

SEQ ID NO: 211936 - DNA, 426 bp, Klebsiella pneumoniae
atgattgacaacagaactgtcagcgccattgacctggcgttgcaaaagcacccaacgccagttggtgatctgttcgccgcgatccgccacggacgcatgaagcggtgcttcagccgggataccgcaattcgttacctggcgttcttcatgacctcccgagcttttgggcgttctggtttcaagcagcgttatccggacgtgcaggtaattcatccactgaatccagaactgagtagctggcaacgtggcgccgtgaccactgagtattttaacgcccaccagcgcaccgttcgccggctgcgtcgcatcctcgcccgcaaaagagaaatgcaaaagtggtgcaaaaagtgggatgccatgcacgaccgctacgtgaaagagcgcgaagaactacaggcctgtaagcctggagggctgagtcgatga

SEQ ID NO: 211937 - DNA, 195 bp, Klebsiella pneumoniae
atgattgcttacttacgcattgttctatcggtggtgattgtcgccagcgtttatgggctgttcgttccgatcctcatttcgatgaaggacacgacagcagttatatccggttttgccctggcgattctgaccccgccgtgcatctacgccatttgtaagggtcttgtgcttaccgtaacgaaggaaaagaaatga

SEQ ID NO: 211938 - DNA, 828 bp, Klebsiella pneumoniae
atgaaaaaagcaattatggcttcaattatcgcactctctgccatcggccttgttggttgcgatcgagttgagcccggcaacgtgggtatcaaggtgaataagttgggcgacgataaaggcgttggtgaagtcgtcggcgtcggccgctactggaccggctggaataccgaggtttatatctttccgaccttcaagcagatgaaaacgtatgaagacgctttcaacttccagatgagcgatggaaccaccatcggctaccacatcggggtcgcgtacaaggttgatccgaccaaagttacaaccgttttccagacctaccgtaaaggcgtggacgacatcaccgacaccgacctgcggcagaaaattgctgacgcccttaatcgtctcgcaagtcggatgagcaccgataaattcattgacggcgggaaagctgagctgcttgaaaacgcactgaaagagatccagtccgatatggggccggttggtatccaggtgatcagcctttcttacgttggccgtccggaatacccgccgacagtgatcgaaagcatcaacgccaaagttacggccaaccagaagacgctgcagcgcgagcaggaagttaaacaacgtgaagctgaagccaacatgttacgagccgaagccgatggccaggcggatgcaaagctgaaattggctgaagcagaagcaaagtctatccagatccgtgggcaggccttgcgtgagaaccctgaggtactgcaactggaggccatcaacaaatggaatggcaccctgccccagtacatgaccagcggaacaaacaccccttttatccaggttaaatga

SEQ ID NO: 211939 - DNA, 579 bp, Klebsiella pneumoniae
atgcttcagaacatgcttaacccggaaccaacctcaacagggatccggtctggaaaccgggtgattggctactccgctgctattcgcctgctggataacggtcgctatgacaaacaccttgccgatggaatggaaattctggcctgcatcatggaagcggtagaaagcaactggatcacgctcaatatcgaaaaagagttgatcctctggcgctggttactggctgccgtgttcatcactgaggagctggagaaaaacggaactgtcgacgttccgaatgatactggcggtgttgatactgctgttatctattccagcaagcatggcgccattagcgtctatccgggacctgaacgctttgcactcgccaaccatattgagctgggggcaatcgagaaatatgggccagaggttggccagcagctggcgctgcggatgtatcaggacatggttattgctgacgaagaatttgggttcaggttatcagcacttggccgggaggggcttaacctcctccatgacagctttatcgaacacatccagatcgaaggtgtgcccgaagcaccgattatgcattga

SEQ ID NO: 211940 - DNA, 708 bp, Klebsiella pneumoniae
atgatgaataacttgatcactaacaaaccatccatgaccagccttgagatcgccgagctggtagaaaaacgccacgacaacgtgaaacgcacgattgagaccctgattatgcgtggcgttattacttctcctcaaattgaggaaaagcctactgccgggcgccccacaacaatttacgtttttgaaagtgaagaagggaagcgtgacagcatcattgtggtcgcgcaactcagccccgagtttaccgccagactggtagatcgctggaaagagctggaagaagaacgctcccggccaaaatcgcaggcagagctgatcgctgaaatggccctgctgaatgttgagcaggaacgacgcctctaccaggttgaagaacaggtggaaaccgtagtcgaagctgtcgaaaacattaagcgtggaaatatgcgggccgggtatgtcggttatcgccaggtggtcgcaaaaagcggcatgaccgatgccaagtgtcgaaaccttgttaacgcataccgtatcccaaccgatacacacgaattcatgacgcctgatggtttactgtctcgccgggcgatcgtggagtttgaaccttttatgaaagcattccgccaaatgatggcagaagccgaaccacgtgggacccgttggtatcacccgaaaatgggactctttcaggctatcggatgggaggaaaaacattgtgaaaattga

SEQ ID NO: 211941 - DNA, 225 bp, Klebsiella pneumoniae
gtgaaaattgagtttaatgatcaagggtcggtttcagttatcacggtcaccagcaccgtgtttgagttccgccggcacaaccgggcgattgatgtcgcgttgttcctcacgcctgaaattaccagccagagcagcggttttttcattatgaaaacgatcttaagcgggaagacacatcacgcgctgcgggcctataaacatctgatccgggaggctaagcaatga

SEQ ID NO: 211942 - DNA, 213 bp, Klebsiella pneumoniae
atgagaaacggccagcattatgcatacccaaatccaagcaacgcaacgcctggtggtatgacttatcgtcagtatcttatcgcaaaaattgcaccagttatgatcacgaacttcttcagcaacgatgcttggacggattacgacgacctcgccagaactctgatgatggctgtggatgccatcatcgaagctgaacaggagacagctgaatga

SEQ ID NO: 211943 - DNA, 480 bp, Klebsiella pneumoniae
atgacaatctgcgaaaaacggcttaaaagaatcgccggcggtgaacctttcttcccgggcgaggtggttgcgatggctcttgagcttctggcgaattctaaagaaacattgcggccggaataccctgaaacactcccctgcccggtcattcttgaacccggcttccggtttggcaaaggcgttggcactcacctggttctgcgagcacttaacaacagggctaaacgttacgctgaattggatgccatgggtccagaggcccgcgcagagcatgatgccgctatcgttgaacttcgggaaaaactgggttttggtacccaagcaaaaacagctgtgcaggtgaagcttccgggactgccgcagctcggatctaacgccgaatggtatcagggatttgctgctggtgcaggaagcatgcgcgaagcatgtgcggccgctctgatttctgcgggtattgaaattattggggagacaatgtaa

SEQ ID NO: 211944 - DNA, 147 bp, Klebsiella pneumoniae
atgaatagagaatttgagatatggatcagactgcgctacggcggccgctatgacctaacgcgagacggtcacggctactacagccgggaagtagttaagcggatgtatgaagtgtggtgccactgccgtggcctggaagtggtgtga

SEQ ID NO: 211945 - DNA, 192 bp, Klebsiella pneumoniae
atggtagacattgaaatgattgacgaggaagaggcgatgcggatgatccgagtatcttcacgcgtgaccatccggaaatacaccgagcgctataatttccccaagccggtccggacctaccctaaacagtatctgcgctctgctattgtggagtggatcttaaacgggggagtcaaccagaaatcttcctga

SEQ ID NO: 211946 - DNA, 1026 bp, Klebsiella pneumoniae
atggggcttggacgctacccagcgctgacgctgcgcgatgcccgcaatatcgttgcagacctgagggagtcggcagacaaaggcattgacccccgaacgctggctggtggcaacaaatccaagagtaagccaacggtaaaggattgcctggattactggaaggaaaattacgttgacgtaacgttaagggctaagacgatagcgctttataagtcaacggttataaagcacatgcgtgacgcttttcccggtattccggttgaggatatcccagtccgcttgtgggttgagaggtttaccgaagaggagaaaatcaatcctcgccgagcccggcatttattgatacagctcaggtccgccattggttggtgtacgcggcgacagttcgttagcacaaccgagctcatgcttttgcagccgaaagacatcggtgttaaacctgtgattggagagaccacactcagctataaccagcttgccaaaatttggatggctatagaaagaagtcgagggtcaacttctaaccgattgcttcatcaattgctaatgctgtacggcgccaggaatagcgaacttcggctggctataaggggtgaatttgaccgagaggaggggttatgggttgttccggcagagaaaagcaaaaccaacaaaattatcaggcgcccaattttctccgcggcagatgatttgctgaaaaaagctgaaatgacgtatggggatatacttttcccgggcgaggacctgaaaagccctataactatttctggtgcaaataaatttctgagaagaatcaaagactcgttggggtttggtgagtttacttcacatgatttccggcgcaccttggcaacccggctatccgaagagggggttgccccgcacgtcatcgaaaaaatgctggggcatgagcttggtggcgtgctttctgtctataacaagcatgactggattgccgaacagaaagacgcctacgatctgtatgctgaaaagatattctggcatatcaggaagatttctggttga

SEQ ID NO: 211947 - DNA, 489 bp, Klebsiella pneumoniae
atgattggacaccaggtcgatgccgtctgcccggataaagccgctggcgactatgtcatgaccgcaatccatgactttgacggcgcccagacttatagcgaaaagccgggccatcgcttcacgctgaacgctgacttcgccgcagtaaaggccgagaactacgatgcgctagtgatccccggcggccgggcgccggagtatctgcgcctgaacgaggaggttattaaactggtacaggccttcgacgccgcgcgtaaacctatcgccgccgtctgccatggcccacagctgctggccgccgccggtattctgcagggacggacctgcagcgcctatcccgcctgcgctccggaagtgcgcctgagcggtgggcactatgcggatataggtatcgaccaggcgcatgtggacggtaacctggttaccgcccccgcctggccggctcatccacagtggctggcgaaattcgccgccctgctggcggaataa

SEQ ID NO: 211948 - DNA, 1533 bp, Klebsiella pneumoniae
atggattttgaaaatgaattgaccagtaagatccttgatcccattcacggcactattcgtttgacgacactcgagattgcctttatcaatcaccccctgttccagcgcttacgcaacattaaacagaactcttttttatataaggtgtttccctctgcggtgcacagccgcttcgaacactctctcggggtgctgcatttatcaagtgaaatactcaataatttacgcctgaatgcgatacggtatcaaaagaaatatgatgatggccatgtgtttggtcatatcgatcagataccaaaacacaacattcaggagttgagactcgctgccctgatgcatgacatcgggcacgggccggtatcccaccagtttgagagttttatgccttgtaagcacgaattctccgatgttctccccacggcctaccattcaatcattgatgtattaagcaagccagaacagaaagttgaacatgaacatctttcgctgttgttcagcctgatgatttatcatgatctgagaaaacaaggtaaggtcgatgacgaaataaatatcgaaaatgtgttaaaaattatcgaaaaaagatacggtgaccaacagatcattgaggaaattaatggaaaggcaacagatatcctgccgttaatgacctcgatcatctcttcctgtccgatcgatgccgaccggatggattacttgctcagagatggctatttctccggcgtcaagtgtggcatctacgattacaatcgcttgtttatgtcaattgtcccggtcgaggaacagggaaaattgtaccttgcttacaaagagagtgggattgattcgatcgctgagtttattggggcgcgctccagccttttttcgcaggtatattaccataaaacaaaccgcgcctttgcgacgatgttgagcacattatgtgagattatgcaaagcaaggatccacaaaatgtcattatcgctgacgttaccgaccgtatcgttgaccatagcgatgaaagcttcatcgacgcgctgaaggatttttatctggcgtgcagtgatgattattttttgaatgacaaggttggtgaatggatagatatcagcgataccgaggcggttaataaaaaaatacttgatgacattattaaccgacacccatggtcgaaggtctatgaggccaaacactctgtgtataaagctaacatcgctgacaaggaaaataaggcgtggaagagtcaactcaccgggttattgacttctgtattacagcctcatttcaaaccacatgaatttgccgttgatattgtctccgactgcgcctttaaagacttggataaaaccgaagttaagcttttggtgaaagatcttaagaaccgctacgaaataaaaccgttaattgaatgtggtgataagttaaatcagtatcaaatcatcaaatattgcattcgggtatttgttgaccgcgatatcaaagaacgcgtaactcctgaaataatctataaaatcaatgaaatagtggtcaagcagatcgcgttgctgaattga

SEQ ID NO: 211949 - DNA, 762 bp, Klebsiella pneumoniae
atgaacaatagcgcaaaaatcgccctggtgacaggtggcagccgcggcctgggacgcgcgaccgtcgaagcgctggcacagcgcggcgtaaatgtagtactgacctacaaaacgcgtcttgccgaggcgaacgaggtggttacacgggttgaagcactgggcgcccgggcgatcgcgttgcctttcagcgccggcgaaatcgacacctttgacgcatttgttagcgcttttcagggcgcgctgacggagctgggcgccgataaatttgattatctggtcaataatgccggcaacgccagcggcatgggatttcttaacgccacggaagcggaattcgatgcgctgtattgcatccacgtgaagagcgttttcttcctcagccaaaaactattgccgctgctggccgatggcgggcgaatagtgaatgtctcgtccggcctcacccgcatcgtgatggcgaaccgggcgccctatgcgatcatgaaatccgcggtggaaaccctgactcgctatatggcgtttgagctgggcagtcgcgggatcacggtgaactgcgtggcgcccggcgccatcgccaccgatttcagcggcggggtggtgcgggataacccgcaggtcgctcaggcggtagcgaacatgacggcgctgggccgacctggcctgccagaggatatcgggccgatgatcgcctcgctgttatccgatgatcatcgctgggtgaatgcccagcgcattgaggtttccgggggaatgcgcatctga

SEQ ID NO: 211950 - DNA, 915 bp, Klebsiella pneumoniae
atggataaactggatactctgaccttgtttgtgcgcatcgtcgaacggggctcattcagtgccgccgccgcggatctgggggtttcccggccagtagcgaccgcggctattaaagcgttggaggtcagtctcggggcgcggctgctacatcgtacgacccggcacgtacggccgacggcagaaggctcgctgtattatcagcgctgcgtgtccattctggcggcccttgaggaggccaaccgcagcgccggggggagcatctccggcaccattcgggtagacgtggcgggcaacctggcgcggaccctgctgctgcccgcgctgccacagtttctcgcccgctacccggacattacgctgcagatcggcgaaagcgagcgtgacgtcgatctggttcgcgagggagtcgactgcgtcattcgcggcggccatctccccgacagcgagatgatctgccggccgctcgccgggttgcaggagatcacctgcgccagtccggcctacctcgcccggtacggcaccccgcatacgattgaaggactgacgggccacgtgatgatcgggtttgtttcatcgcgcacgcaacgtaccttgccgctgagctttacccaggatggccgtcagagcgaggtcagtttgccctgtcggttgctgacttccgatgccgacgtcggcgccgaagcggcaaggcttggctttggcctgtatcaggcgcccttgccccgccttgaggccgatctggcgtcgggcgcgttaacggaagtgctggccgattttcgccctgcgccgctgccgctctccctgctctatcccagtaatcggcagctctctgcccgggtacaggtatttatcgactgggtgacggcgctgatgaagcctcacctggcgcagcaggcatccggaaggctaaaataa

SEQ ID NO: 211951 - DNA, 189 bp, Klebsiella pneumoniae; identical to SEQ ID NO: 138680

SEQ ID NO: 211952 - DNA, 291 bp, Klebsiella pneumoniae; identical to SEQ ID NO: 138679

SEQ ID NO: 211953 - DNA, 870 bp, Klebsiella pneumoniae
gtggaatattcagtattaagtaacgctcgcaaaatgccgatgctgggtttcggcgttttcaaggtgaccgataaagcggagtgtaagcaggcggtgttgaacgccattcgcaccggttatcgcctcatcgataccgctgccgtctacgataatgaagatgcggtgggtgaggccgtgcgcgaagccatcgccgaaggtttgtgtacccgcgaggcgctgtttattacctccaaactgtgggtccaggacatggccaacaccgggatggcgaaagccgggattgccgcgtcattaaaaaaatcgggcctggaatactttgatctttatttgctacatcaggcgatgggcgattatttcagcgcctggcgtgcgctggaagaggcctatgaggccggtaccctgaaagcgatcggcgtctccaatttttacccccatgtgttagctaacttctgcgaaactgtcagaattaaaccaatggtgaaccaggttgaactgcatccttatttcgcgcagcccgcggcgctggaagccatgaagcattatcacgttcagcctgaagcgtgggcgccgttaggcggtggcagacataatccgtatcaagatgcattgcttcgggggatcgccgatgcgcaccagaaaaccattgcgcaggttgttctgcgctggaacgtgcagcgtggcgtcacggtgatccctaaatccacccgccaggagcgcattgaagaaaattttgctatctgggatttcgtattaacagataacgaaatggcgcaaatcagcgccctggatttaggctatgttggcgaagcggtaaaacacttcaaccctgagttcgttcgcggatgtctgggggtgaaaatccacgactga

SEQ ID NO: 211954 - DNA, 1203 bp, Klebsiella pneumoniae
atgtctgcattaggtcacacccgggcacactggagcggcgtcctggcgatgacgctctgcgtatttgtgctcattgcctcagaatttatgccggtcagtctgttgacacccatcgcgggtgatttacacattaccgagggattagccggtcagggcattgcgctttctggcgcgctggcggtactgaccagcctgacgatatcccgtcttaccggatcgctggaccgtaaatggctgctgctggggctcacggcgttgatggcagcctctggggtgattattgccctggcgtccagtttcccggtttatatgctgggcagagcgctcattgggatcgtcatcggcggcttctggtcgatgtcggcggcaacggccattcggctggtgccgcaacgccaggtcccccgcgcactggccatctttaacggcggcaacgcgctggccaccgttgtggcagcgccgctgggcagctacctgggggccaccgtcggctggcgcggcgcctttttatatcttgtcccgctggcggtgctggccttcgtctggcaatgcattagcctgccgtcgatgaaaagtccgcgcgcaccacagcggcagggatcggtgctgcgtctgttccgtctttctacgctatccctgggattgctggcctgcggactgttctttatgggacagtttaccttatttacctatgtgcgaccgtttctggagacggtgacccaggtcagtccttctggtctgtccctgatattgctgacaatgggtatcgccggttttatcggcacgctgcttattacgaccgttctgaatgcccgattttatccgacgctggtggctatcccgttgttaatggccgcaattgccggaacgcttctgctggccggacaccacacgggatcggtcgccgtactgttaagcctgtggggcctgctggcgacggcggcgcccaccggctggtggacatggattgcgcggacgctgcccgaggatgcggagacgggcggcgggctgatggtcgccgtgatccagctatcgatagccctcgggtcaacggtaggcggcctggtgtttgatagtctgggatggcacagcacttttgcactgagcggtctgttactgctgggcgcggcaggggggacttttctgctctctgtcaaaatcagatcatctcagcgcactgcgattaatgaattgaatgcataa

SEQ ID NO: 211955 - DNA, 1059 bp, Klebsiella pneumoniae
atgagctctgctgagacaactaacccgaatgcgcctgtttcactgattgaaaaatgggacaaaacttttgctgagagttcgaaagtggatcaccgtaaggtgaccttccagaaccgctacgggataaccttagttggcgatctctacctgccgaaggatcgcggtgaacgcaaactggcagctattgccgtgagcggtcccttcggcgcggtaaaagagcagtccagcggcctgtatgcccagacgctggccgaacaggggtttgtcaccctggcgtttgacccatcctatacgggcgaaagcggtggctacccacgcaacgtggcctcaccggatatcaataccgaggattttagtgccgcggtggactttctgggcctgcaaaaagaggtggatcgcaaccgtatcggtttgctcggcatttgtggctggggcggtatggccctgaacgacgcggcgatggatacacgcgtcaaagcggtggcgaccagcgtaatgtatgacatgagccgcgcgatggggcatggagtgggtgatggcaaagaccgctataccactgccgatcgtcgcgccgtactgcgctatctgaacgtgcagcgctggaaagatgcggcaaacggcaccttcgtccccggtgggcatgacatttatgttgatgataagggcaacgtcagcgctgccgatcgtattttgccggaaaccttgcccgccaaccccaacccggtcctgaaagagttcttcgattattaccgtatgccgcgtggtttccatccgcgttcggttaattcaaccggggcctggaatgcgacgatgccgctgtcgtttatgaatatgccgctgctgagttacgccagcgaagtgactattccgacgcttatcgtgaccggcgaaaaagcccattcacgctattttgccgaagatgcctttaaggccatcggcagtaaagagaaagcgctggtgattgtcccaggcgcaaaccacgtcgatctctatgacaacgtcgcgggcaaaattccctttgcgacgttcgcgcaattttttaaaaccaacctgaaatag

SEQ ID NO: 211956 - DNA, 885 bp, Klebsiella pneumoniae
atggcgaaacgggaaaactataatgacctttatctgtttatgcaggtggtgcgggaaggcagttttaccgccgcagcgcaacgacttggcctggcgcagtccggtgtaagccgtgcggttcgtgaacttgaagagcggctgggcgttcagcttctggtgcgtaccacccgccggttgtcgctcactcaggcgggtgagcagctctatcacaatgtcgaatccggtttcgacgccttagatatgggactcgccacgctggcccactatcgtcaaacgccctccggtacggtacgcatcaatgccagccagcatgccattgataaagtcctgctgccgaagctggcagtatttaaacaacgctatcccgatatcagactggaactgatcagcgaaagccggtttgtcgatattattgcgcagcgatttgatgcgggcgtacgtctgggcccggaagtcggaagcggcatgattgcggtacgcatttcgcccgatatggagatggcggtggtgggtacaccggaacattttcgccgctacggctttccacaaacgcccgccgatttagtcgcccacccctgcatcgcttatcagttcggcgacggcagcctttacgcctgggaacttaatgtggatggcaaaaaaatcacccacccacctcagggacagtgggctttcgccgatagctatatggaggccaaagcggcgaggctcggtctggggctggcctatgtcccggaagagctgattaccgacgatctagcccagggcacacttatccgggtgctccagcgttatagccagcgtctggaaggttcatttctctattacccgcaccgcaatgtgtcgcccgcgctgagagcggtcattgatacattgcgaatgtag

SEQ ID NO: 211957 - DNA, 834 bp, Klebsiella pneumoniae
atggaaagtttaatttcttcgatatggaattttgatggactgataaatatcgcgttaatttttgttacttttggtttattaggagtgtttatctggaaacgggcaggatccgcatattctttattgaaccggctatgggagttctgcctgggagggaaaacgtttcacgacggtaaaataaatgcatatttcaatgagagaaatgatgttgaacgttttaatgttttatttaatgtcggcgcaagaaataaagaagagatcaagtcactgattaactggacgaaaaagaaaaatatagatattcgtcatgtcacagccgcgaaaggatggtttgaaatatcaacgcttaaggcaataaaaccattatttatcgctaatgttggtgtatttgtctcttgtgtgttaactatgctgctattatcaaattttatgttgctggcattgaagccatccgcactagtacgattaggcgacgacaagtcatgggtttggattaatgatcatattgctgagagttcgatctggaccaataattaccttcccctgaactggactgagtggaagctcgataaaaaacagtgtgaaagtgaagatttcgataaaacggttttctcagaaaaagcggggataagtgtgcgctcggttgacaggatttgtgagaacttttcaagtggttcgttgagtgatactataaataatattattaaaaatcaaaaactggcatgggttttggctatttaccccttcatctttacgattatttgcttttttagcttgttacgcagaggtgctgcttctaaactttataatgaagtacataactcacaaaattaa

SEQ ID NO: 211958 - DNA, 387 bp, Klebsiella pneumoniae
atgaaagaccttaatatcctgatccgtcgatgcgtgctgattgcccgctttgaagaaaccgtttcgttttatgaacatctcatttcgcaaaaggcaaggttacgttttgactatcccgaatacgatctcaaactggcgcaggtgggttccgtgcttttaattggcggaaccgagcaaagcctggctccgtttcgcgccaccgaggccactttcctggtaaacgacattaccgcctgggagaaacatctgccttccaccggggcaacgattatcaacccggtgaaggccgtgcccaccggctggaacatgctggttcggcatccggatggcatgattgccgaatacgttgagcatcatgataaaaacccggcggatgagatcttctga

SEQ ID NO: 211959 - DNA, 1617 bp, Klebsiella pneumoniae
atgaagtatcctgtcgctttgacatgcggcgcgctgtggttagccagcgtatcttctctggcctgggcggctgacgtaccgccgggcacggtactggcggaaaaacagctgttagtgcgccatatcaaagatgaacccgcctcgttagatcccgccaaagcggtgggcctgccggaaatccaggtgatccgcgatctgtttgaaggtttagtcaatcaggatgcgaaaggcaacctggttccaggcgtagcgacccgctggcagagcaacgataaccgcgtctggacctttaccctgcgtgataatgcccgctggtccgacggcacgccggttactgccgaagatttcgtctatagctggcagcgtctggtggatccgaaaaccacttcgccgttcgcctggttcgcggcgctggcggggatcgctaacgcgcagaacattattgacggcaaagccgcgccggagaccctgggagtcaccgccgtcgacgcccacaccctgcgggtgcagctggataaaccactgccgtggttcagcaacctgaccgccagctttgccttctatccggtgcaaaaggcgaatgtcgagagcggggcgaactggacgcggcccggcagcctggtgggcaacggcgcctatgttctgaaagaccgtgtggtcaatgagaagctggtggtggtgccgaacacgcactactgggataacgccaaaacggtgatccagcaggtcacctttgtgccgattaaccaggagtccgccgccaccaagcgctatcttgcaggggatatcgatatcaccgagtctttcccgaaaaatatgtaccagaaactgctgaaggatattccggggcaggtgtataccccgccgcagctgggtacctactattacgctttcaatacccaaaaggggccgacggcggatgagcgggtacgcctggcgctgagcatgaccatcgatcgccgggtgatggcggagaaagtactggggaccggggaaaaaccggcctggcgcttcacgccggacgtgacggcgggcttcaccccccagccgtcacagtttgagagcatgagtcaggctgagcttaatgcccaggcgaaagccctgctggctgccgcgggctatggcccgaatcgtccgctgaagctgacgctgctgtataacacctctgagaaccaccagaagattgccatcgcggtggcgtcgatgtggaagaaaaacctcggcgtggaagtgaagctgcagaaccaggagtggaaaacctatatcgacagccgtaacaccggcaatttcgacgtgatccgcgcttcgtgggtgggggactacaacgagccgtccaccttcctgtcgctgctgacctccacccacagcggaaatatttcgcgctttaacgatccggcgtacgacaaaatcctcgcccaggcggcggtagagaattcggccaaagcgcgtaacgacgattacaacgcggcggaaaagatcattatggtcaaagcgccgatcgcgccgatctaccagtacactaacggccgattgattaagccgtggctgaaaggctacccgatcaccaacccggaagatgtggcctacagccgtaccatgtatatcgtgaagcactaa

SEQ ID NO: 211960 - DNA, 708 bp, Klebsiella pneumoniae
atgtctatttcacgtcctcgcccgcagcgcggcgactttccgccgggaacccggcagtatggcagctcggaactgggcgcgccgctgctgtggtttcctgcgccgcaggccgacagccgtagcgggctgattattgccggtacccacggtgatgagaattcgtcgattgtgaccctctcctgcgccctgcgcaccctgaaacccgagctgcgccgccaccacgtggtgctgacggtcaatcctgacggctgtcagctcgggctgcgcgccaatgcccgcggcgttgacctcaaccgtaactttccggcagccaactggaagcaaggggaaacggtttaccgctggaatagcgcggcggcggagcgcgacgtggtgctgttgaccggcgagcagccgggttcggaacgggagaccgaggccctgtgtcagttgatccatcagattcatccggcgtgggtggtctcctttcacgatccgctggcctgcatcgaagatccgggccacagcccgctgggtcgctggctggccgacgccttctccctgccgctggtgggcagcgtgggctacgacacgccgggctcctttggcagctggtgcgccgatatcggactcccctgcatcaccgccgagttcccgccggtctccgccgacgaggcaacggagcgttacctgccggcgatgaccgatctgctgcgctggcaggcttaa

SEQ ID NO: 211961 - DNA, 966 bp, Klebsiella pneumoniae
atgcgtaacgtgcgagtgtatgaggaagcctggccgctccataccccttttgtgatcgcccgcggtagccgcagcgaggcaaaagtggtggtagtggaactggaagaggacggcgtgaaaggggtaggcgaatgcacaccctatccccgctatggcgagagcatcgcctcggtcatggcccaggtgatggcgatcggcgagcaactggaggcggggcttacccgcgaacagctgcagcggctgctgccggcaggcgccgcccgcaatgccattgactgcgcgctatgggatctgcaggcccggcgcgaaggcaaaaccttggcccagctgttgggcgtggcgttgcctgaccgggtgattaccgcccagacggtggtcattggcacgccggatcagatggcggccagcgccgcggcgctgtggcaggcaggggcccagctgttgaaggtgaagctcgacgatcgactgatcagtgagcggctaatcgctatccgccaggcggcgccggaggctacgctgattgttgacgccaatgagtcctggcacagcgaggggctggcggcgcgctgtcagctgctggcggacctcggtgtggcgatgcttgagcagccgctccccgccgacgacgactcggcgctggaaaacttcgttcatccgctgccgatttgcgccgacgagagctgccacacccgggagagcctgccgcggctgcgcgggcgctatgagatgatcaatatcaaactggataaaacgggcggcctgaccgaagcgctggctctggccggggaggcggaacggcaggaatttgaacggatgctgggctgtatgctctgcacctcgcgcgggatcgccgccgcgctccctctggcgccgctggcgcgcttcgctgacctcgacggcccgacatggctggcggtggacgttgagccggcgctgcggttcagcaccggcgtgcttcatctttaa

SEQ ID NO: 211962 - DNA, 507 bp, Klebsiella pneumoniae; identical to SEQ ID NO: 137400

SEQ ID NO: 211963 - DNA, 1053 bp, Klebsiella pneumoniae
ttggcgtcgcgtcgcgcgatcgggcactggctgatattgctgctgctctctgttctcttttcctcgctgctgttacgaatacacctgccggcagcgctgctgctggggccgctgatcgccggtctcattttgagcctgcgcggggtgaagctgagcatccctcgcccctgttatctggtggcgcaggccattgtcggctgcatgatcgcccgggcgattaatccctctgtttttggcgtgctgttcaacaactgggcgctggtgctggcgatcctgttgaccaccctggcgataagcggccttaccggctggctgctggtccgctacagcgcgctgccgggcgccactggcgcctggggaagctctcccggcggcgcgtcggcaatggtggtgatggcccaggagtacggggccgatgtgcggctggtggcgctcatgcagtatctgcgggtgctgtttgtcgtcggcgcggcggcgctggtggtgcgctatgccctgggcaatgaagcacaggaaatgactcaggatattgtctggtttccatcgttgaccctgaatttccctttcacgctgctgctgacggcggtggcctgttggctgggcatgcggctgcgcatcccctccggggccatgctgctgccgatgctgcttggcgccctggcccagggcggcggctggctgatgctggagctgccggagtggctgctggcgatggcctatgcggtgctgggctggacggtggggctccagtttaataaagccatttttctgctggccctcaagacgctgccgcagattatcgcctccatcatcggactgatcctgatgtgcgccctgatggcccttgccctgacccacattctgcagatggactttatgaccgcctatctggccaccagccccggcggcctggacacggtggcgattatcgccgccggcacccgggcggacatgtcgtttattatggcgctacagacgctgcggctgtttaccattttgctgaccggcccggcgatggcgcgggctatctcccgctatgcgccgcggcaataa

SEQ ID NO: 211964 - DNA, 1542 bp, Klebsiella pneumoniae
atgcgtcttgaagtcttttgtgaagaccgtctcggtctgactcgtgaattgctcgatttgctggtgctgcgtggtattgacctgcgcggtatcgatattgaccctattggccgaatttacctcaatttcgccgaactggaattcgccacgttcagcagcctgatggctgagatccgccgtatcgccggcgtgacggacgtgcgcaccgtgccctggatgccgtctgaacgtgaacacctggcgctcagcgcgctgctggtagcgatgccggagccggtgctgtcgctggataccaaaggtcgggtggaactggcgaaccccgccagctgcctgctgtttggccaaagccaggcgaagctgcgtaaccacccggtggcccagctgatcgccgattttaacgttcagcgctggctggagagcagcccgcaggagacgcatgcggagcatgtggtggtgaatgggcagaactacctgctggaagtgactccggtctatctggaaggagagcataacgagcgagtgctgaccggcgccgtggcgatgttgcgctcaaccgtgcgcatgggacgccagctgcagaccatgaccagccaggataccagcgctttcagtcagatcctcgcggtggggccgaaaatgcgccacgtggtggagcaagcgcgcaagctggcgatgctcagcgcgccgctgctgattgtcggcgacaccggcaccggtaaagatctgctggcccatgcctgccatctggccagtccgcgggcgggcaaaccctatctggcgctcaactgtggctccattcccgaggacgcggtcgagagcgagctgtttggcgacgcgctgcagggcaagaagggcttcttcgagcaagccaacggcggctcggtgctgctggatgaaattggcgagatgtcgccgcgcatgcagaccaagctgctgcgctttctcaacgacggcaccttccgccgcgttggcgaggatcatgaagtgcacgtcgatgtgcgggtgatctgcgcgacgcagaaaaacctgatcgagctggtgcagaaagggcttttccgcgaagatctctactatcgcctcaacgtcctgacgctgtatctgccgccgctgcgcgattgcccgcaggacatcatgccgctgacggagctgttcgtggcccgctttgccgacgagcaggggatcccgcggccgaagctctctgccgatctcagtacggtgcttacccgctacagctggcccggcaacgtccgccagctgaagaatgccgtctatcgcgcactgacccagctggaaggatttgagctgcgtccacaggacattctgctgccggaccatgacgtcgcctcgctgccggtgggcgaggaggccatggaagggtcgctggacgacatcacccgccgctttgagcgctcggtgctgacccagctctatcgcagctaccccagcacccgtaagctggcgaagcggctgggggtgtcgcataccgccatcgccaataagctgcgtgaatatggtctgagtcagaaaaagggcgacgaataa

SEQ ID NO: 211965 - DNA, 1314 bp, Klebsiella pneumoniae
atgtcaggactcaaaattgtggtgattggcggtggctccagctacaccccggaactgattgaaggtttgctcaaccgctatcatgaaatgccagtcgcttcgctatggctggtggacattgaagagggcaaagagaaagtcgagattatcgccggactggcgcggcgaatgatcgccaaagccgggctgactattgaagtggtggccacccttgaccgggaaagcgcgctgcgcgatgccgatttcgtctgctcgcagtttcgcgccggctgccttgacgcccggatcagcgatgaacgtatctccctcaagtatggcttgatcggccaggagaccaatggcctcggcggcttcgccaacgcctgtcgcaccattcccatcgccctggagatcgctgccgatatggagcgactgtgtcccgacgcctggctgctgaactttaccaacccgtcggggatggtgaccgaagcgatcctgcgccacagccgcatcaaagccgtcggcctgtgtaacgtgccggtgattatgcaaaaagggataaccactctgctgcaatgcgctgacgaaaaagaggtggtgatgcaggtcgccggcctgaaccactttatcttcgtgcgccagatcctgcacaaaggtaaagaatggctgccggaggtgatagccgagatcaacgccggtcgggatccgctggtgccgcgcaacattccgccgttccgttggccgtcgcatctgctgcagggcttaggcatgatcccctgcgcctatctgcgttattactacatgaaagacgatctgctgcgccaggagctggcggaggcgggcggcgaaggaacccgcggggaagtggttaagcagctggaaaaaatcttgtttgaccagtaccgcgacccgcacctggcagtcaaaccgaaggcgctggaagggcgcggcggccagtactattccgaggcggcctgcgagctgatgaatgccatctacaacgacaagcggattatcatgcacgtcaacacgcgtaataacggcgccatcaatggcctgccggatgactgcgcggtagaggtcagctcgctgattaccgcttctggtccgctacctctcaatgtggcgccgttcccggaagataccctgcgtttgctgcagctgatgaaatcatttgaacggctgactatcgaggccgcgctcaccggcaaccgccataccgcatggcgtgctctgatgctgaatccgctgatcgtcagcggcgagaagctcgaactggcgttggatgaggtgatcgctgagaaccgtcagtggctgcctgctttccacgcctga

SEQ ID NO: 211966 - DNA, 855 bp, Klebsiella pneumoniae
gtgaccgcccgccacctgagctttacccttgccgcgcatgaaatgaaccttacccagggagcggtcagccatcggatccgcaggctggagatgcacatcgggtttcgcctgtttatccgcatgacgcgtaaactggcgctgacagaggaaggtaagcggctgctggcgacgttaagccattcgctgcgggcgattaacgatgaaattgaggatattcgcgatcaggatctgcgcggcacgctgcatattggtattgcgccgacgctggcccatctgtggctaatgccgcgtctgccgcgctttcagacgcaatggccgggactgaatctgcagtttcgcgtgcgcgccggggtgatggattttaacgaggagcgggtggatctggcaatttactacggcgccacgcgctatcccgatctttatcaacagcggctgatggcggaaagtttgctcccggtctgctccccgcgttatcgccagcagtatcgtccgctgagcggcggcgacccggcggcgctcgtctggatccatgcgtgcgaatccaccgacgtacaggatcaatttgcggaatggcgcctgtggtgccagcacagcggacaggcgttaccttttgacggccggtattacgcggtgaataaccactcgctggccatcgagatggcgctcaatggactcggcgtggtgatggggcgtaaaacgctgatccagccgctgctcgacgccggcaggctggtggccttgtctgaaaatgaagcgccctcgccctttggctatgacctgatttgtccgcaggagaaccgttcccgcccgcgctttcgcgccttcagcgagtggctggcggcggaatgcgcctaa

SEQ ID NO: 211967 - DNA, 1062 bp, Klebsiella pneumoniae
atgagcgaaccgttaaaaccgcggattgattttgatgggccgctgcaagcggagataattccgccgctgaaaggcgctcgcgccttcgacaccctggaggcggacaacttcgcgccagcgcggctggtgaccggcgaagaggaagagggggcggcggaagcggtggtggagtcggtcctgcgacccaaacgcagcctgtggcggcggatggtcagcgccggactggcgatcttcggcgtcagcgtcgtggcgcaaggcgtgcagtggacggctaacgcctggcagacccaggactggattgcgctgggcggctgcgtcgccggggcgctgatcgtcggagccggcgtcggttcgctggccaccgagtggcgccgtctgtggcgactgcgccagcgcgcccacgaacgcgatgaagcgcgcgatatgctgcacagtcacgcggtcggtaaagcgaaagcgttttgtgagaagctggcgcagcaggccgggctggatcagtcgcatccggcgctgcagcgctggtatgccgcgatccacgaaacgcaaagcgaccgtgaagtggtgagcctttatgcgcagctggtgcagccggtgctcgatgcccaggcgcggcgggaaatcagccgttcggcggcggagtcgacgctgatgattgccgtcagcccgctggcgctggtggatatggcgtttatcgcctggcggaacctgcggctgatcaaccgaattgccacgttgtacggcattgagctcgggtattacagccgtctgcgactgtttcgcctggtgttgctcaatatcgctttcgctggcgccagcgaactggtgcgcgaggtgggcatggactggatgtcgcaggatctggcggcccggctgtcggcgcgcgccgcgcagggcattggcgccggcctgctgaccgcccgtctcgggatcaaggcgatggagctgtgccgcccgctgccgtggatcgccgatgataaaccgcgactcggcgattttcgtcgcgagctgattgggcagttgaaagagaccctgcagaaaagcaaaacccacccggagaagtaa

SEQ ID NO: 211968 - DNA, 1398 bp, Klebsiella pneumoniae
atgaagcgactgaaaactgaattgaatgcgctggtcaaccgcggggttgaccggcatttacgtctggcggtgaccggcctgagccggagcggtaaaacggcgtttatcaccgcgctggtcaaccagctgttgaatatccacaccggcgcccgcctgccgctgctgagcgccgcacgcgaagagcggctgctcggcgtcaagcgcgtgccgcagcgggactttggcattccccgattcacctacgacgaagggctggcccagctgtacggccagccccccatgtggccaaccccgacgcgcggggtgagcgagatccgtctcgcgctgcgctaccgttcgaatgactccctgctgcgccattttaaagatacctccacgctgtatctggagatcgtcgactatccgggggagtggctgctcgacctgccgatgctggcgcaggattatctgagctggtcacgacagatgaccgggctcctgcagggacagcgtgcggagtggtcggcccgctggcggcagctgtgcgccgggctggatccgctagcccctgccgacgaggctcggctggcggatatcgctgccgcctggacggactatctccacgcctgtaagcgtgaagggctgcactttatccaacccgggcgctttgtcctgcccggagaaatggcgggcgcgccggcgctgcagtttttcccgtggcccgacgtcgacgccgtcggcgaagccaagctggcgcaggccgataaacacagcaacgccggcatgctgcgcgaacgctacaaatactattgcgaaagggtggtgaaggggttctacaaagagcacttcctgcgcttcgaccggcagattgtgctggtggactgtctgcagccgctcaacagcgggccgcaggcgtttaacgatatgcgcctggcgctgacccagctgatgcaaagtttccattacgggcagcgcaccttgttccgccggttgttttcgccggttatcgacaagctgctgtttgccgctaccaaagccgatcacgtcacgatcgatcagcacagcaatatggtgtcgctcctgcagcaactgattcaggacgcgtggcagaacgccgcctttgaagggatcagtatggattgcctggggctggcgtccattcaggcgacccagagcgggctgattgaggtgaatggcgagaaaattcccgccctgcgcggcaatcgcctgagcgacggccagccgttgaccatctatcccggtgaggtgccggcgcgcctgccgggccaggccttctggcagcagcagggatttcagtttgaaaactttcgtccgcaggtcatggatgtcgatcggcctttgccgcacattcgtctcgacgcggcgctggaatttttgattggagataaactgcgatga

SEQ ID NO: 211969 - DNA, 219 bp, Klebsiella pneumoniae; identical to SEQ ID NO: 137407

SEQ ID NO: 211970 - DNA, 360 bp, Klebsiella pneumoniae
atggccggactggatctgaataaaaaactgtggcgtatcccgcagcgcgggatggtgaagggcgtctgcgcgggtattgctcagcatcttgatgtcccggtgaagctggtgcgcctgattaccgtgctggcgatgattttcggcctctttttctttgtcctggtggcctacatcattttgacttttgctctggatccgataccggacagcgagctttacggtcataaagcgccgagcaatggcgatctgctggccgccgtggatgccgaactggcctccggtgaacagcgtctgcgtgaaatggagcggtatgtgacctccgacacctttacgctgcgcagccgctttcgccagctgtaa

SEQ ID NO: 211971 - DNA, 225 bp, Klebsiella pneumoniae
atgagcatgctttttctcgccattccgctgacgctgtttgtgctgtttgttctgccggtctggctgtggctgcactacaacaatcgcggcgccaacggcagtctgacgcaaaatgagcagcaacggctgctgcagttgaccgatgacgcgaagcggatgcgcgaacgcattcaggcgctggaagcgatcctggatgccgaacatccgaactggagggacaaataa

SEQ ID NO: 211972 - DNA, 669 bp, Klebsiella pneumoniae
atgggtattttttctcgttttgccgacatcgtgaacgccaacatcaactccctgctggagaaagcggaggacccgcaaaagctggtgcgtctgatgatccaggagatggaagacacgctggttgaggtgcgttcgacatcggcccgcgcgctggcggaaaagaaacagctgtcccgtcgtattgagcaggcggtcgcccagcaggcggaatggcaggaaaaagccgagctggccctgcgcaaagagaaagaagatctggcccgggcggcgctgatcgaaaaacaaaagctgaccgaccttatcgctcagctggatcatgaagtgcagctggtggatgaaaccctggcgcggatgaaaaaagagattggcgagctggagaacaaactcagcgaaacccgcgcccgtcagcaggcgctggcgctgcgccatcaggcggcgagttcgtcccgcgatgtgcgtcgccagctggacagcggtaaactggatgaggcgatggcgcgctttgaatcctttgagcgtcgcatcgatcagatggaagcggaagcggagagccaccgctttggcaagcagcagacgctggatcagcagtttgccgaactgaaagcggacgatgaaatcagcgagcagctggcggcgttgaaagccaaaatgaatcagtccaaccagtaa

SEQ ID NO: 211973 - DNA, 990 bp, Klebsiella pneumoniae
atggcgaaattcatcatggcgcagtacaaggataatctgctgggcgaggccaacagctttctcgaggtgctggaacaggtttcccggctggccccgctggataaaccggtgctggtcatcggcgagcgcggcaccgggaaagagcttatcgctaaccgtctccactacctctccagccgctggcaggggccgtttatctcgttgaactgcgcggcgctgaacgataatctgctcgactcggagctgttcggccacgaagccggggctttcaccggggccagcaagcgccatcccgggcgcttcgagcgcgccgacggcgggacgctgtttctcgatgagctggcgacagccccaatgctggtgcaggagaagctgttaagagtgattgaatatggcgagctggagcgcgtgggcggcagccagccgctgcaggttaacgtccggctggtgtgcgccaccaacgctgacctgccgcagatggtcgaggaaggtcattttcgcgccgacctgctcgaccgcctggccttcgacgtggtacagctccccccgctgcgcgaccggcagagcgacatcatgttgctcgccaaccagtttgccatccagatgtgccgcgaactcggtctgccgctgtttcccggctttagcgaacgagcgaccgcgacgctgctcggctaccgctggccggggaatattcgcgaactgaagaacgtggttgagcgctcggtgtatcgccacggcgacagcgaacatgagctggacgcgattattattaatccttttcgtcagtcccccggctctccgccggaagccgcgcccggcgatgagctgcccgcgctaccgctggatctgcgcgatttccagctccagcaggaaaaacgcctgctgcagcggagtctggagcaggcgaagtatcatcagaagcaggcggcggagctgctgggattaacctatcaccagctccgcgcgctgctgaaaaagcatcagctgtga

SEQ ID NO: 211974 - DNA, 1392 bp, Klebsiella pneumoniae
atgagcactgtcacaataagcgacaccccgtttgtcggcaacgatcgcctgctggtggggattgtgttaagcgttttaaccttctggctgttcgcccagtcggtgattaacgtggtgccggcgatgataagcagtcttgatatctctcttgagaccttaaccctggccgtcagtctcagcgcgctgttcagcggctgcttcgtggtcgccagcggcggtctggcggacaagtttggccggatgcggatgaccaccattgggctggggctgagtatcgtcggcagcgccatgctggtggtcgctcagggaccggggctgttcctcgccggccgggtgctgcaggggctgtcagcggcctgcattatgccggcgacgctggcgctgattaagacctggtatgaggggcgtgcgcggcagcgggcggtcagcttctgggtcatcggctcgtggggcggcagcggtctctgttccttcgttggcggggctatcgccaccggactgggctggcgctggatcttcgtcttctcgatcgccgttgccctgctggcgctgtttttgctgcgcggcacgccggagagccgcagcgccagcgccagccagcataagctggacgtcggcggtctgctgagcctgattgttgcgctggtgctggtgaatctgtttatcagcaagggccacggctggggctggagcagcccgctgtcgttgaccatgctggccggggcgctggcggcggggacgatatttatccgcaacggcatgcgcaaaggcgaggcggcgttgattgattttgcgctgttccgcaatcgggcctacggtgcggcagtgctgtcgaactttctgctcaatggggcgattggcaccatgatgatcgccagcatctggctgcagcaagggcaccacctgacgccgctggagagcgggatgatgaccctcggctatctggtgaccgtcctggcgatgatccgggtcggcgagaagctgctgcagcgctatggcgcccggctgccgatgatggccggtccggtgttgaccgctatcgccatcgcgctgatatcctgcacctttctcgaaaaggcgctgtatatcggggtggtgttcgccagcaacgtgctgtttggcctcggactgggctgctacgccacgccatcgacggataccgcggtggccaatgccccggagaacaaaatcggcgtcgcctcggggatctataagatgggcagctcgctgggcggggcgatgggtatcgccgtgacagcgtcacttttcgcgctgtttttaccgctgggcatggcccatgccgcccagtatgccctgtggtttaacgccgtcttatgtctgggggcgatggcggtgagcgcgctgctgctgccgcgcgcctctcacagctga

SEQ ID NO: 211975 - DNA, 1170 bp, Klebsiella pneumoniae
atgacacatccgttgctagaagcattgcaggttaacgaggcgcaatttatcgctctgcgtcgtcggttccaccagcagccggagatcggctttgaagagcaccagaccagcagcgaggtcgcccgactgcttggcgagtggggatacgaggttcaccgcggcctggcgggcaccggagtggtgggcacgctgcgcgtcggcgaggggaaaaaacgccttggcctgcgggcggatatggatgccctgccgatgcaggagcggagcggtaagccgtgggcaagccaggttgaagggcgctttcacggctgcggccatgacgggcacaccaccacgctgctctacgcagctgaatatctggcgcgcacccggcagtttaccggcacgctgcagctgattttccagcccgcggaagagttgctgtacggcgggcgggtaatggtcgaggacggtctgtttgaccagttcccctgcgacgccatcttcggcctgcacaatatgccgggtcagccgttgggcaagatcggcctgcgcgacggggcgatgatggcctcctccgatacgctgcatattgaagtgaagggcgttggcggccacggcgcggtgccggagcatacggtggatgccacgctggtggcctgccatattaccctcgcgctacagtccattgtctcgcgcaatatcaccccgtttgaaccggcggtggtgaccgtcggcagcatccaggccggtcatgcgcccaatatcattaacgatcacgtgctgatgaagctcacggtgcgcaccctcaatgagcaggtgcgcgagaccgtgctgcagcggatccatgatatcgccgtggcccaggcggagagcttcaatgccaccgccacgctgacccacgtcaacggcagcccggtgttgcgtaacgatccggcgacgaacgccatggtgcgggaggtggcgacagcgctgtttggcgcagagcaggtgggcgaggtgaagccgtttatgggcagtgaagattttgccttcatgctggagcagcacccgcatggcagctatttcaccatcggcgctggcgatgagccggatcgctgcatggtgcataacccggggtatgacttcaacgacgcgctgttgctgaccggcgcggcgctgtggtgcggcctgacggaacgctatctgcgctaa

SEQ ID NO: 211976 - DNA, 2310 bp, Klebsiella pneumoniae
gtggagcagcatgcaggcgactttagcgtcaccgtacgcgatgtgcgtcagctgacccagccggaaagcgatctgctgacgctgctgtgggtgctggagggaagcgtaaatctggcggtggcggaaggtgcgtcgcaaccgctcgtcgccgacgggctggcgatcgttaaccgcaaccgtcgctggagcctgcgcagcgccggggccaacgccgtgatgatcctcaccctctccgccagctggctggcccgcctcgataatgccttttttgccgtcgattaccagataacgccgcgcacccgggatgccgatgacggcctgcgtcgcctgatgcgccagctgctggtgagcggcctggtcaatcatcctggccattaccgactggaggccaaccgctggctgagtgagatagcgctgctgctggccacgcgctttagccagcccatcgcctccacgccccggcgcgataccgaaaaatggagccggagaatagccagcgtggtagcgcggatcgacgctaactatcagcgtcgcctctcgttgcaggaggtggcggccgcggaatttgtctccgaggcctggctgtcacgcttatttcgcaaagaggtcggggtaagttttgtccagtacctcaccgcgctgcgcctgcgccacgccgccgaccagctattaaccacccgcaaaaccgtccagcaaatcgcccgcgaacagggattcgccagtacgcgaatgatgagcgatttgtttaagcgccagcacggcgtgacgccgcgccagtatcgtgaacagcatcctctggagcttgcccgaccgcgcccgccgcaggccgatcgctggcagccggtggcggccgaccggctgtatgcgcgactcaatgagccggaaccacgcgaccgggaaagtccccccctgccgatcaacccaccgcagacccgggagatcaatctgcgcgatcgtccagcgcgccccgcagcgctgcgccatacccggatggtggtgaccgtgcgcgaactggacgatctgctgcgcgaagatgtgcgccgggaactcgaacagctgcaccacgccctaccggtgtatgccatcgatatcaacgatccctttctcagcagtcggctgttcggcaccggctgggacgatccgcagatggccggctacgcctgctggtacaacctgcagcagatttttagctggctggcggcgatgggctggcaggtgatcctgcacaccggcgtcaccacccgcagcgacctgctgcagcgcttcctgcagctcgccgccaaccattttccgccagccacgctcaatagctggcgctttgtctggcactggtcgccgcaggccagcgaagctgcgcgccaggccgcctggcggcagcagcgcggggtccttcatcgcctgctgccgcagccgcagctggggatctggcaccgctttgctcccagcgatcccgggaacgatccgctgttccactcgccgctgctggcagaggcggattttctcgcctgccaggcagatgccaacgaacagctggatctggcccaggcagacagcagccgcctggcctccagcgaacattatccgctgcacaagctgcggcagatccacagcgccctgcgccagcgtcagctcaacctgccgctgtggctgctctcctggaatacgctgaccggcgatacgcgggataccaacggccgcttttttcgcggcgcgctgctgatggataatctgctgggggtggcggaccaggtctggctggcgggcttctggttaaattcaggcctccagggcgaagctcgcgccaacggcaagctcgatacctccagcctggcgctgcactatctgcacggcctgccgcgcccggtttactgggtactctggctctggcggcggctgcgcggcgagatcctggttcacgataaaaacctgctgctgctccaccaccagggtcactaccagctgctgctgcgcaatacggtggtctacaatccctggctctccagcgaagcggcctttatccagcgcttcagccagccctacagcgtgcggctgcagggcctggatggcagctggcgcatcaaacagcacctgttcgatcagcaccacggcgcgttgttcccgctggtggacgcctttcgcagccgcagcggccctgacgccgaggattatcagtggctgatgcatcaggcccgtccggcgctcagcgtggatgaagccaggctcaatggctattggctgcggatcgactcgctgcagagcaacgcgctggcgctgtacgagtttacccctcagtcgcccacagccccctga

SEQ ID NO: 211977 - DNA, 831 bp, Klebsiella pneumoniae
atgaacacttctgacaaccatgctttaggcgattttctccgcgcccgccgccagcgtctcgatccggcaacgtttggcttcccggcgggacgccggcgcaccccggggctgcgccgcgaagaggtcgcgcagctcgccagcatcagcccgacctggtatacctggcttgaacaggggcgcggcggggcgccttcccgcgaggtgctggagcggatcgcccgcggtctgcggctgaccaccccggagcgcgaacatctgtttattctcgcctttggccatccgccgcagacgcgtctgacggtgacggatgatatgacgccgcggctgcagcgggtgcttgacgctttcaccattccggcgattatccgcaccgccagctgggacgtcatcgcctggaatgcgccggcggccagggtgctgaccgactacagccaactgccgctggcggagcgcaacgtgctgcgccgcctgtttacccggccggaggcccgctgcactctggaggactggcagagggtggggcagcttatcgtcaacgccttccgcgccgacgtcacgcggatgggcgccacgaaagaaactgaccagttgatcgcggagctcagccagcagagcgtcgagttcgcccgtttttggcaaagccatgacgtcgccggtcatggagaaggctataagcgcattaaccacccgcagatgggtcagctcgacctggaatttacctcctttgccgtggagggccgtcccgatctttccctgctggtctttaatccggcaacgacggaaagccagcggaaaattcacggtttacttcagggggctgtgggcgactga

SEQ ID NO: 211978 - DNA, 906 bp, Klebsiella pneumoniae
atgcgtatatttcttaccggcgcgagcggatttatcggctcacgtattcttccggcgctgcaggcgtcgggccataaggttatcggcctcgcgcgcagcgaaagcaccgcacaggccctgaaggcggccggcgccgaggtgcatcgcggcacgctggatgccccggagtcgctgctggctggcgtcgggaacgccgacgcggtgatccataccgccttcgaccacgacttcagccgctttgccgctaactgcgagaaagaccgccaggcgatcctggccctgggccaggcgctgcgaggcagcacgcggccgctggtgatcacctccggcacgctgatgggcgacgacgggagcggcgccccggcccgggagtcgttcttcaactcagcgcaccccagcccgcgcaccgcctcagagctcgccggccagcagttgctggaggcgggagtggatgtcaaggtggtccgcttaccgcaggtgcatgacaccgtgcgtcagggactgctgacctgctacatcgaacgcgcggtcgccaacggggcggtagccctgcgcggcgagggaagcaaccgctggtcagccgcccatgtcgatgacgtcgcacgtctgtatgtcagcgcgctgcttcagggcgcggccggcgagcgctatcatgcggtggccgaagaggggatcgcattacgcgatattgccgcggtaattgcccacggattaaacctgccgctgacccacctggatgagtcgcaggtcgacgcctggttcggctggtttgcgccgtttaccgcccttgacctgcgcgccagctcggcatggacccgcgagcgcttgcagtggcagccggttggccccgggctgctggaggacctgcagaatatggactatcataaagtgacactgtcacaataa

SEQ ID NO: 211979 - DNA, 1644 bp, Klebsiella pneumoniae
atgcgcctgaaattgtcatctctcctggcagccgtttccctgctgtgtgggccagcttttgccgcccctgcgctccccgaccgcgccgatatccgcgatagcggtttcgtctattgcgtcagcggccaggttaatacctttaatccgcagaaagtcagcagcggcctgattgtcgatacgctggccgctcagatctacgatcgtctgcttgacgtcgatccctatacctaccggctggtccccgagctggcggagagctgggaagttctcgataacggcgccacctaccgctttcacctgcgccgccacgtcccgtttcaacgcacggcgtggtttaccccgacgcgggactttaatgccgatgacgtcatttttacctttggccgtatttttaaccgcgaccatccgtggcacaacgtcaacggcagcagcttcccctacttcgacagtctgcagtttgctgacagcgtggagagcgtccgcaagctggataatcagaccgtggagtttcgcctcaagcggccggacgcctcgttcctctggcatctggccacccactatgcgtcaattacctctgccgaatatgccgcccgcttaacgcaggacgaccgccaggagcaactggatcgccagccggttggcaccggcccgttccagctatccgattaccgctccggacaatatgttcgcctgcagcgccaccccggctactggcgcggcaaaccgttgatgccccaggtggtggtcgaccttggctccggcggcaccggccgcctgtcgaaactgctaaccggagaatgcgacgtgctggcctggccggccgccagccagttgacgatcctgcgtgacgacccgcgcctgcgcctgacgctgcgcccgggaatgaacatcgcctggctggccttcaacaccgccaagccgccgctggataaccctgaggtgcgccatgcgctggcgctggcgattaacaaccagcgcctgatgcagtccatctactatggcaccgcggagacggcggcgtccatgctgccgcgggcctcgtgggcctacgataatgacgctaaaattaccgaatataatccgcaggaggcccgcgcccgcctgaaagccctggggctggaaaacctgaccctcaagctgtgggtgcccaccagctcgcaggcgtggaatcccagcccgctgaaaacggcggagcttatccaggcggatatggcgcagattggcgttaaggtgattattgtgccggtagagggacgtttccaggaggcgcgcctgatggacatgagccacgacctgacgctctccggctgggcgacggacagtaacgatccggacagtttcttccgaccgctgctaagctgcgcggccatcgcctcgcaaaccaactttgcccactggtgtaaccgggagtttgacgacgtgctgcaaaaagcgctgctctcgcagcagctctcctcgcggatggacgcttacaaagaggcgcagcgcatcctcgcccgcgaactgccggtcctgccgctggcctcgtcgctgcggctgcaggcctaccgctatgatatgaaaggcctggtgctcagccctttcggtaacgcttcgtttgctggcgtatcgcgggaaaataccgaagaggtgaagaagccatga

SEQ ID NO: 211980 - DNA, 966 bp, Klebsiella pneumoniae
atgattatttttaccctgcgccgtctgctgctgctgctgatcaccctcttttttctgacctttgtcggtttcagcctgagctatttcacccctcatgccccactgcagggcgcttccctgtggaatgcgtggctgttctggtttgaaggggtgctgcactgggatttcggcgtctccagcattaacggccagctgatttctgagcagttgcgcgaggtgttcccagcgaccatggagctgtgcatcctcgccttcggctttgccctgctgataggcattccggtggggatgatcgccggcgtaatgcgcaataaatggcccgataccctgatcagcgccgttgcgctggtcggtttctcgatcccggtcttctggctggcgctgctcctgaccctcttcttttccctgaccctcggctggcttccggtctctggtcgcttcgatctgctgtatgaggtgaaaaacgtcaccggtttcgcgctgatcgacgcctggctttcggactcgccgtggcgccatgagatgatcgtcagcgccgcccggcatatggtgctgccggtattgaccctggcggtcgcccccaccactgaagtgatccgcctgatgcgcattagcaccagcgaggtgtatgacactaactatgtaaaagcggccgccacccgcggcgtgtcgcgacgcaaaattctactgcgccatgtcctgcacaacgccctgccgccggtgatcccgcgtctcggcctgcagttttccaccatgctcaccctggcgatgatcactgagatggtgttcagctggcctggactaggccgctggctgatcaacgctattcgccagcaggactacgcggcgatctccgccggagtgatggtgattggcgcgctggtgattattgtcaacgtaatttccgatattctcggtgccatggctaacccactgaaacataaggaatggtatgccctacgatag

SEQ ID NO: 211981 - DNA, 891 bp, Klebsiella pneumoniae
atgccctacgatagcgtttatctggaaaagcgtccgcccggcgcgctgcgcaccgtatggcgtaagttctatggcgacaccacggcgatgatcggtctgtacggctgcgcgggcctgctgctgctctgcgtcttcggcggctggttcgccccctacggcatcgaccagcagttcctcggctaccagctgttgccgccgtcgtggtcgcgctatggcgaagtctccttctttctgggaaccgatgacctcggccgcgatgtgctgagccgactgctgagcggcgcggcgcccaccgtcggcggcgcttttgtcgtcaccctcggcgccacgctgtttggtctggtgctgggcgtgattgccggatcgacccacggcctgcgctcggcggtgatgaaccatatcctcgacaccctgctctccatcccctcgctgctgctggcgattatcgtcgtcgcctttgccgggccgcatctgagccatgcgatgttcgccgtctggctggcgctgctgccgcgcatggtgcgctccgtctacagcatggtccacgatgagctggagaaagagtacatcatcgccgcccgcctcgatggcgcctcgacgctgaatattctgctgttcgccatcctgcccaatatcgcctccggcctggtgaccgagatcactcgcgccctgtcgatggccattctggatattgccgcgctgggctttcttgatctcggcgcccagctgccttcgccggaatggggagccatgctgggcgatgcgctggagcttatctatgtggcgccgtggaccgtgatgctccccggggcggcgattatgctcagcgtactgctggtcaacctgctgggcgacggtattcgccgggcgatcattgccggggtagaataa

SEQ ID NO: 211982 - DNA, 993 bp, Klebsiella pneumoniae
atgccgttactcgatattcgtcacttaaccattgaatttaaaaccagcgaaggctgggtaaaagccgtcgatcgcgtcagcctgacgctgaccgaaggcgaaatccgcggcctggtgggggaatccggctccgggaaaagccttattgccaaagctatctgcggcgtgaccaaagacaactggcgggtcacggccgaccgcatgcgcttcgatgacatcgacctgctgcgactgtcgaaccgcgagcgccggaagctgatcggccataacgtgtcgatgatttttcaggagccccagtcgtgcctcgatccctctgagcgcatcggccagcagctgattcagagtatccccggctggacctacaagggccgctggtggcaacggctgggctggcgcaagcgccgggccatcgagctgttgcaccgcgtcggcattaaagatcacaaagatgccatgcgcagcttcccctatcagctgaccgagggcgagtgccagaaggtgatgatcgccatcgccctggccaaccagccgcgtctgctgattgccgacgagccgaccaacgccatggagccgaccacccaggcgcagattattcgcctgctgacgcggctcaaccagaacaacaacaccaccatcttgctgatcagccatgacctgcaaatgctcagcaaatgggcggataaaatcaacgtcatgtactgcgggcagacggtggagagtgggcccagcgaagagctgatcaccctcccacatcacccctacacccaggcgttaatccgcgcgatcccggatttcggtagcgccatgccgcataaaagtcgcctcaacaccctgcctggagcgatcccgctgctggagcagttgcctatcggctgtcggctggggccgcgctgcccgtacgcccagcgcgagtgtatcgaaacgccgcgtcttaccggggcgcgcaaccatctgtacgcctgtcatttcccgttgaacatggagaaagagtga

SEQ ID NO: 211983 - DNA, 810 bp, Klebsiella pneumoniae
atggtcgaaacattgctggaagttcgccaactcagtaagacctttcgctaccgcaccggctggtttcaccgtcagacggttgaggcggttaagccactgagttttaccctgcgcgaacggcagacgctggcgattatcggcgagaacggctccgggaaatcgaccctcgcgaagatgctggcgggcatggtggaacccaccagcggcgaactgctgattgacgatcatccgctgacttttggggattactcctaccgcagccagaagattcgcatgatctttcaggatccgtcgacctcgctaaacccgcgccagcgcatctcgcagatcctcgattttccgctgcgactgaataccgatctcgacgccgaggcgcggcagaagcagataatcgacaccctgcgcatggtcggtctgctgccggaccacgtcagctactacccccatatgctggcgcccggtcagaagcagcgtctcggcctcgccagggcgctgatcctgcgcccgaaggttatcgtctgcgatgaggcgctggcctcgctggatatgtcgatgcgctcccagcttatcaacctgatgctggagctgcaggagaaacagggcatctcttatatctatgtcactcagcacctgggaatgatgaaacacatcagcgatcaggtgctggtgatgcataacggcgaagtggtcgagcgcggcagcactgccgatgtgctggcctcgccgctgcacgacctgacccggcgcctgatcgccggccacttcggtgaagccctcaccgccgacgcctggcgcaaagacgggaaatag

SEQ ID NO: 211984 - DNA, 1431 bp, Klebsiella pneumoniae
atgtcttcgttttcgtctacagacgggcagtcaaagagcaattatgctggaatgagtgaaaggcggtcgattgattacatcccggaaagcgaacggcatggacacccttttagccagttcaccctttggtttggcggcaatctgcaaattacggcgattgtcactggcgctttagccgttgtgctgggcggcgatgtagtgtggtctctggtcgggcttctggtcggtcagatgctgggggcggcggtgatgtctctgcatgcgctgcagggaccgcgactgggacttccgcaaatgatccttagccgcgcccagtttggggtttttggcgcggtggtgccgctggtgctggtttgcgtcatgtatatcggtttttctgccagcggcaccgtattggccgggcaggcaatggccaaactactgaatatcagccacgtagccgggatgctgatattcagtgcgattattatcgttatcgccgtcctcggttataaggtgatccacaagctgggcaaactggcgagtatcgtcggaattctcgccttcgtttatatgttcatcacgctgctactttcggccgatctcagtgcgctcgcgcacaataaccatttttcgctgccgacgtttttattagccgtatcgctctcctcatcgtggcagatcgctttttgcccctatgtatccgactattcgcgctacctgccacgcgatgtttccgccacgaaaacgtggtgctcagtgtttttcggcaccgtattgggcacccaaacgtcgatgacgctcggggttctgacagcggccattgccggcagcgcgttccctggtcacgaggtgagctatctggtgggattaggtaagagtcaggcgatggccatggttatctatttcgccatctgttttggtaaaattaccttcactaccctcaatgcgtacggcagctttatgtcgctgaccaccattgtttccgccttccgccggcaaaccgtgctgtcgcaaaagtgtcgcattgcattcgtggtgctgatggtgacggcttcctgcattatcgcgttgcttagcgaacccgctttcttaaagcatttcacgcattttcttctgtttctgctggcgttcttcgtgccgtggagcgccatctgtctgacggattattatcttatctcgaagggcgccatcgatattccggcgctaagcgacccgcagcaacgctacgggttctggaacctgtacgcgatcaccctgtatatcgtcggtgtgcttatccagttgccgttcattgagaacccgttgttccatggttcgctcacgtggatcttcgccggtaacgatgtctcatggataataggctggtttggcaccggggttctttactacgcgctgcgccgctttgaccgccggtcgctgccggcgcagagtcttttcccttccacctga

SEQ ID NO: 211985 - DNA, 543 bp, Klebsiella pneumoniae
atgatggtcccttttcaactttcgacgctccccgtcacgccgtggaaaaacggcggcggagagacgcgcgaaatcatctgcgtacccgctccagatgccccttttctctggcgagcgagtattgccaccctgcaggcggatggccctttctccccctttcctggcgtcgaccgggtcattactctgctggcggggcagccgctacggctgtgtggcgagaatatcgaccaaccgctggcgctctggcagccgtgggctttccccggcgaatgggcgctgtccagcgtcgggatcgttgcgccagggctggacttcaatatcatgactcagcgcgggcgcgcgtcggcgacagttcaggtcgttagcgacctgcaatgccctgccagcgagggggtcgcttatgttctacaaggcgagtgggatctggccgggcggcgctgcgcggccggcagcggcctctgctggcgcggtggatccccgcggaatctgcgtcccgtgggcagcaatggacgcctgctgctggcggagatcgcgctcaaataa

SEQ ID NO: 211986 - DNA, 789 bp, Klebsiella pneumoniae; identical to SEQ ID NO: 139601

SEQ ID NO: 211987 - DNA, 1158 bp, Klebsiella pneumoniae
atggagccacgccgcgtgaatggcaaaaatcactggtatcacgaaacccagtcaacaatctgcccggtggatgtcctgccgctcgtccctgaagccgcccatgttgaagaccgctttttgctggacctgacgctgccggccgcctggctacgtgcccacgctgactggctacaccccgcacgccagctggccgaactgctgtttcccgaccaggtggcggtgagtcgcctgcagacctttaccgcttacgatcgactcagcaccgcgctcaccgtcgcccaggtctacggcgtccagcggctgtgtaaccactacgccgcccgccttgctcccctgccaggccccgattcctcgcgcgagagcaaccgtcgtctggcgcaaatcacgcaatatgctcgtcagcttgccggttcgccctcggttattaacgctctctcccgtagccagctggacgaagtgggcttaaccagtcgggacattattctgttcaaccagattatcggattcgtcggcttccaggcgcgggcgattgccgtcctgcaggcggcccagggctttccggtgcgctggatccccggtatgccccagcaagaggaggcacccgcggaactgttcgccccgccgccgggagcatggcaggcagacattgcggatcccgacctgcagtatgccgatgatgagcgtcagcggcgcatcgccggctggcagtcgctgcccggtctgggcgagctggcgccgctgctggcctgcgacccacagttattcgcgcctctggagaccttgatccgccagctcagcacggatgatacctttggcccgcaggtcgccttactcacggcgcgcaccaatggcagccccacctgttttgacgcctggctcccccactggcagggtgaagaggagttcgccagccatctgcgggagggcgaccaggccctccatcactggctccagcagcatcctcaggcccggtctctcgtgaccgcggtgcagctgttaacccgctcgcctgaccggtttagcgccgcccagttaacgcccctcgcggaatatcgactctctgagcaacaagcaatcgatctgttgatctggagcgggctgtgcggatggatgaatcgtctgaaaatcgccctcggcaatgtgcgtcagcagacgtaa

SEQ ID NO: 211988 - DNA, 1935 bp, Klebsiella pneumoniae
atgtttcaggataacccgctgctagcgcagcttaaacagcaactgcattcccagacgccgcgcgcggaaggggtcgttaagggcacggaaaagggctttggcttcctcgaagtggacgctcagaagagctacttcattccgccgccgcagatgaaaaaagtgatgcatggcgaccgtatcgtcgcggtgatccattctgaaaaagaacgcgaaagcgccgagccggaatcgctggttgagcccttcctgactcgttttgtcggtaaagtccagaagaaagacgatcgcctcgctatcgttcctgaccatccgctgctgaaagacgccattccctgccgcgccgcccgcggcgttgagcacgattttaaacagggtgactgggccgtcgccgagatgcgccgtcatccattaaaaggcgaccgcggattttacgcggagttgacccagttcatcacttttagcgacgaccacttcgtcccatggtgggtaaccctggcgcgccataatcttgagaaagaggcaccggacggcgtcgccaccgagatgctcgacgaggggctgacgcgccgcgacctaaccgccctcgacttcgtcaccattgacagcgccagcaccgaagatatggacgatgcgttgtatgccgaatccactgctgatggcaaactgctgctgacggtcgccattgccgacccgaccgcctggattgccgaaggcagcaagctggataacgccgcaaaagtgcgcgcctttaccaactatctgccaggcttcaacattccaatgctgccgcgcgagctgtcggacgacctctgctccctgcgcgctaacgaagtgcgcccggtgctggcctgccggatgaccctggcggccgatggcaccatcgaagacaatatcgagttctttgccgccaccatcgaatcgaaagccaagctggcctatgacgacgtctctgactggctggaaggccgcggcagctggcagccggacagcgaggcgatcgcgcagcaaattacgctgctgaaggacgtgtgccagcgtcgtagcgaatggcgtcagacccatgcgctggtgttcaaagaccgtccggactaccgttttgttctcggcgaaaaaggcgaagtgctggatatcgtcgcggaaccgcgtcgcattgccaaccgcattgtcgaagagtcgatgatcgccgccaacatctgtgccgcccgcgttctgcgcgacaagctcggcttcggcgtttataacgttcataccggtttcgacccggcgaataccgagcagttggccgccctgctgaaaacccatgatgtgcacgtcgacccgacggaagtgctcaccctggaagggttctgcaagctgcgccgggaactggacgctcagccgaccggtttcctcgacagccgcattcgccgcttccagtcgtttgcggaaatcagcaccgagccgggcccgcactttggtcttgggcttgaagcctatgccacctggacctcgccgatccgtaagtatggcgacatgatcaaccaccgtctgctgaaagccatcattaaaggcgagaccattgcgcgtccccaggatgaagccaccgtgcagatggcggagcgccgtcgtctcaaccggatggccgagcgcgacgtcgccgactggctgtacgcccgtttcctcaacgataaagccgggaccgatacccgcttcgcggcggagatcatcgacgtcagccgcggcgggatgcgcgtgcgtctggtggacaatggcgcggtcgcctttattccggccccgttcctccacgccgtgcgcgacgaactggtgtgcagtcaggagaacggtaccgtgcagatcaaaggtgaagtagtctataaagtgactgacgttatcgatgtcactatcgctgaagttcgcatggaaacccgcagcattattgcgcgtccggcggtctga

SEQ ID NO: 211989 - DNA, 180 bp, Klebsiella pneumoniae; identical to SEQ ID NO: 138130

SEQ ID NO: 211990 - DNA, 750 bp, Klebsiella pneumoniae; identical to SEQ ID NO: 138131

SEQ ID NO: 211991 - DNA, 222 bp, Klebsiella pneumoniae; identical to SEQ ID NO: 138132

SEQ ID NO: 211992 - DNA, 327 bp, Klebsiella pneumoniae
atgagcgattccaacagccgtctggtctactccaccgaaaccgggcgtatcgacgaggcgaaaccggcgccggtgcgcccgaaaggcgacggcattgtgcggattcagcgccagaccagcggccgcaagggcaaaggcgtctgtctgattagcgggattgatgccgacgatgctgcgctaaccgctctggcggcagagttgaaaaagaagtgcggctgcggcggcgcggtgaaagatggcgtgatcgagatccagggcgataagcgggatctactcaagtcgctgcttgaggcgaaagggatgaaggtcaagttagccggtggctga

SEQ ID NO: 211993 - DNA, 738 bp, Klebsiella pneumoniae
atgacgtctacagctatcccatcttcccgcgctgtcacatcctctcccgttgtggttgcgctcgactatgataatcgcgataaagcgctggcatttgtcgaccgcatcgacccgcgcgactgccgcctgaaggtgggcaaagagatgttcaccctgctgggcccgcagtttgtccgcgatctgcatcagcgtgggtttgaggtgttcctggaccttaagtttcacgatattcccaacaccaccgcccgcgcggtggccgcagcggctgagctgggcgtatggatggtgaatgtccatgcttccggcggcgcgcgaatgatgaccgccgcgcgcgaagcgctgctgccgtttggcaaagatgcgccgctgctgatcgctgtcacggtgctcaccagcatggagtccagcgatctacaggatctgggcattaccttatctccggctgactacgcggcgaagctggcggcgctgacccaacgctgcggccttgatggggtggtgtgttcagcccaggaggctgtgcgctttaagcatgagctggggcaggcgtttaagctggtgaccccggggattcgtccgcagggcagcgacgctggcgatcagcggcgaattatgactcctgagcaggctcaggaagctggggtagactatatggtgattggtcgcccggttactcagtcggcggatccagccgcgacgctgcgggcgatcaacgattctctgcgcaagggggcataa

SEQ ID NO: 211994 - DNA, 1170 bp, Klebsiella pneumoniae
atgctggagttgttgtttctgcttttacccgttgccgccgcttacggctggtacatggggcgcagaagtgcacaacagtccaaacaggacgatgcgagccgcctgtcgcgagattacgtggcgggggttaacttcctgctcagcaaccagcaggataaagccgtcgacctgttccttgatatgctgaaagaggataccggtaccgttgaggcgcacctgacgctcggtaatttgttccgttcgcgcggcgaagtcgaccgcgcgatccgaattcaccagagcctgatggaaagcgcgtcgttaacctacgatcagcgcctgttagcggtgcagcagctgggacgggattatatggccgccggactgtatgaccgcgcggaagacatgttcaaacagctggtggatgagaccgatttccgcctcggcgcgctgcagcaactgctgcagatttaccaggcgaccagcgactggcagtcggctattgaagtggctgaacggctggtgaagctagggaaagagaaacatcgtggcgaaatcgccaacttctggtgcgaactggccctgcagcagatggcagccaacgatctggataaagcgatggcgttgttgagaaaaggcgccgccgcggaccgcaccagcgcccgggtatcgatcatgatgggccgggtgtggatggaaaagggcgactacgccaaagcggtggagagcctcgagcgggttatcgatcaggataaagagctggtgggtgaaacgctggagatgctgcagacctgctaccagcagctcggcaaaaccgatgaatgggaagtttttctgcgccgctgcgtggaggagaacgccggggcgaccgccgaactgatgctggcgcagatcctcgagcaacgggaaggcgtcgaagcggcgcaaaactacgtcacccggcagctggaacgccacccgaccatgcgcgtcttccataagctgatggactaccatctcaacgaagcggaagaagggcgggcgaaagaaagccttggagtgctgcgaaacatggttggtgagcaggtgcgcagcaaaccacgctatcgctgccagaaatgcgggtttaccgctcatacactttactggcattgtccgtcctgccgctcgtgggcgaccattaaacctattcgcggtctcgacggccagtaa

SEQ ID NO: 211995 - DNA, 309 bp, Klebsiella pneumoniae
gtgaaatatttactcattttcttactggtgttagcaatcttcgtcatttcagtgacgctgggggcgcagaatgaccaacaggtcactttcaactatttactcgctcagggtgaattccgcatatcgacgctgctggcggtgctgtttgccgcgggctttgccattggctggctgatctgcggcctgttctggctgcgggtgcgtgtctcactggcgcgcgcggagcggaaaattaagcgtcttgagcatcagattgcccccgtcagcccggcggctgtcgacgcaggcgtgcctgcggtgaaggaataa

SEQ ID NO: 211996 - DNA, 768 bp, Klebsiella pneumoniae
atgctgttgatagcccgacgaactgctctcgcggcggcgctgctgctggttatgcccctcacggtctggctttccgggtggctgtggcagcctggactgccggttgccatgttgaaaagcctgtggtgggtgacggaaacggtgacccaaccgtggggaattatcactcatgtcgtgctttgcggctggttcctctggtgtctgcgctttcggctgcgcgcggcgttgatcctgttccttatccttgccgccgctatcctggcgggacagggggcgaaatcctgggtcaaggcgcgggtccaggagccgagaccgttcgtcatctggctggaaaacacaaggcaggtgccggtgacgcaattctacgcgttaaagcgtaaagaacgcgctaaactggtgcatgaacagctggcgcaggcgcaggacattccgtcatttttacgcaaacactggcagaaggagacggggtttgctttcccgtcaggtcacaccatgtttgccgccagctgggcgttactcgctgcgggactgctgtggccgcgtcgccgctggggcacaatcgcggtgctgctggtgtgggcgacggcggtgatgggcagtcgcctggcgctgggcatgcactggccgctggatctcatcgtcgccacgctgatctcctggctgctggtcacggtggcctgctggctgacgcagcgcctttgtgggccgctctcgccgcccggagaagaggcgcaggatattaaaaaacggatgcctgaagcggaataa

SEQ ID NO: 211997 - DNA, 603 bp, Klebsiella pneumoniae
atgcagcttaaacgtgtggcagaagccaaactgccaaccccctggggcgatttcctgatggtgggttttgaagaactggcaaccggacaggatcatgtcgcgctggtgtatggcgatatatcagggcagtcgccggtcctcgcccgcgtacattcagagtgtttgacgggcgatgccctgtttagcctgcgctgtgattgcggctttcagctggaagcggctctgtcgcatatcgctgaagaaggtcgggggatcctgctctatcaccgccaggaaggacgcaacattggtttattgaataagatccgcgcctacgcgctgcaggatcagggctacgacactgtcgaagcgaaccatcagcttggcttcgccgccgatgagcgcgatttcaccttgtgcgccgacatgttcaaattgctcaacgttgagcaggtgcggttattaaccaataacccgaaaaaagtggaaattcttaccgaagccgggatcaacattgtggagcgggtgccgctgatcgtcgggcgtaacccgaaaaacgctcactatctggacaccaaagccgccaagatgggccatctgctgaacagcaagccgacagaataa

SEQ ID NO: 211998 - DNA, 2673 bp, Klebsiella pneumoniae
atgtcgtcaaccctacgagaagccagtaaggacacgctgcaggtcaacgataaaacctggcattactacagtctgccgttggcggagaagcaactgggcgagatcagtcgactgcccaagtcgctgaaggtgctgatggagaacctgctgcgctggcaggacggtgactcggtaactgaagaagatattcgcgccctggccggctggctgcaacaggcccatgccgaccgggaaatcgcctaccgtccggcacgcgtcctgatgcaggactttaccggcgtgccggcggtagtggatctggccgccatgcgcgaggcggtgaaacgccttggcggcgatacggcgaaggttaatccgctatcgccggttgacctggtgatcgaccactcggtgaccgttgaccgcttcggcgacgacgaggccttcgaagacaacgtccgcctggaaatggagcggaaccacgaacgctacgcttttctgcgctgggggcagcaggccttcagccgcttcagcgtggtgccgccgggcaccggtatttgccaccaggtgaacctggaataccttggccgggcggtctggagcgaggaggtgaacggccagtggatggcgtggccggatacgctggtgggcaccgactcccataccaccatgattaatggtcttggcgtgctgggctggggcgtgggcgggattgaagcggaagccgctatgctgggccagccggtgtcaatgctgatccccgatgttgtgggctttaagctcagcggcaaactgcgcgaaggcatcaccgccactgacctggtactgacggttacccaaatgctgcgtcagcatggcgtcgtcggcaagtttgttgaattctacggtgacggcctggataccttaccccttgccgacagggcgaccatcgccaatatggcgccggagtatggcgccacctgtggctttttccctatcgatgacgtaacgctcagctatatgcgtctcagcggccgtagcgaagaacaggtcgcgctggtggaagcctacgctaaagcccagggcatgtggcgccagcctggcgatgagccggtctttaccagtaccctggcgctggatatgagcagcgtcgaagcgagcctcgccgggccgaagcgaccgcaggatcgcgtggcgctgggcgatgttccgaaagccttcgccgccagcggcgagctggaggttaaccaccttcagcgtcagcgtcagccggttgactatacgctgaacgggcatcactattcgctaccggatggcgcggtggctattgcagcgattacctcctgcaccaatacctctaaccccagcgtgttgatggccgccggcctgctggcgaaaaaagccgtcgaacgcggcctgcagccgcagccgtgggtgaaagcttctctggccccaggctcgaaagtggtgtcggattatctggcccatgccggcctgacgccttacctcgaccagctcggcttcaatctggtgggatatggttgcaccacctgtattggtaactccggtccattgcctgaacctatcgaagaagcgatcaaaaaaggcgatctgaccgtcggggcagtgctctccggtaaccgtaacttcgaagggcgtattcatccgctggtgaaaaccaactggctggcctcgccgccgttggtggtcgcctatgcgctggcggggaacatgaatatcgacctcacccgcgagccgttgggacagggcaagaatggcgagccggtctatctgaaagatatctggccgagcggggaggagattgcccgcgcggtggaacaggtctccaccgagatgttccgcaaagagtacgcggaagtgttttccggcactgaggagtggaaggcgatcaaggtggaggcgtcagatacctacgactggcaggaggactcgacctatattcgcttgtcgccgttctttgacgagatgggcgtcgagccgctgccggtagaggatattcgcggcgcgcggatcctcgccatgctgggcgactcagtcaccacggaccacatttcgccggcggggagcatcaaagccgatagtccggcaggccgctatctgcaggagcatggggttgcccggcgcgactttaactcctatggttcccgtcgcggtaaccatgaggtgatgatgcgtggcaccttcgccaatatccgcatccgtaacgaaatggtcccaggggtggaagggggtatgacccgccatctgccggatcctgaaccgatggcgatttacgatgcggcgatgctgtacaaggctgagggcacaccgctggcggtgattgccggtaaggagtatggctcaggttccagccgtgactgggcggcgaaggggccgcgcctgctggggattcgggtagtgatcgccgagtccttcgagcgtatccatcgttccaacctgatcggaatgggcattttgccgctggagttcccgcagggcgtcacccgcaaaacgctacggttgaccggggaagagcggattgatatcagtaatctgcagtcgcttcagcctggcgctacggtgccggtgaccctgactcgcgctgacggctcgcaggaagcgatcccttgtcggtgccgtatcgacacggcgacagaactcacctactaccgcaacgacggcatcctgcactacgttattcgtaatatgctgtga

SEQ ID NO: 211999 - DNA, 168 bp, Klebsiella pneumoniae; identical to SEQ ID NO: 134906

SEQ ID NO: 212000 - DNA, 975 bp, Klebsiella pneumoniae
atgaaactacaacagcttcgctacatcgttgaggtggttaaccataacctgaatgtttcatccaccgccgaagggctctatacctcccagccgggtatcagtaagcaggtccgcatgctggaggatgagctgggcattcagatctttgcccgcagcggtaaacacttaacccaggtgacgccggccgggcaggagatcatccgcatcgcccgcgaagtgctgtcgaaagtcgatgccatcaaatctgtcgccggagagcatacctggcctgacaaagggtctctttacgtcgccaccacccatacccaggcgcgctatgcgttaccgggagtgatcaaggggtttattgaacgctacccgcgggtgtcgctgcatatgcatcagggctcgccgactcagattgcggaggctgtgtcgaaaggcaatgccgatttcgccatcgccaccgaggcgctgcatctgtatgacgatctggtgatgctgccatgctatcactggaaccggtcgattgtagtgacccccgagcatcctctggccaccaagggctcggtgtccatagaggaactggcccagtatccattggtaacctatacctttggttttaccggccgctccgaactggataccgcgtttaaccgtgcgggcctgacgccgcgcattgtttttaccgccaccgatgccgacgtcatcaaaacctatgttcgcctggggctgggggtaggggtaatcgccagcatggcggtggatccggtctctgacccggatctggtgaagctggatgcgaacggtattttcagccacagcaccactaagataggtttccgccgtagcaccttcttacgaagctacatgtatgattttattcaacgttttgctccccatttgaccagggacgtggtagataccgcggtggctttacgctcgaatgaagatattgaagcgatgttcaaagatataaaacttccggaaaaataa

SEQ ID NO: 212001 - DNA, 2598 bp, Klebsiella pneumoniae
atgggtaaagctctcgttatcgttgagtccccggcaaaagccaaaacgatcaataagtatctgggtaatgactacgtggtgaaatccagcgtcggtcatatccgcgatttgccgaccagtggatcagcttccaaaaagagcgccgactctaccgccaccaaaggggctaaaaagcctaaaaaggacgaacgtagtgctctggttaaccgtatgggcgtggacccatggcatgactggaatgcgcactatgaagtacttccgggtaaagaaaaggtagtttcagaactcaaacagttggcggaaaaagctgaccacatctatctcgcaaccgaccttgaccgcgaaggggaagccattgcctggcacctgcgggaagtcatcggcggcgatgaacagcgttacagccgcgtggtgttcaatgagatcaccaaaaacgctattcgtcaggcctttgaaaagccgggcgaactgaatatcgatcgggttaacgcccagcaggcgcgtcgttttatggaccgcgtggtgggctatatggtttcgccgctgctgtggaaaaaaatcgcccgtggtctttctgccgggcgcgtgcagtccgtcgcggtccgcctggtggtggagcgtgaacgtgaaattaaagcgttcgtcccggaagagtactgggaagtcgacgccagcaccaccacgccgggcggtgacgccctgccgctgcaggtaacccataaggatgataagccgttccgtccggtcagccgtgatgagaccatggcggcggtatcgctgctggaaaaagccagctacagcgtactggagcgtgaagataagccgaccagcagcaagccgggcgcgccgttcatcacctccaccctgcagcaggcggccagcacccgtctgggcttcggcgtgaaaaagaccatgatgatggctcagcgactctatgaggcagggcacatcacctatatgcgtaccgactccaccaacctgagtcaggacgcgctgaacatggttcgcggctacatcagcgacaaatttggcaaaaaatatctgccggatagcgcgaaccagtacgccagcaaagaaaactcgcaggaagcgcacgaagcgattcgtccgtctgatgtgaacgtgctggcggaaacgctgaaagatatggaagcggatgcgcagaagctttatcagctgatctggcgccagtttgtcgcctgtcagatgacgccggcgcagtacgactccaccacgctgaccgtggctgcgggtgatttcaaactgaaagcgcgcggtcgcactttacgtttcgacggctggacaaaagtcatgccggcgctgcgcaagggcgatgaagaccgaacgctgccgctggtcaaacagggcgaccgcctgagcctggtggagctgacgcctgcgcagcactttaccaagccgccggcgcgtttcagcgaggcctcgctggtgaaagagctggaaaaacgcgggattggccgtccgtcgacctacgcgtcgattatttcgaccattcaggatcgcggctacgtgcgggtggaaaatcgtcgtttttacgccgaaaaaatgggcgagatcgttaccgaccggctggaagaaaacttccgcgatctgatgaactacgattttaccgcgcagatggaggatcgcctcgaccaggttgcgaaccaccaggccgagtggaaagaggtgctgaaccacttcttcggcgattttaccacccagctggcgacggcagagaaagatccggaagagggcggcatgcagccgaacccgatggtgctcaccagcatcgactgcccgacctgcggccgtaaaatggggatccgtaccgccagcaccggcgttttcctcggctgttcgggctatgccttgccgccgaaagagcggtgcaaaaccaccatcaacctggtgccggagaacgaagtcctcaacgtgctggaaggcgatgacgcggaaaccaacgcgctgcgcgccaaacgtcgctgccagaagtgtgggacggcgatggacagctaccttatcgatcctaagcgtaagctgcacgtctgtggtaataacccgacctgcgacggctacgagattgaagagggcgaattccgcatcaagggctatgacggcccggtggtggagtgcgagaagtgcggttctgaaatgcacctgaaaatggggcgtttcggtaagtacatggcctgtaccaacgacgagtgtaagaacacgcgtaagatcctgcgcaatggcgaagtggctccgccgaaggaagatccggtgccgctgccggagctgccgtgtgagaagtctgacgcctactttgtgctgcgcgacggggcggcgggcgtcttcctggcggccaacaccttcccgaaatcacgggaaacgcgtgcgccgctggtggaggagctgtaccgcttccgcgatcgtctgccggaaaaactgcgttatctcgccgatgcgccgcagcaggatccggaaggcaataaaacgctggtacgctttagccgtaaaaccaagcagcagtacgtggcgtctgaaaaagagggcaaagcgaccggctggtcagctttctttatcgacggtaagtggacggaagccaaaaagtaa

SEQ ID NO: 212002 - DNA, 252 bp, Klebsiella pneumoniae; identical to SEQ ID NO: 134909

SEQ ID NO: 212003 - DNA, 1083 bp, Klebsiella pneumoniae
gtgcagcaacgtcagtgctttacacaaggtgaaaacgtggaattacttgctcagtacggcttatttttagccaagatcgcgacggttgtcgtcgccatcgcggtgattgccgctattatcgtcaacctcgctcagcgcaagaagcagcgcggcgagctgcgggtgaccaatcttagcgagcattataaagagatgaaggaatcgctggcggtggcgctgctggacggcccgcagcagaagcagtggcataaggcgcagaagaaaaagcaaaaacaagaggcgaaggcggccaaagcgcgggcgaagctgggtaatgccgagccggaaggcaagccgcgcgcctgggtgctggatttcaaaggcagtatggatgcccatgaggtcaatagcctgcgggaagagatcaccgcggtactggcggcggcgaaagcgcgcgatcaggtggtgattcgcctggaaagccccggcggggtggtgcacggctacggtctggccgcctctcagctgcagcgcttgcgcgacaagcagatcccgctgacggtggcggtcgacaaagtggcggccagcggcggctatatgatggcctgcgtggcgaacaaaattgtctcggcgccgtttgcgatcctcggctctattggcgtggtggcgcagatcccgaacctgcaccgcttcctgaagaataaagatatcgatatcgaactgcacaccgccgggcagtacaaacgaacgctcaccatgctgggcgaaaataccgaggaagggcggcgcaagttccgcgaggatctcaatgaaacacatcatttgttcaaggatttcgtccaccggatgcgtccgggacttgatattgagcaggtggccaccggcgaacactggtacggggtgcaggcgctggaaaaaggtctggtggatgcggttgaaaccagcgatgagctgctgctggggctgatggagagccacgaggtgatcggggtgcgttatcaacagcgtaagaagatgctcgaccgctttaccggtagcgcggcggagagcgccgatcggcttctgctgcgctggtggcagcgcggtcagaaaccgctgatgtaa

SEQ ID NO: 212004 - DNA, 801 bp, Klebsiella pneumoniae
atgaagcgcgatcgggaaccgatcgcccaaggagttgccgtgcattatcaaccacaacgtcacttgctgaaagagcgcatcatcctggtcaccggggccagcgacgggattggtcgtgaagcggccctgacctacgcgcgctatagcgccagcgttatcctgctgggtcgcaacgacgacaaactgcgcaccgtcgcccaggagattgagcgtgagggtggtattccccctcgctggtttaccctcgacctgctcacctgtacgccccaggcgtgccagcagctggcgcagcagatcagcatgcactatccccgccttgacggcgtgctgcataacgctggcctgctcggcgacatctgcccaatggaagagcagaagccggaggtctggcagcaggtgatgcaggtgaacgttaatggcacctttatgctgacccaggcgcttcttcctttattactccgttcggaatcgggctcgctggtcttcacctcatccagcgtcggtcgtcagggccgcgccaactggggcgcctatgccgtttccaaattcgccaccgaagggatgatgcaggtgctggccgacgagtatcaaagccgccacctgcgggtaaactgtatcaaccccggcggcactcgcaccggaatgcgcgccagcgcgttcccgacggaagatccgctgaaactgaaaacccccgctgacattatgcccgtctatctgtggctgatgggtgacgacagtcgtcgcaagacgggaatgaccttcgacgcccaaccgggacgtaaaccaggaattgcccaatga

SEQ ID NO: 212005 - DNA, 591 bp, Klebsiella pneumoniae
atgagtgatgaacgctaccgcgaacgccagcagcggctgaaagataaagttgacgcccgggtggcggcggcccaggacgagcgcggcattgtgatggtctttaccggcaacggcaaaggcaaaaccaccgccgcctttggcaccgcgacccgcgccgtcggccatggcaaaaaagtcggcgtgatccagtttatcaaggggacctggcctaacggcgagcgtaatctgctggagcctcacggcgtcgaatttcaggtgatggccacaggtttcacctggaacacccaggatcgcgacagcgacaccgccgcctgcctggcggtctgggagcatgcccgccgtatgctcgctgacgaccagctcgatctggtgctgctggacgagctgacctacatggtggcgtatgattacctgccgctggagtcggtgctgagcgccctgcgtgagcgccctgcccatcagtcggtgatcatcaccggccgcggctgtcatcgcgatattattgaactggccgataccgtcagcgaactgcgtccggtcaagcatgcatttgatgccgggattaaagcgcagatggggattgactactaa

SEQ ID NO: 212006 - DNA, 903 bp, Klebsiella pneumoniae
atgagcgagaaactgcaaaaagtgctggcccgcgccggccacggctcccgccgtgaaattgaagcgaaaatcgaagctggccgcgtcagcgtcgacggcaaaatcgccaccctcggcgatcgtgtggaaattgtccctggtttaaaaattcgtatcgatggtcatctgatctcggtgaaagagtctgccgagcagatctgccgcgtgctggcttactataaaccggaaggcgagctgtgcacccgtaacgatccggaaggacgcccgacggtgtttgatcgtctgcctaaactgcgcggcgcgcgctggattgccgttggtcgtctggacgtgaatacctgcggcctgctgctgttcaccaccgatggcgaactggccaaccgcctgatgcacccgagccgtgaagtcgagcgtgagtacgccgttcgcgttttcggccaggtggatgatgataagctgcgccagctgtcgcgcggcgtacagttagaagatggtccggcagcgtttaaaaccatcaaattcaccggcggcgaagggattaaccagtggtataacgttaccctgaccgaagggcgtaaccgcgaagtgcgtcgcctgtgggaagcggtcggcgtgcaggtcagccgtctgatccgcgtgcgctacggcgatattctgctgccgaaaggcctgccgcgcggcggctataccgagctggacctggcgcagaccaactacctgcgcgagctggtggagctcacgccggaaaccagctctaaggttgccgtcgagaaagaccgtcggcggttgaaagccaatcagatccgtcgggcggtgaagcgtcacagccagaccagcgctaatccgcgccagggtaacaacagcaaccgtcgttccagtactcgcaataagactaacggttaa

SEQ ID NO: 212007 - DNA, 897 bp, Klebsiella pneumoniae
atgaaactcccgccgctgaatgcgttgcgctgctttgaggcggcggcgcggctgctcagcctgaagctggccgccagtgagctttgcgtcacgcccagcgccgtcagccagcagattgcccgccttgaggagacgctgaatgtcccgctatttatccgtactccgcgacggttacagttaacggcggtgggagagatctacctgcgggccgttcagccggcgtttcatcagatagccgccgccacccagcgtctgcaggtgcccccgggaccagaaaaggtagctatcagctgtaccagcggcttcgccattcagtggctgctgccgcggctggctgattttgaacaacgctatccgcagatagagatccagatcggcaccaccaaccggcgagtggatttgctgagtgaagggatcgattttgccgtgcgtcatggtgtcggcggctggccggaactgcaggcttaccgcctgctggatgacgacctgatgccggtctgtagcccgcaactgattgctccgcgccggacgctcaccgatgcgagcgatctactgcagtatccgctgctgcacgatgaacatcgtgaagactgggcgctgtggtgtaaggccgtggggctggcgccgcacttcgcgcggcgtgggccggtgttcactgattccaacggcgtgacggaggcggcgttcgccggtatggggatggcattactgcgacgctcattcatagcgcctgcgctgacgcaggggcggctggttaatcctctggcgcagcccatcgcctgtccgctggcctatcatctggtttaccacgagaccgcgctgctggcgcctgccaaccgctgttttcgcgactggctgcttggccagcgcccggccgttgctgaggagcgcgcgtaa

SEQ ID NO: 212008 - DNA, 909 bp, Klebsiella pneumoniae
atgcgtgttatcgactatggccgcctgctgctgctcgccgccctctggggcgccagctttttgtttatgcgcatcaccaccccggccttcggggcgttgaacagcgcttttcttcgcgtactgttcgccgctatcgcgctcgggctgttactcggcgtgcagggtaaatggagcgggtatcagggaaaattcacatccactctgcagctgggggtcattaattcaggccttccttttctcatgtactgccttgccgcgcaatggctgccggcagggtactccgccacgcttaacgccacggcgccgatgatgggggtgctgatcggcgcgttatgctttgcagaaccgttaaccctgcgcaaaggcggcggcgcgatactgggcgccattggcgtggcggtgatcgcgcgcccgacgtctggccttagcgccgccctgctgctgccggggattggcgcctgcctgaccgcgaccgcctgttacggtctggccggctttctgacccgccgctggatccagcagcgaggcggcctcgaggctgaacgcgtcgcgctgggtagccaggtcggcgccacgctgtttctgtttcctttctttctctggtcctgctggcatgggcctgccgtagactggcggcagagtctgccgtggatagcgatagtcatgctgggcgtggtctgcacggcggcagggtatattatctacttccgcttgattgcagatatagggccgctgcgttcgctgtcggtgacctttttgatcccaccttttgcggcgctgtggggctatctctgcctcggagagacagtggagaaaggattgattctcggcgcgctgctggtttgtgtagcgctatggatgattatcgtgccgtcggggcgaaaacgcggggtaccggacggcgcatga

SEQ ID NO: 212009 - DNA, 621 bp, Klebsiella pneumoniae
atgagccagtttttttatatccatccggataacccgcaggcgcggttgattaaccaggcggtggagattgtgcgtaagggcggggtgatcgtttatcctaccgactccggctacgcgctgggctgcaaaattgaagacaagggggcgatggagcggatctgccgcatccgtcagctgccggacggccacaactttaccctgatgtgccgcgatctgtccgagctgtcaacctacgcttttgtggataatgtggcatttcgcctgatgaaaaacaacacgccgggcaactatacctttatccttaaggggaccaaagaggtgccgcgtcggctgctgcaggagaagcgtaaaaccatcggcatgcgcgtcccgtctaaccccatcgctcaggcgttgctcgagaccttaggcgagccgatgctctccacgtcgctgatgctgcccggcagcgactttaccgaatccgacccggaagagatcaaagatcgtctggagaaagtggtggacctcatcattcacggcggtttccttgggcagcagccgaccacggttatcgatctcactgaagacaccccggtggtgctgcgcgaaggcgtcggcgacgtgaggccgtttctctaa

SEQ ID NO: 212010 - DNA, 864 bp, Klebsiella pneumoniae
ttgagcgacagccaatacgcagtgatttacgatctgcacagccataccaccgcctctgacgggcggctgactccgcaggaactggtccatcgcgcccatgagatgcgcgtcggcaccctggcgatcaccgaccatgacagcgtggcggcgatcccggcggcccgggaggagatcgcccgcgccggattacccttgaccctggtgaacggcgtcgagatttccaccctttgggagaatcacgagattcatattgtgggtctgaatattgatattgcgcacccaacgatgaccgccctgctggaggagcagaaagcgcggcgccagcagcgcggtcagatgattgccgagcgcctggagaaggcgcggatccccggcgcctgggaaggggcgctgcgactggcggacggtggcgccgtcacccgcggccattttgcccgttttctggtggaggccggccatgcgaaaaacatggcggaagtcttcaaaaaataccttgcccgcgggaaaaccggttacgtgccgccgcagtggtgtacaataaaacaagcgattgatgtgattcatcattctggcggcaaggcggtgattgcccatcccgggcgctacgatctctccgccaagtggttgaagcggctgttggcccactttagcgagcagggcggtgatgccatggaagtggcccagtgtcagcaggcgccccatgaacgcgcccagctggccaccctggccgtgcagtttggtcttctggcgtcgcagggatccgattttcatcagccctgcgcgtggatcgaacttggccgtaagctctggcttcctgccggcgtggaaggcgtctggcacagttgggaagcggccgccgaataa

SEQ ID NO: 212011 - DNA, 1563 bp, Klebsiella pneumoniae
atgcaaacatccaaaccggcactcgagcttctcaccagcgacgccatctaccgggagaacccgacggcgttattccaccaactgtgcggcgcccgtccggcgacgctgctgctggaatccgctgacatcgacagcaaagatgacttaaaaagcctactgctggtcgatagcgcgctgcgcattacggcccttggtgacactgtcactattcaggccctctccgccaacggcgcggcgctgctggaactactggacggcgcgctgccctccgggatcatcaatcagcgccagcccaacggccgcatcctgaccttcccggccgtcagcgccctgctcgatgaagacgcccgtctctgctcactgtcggtgtttgacgccttccgtctcctgcaggagctggtgagcgttccggacaacgagcgcgaagcgatgttcttcggcggcctgttcgcctatgacctggtggccggttttgaagatcttccccagttgcaaagcgacaccacctgcccggactactgcttctatctggcggaaaccctgctggtcatcgaccatcagaccaagcatacccgcattcaggccagcctgttcaccccgctggagagtgaaaaacagcgcctggagcagcgcctgagccagctgcgtcagcagctgaacgagccgccggcgccgctaccggttaccaccgtggccgaaatgcgctgcgacgttgaccagagcgatgaagagtacggcgcggtggtgcgcaaaatgcagcgcgcgatccgcgccggggaaatcttccaggtggttccttcccgccgcttctcgctgccctgcccatcgccgctggccgcttatgatgtgctgaagaagagcaaccccagcccgtacatgttctttatgcaggacaatgatttcaccctgttcggcgcctcgccggaaagctcgctgaagtatgatgccgtcagccgtcagattgagatctaccccatcgccggcacccggccacgcggccgccgcgccgacggctcgctggatcgcgacctcgacagccgcatcgagctggaaatgcgcaccgatcataaagagctttccgaacacctgatgctggtggacctggcgcgtaatgacctggcgcgcatctgcaccccgggcagccgctatgtcgctgatttaaccaaggttgaccgctactccttcgtgatgcatctggtctcccgtgtagtaggcgaattgcgtcaggatctcgacgtcctccacgcctatcgcgcctgcatgaatatgggcaccctcagcggcgcgccgaaggtccgcgccatgcagctgattgccgccgccgaaggtaaacgccgcggcagctacggcggcgcggtgggctatttcaccgcccacggcgacctcgacacctgcatcgtcatccgttccgcctacgtgcaggaaggtatcgctaccgtccaggccggagccggcattgtgctcgactcggttccccagtcggaagcggatgagacccgaaataaagcccgcgcggtgctgcgcgccattgcccaggcccatcacgcgaaggagattttctga

SEQ ID NO: 212012 - DNA, 1596 bp, Klebsiella pneumoniae
atggctgacattctgctgctcgataatatcgattcctttacctataacctggcagaccagctgcgcgccaacggccataacgtagtgatttatcgcaactccgttccggcgcaggcgctgattgagcgtctgggcaccatggacaacccggtgctgatgctctccccgggcccgggtacgccaagcgaagccggctgcatgccggagctgctgacccgtatgcgcggcaagctgccgatcatcggcatctgcctcggccaccaggccattgtcgaagcctacggcggctatgtcggccaggcgggggagatcctccatggcaaagcctccagcattgagcacgacggccaggcgatgtttgccggtctggctaacccgctgccggtggcgcgctaccactcgctggtcggcagcaatattcccgccgggctgacgattaacgccaatttcaacggtatggtgatggcggtgcgtcacgatgcggatcgggtgtgcggcttccagttccacccggaatcgatcctcaccacccagggcgcgcgactgctggagcagaccctggcctgggcgctgcagaagctggagcataccaacaccctccagccgatccttgagaagctgtaccaggcggaaaccctgagtcagcaggagagccaccagctgttctccgccgtcgtgcgcggcgaagtgaagcctgagcaactggccgccgcgctggtcagcatgaaagtgcgcggtgagcagccgcaggaaattgccggcgccgctaccgcgctgctggaaaacgccgcgccgttcccgcgcccggactacctgtttgccgacatcgttggcaccggtggcgacggcagcaacagcatcaatatctccaccgccagcgcctttgtcgctgcggcctgcgggttaaaagtggcgaaacacggcaaccgcagcgtctccagtaaatcaggctcttctgacctgctggcggccttcggcattaatctcgatatgaacgccgataaatcccgcgccgcgcttgatgagctgggcgtctgcttcctgttcgcgccgaagtaccacaccggtttccgccacgcgatgccggtccgtcagcagctgaagacccgcaccctgttcaacgtgctgggcccgctgatcaacccggcgcatccgccgctggcgctgattggcgtctacagcccggaactggtgctgccgatcgccgagaccctgcgcgtgctgggttatcagcgcgcggcggtggtgcacagcggtgggatggatgaagtttcgctgcatgcgcctacggtggtggccgaactgcataacggggaaattaaaagctatcagctgaccgccgacgacttcggcctgacgccttaccatcaggcgcagctggcgggcggcaccccggaagaaaaccgtgacattctgacgcgcttgctacaaggtaaaggtgaagccgctcacgaagccgccgtcgccgccaacgtcgccatgttgatgcgtttacacgggcatgaagatctgaaagctaacgctcagcaggtactggatgtgctgcacagcggcgcggcctatgacagagtgaccgccttagcggcaagagggtaa

SEQ ID NO: 212013 - DNA, 1359 bp, Klebsiella pneumoniae
atgcaaaccgttttagcaaaaatcgttgccgacaaagcgatttgggtggaagcccgcaaacaacaacaaccgttagccagttttcaaaatgagatcgttccgacgcagcgcaatttctatgacgcgctggccggcacccgcaccgcgtttattcttgagtgcaagaaggcctcaccgtcgaaggggttgattcgcgaggatttcgatccggcagcgatcgccagcatctacaagcactacgcctcggcgatctcggtgctgtgtgatgagaaatatttccagggcagcttcgatttcctgccgatcgtcagccaggtcgcgccgcagccgatcctgtgtaaggacttcaccatcgacccttaccagatctacctggcgcgctactatcaggccgacgcctgcctgctgatgctctcggtgctcgacgatgaacagtatcgtcagctctcggcggtggctcacagcctgaatatgggcgtgctgaccgaagtcagcaatgaagaggaactggagcgcgccatcgccctgaaggcgaaggtggtgggcattaacaaccgcgacctgcgcgatatgtcgattgaccttaaccgcacccgtcagctggcggcgcgtctcggcccggatgtcacggtgatcagcgaatccggcatccatacctatgccgaagtgcgcgagctgagccacttcgccaacggcttcctgatcggctccgccctgatggagcaggcggatctggaagcggcggttaaacgcgtgctgctcggcgagaacaaagtgtgcggcctgacgcgcccgcaggatgcccaggtggcctgggagtccggcgccatttacggtgggctgatcttcgtcccgacctcgccgcgagcggtgaatgacgcccaggccaaagcggtgatcgccgctgcgccgctgcagtacgtcggcgtcttccgcaatgcgccgctggaggaggtggtcgcccgcgcgcaggctctggggctggccgccgtgcagctgcacggtgatgaagaccaggcctatatcgacgcgctgcgcgacgccctcgcggacaacgtccgcatctggaaagcgctgagcgtcggcgaaaccttcccggcccgtacgctccaccatgtcgacaagtacctgctcgacaacggccagggcggcagcggccagcgctttgactggagcctgctgcagggccaggatctgcgcaacgtcatgctggcgggcggcctcggcgccgataactgtgtggaagcggccaaaagcggctgtgccggactcgatttcaattcaggcgtagagtcgcaaccagggatgaaagacgccagcaagctggcctccgtattccagacgctgcgcgcatattaa

SEQ ID NO: 212014 - DNA, 1194 bp, Klebsiella pneumoniae
atgagcactttactgaacccctacttcggcgaattcggcggcatgtatgtgccgcagatcctgatgcccgccctgcgccagctggaagaagcctttgtcagcgcgcagaaggacccggcctttcaggcggaattcaccgacctgctgaaaaactacgccggtcgtccgacggccctgaccaaatgccggaatctgaccgaaggcacccgcaccaccctgtacctgaaacgcgaagatctgctgcacggcggcgcgcacaaaaccaaccaggtgctgggccaggccctgctggccaaacggatgggtaaaaccgaaattatcgccgagaccggcgccggccagcacggcgtcgcctcagcgctggccagcgccctgctcggcctgaaatgccgtatctacatgggtgccaaggacgtcgagcgccagtcgccgaacgtgttccgtatgcgcctgatgggcgccgaggtgatcccggtgcacagcggctccgccacgctgaaagatgcctgtaacgaggcgctgcgcgactggtccggcagctacgaaaaggcgcactatatgctgggcaccgccgccggtccgcacccgttcccgacgattgtgcgtgaattccagcgcatgattggcgaagagaccaaagcgcagatccttgaaaaagagggccgcctaccggacgcggtgatcgcctgcgtcggcggcggatcaaacgccatcggcatgttcgctgattttatcgaggaaaccaacgtcggcctgatcggcgtggagcccgccggacacggtatcgagagcggcgagcacggcgcgccgctgaagcatggccgcgttgggatctacttcggtatgaagtcgccgatgatgcagaccgccgacggccagatcgaagagtcttactccatttccgccgggctggacttcccgtccgttgggccgcagcacgcgtttctgaacagcaccggtcgcgctgactatgtgtcgatcactgacgacgaagcgctggacgcgtttaaagcgctttcccgccacgaagggattatcccggcgctggagtcctctcacgctctggcccacgcgctgaagatgatgcgcgagaacccggaaaaagagcagctgctggtggttaatctctccggccgcggcgacaaagacattttcaccgtacatgacatcctgaaagcgcgaggggaaatctga

SEQ ID NO: 212015 - DNA, 810 bp, Klebsiella pneumoniae
atggaacgctatgagacgctgtttgcccaactgaaaaatcgccaggaaggcgccttcgtcccctttgtcacccttggcgatccgggaccggagcagtcgctgaaaattatcgatgcgctgatcgaaggcggcgctgatgcccttgaactggggatccctttctccgacccgctggcggacggcccgaccatccagggcgcggccctgcgcgccttcgccgcgggagtgaccccggcgcagtgctttgagatgctggcggcgatccgccagaagcatccgaccatcccaatcggcctgctgatgtatgccaacctcgtcttcagcccgggcatcgatgcgttctatgcccagtgcgcccgcgtcggcgtcgactcggtgctggtggccgacgtgccggtggaagagtccgccccgttccgccaggcggcgatgcgccataacatcgcaccgattttcatctgcccgcccaatgcggatgacgatttactgcgccagattgcctcttatggccgcggctacacctatctgctgtcgcgcgccggagtgacgggtgcggaaaatcgcgccgcgctgccgctgcaccacctggtggagaagctggcggaatatcacgccgcgccgccgctgcagggctttggtatctccgcgccggagcaggtgagcgccgccattgacgccggagccgccggggctatctccggttccgccatcgtcaaaatcatcgaacgccacctcgatgagccgcagaccatgctcgacgagctgaaagccttcgtccagagcctgaaggcagcgaccaaaaccgcctga

SEQ ID NO: 212016 - DNA, 1260 bp, Klebsiella pneumoniae
atgaataacgaacaggctgcagagatcctgcaggatatctttcaacatgcggtcaacagtgcccgcgccgggccggtgaccctggctaacctgccggaaaaacctcgcggccgttgtgtggtgatcggtgcgggtaaagcgtccgcggcaatggcggctgccgtggatgcggcctggccggatgtggcggtgtcgggcgtggtggtgacgcgttacggttacgcggttcctgcgggccgcatccgcattattgaggcggctcatcccgtatcagatgccatgagcgaggttgccgcaatgctgattgtggagacgctgcgcggtttaactgccgatgatctggtgctggcattgatttcagggggagggtcggcgctgatggcgctgcccgccccggggttaacgctggcagataagcagaccatcacccgggccctgctccatagcggggccaacatcaaagagatgaatctggtacgtcgtcatctctcagcggtgaaaggcggaaagctggcgaccatggcgcaaccggcgcgcatcgtatcactgattatcagcgatgtgcctggcgataatccgacggacgtagcgtctggccccaccgttgccgataacagcgcaccacgtgatgcgctccgggtactgcagcggtatggcattacgatcccgaagcccgttagcgaacggctaaaccagccggccggcccgatggaaaacgccgcgacaggcgaggtcaggcttatcgccacgccggcgatggcgttagcggcggcggggctggccgcacgacaacatgggttcaccccccttattttgggggatgctatagaaggtgaaagcagggaagtggcggtggtcatggccggtatggcgaaatcggcgaagcagtatggtcacccgatttcagggcctgctgtgctgttgtcaggtggcgaaaccacggtgacagtaaacaacactcagcctggaaaagggggccgcaataccgagtttttactcagtctggcctgtgcgctccagggggaacacggtatctgggccatggcgggagatagcgatggtattgatggcacagaagatgccgcaggtgcgatcgtcttcccggatacgcttgcgcgcggcaagctgagcggtcttaatgcagtgcaatatctggatggccatgatagttactgctattttcacgcgcttaatgatttgctgatcaccggcccgacgttaaccaacgtcaatgatattcgggcaatattgattgcctga

SEQ ID NO: 212017 - DNA, 1089 bp, Klebsiella pneumoniae
atgcgtcactacaaaattgctgccatccctgcggacggtatcggaccggaagtcatttcggcaggtattgaagtcttgcacgcgctgacgcgccacgatccgcaactgaaatttgatatagagacctttgactgggggtcagactattacaaaaaacatggcgtgatgatgccggaagaagggctgaacatgctgaaagcatttgatgccatttacttcggcgcggtgggggccccggatgtccctgaccacatcacactctggggcctgcggctgcctatttgccagggctttgaccagtacgccaatgtgcgacccaccaaaattctgccgggcgtcacttcaccgctgcgcaaccgcgggcctggcgatcttgactgggtcatcgtgcgcgaaaactccgaaggtgaatattctggtaacggcggccgtacccaccgtggtttacctgaagaagtcggtaccgaagtggcaatctttacccgtgttggggtgacacgcattatgcgctatgccttcagactggcacagtctcgtccacgtaaactgctgaccgtggtgaccaaatccaacgcccagcgccatggtatggtgatgtgggatgagattgccgctgaagtggcgcaggaattcccggatgtgcagtgggacaaaatgttggtcgatgccatgacgcaccgtatgacgttgcatccccagaccctggataccatcgttgccaccaatctgcacgccgatatcctttccgatctggctggcgcgctggcgggtagtctgggcgtagcgccgaccgcgaatattgatcctgaacgccgtttcccttccatgttcgaaccgatccatggttccgcattcgatatcaccggcaaagggattgcgaaccccattgccactttctggaccgcggtacagatgcttgaacatctgggcgaacgccatgccgctgcgctgattatggaaagcattgagtatgtgtgtgaaaaaggcattctgacgccagatgtcggtggctcagccaataccgcggaggtgacacgcgccgtggtgcactacattgacgctaaagctgacattgccgagaccgcataa

SEQ ID NO: 212018 - DNA, 1311 bp, Klebsiella pneumoniae
atgaaaaacgacctcgaaaagaaggtgatgcgtaaggttaccctgcgcattattcctttcatcatgctgctgtacttcattgccttccttgaccgcgtcaacattggctttgccgccctgaccatgaatcaggatctgggattttcacccaccgtttttggtctgggcgctggaattttcttcctgggttattttctgtttgaggtaccgtcaaacttaattcttcataaagtgggcgcccgcatctggatcgcccgcgtcatgattacctggggattcgtctctggctgcatggcttttgtgcagggcacgacgagcttctacattctgcgttttctgctcggcgtggcggaagccggtttcttcccggggatcattctctatctcagctactggtttcctgccgccaggcgtgcgcaggtcactgccatctttatggccgcagctcccctgtcgacagcactgggatcgccggtttcggccgcactgctggagatgcatggcttccttggctacgccggctggcagtggatgtttgtactggaagctttgccggcgctggtgctcggtgttgtggttctgttcttcctgacggatcgtccggccaaggccaaatggctgactgatcaagagcgtgcctggctggaaaacgccatgcaagacgaggagcgggcacgggcggcaaaacagagccattccagcgcatggcgagggctagcggatatacgcgtcctggcgctggcgctggtctatttcggtacctcagccgggctgtatacgcttggcatctggtccccgcaaatcattcgcagtttcggtgcttcctcgctggagattggtttcctgaacgcctttccggcggtgatcggcgtcatcgccatgatcctctgggcgcgtcattccgatcgaaccaaagagcgcagctggcacgtcattggcgcctgcctgctggcggctgccgggctgatatacgccggtaatgtcagcacattgtttaccgtaatggtcgccttaacgctggtcaccgtggggattagcgcatcaaaaccccctttgtggagcatgccaaccctgttcctcagcggaccggctgcggccgctggcattgcggctatcaactccatcggcaacctcggcggtttcgttggcccgatgatgattggcgtgatccgcgagcaaaccggtagttacagctggggcctgtactttgtcgccggattgctggcgctctcggccctcgtggtcatgattctttctgccagagcgaacaaatcgccgacggcagagcttccacatcctcatactcattaa

SEQ ID NO: 212019 - DNA, 909 bp, Klebsiella pneumoniae
atggatataaatcagctacgttgctttgtggtgttaggtgatgagcttcactttggccgggctgcccgtaaactcgaaatgatgcctgcgtcactgagtcgctttattaagctactggaagatgatttggggatcaggctactgaatcgatcgacccgcaacgtgtcgctaacacctgaaggcgccgcctttttaaatgaggccaaaacggtcattgctgatttcgatgcgctacggcagcgattccggaaaaatagcctgttgcagaaaagaacgttgcggatcggggctatcgacagcgcagccaaaggattacttcctgaattgcttaatcttttcgtcaggcgttttcctgaagcagatattcatcttacagaagataaatctcacaaacttatcccccgactcatttcagggtggctggatgtggtttttgtgcgcccgccggaacacattgatgccatgctgacaacgcgatttattgccaatgaaacttgcgtgctcgccgtgcccgctcatcaccggctggtcagttatgatgaagtcagtatcgatgactttcggcacgagcctgttatcttgccggaaagacgcacccggcgtcacagccatgacctgacaatgaatattttcaaagaggggggcagcatgcctgtcatcgcgcagtatgctgaagagaagcagactatcctgagttttgttgccgcaggactcggcattgctctggtgccagcgtcctataaagacatgaatgccgacggcgtgaaataccttgcgctcacgccgaaaaagcatgtcgaagggctccccctcagcgcgatgtggcatcagggaaacaacactctctatgtgagatccctgctggagatactttccgacaacatcgacgaactgacccgtgagttgtga

SEQ ID NO: 212020 - DNA, 459 bp, Klebsiella pneumoniae
atgcaagatgcacataatgactacgacattaccgactttcacggcgcgctgctggatatcatcagcgtaatgaaccagccgctgcgcgatgagcagatcctgcaggcagccggcatccagctggaacagatgctgtttccgctgcttgtggcagtagggcgccatggcccggtgggggtggttgagctggcggatcatttagggcgcgattacaccaccgtcagccgccaggtgaaaaaactggaagcccagggactcgcctgtaagcaaccgaaccgtcatgatcgacggatcagcgaagtgacgcttagcgccagcggacaacagatgatcgacagtattgcggtagcgcggcggcggttaatgaatcaggtgctggcgcagtggccggaagatgaagtgcaggcgctgtttcgcttaacgcgcaaatacgccgacagtttgcagcaaccaggctaa

SEQ ID NO: 212021 - DNA, 948 bp, Klebsiella pneumoniae
atgaaagcagccgtggtttttgatctcgcagaaggcccggtttgggccgattttatcgacccgcagcccgcgcccggccagacgctcattgacgtccgcgccgccgcgataagccatgtggttaaggcccgggcatccggacgccattacagcttcgacggcaatctgccctttgtgcccggtatcgatggcgtcggcaccacacctcagggccagcgcgtctacttcgccttccccaccgcccccttcggcagtatggcgcagcgggcgccggtcgccctgcagaattgtctgccgctgccggatgcgctcgatgatatccaggcggcggcgatggccaaccccggtatgtccgcgtgggcatcgctggtgacacgcgcccagcttcaggccggcgaaacggtgctgattaacggcgccaccggcagcgccggtcagttggcggtgcagattgcccgctatctgggggcgaaaaaaatcattgcaaccgggcgcaatgcgcagtcgctggcggcgctggacgccgatgagtgtattcagttaaccgctgatgataaaaacttgagcgggcaattttcagcggtcagcgccgcgcagatcgatgtggtcatcgattacctgtggggacacagcgcggaattattattgccggcactggcgaaatatacccctgccggcagtccggtgcgctatgtgcaggtgggttccctggctggcgccgatatcgcgttaaatggcgcagtgctgcgttccgccccgctcctgctgatgggcagcgggatcggtagcctgtcggtatcgcagctgctggcggcgaccggtgaaatgctgcaggcggcggtgccggggaaattgaccatcgccaccaccccgcggccactgcaggagatcgcggcggcctggccgcaggacgacagccagaagcgcacggttttcaccctcggataa

SEQ ID NO: 212022 - DNA, 201 bp, Klebsiella pneumoniae
atgaacgatcccgattttaatttgctggcggctctcgatccgctgccggtcagtaccgaggtgattacggtttcgcaggcgtggcatccgcgtctggagcaggccccggccaccgctggctgcggcagcgggtgcgtgaggtgtgtcgcgagtaaaaaaaagcccgcacaagtgcgggcaaaaatactggaagcaatgtga

SEQ ID NO: 212023 - DNA, 708 bp, Klebsiella pneumoniae
atgaaatccgatcagcacaacactatcctcatcgtcggcgcctcgcgcggccttggccatgctatggcggcgacgttcctccagcacggctgggaggtcatcggcaccgtgcgcgatttatcatcccacacgccgctccacgacctggccaagacgcatcccctgcggctacgcctggcgacgctcgacattcgcgatgaagcccagctggccgcgctgcaggcgacgcttcccccggcaagcctcgatatgctgtttgtcaatgctggcaccaccaatcgtgacccatcgcagaccattggcgacgtctccaccgaggagttttaccaggtgatgctcaccaatgccctggcgccgatgcgggttatcgagcgcctgcagcaggccgttaaaccgcaggggctgctcggcgtgatgtcctccggccaggggagcgtgaccaataaccttaccggccagcgggaactctaccgcgggagtaaagctgcgctgaatatgttcatgcgcagcttcgccgctcgcccctcctcggcctcccatccgctggtggtgatggccccgggatggatccgcaccgagctcggcggggcagatgccccgctgaccatcgaagagacgatcccacgcctggtgaacgtcctgctcgacaaacggcaacgtccgggactggagtatctggattaccagggccgtaccgtgccctggtga

SEQ ID NO: 212024 - DNA, 2286 bp, Klebsiella pneumoniae
atggaaaaaaacgcttctctgcctttcggcagtttcaactcattggcattgtttacaggtctgtgtctgggagcctcgccggcagcaggcatcacagcggaaaattcggtcaaaaatagtgaagagacgctggtagtggaagccgctccgccttcactctactcccccggcgcttccgccgatcccaagttcaataaaccgctggtcgataccacccgcaccatcaccgtgatcccggaacaggtgattaaagatcagggcgtcaccaacctgactgacgccctcaaaaacgttcccggcgtcggggcgttttatgccggggagaatggcagctcaaccaccggggatgccatctttatgcgcggcgtggatacctctaacagcatctatgtggacggcattcgcgacatcggcagcgtgacgcgcgataccttcaatacccagcaggtggaagtcatcaaagggcccgccggcacggactatggccgcagcgcgccctccggctcgatcaatatgatcagcaagcagccgcgccttgactccgggatcgacggctcggccagcatcggcagcgcctggtcgcgccggggcactctcgacctgaaccaggcgtttagcgacaacgctgcgttccgtctgaacctgatgggggaaaaaacccatgacgctggtcgggaccgcattgaaaacgaacgctatggcatcgcaccgtcgctagccttcggccttgataccccaactcgtctgtatctgaactatctgcacgtccggcagaacaacaccccggatggcgggatccctaccgtcggcctgccgggctattcggcgccttcgccgaagtatgccgcactcaactccaccgggaaggtcgataccagcaatttctatggcaccgactccgattacgataaatctactaccgacagcggtaccctgcgcttcgaacacgatctgacggagaataccaccgtgcgcaataccacccgctggtcgcgagtgaaacaggagtatcttttgaccgcggtgatgggcggcgcgaacaatatcaccgcccccgatatcaatgacgtcaacacctggagctggtcgcgtctggttaataccaaagatgtcagcaaccgcattctgaccaaccagaccaatatcacctcgaccttcgatactggctcgataggccatgacgtcagcgccggcgtggagtttacccgggaaaaccagaccaactatggcgttaacgccaggaccgcgccggcggtgaatctctaccatccggtgagcaacctgtcgattggcgggctggacagaaacggggcgaacgccaacggccagaccgataccttcgggatttatgcctttgatacgctgacgctgaccgagcggattgagatcaacggcgggctgcgtctcgacaattaccataccaaatatgacagcgccaccgcctgcggcggcagcggacgcggggctatcgcctgcccgcccggacagtcgaccggcagcccggtcaccactgtcgataccgctaaatccggcaatctggttaactggaaagccggggcgctgtaccgcttaaccgagcagggcaatgtctacgtcaactacgccatctcacagcagccgccgggaggcagcagcttcgccctggccgccagcggcagcggcaacagcgctaaccgaaccgactttaagccgcagaaggcaaaatccagcgagctgggcaccaagtggcaaatcttcgacaaccgtctgctgctcagcgcggcattattccgcaccgatattgaaaacgaagtggccgccaacgatgacggaacctggtcgcagtacggcaaaaagcgcgtggaggggtatgaactctccgcgaccggaaacctgaccccggactggacgattatcgccggctacactcagcagcatgcgacagtgacggagggacagaacgttgcacaggatggatcttccgccctggcctacaccccgaaacatgcctttacgctgtggacgcagtatcaggccaccagcgatctgtccgtcggcggcggtgtgcgctatgtcggaagcctgcgccggggcagcgatggtgcggtcggtaccccggatcacaccgagggctactgggttaccgacgccaaactgggctatcgggtcaacagaaacctcgatctgcagctcaatatgtataacctgtttgataccgattacgtggcctccatcaacaagagcggctatcgctatcatccgggcgaaccccggacctttatgctgacggcgaacgtccatttctga

SEQ ID NO: 212025 - DNA, 678 bp, Klebsiella pneumoniae
atgatgtatcacattcctgacgtgctatcgacagaccaggtggcggaatttacccggcagctggcgcaggccgagtgggtcgacgggcgggttacggtgggtagccagggggcggccgtcaaacagaaccagcagatcgatacccgaacgccgctgtatgcccgcctgcaggccactgtgctcgatatgctgcgcggccatccgcagtttttttccgccgcgctgccgcggacgatttccgcgccgttgtttaaccgctatgggccaggggagacctatggttttcacgtcgatggcgccgttcgccagaacggcgaggctggctggatgcgcactgatctgtcagcgacgctgttcctttgcgatccggagagctatgagggtggcgaactggtgattgaagacacctatggccaacatcgggtgaagctcccggccgggcatctggtgctctatcccgccagcagcctgcactgcgtcaccccggtcacccgcggcgtccgccaggcctctttcctgtggatccagtcgatggtccgcgacgataagcagcgtgcgatgctttacgacctggaccgcaccatccagtctctgaaggcccgctttggcgacggagaagaggtcctctccctgctcaacatgtatcacaacctgctgcgccagtggacggaagtgtga

SEQ ID NO: 212026 - DNA, 639 bp, Klebsiella pneumoniae
atgaagaagttagcagcggcggcattgattcttggcacgctttctaccggcagcgtctgggcgcatgaggcgggggagtttttcattcgtgccgggaccgccaccgtccgaccgacggagggctctgacaatgtgttaggcagccttggcagtttcaacgtcagtaacaatacccagctgggtttaacctttacctatatggcgaccgataacattggcgtggagttgcttgccgcgacgccgttccgccataaggtcggcaccgggccaaccgggactatcgccaccgtccatcagctgccgcccaccctgatggcgcagtggtactttggcgatgcgcaaagcaaggtgcgcccgtacgtgggggccggtatcaactacaccaccttctttaatgaagactttaacgacaccggcaaggcggccgggctttccgatctgagcctgaaggactcctggggcgcggcggggcaggtcggcctcgattatctgattaaccgcgactggctgctgaatatgtcggtgtggtacatggatatcgataccgatgtgaaattcaaagccggcggtgtggaccagaaagtcagcacccgtctggatccgtgggtgtttatgttctccgcaggctatcggttctaa

SEQ ID NO: 212027 - DNA, 414 bp, Klebsiella pneumoniae
atgagtgaaatcaacccgtgcatgacgtgcggtgcctgttgtgcgtattttcgagtctctttctactgggcggaagccgacgatgcaggcggcctggtgccctccgcgctgaccgaaccgctgacccctttcctgcgctgcatgagcggcaccaatcagcgccagagccgctgcgcggccctgtctggcgatatcggcgacgccgttcactgcactatttatgaaaaccggccttcgccgtgtcgcgaattcgccatgtccggggaaaatggcgaggaaaacgatgcctgcaaccgggcgcgggcgcgctacggcctgccaccattgcggcctctttacaaagatatacctgccctgaccggcgcagagagtgctacgacggaacgatttgcggtacaatcgccggctagttaa

SEQ ID NO: 212028 - DNA, 744 bp, Klebsiella pneumoniae
atgtctatcacggcgaagtccgtctaccgtgacaccgggaatttttttcgtaatcagttcattactattttactgattgcgctgttgtgcgcgtttattacggtagtacttggccatgccttttcacccagcgacgagcagctgtcgatactcagcgaaggcgataacctcgccggtagcgccgggctgttcgagctggtgcagaacatgacgccggagcagcagcaggttctgctgcgcgcctcggcggcatcaaccttctcgggtctggtaggtaatgcgatcctcgtcggcggcgtcctgctgctgatccagctggtctccgccggtcatcgcgttagcgccctacgcgccatcggcgcctcggcgccggtgctgcccaagctgctgctgctgatcctgttcaccaccttcctggtgcagatggggatgatgctggtgctggtgcccggcgtgctgctggccatcgtgctggcctttgcgccgatcatgctggtacaggacaaaatgggcatcctcggcgccatgcgcagcagcatgcgcctggcgtgggccaatctgcggctggtggcgccggctattatcggttggctggtggcgaaaaccctgctgttactgtttgcttccagctttgccgccctgacgccaaacgtcggcgcggtggtgattaataccatcagcaacctgatttccgccctgttgctgatctatttatttcgcgtgtatatgcttatccgcagctaa

SEQ ID NO: 212029 - DNA, 540 bp, Klebsiella pneumoniae; identical to SEQ ID NO: 134933

SEQ ID NO: 212030 - DNA, 2184 bp, Klebsiella pneumoniae
atgagatcgccgcaatattctgtgcccacgaccctggcgctggtcatatccagtctcctcgcccctaacgcctttgctgaagaatcagaacaagataccgaaacgatgattgtgcgcagtacggcggaagaggcgcttaagcaacagcccggggtgtcgattatcacggctgaggatattgctaagcagtcgccggtcaacgatctctcagacatcatccgtaaaatgcccggggtgaacttgaccggcaacagcgccagcggcagtcggggcaacaaccgccagattgatatccgcggcatggggccggagaacaccctgatcctgatagatggggtaccggtcacgtcacgtaacgcggttcgctatagctggcgcggcgaacgcgatacccggggcgacagcaactgggtacctgccgaaatggtcgaacggattgaagttctccgcggtccggcagccgcgcgctatggttccggcgcggcgggcggagtggtcaatatcattaccaaacgtccgaccaacacctggcacggttcgctgtctttcttcaccaaccagccggaaaacaacaaagaaggcacgaccaatcgcgctaacttcaatctcagcggcccactggccggcgaggcgctgacgatgcgcctgtatggcaatatcaataaaacggaacccgacgcctgggatattaaccatgcgcaaaacggctcttacgctgcgggacgcgaaggggtccgcaataaagatattaacaccttgctgtcatggaaaatgaccccgcaacagatcctcgatttcagctacgcctatagccgtcaggggaatatctatgctggtgatacccagtacagcaacggcaatcttagcccgagcgggctggtggactccctgtacggccacgaaactaatcgcctctatcgccagtcctggggactcacctacaacggtctatgggattggggccagtccaaagccggtgtttactacgagaaaaccaacaatacccgcctgcaggaaggctctaccggccgcgtcgaaggcatgatcaacagtgaagattatgccaccagccgtctggaatcctggcgtactacctcggaattaaatgtgcctttcttctggctggcggaccagacgctgacgctgggaatggaatggaaccatgatcagcttgacgacccggcatcaatgcaggccactaacagcaacggcgagactatccctgggacctcgggcgaccctacgcaacgcagtaccaaaaacagcgccaccctcaccggtatctatctggaagataatatcgaagccgtgcccggcaccaacctgatccccggcattcgcttcgattatcataatcagtttggcagtaactggagccccagcctcaatctgtctcaggagctcggcgatatgttcacgctgaaggccggtatcgcgcgcgtgtttaaagcgccaaacctctatcaatccagtaaaggctatttgctctccacccgcggcaacggttgtccaaacacgatcgctgaaggcagctgctacctgctgggtaaccctgacctcgacccggagatcagtatcaacaaagagatcggtatcgaatttaaccttaatggttacgctgccggagtcacctggtttcgcaacgattacaaaaacaaaatcgtctccggaacagaggtactgggctatacctccagcggcaataatattttgcaatggcagaacggcggcaaagccgtggtcgaggggctggaaggaaatctgctgatcccggtgctgagagatgtcctcagctggcggaccaatgccacctggatgctcaaatctgaaagtaaagagactggcaacccgctgtcggttatcccgaaatataccgttaacacgatgctcgactggcaggtaaacgacgccctgtctgcgaatgtgaactggacgctttatggccgtcagaagccgcgtcagtatgcggagatccgcaacgaaaccgggacccttgccaccaccgaggttggcgcctattccatcgtgggtattggtactcagtatcagctaaaccgggatattcgcctgaatgccggaataagtaatctatttgataaacaactgtatcgcgaaaatgccggcgcctcgacctacaatgagcctggccgcgcgtattacgccggcgttaccctctccttctga

SEQ ID NO: 212031 - DNA, 366 bp, Klebsiella pneumoniae
atggttttacgcaccctggcaatgccggcggataccaatgccaacggggatatttttggcggctggctgatgtcgcagatggatattggcggcgccattatggccaaagagatcgcccagggtcgcgtggtgaccgtgcgggtggatgggatgacctttttacgcccggtcgccgttggcgacgtggtgtgctgctacgcccgctgcgtgaagcgcggcaacacctcggtgacaatcaatatcgaagtgtgggtgaaaaaagtttcttcagaaccgattggccagcgctacaaggcgacggaagcgctgtttatctacgttgccgttgataatcagggaaaaccacgtcctctgccagcggaataa

SEQ ID NO: 212032 - DNA, 537 bp, Klebsiella pneumoniae
atgacgtaccaacaagctggacgcatagcggttatcaaacgcattttaggatgggttatctttattcccgccgtgctgtcgacgctgatttctgtgctcaaatttatgtatgagcacagtgaaaagaaacccggcattgatgcggtaatgatggattttgcgcacgtgatgattgagatgatgcgctttaacacgccgttcctgaactttttctggtacaactcgccgctgccggattttcaccatagcctgaacatcggcttctggatcatcttcattctggtgttcgtcggcatggccctgcaggcttccggcgcgcgaatggcgcggcaggcgaaatttctccgcgaggggattgaggatcagctgatcctcgaacaggccaaaggcgcagatgggttaacccgcgagcagctcgctgaacgcattgtggtaccgcgccatacgatcctggtgcagtatttcccactgtacgtgctgccggtgatcgtgattgtcatcggttacttcttcttttcgctgctgggctttctgtaa

SEQ ID NO: 212033 - DNA, 669 bp, Klebsiella pneumoniae
atgtcagcgaagcgccgcattgaggccgcgatatttgatatggacgggttgctgattgactcggagccgctctgggatcaggcggaggtcgaggtcatggagagcctgggagtggatacccgtcgccgcgatgaactgcccgacctgctcggtctgcgaatcgacctggtggtggatctgtggtacgcgcagcagccgtggcacggcgtagaccgggcggaagctaccgcgcgcattattcgtcgcgccattgagctggtggaagcctcacgcccgctgctgccgggcgtacgcgaggcagtggccctgtgtaaagctcagggcttaaaggtgggcctggcctcggcctcgccgctgatgatgctggagaaagtgctcgatatgtttgaactgcgcgaccagtttgatgctctcgcctccgcggagcatttaccctggagcaaaccgcacccgcaggtctacctcaactgcgccgctgccctgggagtcgacccgcagcgctgcgtcgcgctggaggattcggtcaacggcatgatcgccagcaaagccgcgcgcatgcggtctatcgtggtgccggaagcggagaacagccgcgacccgcgctttgcgctggcggacgtcaagcttccgtcactgctggcactcactgctgagaacttgctcggctaa

SEQ ID NO: 212034 - DNA, 762 bp, Klebsiella pneumoniae
atggtactgaacgccttcgacctgacgggtaaggtcgccatcgtgaccggttgcgataccggcctgggacagggaatgacgctgggcctggcgcaggccgggtgcgatatcgtcggcatcaaccgtaaaattccccatgatacggccgcccaggtgctggcgctgggccgccgctttcacgccattcaggcggatctcagccaagagaatgatatgagcggtctggtcgaccaggcggtggcagcgatgggccgggtcgatattctggtcaacaacgccggaattatacgccgccatgatgccctgaccttcacggaaagcgactgggacgcggtgatcgacctgaatctcaaagcggttttctttctcagccaggcggtcgccaggcagttcattcgccagggggaaggcgggaaaatcattaacatcgcctcgatgctgtcgtttcagggcgggatccgcgtcccctcctacaccgcctcgaaaagcggcgtgctgggtttgacccgtctgctggccaacgaatgggctggccagggtatcaacgtcaacgccatagcgcccgggtatatggccaccaacaacacccaggcgctgcgcgaagatgaagagcgtaaccaggcgatcctcgagcgcattcccgctggtcgctggggagtgccgaaagacctgcaggggccggtggtgtttctcgcctcatcagcggccgactatattaacggctatacgctggccgtcgatggcggatggctggcgcgctga

SEQ ID NO: 212035 - DNA, 591 bp, Klebsiella pneumoniae; identical to SEQ ID NO: 134939

SEQ ID NO: 212036 - DNA, 1392 bp, Klebsiella pneumoniae
atgaactttccattaatagcgaacgtagtcgtgttcgccgtattactgtttgcgctggggcaaacacgtcataaacagtggagcctggccagaaaagtgctggtcggtctggcgactggcgtggtctttggtctggcgctgcagctaatctacgggtctgacagccaggtgctgaaggattccatccagtggttcaatatcgtcggcaacggttacgtccagctgctgcaaatgattgttatgccgctggtcttcgcctccatccttagcgcggtggcccgcctgcacaatgcctcgcagctggggaaaattagcttcctgagcatcggtactctgttgttcaccaccctgatcgccgccctggttggcgtgctggtgaccaatatgttcggcctcaccgccgagggtctggtccagggcagcgcggagaccgcccgtttgaacgccatccagagcaactatgtggggaaagtagcggatctcagcgtcccgcagctgatcctttccttcgtgccgaagaacccgtttgctgacctgaccggggctaacccaacctccatcatcagcatcgtcattttctcggcgttcctcggcgtcgcagcgcttaagttgctgaaagaggatgtggaaaaaggccagcgcgtgctgaccgcgatcgataccctgcagggctgggtaatgaagctggttcgtctggtcatgcagctgaccccttacggtgtgctggccctgatgaccaaagtggttgccgggtcgaatttgcaggacatcatcaagcttggcggcttcgtggtagcctcgtacattgcgctgggtattatgtttgtcgtccacggcctgctgctggcgattaacggcgtcagcccgctgaagtacttccgtaaagtctggccggtgatcaccttcgcctttaccagccgctccagcgccgcctccattccgctgaacgttgaggcgcaaacccgtcgtctcggcgtaccggagtcgattgccagcttctccgcctcctttggtgccaccatcggccagaacggctgcgccggtatctatccggcaatgttggcggtgatggtcgcgccgaccgtgggcatcaacccgctggatccgatgtggattgccaccctcgtgggcatcgtcaccgtcagctcggcgggcgtcgccggggtgggcggcggcgcgaccttcgccgcgctgatcgtcctgccggcgatgggcctgccggtgaccctggtagccctgctcatctccgtcgaaccgctgatcgatatggggcgtaccgcgctgaacgttaacggctcaatgaccgccgggacgctgaccagccagtggctgcgccagaccgacaagtcgatcttcgatagcgaggaagaagccgaactggcgcatcgctaa

SEQ ID NO: 212037 - DNA, 333 bp, Klebsiella pneumoniae; identical to SEQ ID NO: 134941

SEQ ID NO: 212038 - DNA, 2259 bp, Klebsiella pneumoniae
atgtctgataagcacccgaaccctcaccaacagcaggcaccggtccacgacagcgaggaagcgcagccgggtctcgattcgctggcgccggacgatcgggagtggcgccccacgccgaaacctaccgctccgggcgtcgaacccaccgccccaggcagcctgaaagcgcccgatactcataacagcaaactggattccctggaggcgcaacgcaaagggggggaagattttccgctgaccaccaaccagggcgtgcgcattgctgacgatcagaattcgctgcgcgccggtagccgcggcccaacgctgctggaagattttatcctgcgggagaagatcacccactttgaccacgagcgtattccggagcgtatcgttcatgcccgcggctctgccgcccacggctacttccagccctacaaaagcctggctgcgttgactaaagccgattttctttcgtcagccgataaaatcaccccggtgtttgtacgcttttccaccgtgcagggcggcgcggggtcggcggacaccgtccgcgatattcgcggcttcgctaccaagttttacactgacgaagggatttttgacctggtgggcaacaacacaccggtcttcttcatccaggacgcgatgaagttccccgactttgtccacgccgtgaagcctgaaccccactgggccatcccacaagggcagagcgcccacgatactttctgggactatgtttccctgcagccggaaacgctgcacaacgtgatgtgggcgatgtcggatcgcggcatcccgcgcagctatcgcaccatggaaggcttcgggatccacaccttccgtctgattaatgccgagggcaaagccaccttcgttcgttttcactggaaaccggtcgccggcaaggcgtcgctggtgtgggatgaagcgcagaagctgaccggccgcgaccccgattttcatcgccgcgatctatgggaggccatcgaagccggggactacccggaatttgagcttggcctgcaattgatccccgaagagaatgaatttgcttttgacttcgacctgctcgatcccaccaagctgatccccgaggcgctggtgccggtgcagcgggttggcagaatggtcctcaaccgcaacccggataacttctttgccgaaaatgaacaggcggccttccatcccggacatatcgtcccgggcattgatttcagcaacgatccgctgctgcaggggcgtctcttctcttacaccgatacgcaaattagccgcctgggtgggccgaacttccatgaaatccccatcaaccgtccgacctgcccgtatcataatttccagcgtgacgggatgcaccggatggacattgacaccaatccggccaactacgagcccaactcgattaacgacaactggccgcgcgagacgccgcctgccgccaaacgcggtggctttgagtccctcgccgagcgcgtcgacggcgaaaaaatccgccagcgcagcccttcgttcggcgaatattacgcccagccgcgtctgttctggctgagccagacgccgattgaacagcagcatattatcgatggtttcagcttcgaactcagcaaagtggtccgcacctggatccgcgagcgggtggtcgatcatctggcccacattgatactaagcttgcggaagcggttggggcgaacttaggcatcgaactgagcgacgatcagcgcaacattaccctgcccgccccggtcaatggcgtggagaaagatcccagcctcagcctctacgccgacgccgaaggagatgtgaaaggtcgcgtggtggcagtcctgctcaacgaacgcacctcagcgcaggatctggttcagctcctgcaggcgctgcaggcccagggcgtgcacagcaagctgctctactcgcgaatgggcgaagtcattgccgacgatggttctccgctgccgatcgccggcaccttcgccggttccccgtcgctgacggtggatgcggtggtggtgcccggcggcgacctcagcgccctgagtcagagcggtgacgcgcgctattacctgctggaagcctataaacatctgaagccgatcctgctggcaggggatgcgcggcagctgacgtccgttctgcatgttccgacccagggtgaagagggggtcatcgtcaccgatgcgctcgacacgccagcggcggacaaactgctcgccctgatgacggcccaccgcgtgtggtcgagaagcccgaaaatcgccgctattccggcgtag

SEQ ID NO: 212039 - DNA, 759 bp, Klebsiella pneumoniae
atggaacgcgtattgatcgtcaatgccgacgacttcggcctcagtaaagggcagaactacggcattatcgaggcctgtcgcaacggcgtggtgacatcgaccaccgcgctggtcaacggcgcagccattgaccacgccgcccagctgagccgcagtactccggagctggcggtcggtatgcactttgtactgacgctgggcgagccgctgtcggccatgccgggattaacccgcgatggccggctgggcaaatggatctggcagcaggcggaagaagatatcctgccgctggaagagatcgcccacgagctggcgtgtcagtaccgtcgttttgtcgaactcttcggccacgagccgacgcatatcgacagccatcaccatgtgcatatgttcgcccagatttatcccatcgtcgcggcctttgcccgcgagaagggcattgcgttacgcattgaccgccaggtggcggcgcagagtgggctcgaccagcaggcggcgcgcagcagcgccggcttcagcagcgagttttacggcgaagcggtctctgaggaactgtttctgcagacgctggatgcctccatcgcccgcggggagcgctccctggaggtgatgtgtcatccggcttatgtcgatcggatcattatgggcagcgcctactgctatccgcgactggatgagcttgatgtgctgacatctgcctcgctgaaagcggcggtggccgaccggggttatcgtctgggaacctaccgcgacgtgtaa

SEQ ID NO: 212040 - DNA, 1347 bp, Klebsiella pneumoniae
atgagccagaaattaaaagtagtcactattggcggcggcagcagctataccccggaattactggaaggatttctgaaacgttatcatgaactgccggtaagcgaactgtggttggtagacgtcgaagagggacaggagaagctcgatattatccacgcgctgtgccagcggatggtggaaaaagccggcgtgccgatgaaagtctataaaacgctggatcgccgcgcagcgctgcagggcgcagatttcgtcaccacccagctgcgcgtgggccagctgaaggcgcgtgaaaaagatgagcgcatcccgctgagtcacggctacctgggccaggagaccaacggggcgggcgggttgtttaaaggactgcgcaccatcccggtgattttcgacatcgtgaaagatgtgcaggaaatttgccccgacgcatggatcatcaactttaccaacccggcgggcatggtcaccgaggcggtctatcgccacaccaatttcaaacgctttatcggggtgtgcaacattcctatcggcatgaagatgttcatcaccgacgtgctgcagctgagcccgagcgatgagctgaatatcgacctgtttggtctgaaccacctggtgttcgtccgcgacgtgctggttaacggcgtctcgcgcttcgatgaactgctggacggcgtggcctccggccgtctgaccgcgaactcggtgaaaaacatcttcgacctgccgtttagcgaagggctgatccgctccctgcgcctgatcccatgctcttacctgctctactactttaagccaaaagagatgctggcgattgagatgggcgagtactacaaaggcggtgcgcgcgcccaggtggtgcagaaggtggagaaacagctgttcgagctgtataaaaacccggatcttaacgttaagccgaaggagctggagcagcgcggcggggcctattactctgatgccgcttgcgaagtaatcaatgccatctataacgacaagcagactgagcactatgtgaatatcccgcatcatggtcatgtcgataatatcccggcggactgggcggtagagatgagctgcaccttaggccgcgacggcgcgaagccgacgccgcgcattactcatttcgatgagaaggtgttagggcttatctacaccatcaaggggttcgaagtggcggccagccaggcggcgatcagcggtgagctgaacgatgtcctgttggcgctgaacttaagcccgctgatccattccgatcgtgacgccgaacagctggcgcgggagatgattctggcgcatgaaaaatggctgccgaactttgcggcgacgatcgaaaaactaaaatcgtaa

SEQ ID NO: 212041 - DNA, 825 bp, Klebsiella pneumoniae
atgatgaccaccgagatcagtaccgccagagaacaacagctgttcaacgggaagaactttcatgtggtcatctataacaaaacggaaagcgtgagcgggcttcaccagcatgattactacgaatttaccgtggtgttaaccgggcgctattaccaggagatcaatggcaaacgggtgctgctggagcgcggggatttcgtctttatcccgatgggctcgcaccaccagagcttttacgagttcggggcgacgcgcatccttaacgtcggcatcagcagacgcttctttgagaaacactacctgccgctgctgccgtttggtctggtggcttcgcaagtctacgccgtgcagagcgcttttctcggctacgttgagtcggtcatcgcctcactcaattttcgcgaaacggaatttgacgaatttatcgagctggtctccttttatgtcattaaccgtttacgccactatcgtgaagagccggttgccgacgtgacgccgcaatggttaaaaaataccgtggaagccatgcatgataagctgaaattcggtgaaggcgctcttgaaaatatggttcgcttatccggaaaaacgcaggaatatttaacccgggcgacccagcgctattatggtaaaacgccgatgcagataattaatgatatccgtatcaactttgccaaaaaacagctggaaattaccaattattcggtgacggatattgcgtatgaatcaggttacagcagcccgagcttgtttattaaaacctttaaaaaactgacgtcgtttacgccgagcagttatcgcaaacatttgaccagtattaattaa

SEQ ID NO: 212042 - DNA, 285 bp, Klebsiella pneumoniae
atggggctgattatcaactccggacaagcccgcagcctggcctatgccgcgctgaagcaggcgaagcagggcgactttgccgcagcgaaagcgatgatggagcagtcgcgccaggcgctgagcgaggcgcatcgcgtgcagacccagcttatcgaaagcgacgagggcgaagggaaaatgaaggtcagcctggtgctggtgcatgcccaggaccatctgatgacctccatgctggctcgtgagctggtggccgaattgattgagctgcacgagaaggtacaatag

SEQ ID NO: 212043 - DNA, 1359 bp, Klebsiella pneumoniae
atgagtaaagtgatcgattcgcttgaaaaggtactccttccttttgcagtgaaaataggaaagcagccgcatattaatgcaataaaaaatggatttattaaattaatgccgttgaccctcgccggggccatgtttgtgttaattaacaacgtttttctgagcttcggcgaaggctctttcttttattccatgggcattcgcctggatgcctccaccattgaaaccttaaacggctttaaggctatcggcggaaacgtctataacggcaccctcgggattatgtcgctaatggcgccgttctttatcggctccgcgctggcggaagagcgcaaagttgacccgatggcagctggcctgctggcggtggcggccttcatgaccgtgaccccgtatagcgtgggcgaagcctatgcggtgggcgccaactggttgggcgggcagaacatcatctccgggatgattatcggtctggtcgttgcggaactgttcaccttcgtgatccgtcgcaactgggtgattagactgccggacagcgtgccggggtcggtatcacgctctttctcagcgctgatcccgggcttcttgatcctctccatcttcggcattatctcgtgggccctggcgagctatggcagcaacttccaccagatcatcatggactctatctcgacgccgctggcggcgatgggcagcgtggttggctgggcatacgttatttttaactctctgctgtggttcttcggtgtgcacggttctctggcgcttaccgccctggataacggcatcatgacgccgtgggcgctggaaaacatcgcgctgtacaaccagtacggctctgttgatgcggccatcgaagcgggcaaacagttccacttctgggctaagccgatgctcgactcctacatcctgctgggtggctccggggcgacgctgggtctgattatcgccatctttatcgcttctcgccgcgctgaccatcgtcaggttgctaagctggcgctgccgtcaggcatcttccagattaacgaaccgattctgtttggtctgccgatcatcatgaacccggtgatgttcatcccgttcgtgctggttcagccgattctggcggccattacgctggcggcctacagcctggggattatcccaccggtgaccaacctggcgccgtggactatgccgaccggtttgggagcgttctttaacagtaacggcagcgttgccgccctgctggtggccctgttcaaccttggcgtcgctaccctggtctacctgccgtttgtggtgctgtcgaataaagcgcagaccgttatcgagcaggaagagagcgaagaagacatcgctaacgcactgaaattctga

SEQ ID NO: 212044 - DNA, 321 bp, Klebsiella pneumoniae; identical to SEQ ID NO: 134947

SEQ ID NO: 212045 - DNA, 339 bp, Klebsiella pneumoniae; identical to SEQ ID NO: 134948

SEQ ID NO: 212046 - DNA, 828 bp, Klebsiella pneumoniae
atgacgctacaacaagagattattcaggcgctgggcgcaaagccgcagattgatgtcgcaggcgagatccgccgcagcgtcgatttcctgaagtcatacctgcagacctacccgtttattaaatcgctggtgctgggtatcagcggcggtcaggactccaccctgacgggaaaactgtgccagatagcgataaacgaactgcgtgccgaaaccggcgacagtagcctgcagtttatcgccgtccgtttaccctatggcgtgcaggctgatgagcaggactgccaggacgccatcgcatttatccagcctgaccgggtgttgacagtcaatattaaagctgcggtgctggccagcgaacaggcgctgcgcgaagcaggcatcgaactgagcgacttcgttcgcggaaatgaaaaagcccgtgagcgaatgaaggcccagtacagcatcgccggaatgaccaaaggagttgtggtcggtaccgaccatgcggcggaagcgattaccggctttttcaccaaatatggcgacggcggcaccgacatcaacccaattttccgcctgaacaaacgtcagggcaaacagctgctggcccatctcggctgcccggaacatctgtataagaagctgcccaccgccgacctggaagacgatcgcccctccctgccggatgaagtggccctgggtgtcacctacgagaacatcgacgattatctggaaggcaaaacgctggacccgagcatcgccaaaacgatcgagggctggtatctgaaaaccgaacacaagcgtcggccgccgatcaccgtctttgacgatttctggaaaaaatag

SEQ ID NO: 212047 - DNA, 864 bp, Klebsiella pneumoniae; identical to SEQ ID NO: 134950

SEQ ID NO: 212048 - DNA, 483 bp, Klebsiella pneumoniae; identical to SEQ ID NO: 134951

SEQ ID NO: 212049 - DNA, 966 bp, Klebsiella pneumoniae
gtggaacattttctggcattaaccctggcggggcgattgccccatcactttcacggcgagacggctcattcccgctggcactggctcggggaagggatccttgagctgacgccgcatgcgcgctgcgagcgcgggctggtactttcctgcgccattcatggcaacgaaacggcgccggtggagatagtcgaccagctggtgcagcgactggtccgggaggcgctcccgctgcgctggcggctgctggtgatcgtcggcaacccaccagcgctgcgggcgaataagcgctatctgcacagcgatatgaaccgcatgtttggcgagcgctggcggcagtttccgctcagtgaggagacgcagcgggcgcagcggctggagcaggcggtggcccgcttttatcgcgaccacgatggcccgcgctggcacctcgatctgcataccgcgatccgcgggtcgctacatccgcgcttcggcgtgctcccggcccgcgatacgccgtgggaggaggattttcttcactggctgggcggcgccgggctggaggcactggtgtttcatcgccagcccggcgggaccttcacccacttcagctgcgaacggttcgcggcgctggcctgcacccttgagctgggcaaagctctgccgttgggggaaaacgatctgacgcagtttgccgccgtccagcgggcgctctcccggctgctggtgggggatctggccattgccgacgccccagcgccgctgcgctaccgggtggtacagcagctaacccgccatagtgatgatttccgcttgcatatggcggatcagacgctgaacttcacccccttcgaacccggcacgctgctggcggaggagggcgagaggcggtatgtggtggggcctgagacggagtatgttctgtttcctaacccgacggtggcgaaaggactgcgcgccggcctgatgctggagaaattatcctga

SEQ ID NO: 212050 - DNA, 1326 bp, Klebsiella pneumoniae
atgaccgcccgcgaagtcaactttgacggtctgcccgggctgacccatcactacgccggactctcctttggcaatgaggcttccacccggcatcgctatcgggtgtctaacccgcagctggcggcaaagcaggggctgaaaaaaatgaaagccctcgccgacgctggctacccgcaggcggtgatcccgccgcaggagcgtcccaacgtgccgcttctgcgccagctgggctttagcggcagcgatgagcaggtggtggcccgggtggcgcagcaggagccggatctgctgtcggcggtgagttcggcctcggcgatgtgggtggcgaacgcggcgacggtgtgtccctccgccgattcgctggatggcctggtgcatctgacggtggcgaatctgcaggataaattccaccgcgccagcgaagcaccgactacagaggcgctgctgcaggcgattttccccgaccgcacgcgatttgctatccacccggcgctgcccgcctcggcctggtttggcgacgaaggggcggcgaaccataatcgtctcggcggcgagtatggcgctcccggcgtccagctctttgtctatggccgccgccgggggagcgaggaggcgccgcgtcgctatccggcgcggcaaacccttgaggccagccaggcggtagcgcgcctcaatcaggtcaatccccgccagctgatcttcgcccgccagcatccggcggcgatcgacacgggggtttttcataacgacgtcatcgcggtgagcaaccgtcaggtcctgttctgccatgagcaggcctttgccgaccagaccgcgcttctccagcagctggcgcagcgggtgccgggttttacgccgctggtggttcccgccagccgggtcttggtggcagaggcggttgccacctatctgttcaacagccagctgttgagccgggcggatggcagcatggcgcttatcctgcctcaggaagcgcaggagcatgccggcgtctgggaatacctcaatgagctgctggccggggataaccctatcgccgacctgcgggtgttcgatctgcgcgagagcatggccaacggcggcggtccggcgtgcctgcgcctgcgggtggtgttgacggccgaggagtatcaggcggtcaatccgcacgtcctgatgaacgatacgctgtttgccaccctcaatgactgggtggatcgctactatcgcgatcgtctcacccagaccgacctcgccgacccgcagctgctgcgggaagggcgcgacgcgctggatcggttgacccagatcctgcagctcggttcggtttatccatttcagcaataa

SEQ ID NO: 212051 - DNA, 1479 bp, Klebsiella pneumoniae
atgagtctgtggattaacggcgagtggcggcccggccgtgggccaggtttcagtaaacaggatccggttaacctgaaggttgtctggcagggcgaggcggcggatgccgggcaggttgccgaggcggtggcggctgcccgccaggcgttcccgtcctgggcgcggctgccgtttgccgcccgtcaggcgatcgttgaaaagtttgccgctctgctggaagccagtaaggcggagctgacggcggttatcggcgccgagaccggaaagccgcgctgggaggcggccggggaagtgacggcgatgatcaacaaggtggcgatctcggtgaaggcctaccacgtccgcaccggcgaacagcacagcgacctgcccgacggcgccgccacgctgcgtcaccggccgcacggcgtactggcggtgtttggcccctataactttcccggccatctgccgaacgggcacatcgtgccggcgctgctggcgggcaataccgtggtttttaaacccagcgaactcaccccgcgcagcggcgaagcggtggtgaaactatggcagcaggccggcctgcccgccggggtgctcaacctggtgcagggcggtcgggaaaccggcgaggcgcttagcggccaggcggatatcgacggactgctgtttaccggcagctcaaccaccggttttcatctgcatcgccagctggccgggcagccgcagaagatcctcgcgctggagatgggcggcaataacccgctgatcgtcgacgatccgagggacgtggatgccgcggtgcatctgaccatccagtccgcctttattaccgccggccagcgctgcacctgcgcccgccgtctgctggtccggcgcggcgaggcgggcgatgccttcctctcccggctggtgacggtgagccagcggctgatcccggcggcgtgggacgccgagccgcagccgtttctcggcgggcttatctctgaacaagccgcgcagaaagtgcatcaggcctggctgcagcgggtcgccgctggcgcggtcaccctgctggagccgcggttattgcaggccgggacgtcgctgctaacgccggggattgtcgacatgagcgacgtggccaatgtcgaggatgaagaggtgtttggcccgctgcttggggtctggcgctacgacacgttcgaggaggcgattgccttagccaacgctacccgcttcggcctctcctgtgggttaatctccccggaacgggagaagttcgatcgactgctgcttgaggcgcgggcagggatagttaactggaacaaaccgctgaccggggcggcgagtaccgcgccgttcggcggcaccggggcgtccggtaaccatcgtccgggggcctggtatgccgccgattattgcgcctggccgatggccagccttgaatcgccgaccctgacgctgcccgccagcctgagcccggggctcgactttctggcgggggaggcgtcatga

SEQ ID NO: 212052 - DNA, 1035 bp, Klebsiella pneumoniae
atgatggttattcgaccggtggagccgggcgatttgcccgggctgctgaagctggcagcggagaccggcggcgggctgacctcgctgccggtggatgaagcgaccctcgcggcacggatcgcccgctcgcagcagacctggcgcggcgagctaccgaaaagcgagcagggctatgtctttgtgctggaggagagcgaaagcggcgcggtggtgggcatctgcgcgatcgaggtggcggtggggctcaacgatccctggtataactaccgggtcggcacccaggtccatgcctcgaaggagctcaacgtctatcaggcgctgccgacgctgtttctcagcaacgatcataccggcagcagcgagctgtgcaccctgttcctcgacccgcagtggcgcaaagagggcaatggctatctgctgtcgaaatcacgcttcttatttatggccgcctttcgcgagcgcttcaatgagaaggtggtcgccgagatgcgcggggtgattgacgagcagggctactcgccgttctgggagagcctgggcaaacgctttttcgccatggagttttcccgtgccgactacctgtgcggcaccggacagaaggctttcattgccgccctgatgcccaagcatccgctgtatatcgatttcctttcccctgaggcacaggcggtgatcggcaaggttcatccgcagaccgccccggcccggacggtgctggagaaagaggggttccgctacctgaactacatcgatattttcgacggcggcccgactctggagtgcgacatcgaccgggtgcgggcgatccgcaaaagccgtctggtgactaccgaggcaggtgaaaccccgcccggtgactggccgctgtgcctggtggcgaatgaacagtatcaccagttccgcgctctgctggtgcatgccgatccggatggcgacaccctgaccctcagcgcccgcgaactggatatgctgaagtgtcatgccggcgaccaggtgcgcatggtgcgcctgatccctgaggagaaaactgcatga

SEQ ID NO: 212053 - DNA, 1221 bp, Klebsiella pneumoniae
atgtctcagtcaattacgcgtaaccactttgatgaatggatgatgccggtctacgcgccagcggcgtttattccggtgcggggcgccgggtcacggctgtgggatcagcagggcaaagagtatatcgattttgccggcggcatcgccgtgaacgcgctggggcatgcccatccgcgtctggtgcaagccctgaccgaccaggccggcaagttctggcataccggcaacggctacaccaatgagccgatcctgcgtctggccaaaatgcttatcgatgctaccttcgccgaccgggtcttcttctgtaactccggcgccgaggccaatgaggcagcgctcaagctggcgcgtaaatatgcccacgatcgctttggcagcgagaaaagtggcatcgtcgcctttcagaacgctttccacgggcggacgctgttcaccgtctcggcgggcggtcagccggcctattcccgggatttcgccccgctgccgccgcagatccagcatgccgtatttaacgatctcgagtcggcaaaggccttaatcaatgaccagacctgcgcggtgatcgtcgagccggtgcagggcgaagggggcgtggtgccggccagcgtcgagtttttacgcggcctgcgtcagctttgcgaccagcacaacgccctgctgattttcgatgaagtgcagaccggggtcgggcgcaccggcgagctgtatgcctatatgcactacggcgtgacgcccgatgtgctgaccaccgccaaagcgctgggcggtggtttccctattggcgcgctgctggcgacagaggcctgcgccagcgtgatgaccgtcggcacccacggcaccacctacggcggtaacccgctggccggggcggtggccggcgaactgctgtcgatcgtcaacaccccggaagtgctctccggcgtcagacagcgccatcagtggttttgtgaacgcctgcaggcaattaacgcccgctatggcctgttcaaggagatccgcggcctgggactgctgctcggctgcgtgctaaacgacgcctgggccgggaaggcgaaaaccctcagtaacctggcggcggaagagggggtgatgattctgatcgccggcgccaacgtggtgcgtttcgcgccggcgctgaacgtcagtgaagaagaggtgaacagcgggctggatcgcgtcgagcgggcctgcgcgcgtttcgtggcaggagtctcatcatga

SEQ ID NO: 212054 - DNA, 807 bp, Klebsiella pneumoniae
atgaaattcgtctcttttaatatcaacggcctgcgtgcccgcccacaccaactggccgccatcgtcgaaaaacaccagccggacgtgattggcctgcaggaaaccaaagttcacgacgacatgttccctctcgaagaggttgccaggctcggctataacgtcttttatcacgggcagaaaggccattatggcgtcgcgctgctgaccaaagagacgccgattgccgtccgccgcggtttcccggacgatggcgaagaggctcagcgccgcatcattatggcggagatcccgtcgcccttcggcaacgtcacagtgattaacggctatttccctcagggtgaaagccgcgatcatgaaaccaaattcccggccaaagcggcgttctatcagaatctgcagaactatctggagaccgagctcaacaaagagaatccggtgctgatcatgggcgatatgaacatcagtcctaccgatctggacatcggtatcggtgaagagaaccgcaaacgctggctgcgcaccggcaaatgttccttcctgccggaagaacgggaatggatggaccgcctgctgggctggggcctggtggatacctggcgtcaggctaaccccgacaatcatgagcatttctcgtggtttgattaccgctccaaaggcttcgacgataaccgtgggctgcgcatcgatctgctgctggccagccagcctctggcgcagcgctgcgtggaaaccgggatcgattacgagatccgcgggatggaaaaaccgtccgaccacgcgccggtgtgggccaccttccggccataa

SEQ ID NO: 212055 - DNA, 657 bp, Klebsiella pneumoniae
gtggccacgctggccgttatcagccaccgcgtcggtctccacgatctgctgactcatctgcatctgcttcaggacaccctccgccatcagggcgcctggggatatctggtctatgctgcgctgtttatcattgccaccctgtgtctgatccccggcagcctgctggtgatcgccggcgggatgctcttcggcccgctaacaggctccctgctctcgtttgccgccgccaccctcgcctcttcgctgtcgtttttaatcgcccgctggcttgggcgcgatctgctgcagcgctatgtgggccataccaccgtctttcaggcgattgagcgcggtatcgcccgcagtggctgcgatttcctgatcctcacccgcctggtgccgctctttccctacaatattcagaattacgcctacggcctgacggcgatccgcttctggccctttaccctgatctcggccgtgaccaccctgccgggtctggtcatctattcggtgatggccagcgaactggcccgcgagggggtgaccctcgccttcgcgctaaaactgagcctcgccggcgggctgctgtttgccctggtgcagataggcaaacggtttgcccgcgcccgtcgcgtggcggcgtgcagtgaggaggtgcgccatgacccaacctga

SEQ ID NO: 212056 - DNA, 711 bp, Klebsiella pneumoniae
atgacccaacctgatcgccgtcacctgcgccgcgcccggctggcccttgccgtcgtggtcgccgccgctctggccgcctggctgtggttccctggcgggcgtacctttctgcagcagagtctgacggcgttagcctccctggatccgcagcaggtcagagggtttatcgccgcctgggggccgcaggccgcgctggtctcatttgcgctgatgatcctccaggcgatcgtcgctccgctgccggctttcctgattaccctggcgaacgccgccctgttcggcgccttctggggcggggcgctgtcgtggttcagcgctatggtcggggccgggctctgcttctgcatcgccagagcgctggggcgcgaagtggtggagaaactcaccggccgcgcggtgctgcgcagtgccgacggctatttcacccgctttggcccgcagacgatcctggtctgccgcctgctgccgtttgtcccgtttgacccggtcagctatgccgccggactaacctcgctgcgcttctggccctttatgctggccaccggcgtgggccagctcccggcgactatcgtttattcctgggccgggagtctgctcaccgggggcaccttctggctggccaccgggctttcgctgctttttgccctggcggtggtcatctctatcgccaaaaatatttaccgtgaacgtcataagagatcgtcgccatga

SEQ ID NO: 212057 - DNA, 561 bp, Klebsiella pneumoniae
atgagcttacccccgctggattctgtccccctgatccttcgtccgcaggtgtggctgcaccgccggcattacggccaggtgctgagccccattcgctggtggggtcggatcccgtggctgttttacctggtttcgctgttcgtgggctatattgaacgccgccgctcgccgctggatcctgtgctgcgctcgctggtcagcgcccgcatcgcccagctgtgccactgcgaattctgtatcgatatcaccagcatgatcctcgcggcgcggagcggtagccaggacaagctgctggcggtcgccgactggcgcagcagtacgctgttcagcgaaaaagagcgcctggcgctggcctatgccgaagccgccacccagacgccgccggcgttggatgatgccctgcgtagcgcgatggccgcgcattttgacgcccgggcgctcaccgagctgaccgccctgatcggcctgcaaaatttatcagcgcggttcaatgccgcgatggcgatcccggctcaggggttgtgccagatacccacctcttcctcgcagaataaggagtaa

SEQ ID NO: 212058 - DNA, 1179 bp, Klebsiella pneumoniae
atgcgccgtttgcgtgattacagcctctgtctgtgcctgctgctgctctggccgctggcggttaatgccgacgacagctggcggcagattcagacggaagcccacggacagaccgtctggtttaacgcctggggcggcgacccggccgtcaatcgctatctggcgtgggtcagcgaagaggtcaaacgctattacgcaatcgacctgcgtattgtgcctgtcgccgacgccgccgacgcagtgaaacgcatccagaccgaggcgcaggccggtcgtcgccagggcgggtcagtggatctgctgtggatcaacggcgaaaactttcgcacgcttaaacaggccaacctgctgctcaccggctgggccgaatcgctgcccaactggcgctatgtcgatctgcaaaagccggtacgggaagatttttcagtcgccaccgagggcgcggagtcgccgtggggcagcgcccagctgacgtttatcgcccgccgcgggcaaacgccgcagccgcccaccagcccgcaggcgctgctggccttcgccagagcccatccgggcagcgtaacctacccgcggccgccggacttcaccggtaccgccctgctggagcaactgctgatcgcgctcaccgaccagccagccgccctgcgccagccgccgcagccaacgaccttcgcggcggtcaccgccccgctgtggcgctatctcgatgcgctgcacccggccctgtggcgggcgggcaaggatttcccggcgtcgccggcgcggatggacgccatgctcaaccagggcaccctccgcctgtcgctgacgtttaaccccctgcacgcccggcagaaagccgccagcggcgaattaccgacggacagctacagcttcggctttaccgcggggaccctcggcaacgtccatttcgttaccatcccggctaacgcccgcgctgtcgctggcgccaaagtagtggccaatttcctgctctcccctgaggcgcaattgcgcaaggccgatgccgccgtctggggcgatccgagcgtactggatccgcagcgtctgcctgacggccagcgccaggcgctggcggcagccctgccgcaggatctgccgccggtgcttgccgagcctcacgcggcatgggttgacgcgctggagcaggaatggctgcgccgctacggtacccactga

SEQ ID NO: 212059 - DNA, 1536 bp, Klebsiella pneumoniae
atggctgcgccgctacggtacccactgatcctgctggcctggggggcgatggcggcgatctatctgccgctgctccccgccgccggggaactggtgggcgctgcgcgctccccggccaactggcgggcgctgttcgccgacccgcagctgagccaggcgctggccgccaccctcgtctccacgctgttatccgtcggcggcgcgctgctgatcgccctgaccatcgtcgccgccctctggccttcggcccgctggcggcggctggcttcccgtctgccgctgctgctggcggtgccccatctcgccctggcgacggcggcgctgctgctgttcgccgaagggggttggctctggcagcggctgccgtttctgacgccgccggttgaccggtacggcatcgggcttggcctgacgatggccctgaaagagagcgcctttgtgctgtgggtgatctatggcctgctgggagagaaacgcctcgccgaccaggcgaccgccctgaagagcctcggctacggccgctggcagtgcctgcgttggctggtgctgcccgccctgctgcccgccctcggcatggtgctgctggccaccaccgcctggagcctgtcggcggtagacgtcgccctggtgctggggcccggcaatccgcccaccctcgccgtgctggcgtggcaatggttaagccagggcgatgagctgcagcaggccaaaggggcgctggccagcctgctgctgatggcgatcctcggcgggctggcgctggtcgcctggggcggatggcggctacagcgccagtaccagcccgatctgcgcggtgttcgtcacccgcatcctcatgccctgcccggccgcctgctggcggcgctgctgccgctgagcggtctgctgggcgcgctattgctggcggggctggcgcgctcggcgccgccgcagatggatgctctgggcaacagccttgggctggcgctggcggcctgcgccctcggcgcggctgtctgcctgctgtggctggcctgcggcccggcgcgaggcgatggctgggtctggctaccgctggtcctgccggccctgccgctggccgacggccagtaccggttggcgctgtatgcctggcttgacggtgactggtggaccgtcctgtggggccatctgctgtgggtggtgccctggatgctgtttattttgcgcccggcctggcgccagcgcgatccgcggctgacggttgtcgcccgcacgctcggctggggatccacgcgtattttctggttgctgaccctgccttcgctaactcgcccactgctgaccgccctggcggtgggcttctcagtgagcatcgcgcagtatctgccaacgctatggctgggggctggccgaattccgacgctcaccagccaggcggtggcgctcagcagcggcggcgaggcgcagacgctcgccgctcaggcgctgtggcaattactgctgccggcggtatgctttaccctgaccgctctgctggcctggctggcaggccgctatcgacgaggacttcgctag

SEQ ID NO: 212060 - DNA, 633 bp, Klebsiella pneumoniae
gtgctaaccgtaaaccatctgaccctgagcgtgagacgccagccgctgctgcaggaggtcgccttttcggtagccccgggggaggtgctgacgctgatgggcccctccggtagcgggaaatcaacgctgtttgcctggatgattggcgccctgtccggcgattttcgcgcccgaggcgagctgtggctcaacgaacggcgttgcgatacgctgccgacagagcatcggcgcatcggcattctgtttcaggacccgttactgttcgaccatttcagcgtcgggcaaaatttacagctggcgctgccggagaacgtgcgcggcgaggcgcgaaaaaccgcggtggaggaagcgcttagccgcgccgggctggcgggcttcgccccgcgcgatccggccacgctctccggcgggcagcgggcgcgggtgagcctgctgcgcgccctgctggcgcgccccgaggcattgctgcttgatgagcccttcagccgcctggatgccagcctgcgcgccgggttccgccgctgggtctttgaagaactggcccgccaggccattccggcgatcctggtgacccacgatcgcgaggactgcccgccgacggggcgctgcctggcgatggagcgctggcaatga

SEQ ID NO: 212061 - DNA, 1308 bp, Klebsiella pneumoniae
atgaaacgtgtttctcaattgaccgcactcgccctgctcatggggcttgctgcttccactacctgcgccgctgaaaccatgccagcgctcactctctcccacctgcaacagcagcacggcgtggccatcgacacccggctgagcgcttattacaacggctggccgcagcgcgccaacggcccggaaggccatgagccgcaggccctcaatctttccgcccgctggctcggcgccatgagcgacgatcagctgcgcgcctgggctaagcagcaccagctccagtccgatacccccatcgcgctgtacggcagcccggaggataacgtcagcgtcgcggcgcggctgaaacaaacgggtttcacccggctcagcaccctgagcgatgcgctgagccagaccgaccgtctgcaaaagctgccgcactttgaacagctggtctacccccagtggctgcacgacctacagcaagggaaagcggtcgccgccgccccggcaggcgactggaaagtgtttgaagccgcctggggagcgccgaagctctatctgctgagccatatccctggcgcgggctatatcgataccaatgaggtggagagcgaaccgctgtggaataaagtgtccgacgcgcagctgaaggcgatgctggcgaagcacggcatccggcatgacaccacggtgatcctctatggtcgcgacgtctacgccgcagcgcgggtggcgcagatcatgctgtacgccggggtcaaagacgtgcgcctgcttgacggcggctggcagacctggtccgacgccgggctgccggtagagcgcggtgtgccaccggcgcagcagccggcgcctgatttcggcgcgccgatccccggccagccgcagctgatgctggataccgaacaagcccgcgggctgctgcatcgtcaggacgcctcgctggtcagcgtccgctcgtggccggagtttatcggcaccaccagcggctacagctatatcaatccgaagggcgacatcgctggcgcccgctggggccacgccgggagcgactccacgcacatggaggatttccataacccggacggcaccatgcgcagcgccgacgatatcgctgccctgtggcgccagtggaacattctgccgagccagcaagtggcattctattgcgggaccggctggcgggcctcggaaacctttatgtatgcccgcgccatgggctggccgcacgtcgcggtgtacgacggcggctggtacgaatggagcagcaacccgcacaatccggtggcccgcggagagcgcggcccggaaagcagtcagtaa

SEQ ID NO: 212062 - DNA, 624 bp, Klebsiella pneumoniae
gtgcttgatagccacctgcatccgcgccttaaacccctgctaaacgctgtcgccggcgcccttgaccgccccggcatctcaccggacgggctgacgctggtcggttttgccatcggcgtgctggctctgccctttctggcgctggggtggtatggcgcggcgctggcggccattctccttaaccgcctgctggatggcctggacggcgctctggcgcggcggcgcgggctcacggatgcgggcggctttctcgatattgcgctggattttctcttttacgccctggtgccgttcggctttattctggcggatccgctgaacaatgccctggcgggcggctggctgctgtttgcctttatcggcaccggcagcagctttctcgcttttgccgccctggcggccaggcaccagatcgccaatcccggctacgcccataaatcgctgtactatctcgggggactgacggaggggacggagaccatcctgttgtttgtcctcggctgcctgtttccggcgcatttcgcctggctggcgtggctgtttggcgcgctgtgctggctgacgacggcgacgcgcatctgcagtggctaccagaccttaaagcgggtaacgaccacagcgtaa

SEQ ID NO: 212063 - DNA, 411 bp, Klebsiella pneumoniae
atgctaaaaatgattgatgttgtcgccgccattattgaacaggatggccagattctgctggcgcagcgtccgccccacgccgaccagccggggatgtgggagttcgccggcggcaaagtggagccgggtgaaagccagccgcaggcgctggtccgcgaactgcaggaggagatgggcatcatcgcccgcccggcttgctatatcgctagccatcagcgggaggtctccggccgccggatccatcttcacgcctggtgggtgccgcactttcagggcacgccgctggcccactatcacactcagctgcgctggtgccttcccacagaagcgctggccctcgatctcgccccggccgatattcctctgctgcacgcctttatcgcccagcgccccaccctttccgtccgctga

SEQ ID NO: 212064 - DNA, 1344 bp, Klebsiella pneumoniae
atggatcagacgtgcactctggaaggctttctcacccgcgttcaacagcgcgatcctcatcaaaccgaatttgctcaagccgtccgggaggtgatgaccaccctgtggcctttccttgaggaaaatccgcgctatcgtcagcttgctttgctggaacgtctggtggaaccggagcgcgtgatccagttccgcgtggtgtgggtggacgaccgcaatcaggtccaggtcaaccgcgcgtggcgcgtgcagttcaactcggccatcggcccgtataaaggcgggatgcgttttcacccgtcggttaacctgtcgattctcaaattccttggcttcgagcagaccttcaaaaacgccctgaccactctgccgatgggcggcgggaaaggcggcagcgatttcgatcctaaaggcaagagcgatggcgaagtgatgcgtttctgccaggcgctgatgaccgaactctatcgccaccttggcccggataccgacgtaccggcgggcgatatcggcgtcggcggtcgcgaagtcggctttatggcaggaatgatgcgcaagctctccaacaacagcgcctgcgtcttcaccggtaaaggactctcctttggcggcagcttgatccgtccggaagccactggttacggcctgatctacttcaccgaagcgatgctcaaacgtcacggcctcggcttcgaaggcgctcgcgtggcggtctccggctccggcaacgtcgcgcaatacgccattgagaaagcgatggagcttggcgcgcgggtggtgacggcctccgactccaacggcaccgtcgttgacgaagcgggcttcaccaaagaaaaactgacccgcctgatcgacattaaagagcgtgcccacggccgcgtggccgattacgcccgcgaatttggcctcacctatcttgaaggccagcagccgtggtcagtgccggtggatattgccctgccttgcgcgacccagaacgaactggacgtcgatgccgcccgccagctgattgccaatggcgtcaaggccgtggcggaaggcgccaacatgccgaccaccatcgccgcaaccgacctgttcctggaagctggcgtgctgtttgccccgggcaaagcggccaacgccggcggcgtggcgacttccggtctggagatggcgcagaacgccgcgcgcatgggctggaaagcggaaaaagtggatgcccgcctgcatcacatcatgctggatatccaccacgcttgcgtgcagtacggcggcgaagcgaagcagaccaactacgtgcgcggcgcgaatatcgccggtttcgtgaaggttgcggatgctatgctggcccagggcgtgatttaa

SEQ ID NO: 212065 - DNA, 981 bp, Klebsiella pneumoniae
gtgaaatatattgctatcagccaaccgggcggcccggaggtattgcagatccgcgaaggggagatccccaccatcggggagcatgaggtgctcattgaggtgaaggcggcgggcgtcaaccggccggatattctgcagcgccagggtctgtatccgatgcctgagggcgtcacccccgtgcccggcctcgaggtggcgggcgtggttgttaaggtcggcgcgcaggtcacagcgtttacgcccggcgatcgcgtttgcgcgctgaccaacggcggcggctatgccgaatactgcgccgtgccggcaggccagacgttgccgatcccggcgggcctcagctttagcgaagcggccgccattccggaaaccttcttcaccgtctgggcgaacgtcttccagctgggtaagctgcagcctggcgaaagcattctggtccacggcggcgccagcgggattggcaccaccgcggtcctgctgtgccacgcgctggggatgaccgtctatgccaccgtcggccaggacgaaaaaattgctgcgctacgtccctatgctacggcgattaactacaaaaccgatgattttgccgagaaaatcggccagctgaccaacgatgaaggggtggacgtcattctggatattgttggcggcccttactttaaccgcaaccttgggctactgaaaaaggatggacgactggtcatcatcggctttatgggcgggcgaatcgctcatgaggttgatattcagactctgatgctcaagcgagccaccgtcaccggctcgaccatgcgcggccggacggcggcggagaaacaacagattgccgaggcgctgcgccgccacgtctggccgctgctagaggcagggaaatgcaagccgctgatctacgccagctacccgatggcggagattgccgaggcccatgcctgtctggacagtggtcagcatctggggaaagttgtgatcacgatgacgtcgtga

SEQ ID NO: 212066 - DNA, 1947 bp, Klebsiella pneumoniae
atgcggttgtttattgcagaaaaaccgagtctcggtcgggctatcgccgatgtgttgcctaaaccgcaccgcaaaggcgatggctatattgagtgcggcaacgggcaggtggtcacctggtgtatcggccacctgctggagcaggcgcagccggacatctacgacagccgctatgcccggtggaatctcaacgatctgccgattgtgccggagaaatggcagctgcagccaaagccctcggtcaccaaacagctgaatgtcatcaagcgcctgctcggcgacgccgaggaggttatccacgccggcgacccggacagagaagggcagctgctggtggacgaagtactcgactacctgcagctggcgccggagaagcgtcagcaggtgcagcgctgtctgattaacgatctcaacccgcaggcggtggagcgggcgatcaaccgtctgcgcgccaacagcgagttcgtgccgctctgcgtgtcggcgctggcgcgggcccgcgccgactggctgtacggcatcaatatgacccgcgcctacaccctgctggggcgcaacgccggctatcagggggtgctctcggtggggcgggtgcagaccccggtacttggcctggtggtccgtcgcgatgaagagattgaaaatttcgtcgccaaagatttcttcgacgtgaaggcgcatatcgtcacgccgcaggaggagcgttttgtcgccacctgggtgccgagcgaagcctgcgaaccttaccaggatgaagaagggcgcctgctgcatcgtccgctggccgagcatgtggttaagcgcatcgaaggccagccggcaatcgtgaccggctataacgataagcgcgattccgaacccgcgccgctgccgttctcgctgtcggcgctgcagattgaggcggccaaacgtttcggcttcagcgcgcagaacgtgctggatatctgccagaagctgtacgaaacccacaaactcatcacctatccgcgttcggacagccgctatctgccggaagagcacttcgctggccgccatgcggtgttgaatgcgattgccgtccatgcggcggacctgctgccgcagccggtagtggatccggagatccgcaaccgctgctgggatgataaaaaggtcgacgcgcaccatgcgattatcccaaccgtccgcagcagccaggtgaagctcaccgataacgaagcgaaggtgtacaccctgatcgcccgccagtatctgatgcagttctgccctgacgcagtgttccgcaaatgccagattgatcttgagatcgccaacggcaagtttgtcgccaaggcgcgttttctggccgaggcgggctggcggacgctgcttggcagcaaagagcgcgatgaagagaacgacggcacgccgctgccggtggtggccaaaggcgatgaactgctgtgcgagaggggcgaggtggtggagcgtcagacccagccgccgcgccactttaccgacgccacgctgctgtcggcgatgaccgggattgcccgcttcgtgcaggataaagatctgaagaagatcctccgcgccaccgacggcctcggcacggaagcgacccgcgcagggattatcgagctgctgttcaagcgtggtttcctgagcaaaaaggggcgctatatccactcctcggaggccggcagggcgctcattcattccctgccggagatggccgggcgaccggacatgaccgcccactgggagtcggtgttgacgcagatcagcgagaaacagtgccgctatcaggactttatgcagccgctggtggggacgctgtatcaactgatcgatcaggcgcgcagcacgccggtgcgtcagttccgcggcctggtggcgccgggcggggcgaagaagtcgttcagcaaaggtaaagggaagccgaaaggcaaaaaagcggcagacgataccgcgccgccgccgcagtaa

SEQ ID NO: 212067 - DNA, 1044 bp, Klebsiella pneumoniae
atgagcgagcaagccattcgtttaacgcaatacagccacggagccggttgtggttgtaaaatttccccgaaagtgctggaaactatcctgcatagcgagcaggcgaagtttgtcgacccaaacctgcttgtcggcaacgaaaccagcgatgatgccgccgtttacgatctcggtaatggcacctcgatcgtcagcaccaccgatttctttatgccgattgtcgataacccgttcgactttggccgcatcgccgctaccaacgccatcagcgatattttcgctatgggcgggaaaccgattatggcgattgccatcctcggctggccgatcaacaccctggcgccggaaatcgctcgcgaagtggtggagggcgggcgctttgcctgccagcaggcggggatcgcgctggcgggcggccactccattgacgccccggagccgatcttcggtctggcggtcaccggcgtggtgcccaccgagcgcatcaagaaaaacagcaccgcccaggcgggttgcaaactgtatcttactaaaccgctggggatcggcgtactgaccactgcagagaaaaaatcgctgctcaagccagagcatcaagggttagcgacggagaccatgtgccagatgaacctcgccggcgccgcgtttgccaccatcgacggggtgaaggcgatgaccgacgtcaccggctttggcctgctcggccacctcagcgaggtgtgccgcggggccggcgtgcaggcgcagctgcgctatgccgatatcccaaaactgccgggggtggaggactatatcgccgccggcgcggtgccgggcggcaccgggcgcaactttgccagctacggccatctcatgggcgagatgccgacggagtggcgggatctgctgtgcgatccgcagacctccggcggtctgctgctggcggtgaccccggaggcggaggcggaagttcaggccgccgcggcggagttcggcattaagctggccgccatcggcgagctggtgaccgcccgcggcgggcgacccatgatcgagatccgttga

SEQ ID NO: 212068 - DNA, 747 bp, Klebsiella pneumoniae
atgaaaaagcgtgttcttgccctttgcctggccagtttcttctccgttaacgcctttgctctggttccccccgggaacgatgtcaccaccaagcccgatctctactatctgaccaatgcccaggccatcgacagcctggcgctgttgccaccaccgccggcggtgggcagtatcgcatttttaaacgatcaggcgatgtatgagcaaggacgtctgctgcgcaataccgagcgcgggaagctggcggcagaggatgccaacctcagcgcgggcggcgtggccaacgccttctccagcgcctttggttcgccgatcaccgagaaagacgcgccgcagcttcacaaactgctgaccaatatgattgaagacgccggcgacctggcgacccgcagcgcgaaagagaaatacatgcgcattcgcccgtttgcgttctatggcgtctccacctgcaataccaccgaacaggacaagctggcgaaaaacggctcttacccgtccgggcatacctctatcggctgggccaccgccctggtgctggcggagatcaacccgcagcggcaaaacgaaattttgaagcgcggctatgagctcggcgagagccgggtgatctgcggctatcactggcagagcgatgtcgatgcggcgcgcatcgtcggctccgcggtggtcgctacgctgcacaccaacccggccttccagcagcagttgcagaaagccaaagatgaattcgcgaaaaggcagaagtaa

SEQ ID NO: 212069 - DNA, 1098 bp, Klebsiella pneumoniae
atgaaaggacgttgggcaaaatatgtagcgacgggggcaatgctggccatgctcgccgcctgttcctcaaaaccgaccgaccgcggtcagcaatatagcgatggcaagttcacccagccgttttcactggtaaaccagccggatgccgtcggggcgccgatcaacgccggcgacttctccgagcaggttaatcaaattcgtaacgcctcgccacgcctctataatagccagagcaacgtctataacgcgctgcaggagtggctgcgcgccggcggcgacacccgtacgctgcgccagtttggcatcgacgcctggcagatgcagggcgtcgacaactatggcaacgtccagtttaccggctactacacgccggtggtgcaggcgcgccacacccgtcagggcgaattccagtaccccatttaccgtatgccgccaaagcgcggtaagctgccgtcccgcgccagcatctatgccggcgcgctgagcgataactatgtgctggcgtatagcaactcgttgatggataacttcatcatggacgtgcagggcagcggctatatcgactttggcgatggttcgccgctcaacttctttagctatgccgggaaaaacggctggccctatcgcagcatcggcaaagtgctaatcgaccgcggggaagtgaagaaagaagatatgtcgatgcaggcgatccgcgagtggggtgagaagcacagcgaagcggaagtgcgtgagctgctggagcagaacccgtcgttcgtgttctttaaaccgcagtctttcgcgccggtgaaaggggccagcgctgtgccgctgatcggccgcgcctcggtggcctccgaccggtcgattattccgccaggaaccaccttgctggccgaggtgcctctgctggataataacggcaagtttaacggccagtacgaactgcgcctgatggtcgccctcgacgtcggcggggccatcaaaggtcagcatttcgacatctatcagggcattgggcctgacgcgggccaccgtgccggctggtataaccactacggccgcgtatgggtgctgaaaaacgccccgggcgcggggaatgtttttagcggctaa

SEQ ID NO: 212070 - DNA, 822 bp, Klebsiella pneumoniae
atgtctgttgtaatcagcgatgcctggcgccagcgttttggcggtacggcacgtttatatggtgaaaaagcgctgcaatgttttgccgacgcccacgtctgcgtggtcgggatcggcggggtcggctcctgggcggcggaagcgctggcgcggaccggcatcggggcgatcacccttatcgatatggacgatgtctgcgtcaccaacaccaatcgtcagatccacgccctcagcggcaacgtcgggctggcgaaagcggaggtgatggcggagcgtattcgcctgatcaacccggagtgtcgggtgacggtggtggatgatttcgtgaccccggaaaacgtggcggaatatcttggcgtcggctttagctatgttatcgacgccatcgatagcgtccggccgaaagcggcgcttatcgcctggtgtcgccgctacaaggtgccgctggttactaccggcggggcgggtggtcagattgacccaacgcagatccaggtcgcggacctggcgaagaccatccaggatccgctggcggccaaactgcgagagcggctgaaaagccagtttggggtggtgaaaaacagcaaaggtaagctcggtgtagactgcgtcttctctacggaagcgctggtctacccgcaggcggacggcagcgtctgcgcaatgaagagcacggcggaagggccgaagcggatggactgcgcttccggctttggcgcggcgacgatggtgaccgcgaccttcggcttcgtcgcggtgtcgcatgccctgaagaagatgctggcgaaagcgcagcgtgacgctgcggcttccggaaaatag

SEQ ID NO: 212071 - DNA, 432 bp, Klebsiella pneumoniae
atgacaactctgcaccccttcggcacaaccattaccgacgctacgctgcgccagatcttcgccccgctgaaccagtgggaggataaataccgtcagctgattttattgggcaaaaagctgccgacgctgaccgacgagcgcaaagcgcaggcccatgagattgccggctgtgagaaccgcgtctggctgggctatgaggaggacgccgagggcaggctgcacttctttggcgacagcgaaggaaggattgtgcgcggtctgctggcggtacttttaaccgccgtggaaggaaaaacccgcgccgggatcctggcgcaggatccgctggcgctgttcgacgagctggggctgcgcggccagctcagcgcctcgcgcagccagggcctcagcgccctgagcgaggcggtgctcgccgccgcccgcgaaagttaa

SEQ ID NO: 212072 - DNA, 1206 bp, Klebsiella pneumoniae
atgaacgcattcaacccggcgcactttcgcgcgcagtttccggctctggccgatgccggcgtctatctcgacagcgccgcgacagcgctcaaaccgctggcggtgatcgacgccagcgaccagttttatcgcctgagcgccggcaatgtccatcgcagccagttcgccgccgcccagcggctgaccgagcgctacgaggcggcccgcgatcgcgtggcggcgtggcttaacgccccttccggcaaagatatcgtctggacgcgggggaccaccgaggccatcaatatggtggcgcaaagctacgtccggccgcgcctgcagcctggcgatgaaattatcgttagcgaagccgagcatcatgccaacctcgtgccctggctgatggtggccgggcagaccggcgccagagtggtcaagctgccgcttggcgccgaccgcctgccggatatcgccagcctcagcgcgctgattaccccgcgcagccgggtgctggccatcggtcagatgtccaacgtcaccggcggctgcccggacctggcgcaggctatccgccttgctcacgccgccgggatggtggtgatggtcgatggcgcccagggagcggtgcatttccccgctgacgtgcaggcgctggatatcgatttttacgccttttccggccataagctgtatggcccgaccgggatcggcgccctgtacggcaaaagcgagctgctggcagcgatgtcgccctggctcggcggcgggaaaatgatcgccgaggtcagctttgacggctttacgccgcagccggccccctatggcctcgaggccggtacgccgaatgtcgccggggttatcggcctcagcgccgcgctggagtggctggcgcagagcgatatcggccaggcggaaaactggagccgcagtctggcgagcctggcggaagaggaactggcgaaacggccgggcttccgctctttccgctgccagcagtcaagcctgctggcctttgaatttgaggatattcatcacagcgatctggtgacgctgctggcggagtccggcattgccctgcgcgccgggcaacactgcgcccagccgctgctggcggccttaggggtcagcggcaccctgcgggcctctttcgccccctacaatacccaagacgatgttgcggcgctggtccacgcggtggatcgcgccctggaaattctggtggattaa

SEQ ID NO: 212073 - DNA, 231 bp, Klebsiella pneumoniae; identical to SEQ ID NO: 136056

SEQ ID NO: 212074 - DNA, 825 bp, Klebsiella pneumoniae
gtgacgcaggccgcagtcagccatcaaatcaagtctctcgaggattttctgggccttaagctgttccgtcggcgcaatcgttcgctgctgttaacggaagaagggcagagctattttcaggatattaaagagattttttcgcaactgacggaagcgacgcgtaaactgcaggcgcgcagcgccaaaggggcattaacggtcagtttattgccaagtttcgccattcagtggctggtgccaagactcacaagctttaactcagcttatccgggaatcgacgtcaggatccaggcggtggaccgtcaggaggataagctggcggacgatgtcgatgtggcgattttttacggccgcggcaactggccgggcctgcgtgtggaaaaattgtacgccgagtatctgctgccggtctgttccccgctcttgctcaccggcgacaaagcattgaaaacgcctgccgatctggcgcaacataccctgcttcacgatgcgtcccgccgcgactggcaaacttatacccgtcagcttggtctaagccatattaatgtgcagcaggggccgattttcagccatagcgcgatggtgctgcaggcggccattcacgggcagggcgtggcgctggccaacaacgtcatggcgcagtccgaaattgaagccggtcgtctggtgtgtccgtttaatgatgttctggtcagtaagaatgcgttttaccttgtttgccatgacagtcaggcagaactgggtaaaatagccgctttccggcagtggatcctggcgaaagcggcaagtgaacaagaaaaattccgctttcgttatgaacaataa

SEQ ID NO: 212075 - DNA, 396 bp, Klebsiella pneumoniae; identical to SEQ ID NO: 136058

SEQ ID NO: 212076 - DNA, 1101 bp, Klebsiella pneumoniae
atgaataaggttgtcctctattgtcgccctgggtttgagaaagagtgcgcagcagaaattaccgataaggcagcccgccttgaggtgtttggttttgcccgggtcaaagaagactctggctatgtaatttttgaaggttatcagcaggacgacggcgagaagctggtgcgcgatctgccgttcagctcgctaattttcgcccgacagatgtttgtggtcggcgaactgctgcgcgacctgccgccggaggatcgcataaccccgatcgtcggcatgctgcagggcgtggtggagaaggggggcgagctgcgtgtggaagtggcggataccaacgaaagcaaagagctgatgaagttctgccgcaagtttacggtgccgttacgcgcggcgctgcgcgaggcgggcgtgctgaccaactatgaaacaccaaagcgaccggtggtgcatgtgttctttatcgcacccggctgctgctataccggctactcatacagcaacaacaactcaccgttctatatgggcattccgcggctgaagtttccgtccgacgccccgagccgttccaccctcaagctggaagaggcgttccacgtctttattccggcggacgagtgggacgagcgtctggcgaacggcatgtatgccgtcgatctcggcgcctgcccgggcggctggacctatcagctggtgaagcgcaacatgtgggtctcttcggtcgataacggcccgatggcccagagcctgatggataccggccaggtgacctggctgcgcgaagacggtttccgctatcgtccgaaccgcaacaacatctcgtggatggtctgcgatatggtggagaaaccggcgaaggtggcggcgctgatggcgcagtggctggtcaacggctggtgccgggagaccatcttcaacctcaagctgccgatgaaaaagcgctatgaagaggtgtcgcagaatctggcctatattcaggcccagctggacgagcacggcgttaacgcccagatccaggcgcgtcagctgtatcacgatcgtgaagaggtgaccgttcacgtgcgccgcctgtgggccgccgtcggcggacgtcgcgacgagcgttaa

SEQ ID NO: 212077 - DNA, 711 bp, Klebsiella pneumoniae
atgaaagcagcccgccagcaggcgatcgtcgatctcctgatcacccacagcatcctgaccaccgaaacgttgtcaaaacagctcaacgtcagcagggaaactattcgccgcgatctgagcgagctgcaggcgcagggcaaagtgctgcgtaaccacggccgggccaaagtgatccaccagcgcagccaggacagcggcgatcctttccacatgcgcctgaaaagccattacgcgcataaagccgacatcgcccgcgaagcgctggcctggattgacgaagggatggtgatcgccctcgatgccagctccacctgctggtatctcgcccgccagctgccggaccgcccgctgcacgtctttaccaacagccagcccatctgccaggagctggccaaacgcgaccagatcacgctcacctgctccggcggcactctgcagcggaaatatggctgctacgtgaacccggcgctgatttcccagctgaaatcgctggagatcgatctgtttattttttcctgcgaaggcatcgacccgcagggcgcgctgtgggactccaatgcgttcaatgccgacttcaaatcgatcctgcttaagcgggcggcgcagtcgctgctgctgatcgacaaaagcaagttcaaccgctccggcgaggcgaggattggtcatctggatgacgtgacgcatattgtgtcggatgcgccgcagccttaa

SEQ ID NO: 212078 - DNA, 423 bp, Klebsiella pneumoniae
atgctcaaaaccatttccccgctgatatcgccggaactgctgaaagtgctggccgaaatgggccatggggatgaaatcattttttccgatgcccatttcccggcgcacagcatggggccgcaggtgatccgcgccgatggcctgcgagtcagcgatctgctgcaggcgattatcccgctgttcgaattagacagctatgcgccgccggtggtgatgatggccgccgtcgaaggcgatgcgctcgacccgacggtggaacagcgctatcggcaggcgctatcggcgcaggccccctgcccggatatcgtgcggattgaccgctttgccttctacgaccgggcgcaaaaagcctttgcgatcgttatcacaggagagtgcgctaagtacggaaatatccttttaaaaaaaggagtcacgccgtaa

SEQ ID NO: 212079 - DNA, 1419 bp, Klebsiella pneumoniae
atgaagcaagacgttatcctggtcctcgactgcggcgccacgaacgtgcgggcgatggccgtggatcgacaagggaacattatcgcccgcgccgcaacggcgaacgccagcgacatcgcggcggaaaaaagcgactggcaccagtggtcgctggaggccattatgcagcgctttgccgactgctgtcggcagatccatgaccagctggcctcctgcacggtgcgcggcatcaccgtcacgacctttggcgtcgatggcgcgttggtggatgagcagggcgccctgctgtatccgatcatcagctggaaatgcccgcgcaccgcggcggtgatggagaaaatcagccagtatatgcccgcgcgccagctgcagcggatagccggcgtcggcgcgtttgcgttcaacaccctgtataagctggtgtggctgaaagagaaccacccgcagctgctggcgcaggcccatgcctggctgtttatttcatcgctgatcaaccatcggctgaccggggagttcaccaccgacctcaccatggcgggcaccagccagatgctcgatctccggcagcgcgatttcagcgcgccgatcctgcaggcgaccggcctgccgcgccgcctgttcccgcggctggttgaagcaggccagccgatcggcgccctgctgccggaggccgctgcgctgctgggcctccccgtcgggatcccggttatctcggccgggcatgacacccagttcgctctgtttggcgccggcgccgggcaggatgagccggtgctctcctccgggacctgggagatcctgatggtgcgcagcgcgcaggtcgacacctcgctgctctgtgactacagcggctccacctgcgagctggacagccagccgggccgctataacccggggatgcagtggctggcctccggcgtgctcgagtgggtgcgcaaactgctgtggagcgctgacaccccatggcagacgctgattgacgaagcgcaggcgatcccgcccggcgcccagggcgtcaggatgcagtgcgacctgctcgccagccagcacgccggctggcagggcgtcacgctcaacaccacccgcggccatttttaccgcgccgcgctggaggggttaagcgatcagctggcgcagcatctgcaaaccctggaaaaaatcggcggcttcagggcgaaagagctgctgctggtgggcggcggcagccgcaacgcgctatggaaccagatcaaggccaaccgactcgggataccgatcaaagtcctcgacgatgccgaaaccaccgtggccggcgcggcgatgtttggctggtatggcgtgggcgagttctcttcgccagaacaggccagagcgcaggtcgcgtaccgctaccgctatttctggccgcaaactgaacctgaactgatagaggaagcctga

SEQ ID NO: 212080 - DNA, 1776 bp, Klebsiella pneumoniae
atgaaaaaaatcagcttaccgaagatcggtattcgtccggtaatcgatggtcgtcgcatgggggtccgcgagtcactggaagcgcaaaccatgaacatggcgaaagccaccgccgcgcttatcagcgagaaactgcgccacgcctgcggcgcccgggtggagtgcgtgattgccgatacctgcatcgccggcatggccgagtcggccgcctgtgaagagaaattcagcagccagaacgtcggcgtcaccatcaccgtcaccccctgctggtgctacggcagcgaaaccatcgacatggatccgctgcgcccgaaggccatctggggctttaacggcaccgagcgtccgggggcggtctatctggccgcggcgctggcggcccatagccagaaagggatcccggcgttctccatctacggacatgacgtgcaggatgccgatgacacgtcgatcccagcggatgtcgaagaaaagctgttgcgcttcgctcgcgccggcctggctgtcgccagtatgaaagggaaaagctatctgtcgctgggcggcgtctcaatgggcatcgccggatctatcgtcgaccacaacttttttgagtcctggctcggcatgaaggtgcaggctgtcgacatgacggagctgcgccggcgaatcgatcaaaaaatctatgatgaaaccgagctggagatggcgctggcgtgggcggataaacacttccgctacggcgaagatcagaacgctgagcagtataagcgcaatgaaacgcagagccgcgcggtgctgaaagagagcctgctgatggcgatgtgcatccgcgacatgatgcagggcaacccgaagctcgcagaaaaagggctggtggaggagtcgctgggctacaacgccatcgccgccggtttccagggtcagcgccactggaccgatcaataccccaatggcgataccgccgaagcgctgctcaacagctcttttgactggaacggggtgcgcgaaccgtttgtcgtcgctaccgaaaacgacagcctcaacggcgtggccatgctgatgggccatcagctcaccggcaccgcccaggtgtttgccgacgtacgcacctactggtcgccggatgccgttgaacgggtcaccgggcagccgctcaccgggcgggcggagcacggcatcattcacctgattaactccggctctgcggcgctggacggctcctgccagcagcgcgacgcgcagggcaatccgacgatgaaaccccactgggagattgagcagagcgaggcggatgcctgcctcgcggcgaccgaatggtgcccggcgatccacgaatacttccgcggcggcggcttctcttcccgcttcctgaccgaaggcggcgtgccgttcaccatgacccgggtgaacatcatcaaaggtctggggccggtgctgcaaattgccgaaggctggagcgtagcgctgcccaaagcgatgcacgaccagctcgacgcccgcaccaactccacctggcccaccacctggtttgccccacgcctgaccggcaagggcccgttcagcgatgtgtactcggtgatggccaactggggcgccaaccacggcgtgctgaccatcggccacgttggcgcagatttcattaccctcgccgccatgctgcgcattccggtctgcatgcacaacgtggaagaggcgaaaatctatcgcccttccgcctgggccgcgcacggcatggatatcgagggccaggactaccgcgcctgccagaactacgggccgctgtataagcgttaa

SEQ ID NO: 212081 - DNA, 1311 bp, Klebsiella pneumoniae
atgggaaacacaacgataccaacgcaaagttaccgcgccatggagagcgggcagagtaagagctacattattcctttcgctctgctgtgctccctcttttttctgtgggcggtggcaaataatctgaatgatattttattaccgcaatttcaacaggcctttaccctgactaacttccaggccggattaattcaatcggccttttactttggctattttattattcccatccccgccgggatgttgatgaaaaaattcagctacaaagccggcatccttacggggctgtttttatatgcctgcggcgccgcgctgttctggcctgccgccgaagtgatgaactacactttattcctgattggattatttattatcgctgccgggcttggctgtctggaaaccgcggccaacccgtttgtcaccgtcctcggtccggaaagcggcggtcacttccgccttaatctggcccagacctttaactcattcggcgccattattgccgtggtatttggccagagtcttattttgtctaacgtcccgcatcagccgcaggaggtgctggataaaatgacgccggaacagctcagcgcctggaagcacagtctggtcctgtcggtacaaaccccctatatgattatcgtggccattgtcctgctggtcgccctgctgatcgtctgcacccgcttcccctccctgcaaagcgatgaccacagcgacagcgcgcagagcacttttttcgcctcgctgacgcgcctgatgcgcatccgccactggcgctgggcggtactggcccagttctgctacgtcggcgcgcaaaccgcctgctggagctacctgattcgctacgctatcgaagagatcccgggcatgacggccggtttcgccgccaactacctgaccgccaccatggtctgcttctttatcggccgttttaccggcacctggcttatccgccgcttcgcgccgcacaacgtgctcgctatctatgcgtttatcgccatgctgctctgtttgctctccgccttcagcggcggccacgtcggtttgctggccctgaccctgtgcagcgcctttatgtccattcagtacccgaccatcttctcgctggggattaagcatctgggccaggacaccaaatatggctcgtcatttatcgtcatgaccattatcggcggcgggatcgttaccccggtgatgggctttgtcagcgacgccgccggcaatatcccgaccgccgaactggtcccggcgctgtgcttcgccatcatctttatttttgcccgtttccgttcacaagcggcgacgaactaa

SEQ ID NO: 212082 - DNA, 648 bp, Klebsiella pneumoniae
atggaaagaaacagactggcccggcagattatcgatacctgcctggaaatgacccgcctggggttaaatcaggggaccgccggcaatgtcagcgtgcgctatcagggaggaatgctgatcacccctaccggtatcccatatgaaaagctgacggaagacaagatcgtctttattgatgccgacggccagcatgagcagggaaaactgccctccagcgaatggcgttttcatcaggcggcctaccagacgcgacccgatgcccaggcggtggtccacaatcacgctgtccattgtacggcggtgtcgatcctcaaccggcccatcccggccattcactatatgatcgccgcggccggcgggaattcgatcccctgcgcgccctatgccaccttcggcacccgcgaactgtctgagcatgtcgcggtggcgctgaagcaccgcaaagccacgctgctgcagcatcacggcctgatcgcctgcgaggccagcctggagaaagcgctctggctggcgcatgaagtggaggtcctggcccagctctacctcagtacgctggcgattaccgacccggtcccggtgctggatgacgaggcgatcgccatcgtgctggagaagttcaaaacctacggattacgcattgaagagtga

SEQ ID NO: 212083 - DNA, 1149 bp, Klebsiella pneumoniae
atggcaaacagaatgatcctcaatgaaacggcatggtttggccggggggcgataaacgcattaaccgatgaagcggtgcggcgcggttatcgtaaagcattgatcgtcactgacagcactctcgcccgctgcggcgtggcggcgaaagtcaccgacaaactggatgccgccgggctggcatgggatatattcagcgacgtgatccctaacccgaccatcgccgtggtccagcaggggcggcaggcctttcaacgcagcggggcggattacctgatcgccatcggcggcggttcgccgcaggatacctgtaaggcgatcggtattattcagcgtaacccggaattcgccgatgtccgtagcctcgaggggctgtcgcccacccgtcagcccagcgtgccgatcttcgcggtgccgaccaccgcgggtaccgcggcggaggtgacgattaactatgtcatcactgatgaagaacagcggcgcaaattcgtctgtgtcgacccgcacgatattccgcaggtggcctttatcgatgccgatatgatggacgctatgccgccggcgctgaaggcggctaccggcgtggacgccctgacgcatgctatcgaagggtacctcactcgcggcgcctgggctttgaccgatgctctgcacctcaaggccatcgagatcatcgccggcgcgctgcgcggctcggttgccggcgacgccggcgcgggggaagctatggcgctcggccagtatgtggcggggatgggattttccaacgtcgggctcgggctggtgcacggcatggcgcatccgctcggcgctttttacaacacgccgcacggcgtggcgaatgccatcctgctgccgcacgtgatgcgctttaatgctgaggcgaccggggaaaaatatcgcgacatcgcccgggcgatgggcgtcagggtggaagcgttaagcctgaccgccgcgcgcgaggcggcagtagaggcggtctgccagcttaaccgcgatgtcggtattcccggccatctgcgcgaggtgggcgtcaggaaagaggatattccggcgctggcccaggcggcgctggcggatgtgtgtaccggcggcaacccgcgcgaggcgagcctggcggatatcgtcgggttatatcaggctgcctggtga

SEQ ID NO: 212084 - DNA, 756 bp, Klebsiella pneumoniae
gtggctgttcatctgttaatcgtcgacgcgttaaatctaatccgccgcatccacgcggtgcagggttcaccctgcgtcgatacctgcctgcatgccctggagcagctgattgtccacagtcagcccacccacgctgtggcggtgttcgatgatgaggatcgcgcccacggctggcgccaccagcgcctgccggagtacaaagccggccgcgcgccgatgccggagacgctggtcgccgagatgccggcgctgcgggccgccttcgaacagcgggggatccgctgctgggcctcgccgggcagcgaagcggacgatctcgccgccaccctagcggtaaaggtggcccaggcgggccatcaggccaccatcgtctccaccgacaaaggctactgccagctgctgtcgcccaccatccgcatccgcgactactttcagaagcgctggctggacgcccccttcatcgccagcgagttcggcgtcaccccggagcagctggcggattactgggggctggcggggatcagcagctcgaaggtgccgggcgtggcgggcattggacccaaaagcgccgcccagctgctgaacgagtttcaggacctggaggggctgtacgcccgtctggccgaggtcccggagaagtggcgcaaaaagctggccgcgcatcaggagatggccttcacctgccgggaggtggcccgcctgcagaccgacctccagctggacggcaatctgcagcagctgcggctgacgcgctga

SEQ ID NO: 212085 - DNA, 1944 bp, Klebsiella pneumoniae
atgctgaacccagaatccccttccaccgctcccgcgctgatcgacccggcgtcgaaggccttccagagcctgctggacaaactcgcgccaacggaggcgaccgtgctgatcgtgggcgaaaccggcaccggcaaggaggtggtggcccgctatctccatcatcacagcgcccgtcgccagcagccgtttctggccgttaactgcggcgcgctgaccgagagcctcgccgaagctgaactgttcggccatgagaaaggcgccttcaccggcgcgcagcagggacagcccggctggtttgaagccgcggaaggggggacgctgctgctggacgagatcggcgaattaagcctgccgctgcaggtcaagctgctgcgagtgctgcaggagcgtgaaattacccgcgtcggctcacgcaaagcgattaaagtgaatgtccgggtgattgccgccacccacgttgacctggcccaggcgatccgcgagcgccgctttcgcgaggatctctactatcgactgaatatcgcggtggtgccgctgccgccgctgcgccagcgtcggcaggatatcccgctgctggcgcaccactttttatcactctacgcccggcgcctcgggcggccaaccctgcgtctggcgccggaatcactggcccggctgatggactattcgtggccgggcaatattcgcgagctggaaaacaccctgcacaacgcggtgctgctcagtaaagaagaggagatcagtcctgcccagctgcgcctggcgacgctcaacgacgccccggggccggcgagcgatcatgagctggacgactttattcgccaccagctggcgcttcccggcgagccgctgtggcagcgagtgaccagcgccctgattcgccacgccatggcacattgcgacgataaccagagccaggcggccgagctgttggggatcagccggcataccttgcgcacccagctcgctaacctcgggctgatcaaaagccgccgccgcccgcctgcgccgccgcgggcgttcgccaacgcagccggggccgatcgcgaactgcgcattggctaccagcgcttcggcagcctcgggatcctgaaagcccgtcagagcctggaaaccgccttcgccagcctcggcgtcaacgtgctgtggagtgagtttcctgccggaccgcagctcctccacgccctcgcctgcaacgagatcgacttcggcaccaccggagaagcgccgccggtgtttgcccaggccagcaatagcgaactgatgtacgtggcgtgggagccgccggcgccgcgcagcgtggcgatggtcgtcccgcaggagagcgacattcgccagctcagcgatctgcgcggtaaacgcatcgccctcaataaagggtcgaatgtccactggctgctgctgcagatcctcgaggacgccggcctgggtctgaacgatgtgcgggtggtctataccccgccgaaatatccgctgaccgccagcgactatctggcggttgacgcctggatgatgtgggatccgctgctcagcgacgccgaacacaccggcgagctgcgggtggtcgccagcggcgaaggccgggtcaacaaccatcagttttatctttcgcgacgggactacctcgctcagcatggcgatatcatgcgccgcctgctgacggagctgacccacaccgggcagtttatcgactcgcatcgcggcgaagcggcccgcttactctcggcagagctggggatcgacgcccggtcgctgagcatggccctcgcccgccgcagccatcgcccgcggccgatggatctgtcggtgatccgcgcccagcagaccatcgccgatcgcttttacgccctcgggcttatcgccaaaccggtcccggtgcgcgaagcggtgtggtacggcgaacccgcgccggacgtcatcagaccgctgatggcggtcagttag

SEQ ID NO: 212086 - DNA, 1173 bp, Klebsiella pneumoniae
atgacgcagcaagctcccgacaagatcaatgtcttctggttcttacctacccacggcgatggccgttatctgggtaccaccgagggtggacgcccggtcgatttaccttatctgcagcaggtggcgctggcagccgacagcctgggctactacggcgtgctgatccccaccggtaaaagctgtgaagattcgtggctggtggcctcggcgctggcgccgttgacccgccgtctgcgctatctggtggcggtcaggccgggcctgcagccgccaaccctggcggcgcggatggcggccaccctcgaccgtttatcggaaggtcggctgctgatcaacgtcgttaccggcggcgacccggtggaaaacaaaggcgacggtatcttcctcagccacagcgagcgctatcaggtgacccgcgaatttcttgatgtttacacccgcctgctgcgcggggaaaaagtagattatcacggcgagcatattcacgtggaaggcgctgaggtgttgttcccgccggtgcaggagaatggcccgccgctctatttcggcggctcttctgatgcggccattgatgtggcggccgagcagatcgacagctatctgacgtggggcgaacccccggaactggtggcggagaagctggcggtggtgcgcgagcgcgccgcggcccgcggacgcaccctgcagtacggcattcgtctgcacgtcattgtgcgcgaaacggaagaagaggcatgggccgccgccgaccggctgatcgcccatcttgacgacgataccattgcccaggcgcaaaagatcttcgcccgcatggactcggccggccaggcgcggatgagcgccctgcatcagggatcgcgcgataatctgcgcattgcgcccaatctgtgggccggcgtcggactggtgcgcggcggcgcgggtaccgcgctggtaggtaatccgcagcaggtagcggaacgcatccgcgaatatcaggcgctcggcatcagcaactttatcttctccggctacccacatctggaagaagcgcaccgctttgctgagctggtgatgcctctgttgccgctggaaaacggggcctcgtcgaaggcgcgtagcgtgaacaccggtccgtttggcgaaaccatcggcggcgataagcgcccggtgcgccaggtcagcgccagctga

SEQ ID NO: 212087 - DNA, 1398 bp, Klebsiella pneumoniae
atgagtgcagaaccgcatatcgtgattatcggcggcggctttagcggcgcggcggtggcgattgagctgctgcgcctggcgccgaacggggtgcgcgtgacgctgctggagccgcgccagtcccccggggccggggtggcctactccaccgcggagccgacgcaccggattaacgttccggccgctcgcatgcagctggccggcgacgaagagggcgccttcgatcattggtaccgccatcagcctgcctttaccgtcgatgtgcaggcgctgcgcccggacggttccgtctaccctcagcgcggccagtttggtcgctatgtggcgcagcgttttgccgacgccgcggcgtccagcggcggacggcttcgccacctgcgcgatcgggcgctcgcttttcatcaggggatggtgaccaccgacggcggcctgcagcttaaggccgatctgctggtgctggcgatcagtcatccaccgccttcgctgccgacgcaggccgaagcctggcgtcatcatccggcgctgattgccaacccgtggcagcccggcgcgctcgatgccatcgccccgcacgcccgggtggcggtgatgggcaccggattaaccatggccgatacggtcgcgacgctggaccggctgggccaccgcggcagtatcgtcgccttttcgcgccatggcctgctgtcgcgcggcaaccttagcggcgcaggggcaacctggcctggcgactatcagcagggcagcctgcgccagcgcctgcgccagatccgcctcgacgtcgcgtatgcggcgcagcagggcctgagctggcaggtggtgctggatgcggttcgtcagcaggggcaacggatctggcaggcgctcagcgtcgccgatcgccagcgttttctgcgccatctgcgccattactgggatgtccaccgctaccgcgtggcgccgcaggtcgccgaggtgctggaggcgcgccagcgcacgggcagtctgcaggtgcaggcggccaggctactgtcgataagcggtgaaggcgaaacgctgcgtctgacgctggcgcggcgcggcggcggcgtgcagacgctgagcgtcgatcacctgatcctgaccaccggacccgcacaccgcgccctgaccgacagccagccatttttacaggacctcgcccgccgcggcctgattcgcgccgatgccctcggcatgggcctggaggtggacagccgttcccgggcagtggctgagccgcacgttgaggcgctgccggtgctggtggccggtccggccgcccgcgggcgttttggcgaactgatgggcctgccgcaggtagccgaccatgccgctgacgtggcggcgcaagcgttactcacgctcgggatcccgcaggactcccgatgtcctgcgtactga

SEQ ID NO: 212088 - DNA, 1407 bp, Klebsiella pneumoniae
atgtcatcacaacgtgaaattcgtcttaacgctttcgatatgaactgcgtcggccatcagtcgccgggcctgtgggcgcatccccgggatcgctcctggcagtataaagatctggagtactgggtggatctggcgcggctgctggagcgcggcaagttcgacgggctgtttatcgccgacgtgctggggatctatgacgtgctgaacggcagcggcgatgcggcgatccgccaggcgacgcaggttccggtcaacgatccgctggctctgatcaccccaatggcgctggtgacggagcatctgggcttcggcctgaccgcctcgctgtcgtttgagcatccttaccccttcgctcgtcgtctgtctacgctcgatcatctgaccaaagggcgggtgggctggaatatcgtcacctcctatctggagagcggggcgcgcaatatcggccagcagacccagaccgaccatgacacccgctatgactatgccgatgagtatttgcaggtgatctacaaactgctggagggaagctgggaggacggggcagtgctgcgcgacagagagcggaagatcttcagcgatccgcggaaaatccatcccattaaccatcagggacagttcttttccgtgccggggatccacctctgcgagccatccccgcagcgcacgccggtgctgtatcaggcgggggcgtccagccgcggcaaacagttcgccgccggccatgccgaatgcgtcttcgtcgcagcgccgtcgaaggtgctgctgaagaagacggtggcggatattcgccgccgggcagctgaggcggggcgcgatccgcacagcatcctgatcttcaacctgcagacggtgattgtcggcgacaccgaccgcgaggcacaggcgaagtggcaggaatataagcagtacgtcagctatgaaggcgcgctggcgctgctctccggctggacggggatcgatttcggccagtatcagccggatcaggtgctgaagtatctgcacaccaacgccattcagtcggcggtggaggccttttcgaccgctgatccgaaccgccagtggacggtgcaggccctggccgattgggcggggatcggcggcttcggtccgctggtggttggcagcgcgcaaaccgtggcggacgaactgcagtcctgggtcgaagagacggacgtcgatggctttaacctcgcctatgccgtcactcacgaaaccttccgcgatgtcgtcgagctgctggtgcctgagctgcaaaagcgcggcgtctttaagcaagagtaccgcgaggggaccctgcgcgaaaaactgttcggcggcggcccgcgtctggccgcgcctcacccgggcgccagctaccgccgcgatgcgcgcacggcggcatcggtagaggagaaggtgacatga

SEQ ID NO: 212089 - DNA, 1023 bp, Klebsiella pneumoniae
atgatcgctattgatgacctgcataaaagttaccgcacggcggatggccggctcagcgcggtgctgaaagggctgtcgctgcaggtgcctgagcgctccatcaccgcggtggtggggccgagcggcgccggtaaatcaaccctggcgcgctgcatcagcctgctggagcaaccggacagcggcagcattcgtatcaatggcaaggatctgtcggcgctgtccggcgaggcgctgcgccgggaacggcgggcgattggcaccgttttccagtcttcggcgctgttgagccgcaggaccgcctgggagaatgtcgccctgccgctggcgtggcttggtgtggtggagcgcgatatcaaggcgcgggttggcgagctgctggagagcgtcggcctgagccacaaagcggatgcctggccggcccagctctcaggcggccagcgccagcggatcggcattgcccgcgcgctggcgctgcgcccgtccgttctgctggcggatgaagccacctccggcctcgatcctcaggccacggcctcggtgctggctctgctcaagcggctgcgtgatgagtaccagctggcgatcgtcctgattacccatgaaatggacgcggtgcgcacggcggcggatgcggtggcggagatccgcgacgggacgatcgtccagtacgggcggatcgaagatctgctggcgcgtcccgattctctgctcggccagcagctgttgccgctgacgccggcggcagctacccacagcgatctgctgctgcgtctgagctaccgctgggatgtgccggtggccaccgactggatcagccgcctgagccagcagtgggcgctgcagatcgatctccttggcggtcacgtcgaggtgattaatggtcggctggccggtcgcctgcaggccggagtgcgctttcagggcgaacgcctgtcgcccgcgcgactgcagggcctgctggcgcagctcggcataacggcggagatcctcgacagcgcgccgttgctcagggaggcggtatga

SEQ ID NO: 212090 - DNA, 699 bp, Klebsiella pneumoniae
atgaaaccgacagtcatcagtcaggataccccctggggcgaaatcccttcgctgctgctccccgcctatggcgaaacctggctgatggtggccattgtgatgctgtttgtcgtcacgctgggaggactggtgggggtggtgttgtttaacgcctcgccgcggggcttatttccgcacgcactgctgtaccggctgctgaactgggtggtcaatatgggacgttcgctgccgtttctggtgctgatggccgccattatcccgttcacttactggctgaccggcaccacgattggcatacccgccgcggtcgtgccgatgatcgccgccggcgtcccgttctttggccgtctggtggagaacgcgctgcgcgagttgccggcggaggtcaccgcggtgggggtcgtctgcggcgggtcgcgctggcaaatcattgccagcgcgcagctcagtgaagccatgcccgcgctggtggcggcggtgacgctaaacctggtctcgatgatcgagtattcggctatcgccgggaccatcggcgccggcggcatcggctacctggccgtggtgtacggctatcagcgcttcgacaaccacatcatgatcgcgacgatcgttgccctgatcgccacgatccagttgattcaatttttgggtgaccgtctggtcaaccgtttacgccacacgcaggggaaccttgtatga

SEQ ID NO: 212091 - DNA, 879 bp, Klebsiella pneumoniae
atgacaacagagcaatttgagttacgtaaagcgcggcgctggccctggctggcggcgctggcggtgattatcctgctcgccatcgccttctggtggtggcggggacatacccaaagccagcaggtggtcttcggcagcacgttaaaaattcactacgagccggcgatggccggcgagcagcggatcattgagtatattaatcagcatattgcgcccgattacggtctgaaactggaggcggtgggggtgcaggatccggtccaggctgaccgcgcggtagcggaaggtcagtatgccgggacgatctatcagcatcagtggtggcttaaacaggtggtggacgctaacggctttgcgctgtcgaccacggtgccggtgttccagtgggcgtttggcatctattccgaccgctactcgtcggtacaggcgttgcccaacggcgcgaccattgtcgtgcctgacgatggcgccaatcaggggcaggccctgtggctgctccagcgcattgggttgatctcgctcgacccggcggtggagccgcgcacggcgaagctgaaaaatattgtcggtaacccgcatcagtttgtctttaaagagctggatctgctgaccatgccgcgggcgttaaattcggtggatgccgccatcggctatgtctcgcaatttgacgccgggaaagtgccgcgtgagaaaggcatattattcccgccggcgccgcgcacctttgcttcgcaattagtgattggtacaccgtatttatcgcaggaaaatatcgtcaaattaaaacaggctttttctgatccgcggatccagacgtggttaaaaaccaccgatgacccgctggtaaaagacgtattagttccagtgtccgcggaataa

SEQ ID NO: 212092 - DNA, 1422 bp, Klebsiella pneumoniae
atgagtacattaccagtggataatcccggtatcgcttcggtaccggtcagtagcgtcggggatgtggcgcggctaattaattccggcaaggaacaagcgaaatatgcgcggatgattgtcttcctcgcgctggggggcgtttttctcgacgcatatgacttaaccacgctctcctacggtattgatgacgttgtacgtgaatttcagctctcaccgctgctgaccggcctggtgacttcgtccattatggtcgggactatcgtcggcaatattatcggcggctggctgaccgataaatatggtcgctattcggtttttatggccgatatgttctttttcgtgatttcggctatcgccgccgggctggcgccgaacgtctgggtgttgattggcgcccgcttcctgatgggcatcggcgttggcatcgacctgccggtagcgatgtcctatctggccgagttttcccgctttgccggcaaaggcaacaaagcggctcgcctcgcggcgtggtgcccgatgtggtacgccgcctcaaccgtctgctttctcattatcttcggcctctatttcctgctgccgcaggagcatcttgactggctgtggcgcgcctccctgctgttcggcgccgtgccggcactgctgattattgccgtccgcagtcgatttatgaatgaatccccgctgtgggcggcgaaccagggcgatctgacctctgcagtgcgtattttacgcgactcctgggggatccatgcccatgaggtcccggcggcgaagcccgcgccagcgccgaaagtgagcttccgcgtgctgttcgaaaaaccctaccgcgagcggactatcgtcgccggggtgatgaatatctgtatctccttcgagtacacggcgattgcctttttcctgccgtcaattcttgcccagttcctcggggctggcgtcttcgaaactatttcggcatcgctggggctgaacgccctgtttgcttttaccggtgggctgctcggtatgcatctggcgtggaaatatccttcgcgtcatgtggcgatagccggcttcgccctgcagtttgtggcgctgattgtgctggcgctggtggggcaaccgcacgcgacggcaggtatcgtgctggctatcgcgatgctggggctgtggctgttcgccgaagggtttggcccgggggcgcagctgatgatctacccggcgctctcctatcctactgccattcgcgccaccggggtcggtttcagccgggcactctccgggatcggcagcgcgctggcgttgtttattctgccgctgctgcaggcctccctcggcacgcagatgttctgggtggtctcgcttgccgccattattcccattttcttcctgctggcggtccgtcatgaaccgacgcgagaagatatcgacgcacttcatgaataa

SEQ ID NO: 212093 - DNA, 1224 bp, Klebsiella pneumoniae
atgaccctgctttctactggcaccgattatgacgcgctggcggccgccttccgcccgatattcacccgtatcgcccagggcgctgcggagcgcgaacagcagcgcattctgcccgatgagccgatccgctggctgaaagaagcgggcttcggcacgctgcgtatcccgcgcgagaagggcggctggggcgcttcgctgccgcagctcagtgcgctgctgatcgagctggcgcaagcggactctaacctgccgcaggccctgcgcgcgcactttgcctttgtggaagatcagctgaatcagccggattccgccgggcgcgaccgctggtttcgtcgcttcctcgacggtgagctggtgggcagcggctggacggagatcggcgcggttaagctgggagaggtgaacaccagagtgacgccgacagagggcggctggcgactcgacggcgagaagttttacagcaccggcgcgctgtacgccgactggatcgatgtgtttgcccggcgcagtgataccgccagcgatgtgatagccctggtcagcacccagcagaccggcgtggtgcgggaagatgactgggatggctttggccagcggttgaccggcagcgggaccacccgctttaccggcgctcgggtggaaaccgaacatgtctatgattttgcccagcgctttcgctatcagaccgccttctaccagcatgtgctgctggcgaccctcgcgggcattggcctggcggttgagcgggatgccgcgcagggcgtcaaacatcgttcccggatgtacagccacggcaacgccgccgtgccgcgcgatgacgcccaggttctgcaggtcgttgggcagatcagcagctgggcatgggcgacccgggccgcggtcctgcaggccgcggaatcgctgcagcaggcctatgtggcgcacgtcagcgacgacgaagcattgattgcccggcgtaaccagctggcggaagtggaagcggcgcaggcgcaggtgatcgccagcgactggatcccgcgggcggcgacggagctgtttaatgccctcggggcgtcggatacgcgaactcgccttgcgctggatcgccactggcgcaatgcgcggacggttgcctcgcataatccggtgatttataaggcacgtaatatcggtaactggctggtgaacggtgaagcgcccacctttatctggcagataggcaatggtgagaaaacggcggggtaa

SEQ ID NO: 212094 - DNA, 942 bp, Klebsiella pneumoniae; identical to SEQ ID NO: 136204

SEQ ID NO: 212095 - DNA, 1368 bp, Klebsiella pneumoniae
atgatcagcgtattcgatatctttaaaatcggcattggcccttccagctcccataccgttggaccgatgaaagcgggcaaacaattcactgacgacctgatcgcgcgcggcctgctggccgaggtgagcaaagtcgtcgtcgacgtctacggctccctctccctgaccggtaaaggccaccataccgatatcgcgattatcatgggactcgccggcaacctgccggacaccgtcgacatcgacgccattccgggctttattcaggatgttaatacccatggccgcctgatgctggccaacggtcagcacgaagtggacttcccggtggatcagtgcatgaatttccatgccgacaacctgtcgctgcatgagaacggcatgcgtatcaccgccctggccggcgacaaggtgctctacagccagacgtattactctatcggcggcggctttatcgttgatgaggagcacttcggccagactaccgaggcgccggttgccgttccttacccttacaaaaacgccgccgacctgcagcgtcactgccgtgaaaccgggctgtcgctctccggcctgatgatgcagaacgaactggcgctgcacagcaaagaagcccttgagcaacacttcgccgcggtgtgggaagtgatgagcgccggtatcgagcgcggcatcaccaccgaaggcgtcctgccgggcaaactgcgcgtcccgcgccgcgccgccgcgctgcgccgtatgctggtgagccaggacaccaccaacagcgatccgatggcggtggtcgactggatcaatatgttcgccctggcggtgaacgaagagaacgccgccggcggccgggtggtgaccgcgccaaccaacggcgcctgcggtatcgtgccggcggtgctggcctactatgacaagtttatccgcaaggtgaacagcaactccctggcccgctatatgctggtcgccagcgcgattggttcgctgtataagatgaacgcctccatctccggcgccgaagtcggctgccagggtgaagtgggggtcgcctgctcgatggcggcggccggtctggcggaactgctgggcggcagcccgggtcaggtgtgcatcgcggcagagatcgctatggagcataacctcggcctgacctgcgacccggtcgccggccaggtgcaggtgccgtgcatcgaacgcaacgctatcgctgccgtgaaagcggtcaacgccgcgcgaatggcgctgcgccggaccagcgagccgcgcgtgtgtctcgataaagtgatcgagaccatgtacgaaaccggcaaagacatgaacgccaagtaccgggaaacctcccgcggtggtctggcgatgaagattgttgcctgcgattaa

SEQ ID NO: 212096 - DNA, 1290 bp, Klebsiella pneumoniae
atggaaaccactcaaaccagcaccatcgtttcgggcgaaacccgcagcggatggcgtaaaaccgacaccatgtggatgctgggcctgtacggtacagcgattggcgcgggcgtcttgttcctgccgatcaacgccggcgttggcggcatgatccccctgatcatcatggcgattctggccttcccgatgactttcttcgcccaccgcggcatgacccgcttcgtgctctccgggaaaaacccgggcgaagacatcaccgaagtagtggaagaacacttcggcgtaggcgcaggtaagctgattaccctgctttatttcttcgctatctacccgatcctgctggtttacagcgtggcgatcactaacaccgtcgaaaccttcatggcgcatcagctgcacatgacgccgccgccgcgcgccattctgtcgctgatcctgatcgtcggcatgatgaccattgtgcgtttcggcgagcagatgatcgttaaggcaatgagtgtgctggtgttcccgttcgttatcgcgctgatggtgctggctctgtatctgatcccgcagtggaacggcgcggcgctggagacgctctccctgagcggcgcttccgttaccggcaacggcctgctgatgaccctgtggctggcgatcccggtgatggtcttctccttcaaccactcgccgatcatctcttccttcgcggtagccaaacgtgaagagtacggcgaaggcgctgagaagaaatgctccagtatcctcgctcgcgcccacatcatgatggtgctgaccgtgatgttcttcgtcttcagctgcgttctgagcctctctccggcagacctggcggcggcgaaagagcagaacatctcgattctgtcttacctggcgaaccactttaacgcgccaatcattgcctggatggcaccgatcatcgcgatgatcgccatcaccaaatccttccttggccactatctgggcgctcgcgaaggctttaacggcatggtgattaaatccctgcgcagtaaaggcaaatcgattgaaatcaacaaactgaacaagctgaccgcgctgttcatgctgatcaccacctggattgtggcaaccctgaacccgagcatcctcggtatgatcgagacccttggcggcccgattatcgcgatgatcctgttcctgatgccgatgtatgcgattcagaaagtcccggcgatgcgtaaatacagcggccatatcagcaacgtcttcgtggtgattatgggcctgattgccatctccgcgatcttctactctctgttcagctaa

SEQ ID NO: 212097 - DNA, 1368 bp, Klebsiella pneumoniae
ttgattacacatgttagcccgcttggttcaatggatatgctgtcgcagctggaagtggatatgcttaagcgcaccgccagcagcgacctgtaccaactctttcgcaactgctcgcttgctgtgctcaattcggggagcctgaccgataacagcaaggagctcctgtcccgtttcgaaaatttcgagattaacgtgctgcggcgcgaacgcggcgtgaagctggaactgatcaacccgccggaagacgccttcgttgacgggcggattatccgctccctgcaggccaacctgttcgccgtgctgcgcgatatcctgtttgtttacggccagatccacaataccgttcgcttcccgaacctcgatctcgaaagttcggttcatatcactaacctggtgttctcgatcctgcgcaacgcccgcgcgctgcacgtcggcgaggcgccgaacatgatcgtctgctggggcggccactccatcaacgaaaacgaatatctctacgcccgccgcgtcggtacgcagctgggcctgcgggaactgaatatctgcaccggctgcgggcctggcgcaatggaggcgccgatgaaaggcgccgctgtcggccatgcgcagcagcgctacaaagacagccgctttatcggcatgaccgaaccatccattatcgctgcggaaccaccgaacccgctggtcaatgaactgatcatcatgccggatatcgaaaagcgtctggaggccttcgtacgtatcgcccacgggatcattattttcccgggcggcgtcggcactgccgaagagctgctctacctgctgggtattctgatgcatcccgacaacaaagcgcaggtgctgccgctgatcctcaccgggccgaaggagagcgccgactacttccgtgtactggacgagtttatcacccataccctgggcgaatcggcccgtcgccactaccggatcatcattgacgaccccgcggaagtggcgcggcagatgaaaaaagcgatgccgctggtgaaagagagccgtcgcgagaccgatgacgcctatagctttaactggtcgattcgcatctcgccggacctgcagatgccgtttgatccgacccacgagaacatggccaacctcaaactctccccggatcagccggtggaagtgctggccgccgacctgcgtcgtgccttctccgggattgtcgcggggaacgtcaaagaggtgggcatccaggccattgagcagtacggcccttacaaactgcacggcgatccggagatgatgcgccgtatggacgatctgctgcagggcttcgtcgcccagcaccgcatgaagcttccgggcggcaccgcctatattccttgctacgaaatcatcgcctga

SEQ ID NO: 212098 - DNA, 846 bp, Klebsiella pneumoniae
atgtcttcttacgataataagcaggcgctggccggcctgacgctcggtaaatcaaccgattaccgcgatacctatgacgcctcgctgctgcagggcgtgccgcgcagtttaaaccgcgacccgctgggcctgcatgccgataatctgccgtttcacggcgccgatatctggacgctgtacgaactctcctggctgaacggcaaaggtctgccgcaggtagctgtcggccacgtcgagctgcccgataccagcctcaatctggtggagtcgaaaagctttaagctctatctcaacagctttaaccagacccgtttcgccagctggcaggacgttgcagagaccctgactcgcgatctcagcgcctgcgcgcaggggaaggtgaaggtatcgctctaccgcctggatgaactggaaggccagccgattgcccgcctgcacggcacctgcatcgacgatcaggatatcgagatcgataactatcagttcagcgccgattacctgcagggcgccgccagcggcaaaatcgtggaggagacgctggtcagccacctgctgaagtctaattgccttatcactcatcagccggactggggctcggtgcagatccagtatcggggggcgaaaatcgaccgcgagcagctcctgcgctatctggtttcgttccgccaccataacgaattccatgagcagtgcgtcgaacgtatctttaacgatattctccgtttctgccagccggaatcgctttccgtttacgcccgctatacgcgacgcggcggtctggatatcaacccctggcgcagcaatggcgacttttcccccgccaccggccgcctcgcccgtcaataa

SEQ ID NO: 212099 - DNA, 546 bp, Klebsiella pneumoniae
gtggaccatcagacagcagaagcgctacgcgcttttacccaacgatattgcgccgtctggcagcagcagcgccacagcctgccgcgcagtgaagagctttacggcgtcccgtcgccttgcgttgtcgacacccagggcgaggccgttttctggcagccgcagccgttttcgctggcgcaaaatatcagcgcggttgaacgcgccctcgacattgtggtacaacagccgcttcattcttattataccactcagtttgccggcgatatgtccggccggtttgccggcgaaaccttgacgctgctgcagacctggagtgaagaggatttccagcgggtgcaggaaaatttaatcgggcacctggtggtgcagaagcggttgaagctgtcgccgacgctgttcatcgccaccctcgagagtgaactggatgtgatatccgtctgtaatctcagcggcgaggtagtcaaagagaccctcggcaccgccaaacgcattacgctttctccctcacttgcgggtttcctcaaccaccttgagccagttctgtaa

SEQ ID NO: 212100 - DNA, 330 bp, Klebsiella pneumoniae
atgactcttcacgatagcgtgcgcgatcgcctgcgcgccattgaagccctgctgcgcgaaacggagcactggcaggagacggcgccggacagcagcgccttcgccagcgataagccgttttgcctggataccctggagccgctggagtggctgcagtgggtcctgatcccgcgtatgcaccagctgctggagagcggccagccgctgccgcaaaattttgccgttgcgccttattacgaaatggctctggatcaggcccacccggtccgcgaatccatgctggcggaacttctgctgttagacgcgctgtttgccggtgagcaggcctga

SEQ ID NO: 212101 - DNA, 795 bp, Klebsiella pneumoniae
atgctggagattatctaccaggacgactggctggtggcggtcaacaaaccctcgggctggctggtgcatcgcagctggctcgatcgcgacgagaaagtggtggtgatgcagaccgtgcgcgaccagatcggtcagcacgtttttaccgctcatcgtctcgaccggcccacctccggcgtgctgctgatgggattgtcgagcgaggcgggccggctgctggcgcaacagttcgagcagcaccagatccggaagcgctaccatgcgatcgtccgcggctggctgatggaagaggcgctgctggattacccgctggtagaggagctggatagaatcgccgataagttcgcccgcgaagataaagggccgcagccagcggtaacccactaccgcggtctggcgacagtggagatgccagtggcgactgggcgctatcccacctcgcgctatgggctggtggaactggagccgaaaaccggccgcaagcaccagctgcgccgtcatctggcccacctccgtcatccgatcctcggcgacagcaagcacggcgatctgcggcaaaaccgcagcgccgcggaacatttcggctgtcaccgcctgatgctgcacgccagcgagctgtcgttaacccatccttttaccggcgagccgctgaccctgcgcgccggttttgacgacgtctggatgcgcgcgctgtcgcagtttggctggcgcgggcttctcccgctaaatgaaagggttgagtttgccgacgacagcggtcaggatgaagagaataaggtcaatccagggagataa

SEQ ID NO: 212102 - DNA, 444 bp, Klebsiella pneumoniae
atggcggaagtcggaatttttgtcggcaccatgtacggcaactcgctgctggtcgcggaagaagcggaagcgatcctcagcggactgggacacaaggctaccgtgtatgaggatccgcaggtcaacgactgggaatcctacacgggtaagtatgtgctggtggtcacctccaccaccgggcagggcgacctgccggacagcatcgtcccgctgtatgagggcatcaaagatatgtatcagcctcacctgcggtacggcattatcgcgctcggcgacagcacctatgccaacttttgcggcggcggcctgaagttcgatcagctgctgcaggagcagggcgcgaagcgcatcggcgagatgctgaagattgacgccagcgaagacccggagccggagagcgtctccaatccgtgggttgagcagtgggccaccctgctcgcataa

SEQ ID NO: 212103 - DNA, 1353 bp, Klebsiella pneumoniae
atgagttcattaagtcaggcggcgacggcggctgaaaagcgcaccaacgcccgctactggatagtggtgatgctgtttatcgtcacctcttttaactatggcgaccgggcgacgctgtcgatcgccggttcggaaatggccagggatatcggccttgatccggtggggatggggtatgtgttctccgccttctcatgggcttatgtcatcggccagatcccgggcggctggctgctcgaccgcttcggctcgaagcgcgtctatttctggtcgatcttcatctggtcgatgtttaccctgctgcagggcttcgtcgatatcttcagcggctttggcattatcgttgcgctgtttaccctgcgcttcctcgtcggccttgccgagtcgccgtcattccccggcaacagccggatcgtcgccgcctggttcccggcgcaggagagggggacagcggtatcgatttttaactccgcccagtactttgccaccgttattttcgcgccgatcatgggctggctgacgcatgaggtgggttggtcgcatgtgttcttctttatgggcgggctggggattgtgatcagctttgtgtggctgaaagtgatccacgatccgaacaaccacccgggcgtgaaccagaaagagctggactatatcgccgaaggcggggcgctgatcaacatggatcagaagagcagcgcgcagaaagtgccgtttagcgtcaaaatggggcagatcaagcaactgatcggctcgcggatgatgatcggcatctatatcggtcagtactgcatcaacgccttaacctacttctttatcacctggttcccggtttatctggtgcaggcgcgcggcatgtcgatcctcaaagccggctttgtcgcctccattccggcggtgtgcggctttgtcggcggggtgctgggcggggtgatctccgactggttaatgcgccgcaccggctcgctgaacattgcgcgcaaaacgccgattgtgctggggatgctgctctccatgaccatgctgatgtgtaactatgtcaacgtggagtggatggtgatcggctttatggcaatggccttcttcggcaaagggatcggcgccctcggctgggcggtgatggcggataccgcgccgaaagagattagcggtctctccggcggtctgttcaatatgttcggcaatatctccggcatcgtcaccccaatcgccatcggctatatcgtcggcaccaccggctcgttcaacggcgcgctgatctacgtcggtatccatgccctggtggcggtgctgagctatctggtgctggtgggcgatatcaaacgtatcgaactgaaacctgtagcgggacgttaa

SEQ ID NO: 212104 - DNA, 1341 bp, Klebsiella pneumoniae
atgactactcaatccagcccgattatcacagagatgaaggtcattccggtggccgggcacgacagcatgctgctgaacatcggcggagcgcataacgcctggtttacccgcaatatcgtggtgttaaccgataacgccggccataccggcgtcggcgaagcgcccggcggagaggtcatctaccagacgctgctggcggcgatcccgcaggtggtgggccaggaggtcgcccgactcaatcgcgtggtgcagcaggtgcacaaaggcaatcaggcggcggatttcgacaccttcggcaaaggggcgtggaccttcgaactgaaggttaacgcggtggcggcgctggaagcggcgctgctcgacctgctcggccaggtgcttaatgtgccggtctgcgagctgctgggcccgggtaagcagcgtgatgccgtcaccgtgctgggctacctgttctatatcggcgatcggcagaaaaccgaccttggttatctggaccatacgccgggcgatcacgaatggtaccgcctgcgccaccagcaggcgttgagcagcgaggcgatagtgcgtctggcggaagccgcccaggatcgctacggtttcaaagactttaagctcaaaggcggcgtgctgcccggcgagcaggagattgacaccgcgcgggcgctgaaaaagcgtttcccggatgcgcgcatcaccgtcgaccctaacggcgcctggctgctggatgaggccatcgcgctgtgtaaagggctgcaggatgttctgacctacgccgaagatccgtgcggcgccgagcagggtttctccggccgggaggtgatggccgagttccgccgcgccaccgggctgccggtcgccaccaatatgatagccactaactggcgcgaaatgggccatgcggtgatgctcaacgccgtcgatatcccgctggcggacccgcacttctggacgctctccggcgcggtgcgggtggcgcagctgtgcgacgactgggggctcacctggggctgccattccaacaaccactttgatatttccctggcgatgtttacccacgtcggcgccgccgcgccgggcaaccccaccgccatcgatacccactggatctggcaggagggcgacgcgcgcctgaccaaaaatccgctgcagattattaacggcagcattgccgtgccagacgcgccgggactcggcgtggaacttgactgggagcaggtgcgcagagcccatgaggcctataaagcgctgccgggcggcgcgcgcaacgacgcgggcccgatgcagtacctgatccccggctggacattcgaccgcaaacgtcccgttttcggccgccactaa

SEQ ID NO: 212105 - DNA, 1341 bp, Klebsiella pneumoniae
atgacgactttctcttcaacgcccgttgtcaccaccatgcaggtgatcccggttgccggccatgacagcatgctgatgaacctgagcggcgcgcacgccccgtacttcacccgcaatatcgtaattatcaaagataacgccggccataccggcgtcggtgaaatcccgggcggtgaaaaaattcgccagaccctggaggatgccattccgctggtggtgggcaaaacgctgggcgagtataaaaacgtgctgggcgcggtgcgcaatcagtttgccgaccgcgacgccgggggccgcggcctgcagacctttgacctgcgcaccaccattcacgtggtgaccggcatcgaagcggcactgctggatctgctgggccagcaccttggggtcaacgtcgcctcgctgctaggcgatggccagcagcgcagcgaagtcgaaatgctgggctatctgttctttgtcggtaatcgccatgcgacgccgctggcctatcagagccagccggatgagcagtgcgagtggtatcgcctgcgccatgaagaggcgatgacgccggatgcggtggtccgcctggcggaagcggcgtatgaaaaatatggtttcaacgactttaagctgaagggcggcgtgctggccggttttgaagaagccgaagcgatcagcgccctggcgaagcgcttcccgaatgctcgcgtcactctcgacccgaatggcgcctggctgcttgaggaggccattcagattggtaaacagctgaagggcgtgctggcctatgcggaagatccgtgcggcgccgaacagggcttctccggccgcgaagtgatggccgagttccgccgcgcgacgggcctgccgaccgccaccaatatgatcgccaccgactggcggcagatgggccatacgctgtcgctacaatcggtggatatcccgctggcggacccgcacttctggaccatgcaggggtcggtgcgtgtggcgcagatgtgccatgagttcggcctgacctggggttcgcactctaataatcacttcgacgtgtcgctggcgatgttcacccacgtcgcggcagcggcgccgggcaagatcaccgctatcgatacccactggatctggcaggagggcaaccagcgtctgaccaaacaaccttttgaaatcaaaggcggcatggtgcaggtaccgagtaccccgggcctgggggttgagctggatatggaccgcgtgatgcaggcaaatgagctatataagaaacatggtcttggcgcccgcgacgatgcgatggcgatgcagtatctgatcccgggctggacctttgacaacaagcgtccatgcatggtgcgctaa

SEQ ID NO: 212106 - DNA, 1140 bp, Klebsiella pneumoniae
atgaaaatagtgatcgcaccggattcctggaaggagagcctgagcgcgctggaagtggccagtgcgatagagcaaggctttcgcgagatttatcctgacgccgagtacgtcaagctgccggttgccgatggtggggaagggacggtggaagccatggtggcggcgaccggcgggcttctggttccgctgacggtcaccgggccgctgggcgagccggttgaggcattttacgggctgtccggcgatcgccagtgcgcctttatcgaaatggcggcggccagcggcctggagagcgtcccgccggcgcagcgtaacccgctgctgaccacttcctggggtaccggggagcttatccgccatgcgctggacgccggggtaagacagatcattattggtattggcggcagtgcgaccaatgacggcggcgccgggatggcgcaggcgctgggggcgaaactgctgaccgccgagggccagcaaattgcctccgggggcggcgcgctggagacgctggcgcgaatcgatctcagcgaactcgattcgcggctggcagattgccggattgacgttgcctgcgacgtcaccaacccgttgaccggcccgcagggcgccagcgcggtgttcggcccgcaaaaaggggcgacggcgcagatgatcgaccggctcgatagcggcctacggcactatgcccggattatcgcccgcgatttagatatcgacgtgctgagccttgagggcggcggcgcggcgggcggcatgggtgcggcgctgtatgcgttctgtggtgctcagttgcgtccgggcattgagattgtcaccgatgcgctacagctggctgagcgggtggcggatgccgatttagtgatcaccggcgaagggcgtatcgatagccagacgatccacggcaaagtgccggtgggggtggcgagggtggcgaagcgttttaacgtcccggtgatcgggattgccggcagtcttaccgccgatgttggcgtcgtgcatcagcacgggctggatgcggtattcagcgtgttgtataccatctgtacccttgatgaagcgttggccaatgccgccgccaacctgcgaatgacggcgcgtaacgtagccgcggttttgcagatgggcgacaggcggtaa

SEQ ID NO: 212107 - DNA, 2751 bp, Klebsiella pneumoniae
atgaccaactacagcctgcgtgctcgcatgatgattctgattctggcgccaaccgtcctgataggactgttgctcagtattttctttgtcgctcatcgttataacgacctgcaacgccagctggaggacgctggcgccagtattatcgaaccgctggcggtctccagcgaatatggcatgaacttgcaaaaccgcgaatccatcggccagctgatcagcgttctgcatcgtcgccactcggagatcgtgcgggccatctcggtgtacgattcgcataaccgcttatttgtcacctccaattaccagctcaatcccagcgaactgcagatcccgaaaggcgaggcattcccccgtcacctcagcgtcatccgcgatggcgacatgatgatcctgcgcacgcctattgtctcggaaagctattctccggatgaatcacccgaatctgacgctaaaatgccgggcaatatgctgggctacgtcgccctggagctggatctaaaatcggttcgcctccagcagtacaaagagatttttatctccagcgtaatgatgctgttctgtatcggcatcgcgttaatcttcggctggaggctgatgcgcgacgtcaccgggccaatccgcaatatggttaacactgtcgaccgcatccgccgcggacagctggacagccgggtcgaaggctttatgctcggcgaactggatatgctgaaaaatggcattaactcgatggccatgtcgctggcggcataccacgaagagatgcaacacaacgtcgaccaggcgacctccgatctacgggaaacgcttgagcagatggagatccagaacgtcgagctggacctggcgaaaaagcgcgcccaggaggcggcgcgcattaagtctgagttcctggccaatatgtctcacgagctgcgcactccgctcaatggggtgatcggctttacccgcctgacgctgaaaaccgatctcaacgctacgcagcgcgaccacctgaccaccatcgaacgttcggccaacaatctgctggcgatcatcaatgacgtgctcgacttttccaagctggaagccgggaagctgatcctggagagtattccgttcctgctgcgcacttcgcttgatgaagtggtcaccctgctggcgcattccgcgcacgataaagggctggagctgacgctgaatattaagaacaatgtaccggacaacgttatcggcgacccgctgcgtctgcagcagattgtgaccaacctcgtgggcaacgccatcaaatttaccgagcacggcaatatcgacgtactggtggagcagcgggccatcagtaattcccgggtacagatcgaaattcagatccacgataccggcatcggcatccccgagcgcgaccagtcccggctattccaggccttccgtcaggccgatgccagtatttcacgccgccacggcggcaccgggctcgggctggtgatcactcagcgtctggtcaaagagatgggcggggatatttcgttccacagccagccgaaccgcggctccaccttctggttccatatcagcctcgatctcaacccgaacgccattccggatacgctgaacaccgacgggcttgtcggcaaacgtctggcctatgtggaagccaacgcgacggcggcgcagtgtaccctggagatgctggccgctacgccgctggaggttatctacagccctaccttctcctcgctggcggaagcgcagtatgacattctgctggtcggtatcccggtttcaatgcgcgatttgtcgccgcatcgggaaaaattagccaaagcctgcgcgatgtccgataacgtactgctggccctgccgtgccatgcccaggtcagcgccgaagccctgaagcgcgacggcgttgccgcctgcctgttaaagccgctcaccaccacccgtctgctaccggcgctggtggctaccagccacgcgcttgcctccgcgccgctgatgcagatcgacagtcataagttgccaatgacggtaatggccgtcgacgacaacccggctaacctgaagctgattggcgccctgctggatgatcttgtgcagcaggtgatcctctgcgacagcggccagcaggcggtggacaaggccaagcagctgcagatggatctgatcctgatggatattcagatgccggatatggacggcatccgcgcctgtgagcttatccatcacctgtcccatcatcagcaaaccccggttattgcggtcaccgcgcacgccctggagggccagcgtgagaaattactgagcgccggcatgaacgactatctggcgaagccaatcgaagaagagaaactgcacgcactgctgttgcgctatcagcccggcctgcacagcgtcgttccggcgtcgctaccgcccgcagagccgatcgtcgatcataatcaaacgctcgactggcaactggcgctgcgccaggcggccatgaagccggacctggcgcgggagatgctgcaaatgctgatcgcctttatgccggaggtgcgtaacaaagttgaggagcagctggtgggcgagcagccggaagggctggtggatctgatccataaactgcacggcagctgcagctatagcggcgtgccgcggctgaaaaagctgtgccataccctggaaagtcagctgcgggcaggcaccgccgccgaggatctggagccggagctgcttgagctgttagatgagatggataatgtggcccgcgaagcgtgccggatgggggtgtaa

SEQ ID NO: 212108 - DNA, 1305 bp, Klebsiella pneumoniae
atggcgcaattctactctgcaaaacggcgtgtgacgacgcgccagatcataaccgttacagtcaacgacctcgatccctttggtcagggtgttgcccgccaccaggggaaggcgctgttcgtgagcggcgtgctgccccacgagcaggccgaggtggcgctggtggaagataaaaaacagtacgcccgcgccgaggtgaaacgccgactgaccgacagcccgcagcgccaggcgccgcgctgcccccattttggcgtctgcggcggatgccaacaacaacatgccagcgttccgcttcagcagcaaagtaaacgcgccgcgctggggcgactgatgaagcgcgaggtagatgacgtcatcgccggcgcgccgtggggctaccgccgtcgcgcacgcttgagcttgaattatcagccgaagacccaacaattgcagatgggttttcgccaggccaacgccaaagcgatcgtcgatgtggtgcagtgccctgttttggtgccccaacttgaggcattgctgcccgctgtgcgcgagtgcttaagcgcgctgagcgcattacgccatctcggccacgtcgagctggtgcaggcggacaatggcccgctgatggtgctgcgccataccgcagccctgccggcgacagacagggaaaaactggaacgcttttcgcaaactcacggtctttccctgtacctcgcgccacaaagcgagatactggagcatattcatggcgaagcgccatggtatacctcagacggactacgcttagtgttcagcccgcgggattttatccaggtcaacgacggcgtaaatcagcagatggtgcgtaccgcactggagtggctggatctgcggccagaggaccgggtgctggatctattctgcgggatgggcaactttaccctgccgctggcgacacgcgccgcccatgtggtgggcgtggaaggggtgccggcgctggtggagaaggggcgggaaaacgccgcccgcaatggtttatcaaatgtcactttcttccatgaaaatctggaagaagacgtcacccgtcaggcctgggcgaagcacggctttgataaagtgctgctggacccggcccgcgccggcgcgccgggcgtgatgccgcatataataaaactggcaccgcggcgggtggtgtatgtttcctgcaacccggcgacgctggcgcgagacagcgaaaccctgttgcaggctggatatcagattcaacgcctggcgatgctggatatgttcccgcataccggccatctggaatcaatggtgttgtttgagcgcaggcttacataa

SEQ ID NO: 212109 - DNA, 2238 bp, Klebsiella pneumoniae
atggttgcggtaagaagtgcacatcttaataaagctggtgaatttgacccgaagaaatggatcgcgagtctgggaatttccagccagcagtcgtgtgagcgcttagccgaaacctgggattattgtcgcgaaaaaacgcaaggacacccgcaggcggacctgctgctgtggcggggcgtcgaaatggtggagatcctctccaccctaagtatggacatcgatacgctgcgcgcggcgctgctgttcccgctggccgacggcgaagttgtcagcgaagaggtgatgcaggagagcgtaggtaaatcggtcgtgaccctgattcacggggtgcgggacatggccgctatccgccagctgaaggctacccataccgactcggtctcttccgagcaggtggataacattcgccgtatgctgctggcgatggttgacgatttccgctgcgtggtcatcaaacttgctgagcggatcgcgcatctgcgcgaggtcaaggacgcgccggaagatgagcgcgttcttgcggcgaaagagtgcaccaatatctatgctcccctggcgaaccgcttaggtatcggccagctgaagtgggagctggaagattactgcttccgctatctgcatccggcggaatacaagcgcattgccaaactgctccacgagcgccgtatcgaccgcgagcattacatcgaagagtttgtcggccacctgcgctcagagatgaaagccgaaggcgtcaaggcggaagtctatggccggccgaagcatatctacagtatctggcgcaaaatgcagaaaaaacacctcgctttcgacgagctgtttgacgttcgcgcggtgcgtattgtggctgagcgtttgcaggattgctatgccgcgctggggatcgtccatactcactaccgccatctgccggatgaattcgacgactacgtggccaacccgaaacccaacggttaccagtctattcataccgtggtgctggggccgagcggcaagacggtggagattcagatccgcacccggcagatgcatgaagacgccgagctgggcgtggccgcgcactggaagtacaaagagggcgcgggagccggcaccagcggcggccgcggctatgaagaccgtatcgcctggctgcgtaagctgattgcctggcaggaagagatggccgactccggcgagatgctcgatgaagtgcgcagccaggtcttcgacgaccgggtgtatgtctttacgccgaaaggcgacgtggtggacctgcctgcggggtcgacgccgctcgactttgcctatcatattcacagcgatgtcggccatcgctgcatcggcgccaaaattggcggccgcatcgtgccattcacctaccagctgcagatgggcgatcagatcgaaattattacccagaagcagccgaacccgagccgtgactggctgaaccctaacctcggctatgtgaccaccagccgcggacgttcgaagatccacgcctggttccgtaagcaggatcgcgacaagaacattctcgccggtcggcagatcctcgacgacgagctggagcatttgggcatcagcctgaaggatgcggaaaagcacctgctgccgcgctataacttcaacgagctcgatgaactgctggccgccatcggcggtggcgatatccgtctcaaccagatggtcaacttcctgcaggcgcagttcaataaacctagcgccgccgagcaggatgcggccgcgctgaagcaactgcagcagaaaacctacacgccgcaaaatcgcaccaaggacaatggccgggtagtggtggaaggggtaggcaacctgatgcaccatattgcccgctgctgccagccaatcccgggcgacgagatcgtcggctttatcacccaggggcgcgggatctccgtgcatcgcgcggactgcgatcagctggctgaactgcagtcgcatgccccggagcgcatcgtcgatgcggtatggggcgaaagctactcggcgggctactcgctggtggtcagagtggaggcgaacgatcgcagcggtttactgcgcgatatcactaccatcctcgccaatgagaaggtgaatgtgctgggcgtcgccagccgcagcgatacccgtcagcagctggcaaccatcgatatgaccatcgagatttacaacctgcaggtgctgggccgggtgctcggtaagctcaaccaggtgccggatgtgatcgacgcgcgccgtctacacggcggttaa

SEQ ID NO: 212110 - DNA, 792 bp, Klebsiella pneumoniae
atgactcaaattgaccgcttgctcggcatcatgcgccgcctgcgcgacccggaaaacggctgcccatgggataaagagcagacctttgccactatcgccccttacacccttgaggagacctacgaggtcctcgatgctatccagcgggaagattttgacgatctgcgcggtgaactgggcgatctgctgttccaggtggtgttctatgcgcaaatggcgcaggaagagggacgctttaactttgacgatatctgcgccgccatcagcgacaagctggagcgtcgccacccgcatatcttcggcgaggcatcggcgggcaatagcacggaagtcctggcccgctgggagcaaatcaaaagcgcggagcgggcggaaaaagcccagcattcggcactggacgatattccccatagcctgccggcgctgatgcgcgcgcataaaatccagcgccgctgctcggcagtgggtttcgactggacctcgctgggcccggtgctcgacaaagtgcatgaagaaattgatgaagtgatgcatgaagcgcagcaggcggtggtggatgaagcaaaactggaagaggaagtgggcgatctgctgtttgccacggtgaacttatcccgtcatttgggcgtcaaagccgaggtggcgctgcagaaagcaaacctcaaatttgagcgtcgcttccgcgaggtcgagcgtattgtcgccgcccgaggcctggaaatgaccggcgtcgacctcgataccatggaagaagtgtggcaggaagtaaaacgccaggaaactgatctctaa

SEQ ID NO: 212111 - DNA, 1638 bp, Klebsiella pneumoniae
atgacaacgaactatatttttgtgaccggcggggtcgtatcctctctgggtaaaggcattgccgcagcctccctggcagccattcttgaagcccgtggtctcaacgtgaccatcatgaaactggatccgtatatcaacgtcgatccgggcaccatgagcccaatccagcatggggaagtgttcgttactgaagacggcgcagaaaccgatctggacctgggccactatgagcgttttatccgcaccaagatgacgcgccgcaataacttcaccaccggccgtatctactccgacgtgctgcgcaaagagcgccgtggcgactacctgggcgcgaccgttcaggttatcccgcacatcaccaacgctatcaaagagcgcgtactggcgggcggcgaaggccatgacgtcgtgctggtggaaatcggcggtaccgtaggcgatatcgaatccctgccgttcctcgaagcgattcgtcagatggcggtagagatcggccgcgagcataccctgttcatgcacctgactctggtgccgtacatggccgccgcgggcgaagtcaaaaccaagccgacccagcactccgtgaaagagctgctctccatcggtattcagcctgatattctgatctgccgctccgatcgcgcggttccggccaacgaacgagccaaaattgctttgttctgtaacgttccggaaaaggctgtgatttctctgaaagatgtcgattccatttataaaattccgggcctgttgaaatctcaggggctggacgattatatttgtaaacgattcagcttaacttgtccggaagcaaacctggccgaatgggaacaggtaatctatgaagaagctaatccggcaggcgaagtcaccatcggtatggtcggtaagtacattgaactgccggatgcctacaagtcggtgattgaagcgctgaaacacggcggtctgaaaaatcgcgttaccgtcaacatcaagctgatcgattcgcaggatgtggaaacgcgcggcgtcgaaatcctcaaggatttagacgctatcctgatcccgggcggcttcggctaccgcggcgttgaaggcaagatcgccaccgcgcgctatgcgcgtgaaaacaatattccttatctgggcatctgcctgggtatgcaggttgcgctgattgagttcgcgcgtaacgtagcgggtatggaaaacgccaactcgacggaatttgtgccagactgtaaatacccggtcgtggccctgattaccgaatggcgtgacgaagatggcaacgttgaagtccgctctgagaagagcgatctgggcggcaccatgcgcctgggcgcgcagcagtgccagctgagtgatgattctctggtacgccagctttacggcgagccgaccatcaccgagcgtcatcgtcaccgctacgaagtcaacaacatgttgttgaaatcgattgaagctgccggtctgcgcgttgcgggccgttccggggatgatcagttggtcgagatcatcgaagtgccgaaccatccgtggtttgtggcctgccagttccacccggagtttacttcgacgccgcgtgatggacacccgctgtttgccggctttgtgaaagccgcgagcgagtaccagaaacgccaggcgaagtaa

SEQ ID NO: 212112 - DNA, 1299 bp, Klebsiella pneumoniae
atgtccaaaatcgttaaagtcatcggtcgtgaaatcatcgactcccgtggtaacccgactgttgaagccgaagtacacctggaaggtggtttcgtcggtatggcagctgctccgtcaggtgcttctactggttcccgcgaagcgctggaactgcgcgatggcgacaaatcccgtttcctgggtaaaggcgtaaccaaagctgttgctgcggtaaacggcccgatcgctcaggcaatcctgggcaaagatgctaaagatcaggctggcatcgacaagatcatgatcgacctggacggtactgaaaacaaatctaacttcggtgcgaacgctatcctggccgtttctctggcgaacgccaaagcagctgctgcgtccaaaggcctgccgctgtacgcgcacatcgctgaactgaacggcactccgggcaaatactccatgccggttccgatgatgaacatcatcaacggcggtgagcacgctgacaacaacgtcgacatccaggaattcatgattcagccggttggcgcgccgaccctgaaagaagcagtacgcatgggttctgaagtgttccatcacctggcgaaagtgctgaagtccaaaggcatgaacactgccgttggtgacgaaggcggctacgcgccgaacctgggttccaacgccgaagcgctggctgttatcgctgaagcggttaaagctgcaggctacgagctgggcaaagacatcaccctggcgatggactgcgcggcgtctgaattctacaaagacggtaaatacgttctggctggcgaaggcaacaaagcattcacctctgaagagttcactcacttcctggaagagctgaccaaacagtacccgatcgtctccatcgaagatggtctggacgaatctgactgggaaggtttcgcttaccagaccaaagtactgggcgacaaaatccagctggttggtgacgacctgttcgtaaccaacaccaagatcctgaaagaaggcatcgaaaaaggcatcgctaactccatcctgatcaagttcaaccagatcggttctctgaccgaaactctggctgctatcaagatggcgaaagacgctggctacaccgctgttatctctcaccgttctggcgaaactgaagacgctaccattgccgacctggctgttggtaccgctgcaggccagatcaaaactggttctatgagccgttctgaccgcgttgctaaatacaaccagctgattcgtatcgaagaagcgctgggtgagcaagcgccgttcaacggtcgtaaagagatcaaaggtcaggcttaa

SEQ ID NO: 212113 - DNA, 1110 bp, Klebsiella pneumoniae
atgaccacattattaattaccggcgttacggggtttctgggcggtgccgcgttagagaaaatactccatcaggaaacccggttagatctgctgctgctggtacgtgctgatagccccgaggctggcctcgaacgggttaaagagaacatgcgtaagttcaacatcgccgaggagaagctggcgatgttgcgccagcagcatatcctgctgggcgatctcgcctcttcggagcattttcttaacgatccgcgccttgagcaggtcacccatgtcctcaactgcgccgctgtcgcctcatttggcagcaacccgcttatctggaaggttaacgttgagggcacgctgcgcctggcgcaacgtatggcgcaggtgacgggtctgcagcgctttctgcacgtcggtacggcgatgtcatgttcgcctgaaccggattcactggtcgccgaaagcgcggagtttcgggaacgcgctgagcacctggtggaatatacccactcgaagtcgaccatcgagcagctgatgcagcagcagtgccctacgctaccgctggtaattgcccgcccctctatcgtggtgggtcatacccatcacggctgccggccttccagcagtattttctgggtgttcagcatggggctgatgctgcagaaattcatgtgctccatggaggaccgaattgacgttatcccggtggactactgcgccgacgccctgctaatgctgcttaaccagcctctggctcacggcgaggtggtgcatatctctgctggcgaagagaacagcgtgaagtttgccgaaatcgaccgggcgatggctcaggccctggagcaggcgccggtgggggataagtacgcccaggtgagctatgaaacgctggtcaaaatgagacgcgaactgaaagggatatttgggccatgcaatgagcggctgatgctgaaagccatgcgcttatacggcgcattcgccacactgaacgtgcgctttagtaacgacaagctgctgagcatggggatgccaaaaccgccgcgctttaccgattacatcgaccgctgcgtggaaaccacccgcgggttgtcgatccctcagcaaatggccgtcgactttaaataa

SEQ ID NO: 212114 - DNA, 672 bp, Klebsiella pneumoniae
atgcagtacccgattaacgagatgttccagaccctgcaaggcgagggttacttcaccggcgtgcctgccatctttattcgtctgcagggatgcccggtaggatgcgcgtggtgtgacaccaagcatacctgggacaagctggccgatcgggaagtgtcgttgttcagcatcctggcgaaaaccaaagagagcgacaagtggggcccggcaagcagcgaggatctgctggcgattattgggcggcaggggtggactgcccgccacgtggtcattaccggcggtgagccctgcattcatgatttaacgccgttaacctcgcttctggaacaaaacggctttagctgtcagattgaaaccagcggcacccatgaagtacgctgcagccccaatacctgggtgacggtttccccgaaggtcaacatgcgcggtggctatgacgtgctgtctcaggccctgcagcgggcggatgagatcaagcatccggtagggcgcgtccgcgacatagaagcgctggacgaactgctggaaacgctgagcgatgacaaaccgcggatcatcgccctgcagccgatcagtcagaaagaagatgcgacgcgcctgtgtatcgacacctgcatcgcccgcaactggcgcctgtctatgcagacgcacaagtatctgaatattgcctga

SEQ ID NO: 212115 - DNA, 366 bp, Klebsiella pneumoniae
atgatgtccaccacgctgtttaaagatttcaccttcgaagccgcccaccacctgccgcacgtcccggaaggacacaaatgcggtcgcctgcatggccactcctttatggtgcgtctggagatcaccggtgaagtcgatccccataccgggtggatcatggattttgccgagttgaaggccgcctttaagccgacatacgatcgcctcgaccactattatctgaacgatattcctggtctggaaaaccccaccagcgaagtgctggccaaatggatctgggatgagatgaaaccgcgggtgccgctgctgagcgccgtgatggtcaaagagacctgcaccgccggctgcgtctatcgcggcgagtaa

SEQ ID NO: 212116 - DNA, 1800 bp, Klebsiella pneumoniae
atgacgacacaggccccaccttccaacttgctgccgctcaacccggagcaactggcgcgccttcaggcggccaccactgacttcacgcccactcagctcgcctgggtatctggctatttctggggcgtgctgaatcagcagtccggcgcggcggtagccgcccccgccccggccgccgaggtaccgacgatcacgctgatttccgcctcgcaaaccggcaacgcccgccgcgtcgccgaagcgctgcgtgacgatctgctggcggcgaagctgaacgtgaagctggtgaatgcaggcgattataaattcaaacaaattgctgcggaaaaactgctggtggttgtaacgtccacccagggggaaggagagccgccggaagaagcggtcgcattgcataagttcctgttctctaagaaagcgccgaagctggacgggaccgcgttcgccgtctttggtctcggcgatacctcttatgaatttttctgccagtccggcaaagatttcgacaacaagctggccgagctcggcgcggaacgtctgctcgatcgcgtcgatgccgacgttgaatatcaggccgcggccgctgaatggcgcgcgcgcgtggttgaggcgctgaaggcccgtgcgccggtcgctgcgcccgctcagctggccaccagcggcgcggtgaatgatattcacaccagcccatataccaaagaagcgcccctgacggcgaccctgtcggtcaatcagaaaatcaccggccgcaattcagaaaaagatgtgcgccatatcgaaatagacctcggtgattccggtctgcgctatcagccgggcgacgccctgggcgtctggtaccagaacgatcctcagctggtgaaagagctggtggagctgctgtggctgaaaggcgacgagccggtgaccgttgagggcaaaactctgccgctgtcggaagccctgcagtggcattttgagctgacggttaacaccgcgactatcgttgaaaactacgccaccctgacgcgcagcgaatcgctgctgccgctggtgggcgataaagctcagttgcagcagtatgccgccgcgacgccgatcgtcgatatggtccgtttctctccggcgcagctggacgccgaggcgttaatcggtctgctgcgtccgctgacgccgcgcctgtattctattgcttcctcacaggcggaagtggagagcgaggtgcatgtcaccgtaggcgtggtgcgctatgaaattgaaggccgcgcccgggctggcggcgcctccagcttcctcgccgaccgcgtggaagaggatggcgaagtccgtgtctttatcgaacacaacgacaactttcgtctgccagccaacccggagaccccggtgatcatgattggcccgggcaccggtattgcgccgttccgcgcctttatgcagcagcgcgctgcggacggagcgcaaggcaagaactggttgttcttcggcaacccgcacttcaccgaagatttcctctatcaggtggagtggcagagctatgtgaaggaaggtctgctgacccgtatcgatctggcctggtcccgcgatcaacaacaaaaaatctatgtgcaggacaaactgcgcgagcagggggccgagctgtggcgctggatcaatgacggcgcccacatttatgtctgcggcgacgccaatcgtatggcgaaggacgtggaaaacaccttactggaagtgattgccgaatacggcgcgatggacgccgaagcggcggacgaatttttaagtgagctgcgcgttgagcgccgttatcagcgagatgtctactaa

SEQ ID NO: 212117 - DNA, 1713 bp, Klebsiella pneumoniae
atgagcgaaaaacatccggggcctttagtggtcgaaggtaaactgagcgatgccgagcgcatgaagcttgagagcaactacctgcgcggcaccattgcggaagatttaaacgacggtctgaccggcggttttaaaggcgataacttcctgctgatccgtttccacggcatgtaccagcaggacgatcgcgatatccgcgcggagcgcgccgcccagaagctggagccgcgtcatgcgatgctgctccgctgccgtctgccgggcggggtgatcaccaccacccagtggaaggcgatcgataagtttgccgctgagaacaccatttacggcagtattcgcctgaccaaccggcagacctttcagttccacggcattctgaaaaagaacgtcaagccggtgcatcagatgctgcactcggtggggctggacgcgctggccaccgccaacgatatgaaccgtaacgtgctgtgcacctccaacccctacgagtcgcagctgcacgctgaggcctacgagtgggcgaaaaagatctctgagcatctgctgccgcgtacccgcgcttatgccgagatctggctggatcagaaaaaggtcgccactaccgacgaagagccgatcctcggccagacctatctgccgcgtaagtttaaaaccacggtggtgatcccgccgcagaacgatatcgatctgcacgctaacgacatgaacttcgtggcgattgccgaaaatggcaagctggtaggctttaacctgctggtgggcggcggtctctctatcgaacatggtaacaaaaaaacctacgcccgcacggcgagcgaattcggttatctgccgctggagcatacgctggcggtggcggaagcggttgtgaccacccagcgcgactggggcaaccgtaccgaccgtaagaatgcgaaaaccaagtacacccttgagcgcgtcggtatcgaaaccttcaaagcggaagtggagcgccgggcaggcattaagtttgagccgatccgcccgtacgaatttaccggccgcggcgatcgcatcggctgggtgaaggggattgatgataagtggcacctgacgctgtttattgaaaacggccgcattctcgattatccgggtcgtccgctgaagactggcctgctggagattgctaaggtccatcaaggcgaattccgcatcaccgctaaccagaacctgattgtcgccagcgtaccggaagatcagaaggcgcggatcgagaagctcgcgcgggatcatggcctgatgaatgccgtcaccccgcagcgcgaaaactcgatggcctgcgtctccttcccgacctgtccgctggcgatggcggaagccgagcgtttcctgccgtcgtttatcgacaaggtggaaggggtgatgagcaagcacggcgtgagcgatgagcatatcgtcacccgcgtcaccggctgcccgaacggctgcggccgcgcgatgctggcggaagtgggactggtgggcaaagcgccgggccgctataacctgcacatcggcggtaaccgcaacggcacccgcatcccgcggatgtaccgtgagaatattaccgagtcggaaattctcgactcgctagacgaactggtagggcgctgggcgaaagagcgcgaagcgggtgaaggcttcggcgattttacggtgcgtgcgggcatcattcgcccggtgctcgacccagcccgcgatttctgggaataa

SEQ ID NO: 212118 - DNA, 735 bp, Klebsiella pneumoniae
atgtccgtactcgatctaaacgcgcttaatgcattgccgaaagtggaacgcattctggcactcgcggaaaccaacgcccaactggaaaagcttgacgccgaagggcgtgtggcgtgggcgctggaaaatctgccgggaaactatgtgctgtcgtcgagctttggcattcaggcggcggtcagtttgcatctggtgaatcagatccgcccggatattccggtgatcctcaccgataccggctacctgttcccggaaacctatcagtttattgacgagctgacggacaagctcaagctgaacctgaaggtctaccgcgcggctgaaagcgcggcctggcaggaggcgcgctacggcaagctgtgggagcagggcgttgagggcattgagaaatacaatgagatcaacaaggttgagccgatgaaccgggcgctgaaagagctcaacgcgcagacgtggtttgccggtctgcgccgcgagcagtcgggcagccgggctacgcttccggtgctggcggttcagcgcggggtgttcaaggtgctaccgattatcgactgggataaccgcacggtgtatcagtacctgcaaaagcacgggctgaagtaccacccgctgtgggatcagggctatctgtcggtaggcgatacccacaccacccgcaaatgggagccgggcatggcagaagaagagacccggttcttcgggcttaaacgcgagtgcggattgcacgagggttaa

SEQ ID NO: 212119 - DNA, 1047 bp, Klebsiella pneumoniae
atgttttccgcgttgtgccgccgtctgcttccgctggcgctcggcaccggttttgtttttgccgccgcccccgcattcagcgcgctgggcgacaccgccagtagccaggcccgccatatcgccaccgtcttcccgggacgaatgaccggaacgccgccggaaatgctctcagctgactatctgcgccagcagttcgccctgatggggtatcagagcgacgtgcgaagcttcaatacccgctatatctttaccgacagcaatcagcgcaagaactggcataacgccaccggcagtacggtgatcgccgcccatgaaggtaaagtgcgccagcagattattatcatggcacacctcgacacctatgcgccgcagagcgataaagacgtggagaacaacctcggcggcctgacgctgcagggcatcgacgacaacgcgatgggacttggcgtattgctggagctggcggagcatttaaagaacgtccctacccgctatggcatccgctttatcgccaccagcggtgaagaggaaggccgtctcggcgcgcaaaacctgctgcagcggatgagcgaagcggaaaagaaaaataccctgctggtgatcaatctcgataatctggtggtgggcgataagctttacttcaacagcggccgcagcacgccggcctcggtgcgcaagctgacccgcgatcgcgcgctggctatcgctcgcagcaagggcatcgccgcctacaccaacccgggactcaacccggcttatccgaaaggcaccagctgctgcaatgacgccagcgtcttcgacaacgccgggatcccggtgctgtcggtcgaggcgactaactggtcactcggcaaaaaagatggctatcagcagcggagcaaatcggccagtttcccgcagggaaccagttggcatgacgtccagctggataatcagcagtatatcgaccacgcgctgcccgggcgcatcgaacaccgcggacgcgaggtagtgaaagtcatgctgccgctggtgaaagagctggcgaaggtggagaagaaaagctaa

SEQ ID NO: 212120 - DNA, 1416 bp, Klebsiella pneumoniae
gtggattacttgcccctttttgccgaactgaaacaaaggcccgtgctggtgatcggcggcggcgagattgctgaacgtaagatcaagttcttgctgcgcgcccaggcgcaggtgcaggtggtcgctgaaacgctgtcaccggcgctggccgatctggctgcgcgccaggcactcagctggcgggcgacggaattcagcgactcgctggtggatgatgtctttctggtgattgcggccaccgaggatgaggcgcttaaccagcgggtatttgcggcagctaacgcgcgctaccggttggtcaacgtggtggataaccaggcgctgtgctcgtttgttttcccttctatcgtcgaccgttcgccgctgctggtggcgatctcctccagcggtaaagcgccggtgctgtcgcgcattctgcgtgaaaaaatcgaagcgctgctgccgacgaatctcggtcggctggcggaatcagcaagctactggcgcaaccatctgaaaacccgcctgacgactaccgaagcgcgtcgccgcttctgggagcgcgtctttaccggccgcttcgccagcctgatggtggcgggcaactctgcggaggcggaaaaggcgctgcaggatgagctggataagcccgaacgtgagacgggagaaattattctggttggcgccgggccgggcgatgccgggctgctgacccttcgcggtctgcaggcgatccagcaggcggacgtggttttccacgatcatctggtgactcagccggttctcgagctggtgcgccgcgatgccgaacttatttgcgtcggcaaacgcgccggcgagcactcggtgccgcagcatgaaaccaatcagctgctggtggaggcggcgaaggcggggaaaaccgtcgtgcgcctgaagggcggcgatccgtttatttttggccgcggcgcagaagagctgcaggctgccgccgaggcggggatcccgttccaggtggtgccgggcgtcaccgcagccgccggggcgacggcctacgccggtattccgctgacccatcgcgattatgcgcaaagcgccgtctttgtcaccggccactataagccggacagcgcccccttcgactggtcgctgctggcgaagagccaacagacgctggcgatctacatgggcaccatgaaggcagcggaaatcagcgcgcagctgatcgcccacggtcgcgacagcgacacgccggtggcggtaatttcccgtggcacccgtgacgatcagcagacgataaccggcacattgcaacaactcgaacacctggcgaaagacgccccgatgcccgccctgctggtggtaggcgaagtggtgcagctgcatcagcagctcgcctggtttcaacatacatcatccgccgaggggtttaacgcttcggtggtcaatctggcttaa

SEQ ID NO: 212121 - DNA, 909 bp, Klebsiella pneumoniae
atggaccaaaaacgactcactcacctgcggcaactggaggcggaaagcatccatattattcgtgaggtggccgccgaattttctaacccggtaatgatgtactcaatcgggaaagattccagcgtaatgctgcatctggcgcgcaaagcgttttatccgggaaccctgccgttcccgctgctgcacgtcgataccggctggaaattccgtgagatgtatgagttccgcgaccggaccgccaaagcctacggctgtgagctgctggtgcataaaaacccggaaggggtggcgatgggcatcaacccgtttgtccacggcagcgccaagcataccgatatcatgaaaaccgaaggcctgaagcaggcgctgaacaaatacggctttgacgccgcgttcggcggcgcgcgtcgcgacgaagagaaatcccgcgcgaaagagcgcatctactccttccgcgaccgtttccaccgctgggacccgaaaaatcagcgtccggagctgtggcacaactacaacggccagattaacaaaggcgaaagcatccgcgtcttcccgctctccaactggaccgagctggatatctggcagtacatctatctggaaaatattgaaatcgtgccgctgtatctggccgctgagcgtccggtgctggagcgcgacggtatgctgatgatgatcgatgacgaccgtatcgatctgcagccgggcgaggtgattgaaaaacggatggtgcgtttccgtaccctcggctgctggccgctgaccggcgcggtggagtctgaagcgcagacgctgccggaaattattgaagagatgctggtatcgaccaccagcgaacgtcaggggcgcgtcattgaccgcgaccaggccggctcgatggagctgaagaaacgtcaggggtatttctaa

SEQ ID NO: 212122 - DNA, 1428 bp, Klebsiella pneumoniae
atgaacacgaccattgcccaacaaattgccaacgaaggcggcgtagaagcttacctgcacgcgcaacagcacaagagcctgctgcgttttttgacctgcggcagcgtcgatgacggcaaaagcaccttaattggccgcctgctgcacgatacgcgccagatctatgaagaccagctctcttcgctgcacaacgacagcaagcgtcacggcacccagggcgaaaagctggacctggcgctgctggtggacggcctgcaggccgagcgcgagcagggcatcaccatcgacgtggcctatcgctacttctcaaccgaaaaacgcaaatttatcatcgccgacaccccggggcacgagcagtacacgcgcaatatggccaccggcgcgtccacctgcgacctggcgatcctgctgatcgatgcgcgcaagggcgtgctcgaccagacccgccgtcacagcttcatctcgacgctgctgggcattaaacacctggtagtggcgatcaacaaaatggatctcgtcgagtttagcgaagcgcgcttcaacgagatccgggaagattatctgacctttgccgagcagctgccgggcaaccttgatatccgctttgtgccgttgtcggcgctggaaggcgataatgtcgccagccagagcgcgaatatgccgtggtacagtggcccgacgctgctggaagtcctcgaaaccgtagagatccagcgggtggtcgagagccagccgctgcgcttcccggtgcagtatgttaaccgtccgaaccttgatttccgcggcttctccggcacggtcgcctccggtaccgtgcaggttggccagcgtctgaaggtgctgccgtcgggcgtcgaatcgagcgtggcgcgtatcgtcaccttcgacggcgacctgcaggaagccgccgccggcgaagccattacccttgtgctgaaagatgaaatcgacatcagtcgcggcgacctgctggttgacgcgcaagcctcgctgccggcggtacaaagcgccagcatcgacgtggtgtggatggccgaacagccgctgaccccgggccagagctacgacatcaaaatcgccggcaagaagacccgcgctcgcgtcgacgctatccgctaccaggtcgatattaacaacctgacccagcgtgaagtcgagtctctgccgctgaacggcatcggcctggtggagctgacctttgacgaacctttagtgctggatccgtatcagcaaaacccggtgaccggcgggcttatctttatcgatcgcctgaccaacgtcaccgtcggcgccgggatggtcaacgagccgcacctgcaggcatcgacttcggcatcacagtacagcgccttcgagctggagctgaaccagctgatccgtaaacatttcccgcactgggacgcccgcgacctgctgggaggcaaataa

SEQ ID NO: 212123 - DNA, 606 bp, Klebsiella pneumoniae
atggcccagcatgacgaaaacgtcgtctggcatgcccaccctgtgacccaacagcagcgggaacagcatcacggccatcgcggcgtggtgctgtggtttaccggcctttcggggtcgggtaaatccaccgtcgccggggcgctggaggaggccctgcatgagcgcggcgtcagcacctatctgctggacggcgataacgtgcgccatggcctgtgcagcgacctgggattcagcgatgaggatcgcaaagagaacattcgccgcgtcggggaagtggccaggctgatggtcgatgccgggctggtggtattgacggcatttatatctccgcaccgtgcggaacggcagatggtgcgcgagcgcctcggggaaggacgctttatcgaagtgttcgtcgataccccgctggccatctgcgaggcgcgggatccgaaaggattgtataagaaagcgcgggcaggggaattacgcaatttcaccggtatagactcggtctatgaggcgccggaaaaggcggaaattcatctggatggtgaacaattggtaacaaatttggtgcaccaactattagacctgctgcaacagagcgatattatcagatcctga

SEQ ID NO: 212124 - DNA, 327 bp, Klebsiella pneumoniae; identical to SEQ ID NO: 139427

SEQ ID NO: 212125 - DNA, 318 bp, Klebsiella pneumoniae
atgggtaaactaacgctgctattattagctttgctggtctggctacagtattcgctgtggttcggtaaaaacggcctgcatgactacacgcgggttaacgacgacgtcaccgcccagcaggcgactaacgccaaattaaaagcacgcaacgatcagctgtttgccgaaattgacgacctcaacggcgggcaggaagcgattgaggagcgtgcgcgcaatgaactcagcatgacccgcccgggcgaaaccttctatcgtctggtaccggatgcgtctaaacgcaatcaggcatcggggcaacagcagaacaatcgataa

SEQ ID NO: 212126 - DNA, 711 bp, Klebsiella pneumoniae
atggcagccacttttccgggcgtttgcgccgtggtgccggcagccggtttcggccgccgcatgcaaacggaatgcccgaaacaatatctctcaatcggtaacaaaacgattctcgaacacgcggtcgccgcgctgctggcggatgcgcgcgtccagcgggtggtgattgccgtcagccccggcgatcgccgcttcagccagctgccgctggcgcagcatccgcagattaccgtggtggatggcggcgccgagcgtgccgattcggtgctcgccggcctgcaggcgttgccggaggcgcagtgggtgctggtgcatgacgccgcgcgcccctgcctgcatcaggacgacctcagccgcctgctgtcgctctgcgaaaccagccgcgtcggcgggatccttgcggcgccagtgcgcgacaccatgaagcgcgccgagccggacaaaaccgctattgcccataccgtcgaccgcaatgacctgtggcatgcgctcaccccgcaatttttccctcgcgagctgctggtggattgcctcactcgcgcgctaaacgagggagccactatcaccgatgaagcctcggcgctggagtactgcggcttccatccgcagctggtcgccggacgcgcggataatattaaagtgacgcgcccggaagacctggcgctggctgaattttacctcacccgttcccgacaccaggagaaagcttaa

SEQ ID NO: 212127 - DNA, 480 bp, Klebsiella pneumoniae; identical to SEQ ID NO: 138865

SEQ ID NO: 212128 - DNA, 1050 bp, Klebsiella pneumoniae
atgatcgcctttgaccaactgacctggctgcacggcaaaccgcagagcagtgggctactgaaagccaatccggaagattttctggtggtggaagatctgggctttgccccggacggcgaaggcgaacacgtgctggtgcggatcctgaaaaacggctgcaatacgcgctttgtcgccgacgcgctggcgaaattccttaagatccacgcccgtgaagtgagcttcgccgggcaaaaggataagcacgcggtcaccgagcagtggctgtgcgcccgggtgcccggcaaagagatgccggacctgagcaaatttcagctcgagggctgccaggtactggaatatgctcgccataagcgtaagctgcgtttaggcgcgctgaaaggcaaccagtttaccgtgatcctgcgcgagattagcgatcgccaggacgtggagacgcgtctgcaggccatcgctgaacggggagtgccgaactatttcggcgcgcagcgctttggcattggcggcagtaacctgcagggcgccatgcgctgggcggagagcggcgcgccagtgcgcgatcgcaataagcgcagtttttggttgtcggcagcccgcagcgcgttgtttaatcagcaagtgagtattagattaaaaaaaacggaatttaatcaggtcgttgatggcgatgcgctacaattagcggggcgcgggagctggtttgtcgtcacaccggaagaactcgaggtttcgcaggcgcgggtgcataaccgcgaactgatgattacggccacgctgccgggcagcggcgactggggaagccagcgcgacgccctggctttcgagcaggccgcgatcgccgaggaaaccgcgttgcaggcgctgctggtacgggagaaagtcgaggcggcgcgccgggcgatgcttctctatccacagcagctcagctggaactggtgggatgacgtaaccgttgaactgcgtttctggctgccggcgggcagcttcgccaccagcgtggtcagggagcttatcaatacaacgggtgactatgcgaatattgctgagtaa

SEQ ID NO: 212129 - DNA, 762 bp, Klebsiella pneumoniae
atgcgaatattgctgagtaacgatgacgggatccatgcgccggggatacagaccctggcgaaggccttaagggagtttgccgaggtccaggtggttgcacccgatcgtaaccgcagcggggcctcaaattcgctgacgctggaatcgtccctgcgtacgtttacctttgaaaatggcgacatcgccgtccagatgggcaccccgaccgactgtgtctatctcggcgtgaacgcgctgatgcgcccgcgtccggacatcgtggtttccggcattaatgccggccccaacctgggcgacgacgtcatctattccggcaccgtggccgcggcgatggaaggccgtcatctggggttccccgcgctggccgtgtcgctgaacggctatcagcattacgataccgccgcggcggtaacctgcaccattctgcgcgccttaagccgcgagccgctgcgtaccgggcggatccttaacatcaacgtaccggatctcccgcttgatcaaatcaagggcattcgcgtgacccgctgcggcaatcgccatccggccgaccaggtgatcccgcaaaaagatccgcgcggcaacatcctgtactggattggtccgccgggcgataagcgcgatgccgggccgggcaccgattttgcggcagtggatgaaggctatgtttccgtgacgccattgcacgtcgatttaaccgcccatcaggcgcatgaggtggtcaccgattggctggaacgtgtcggggttgacaggcaatggtaa

SEQ ID NO: 212130 - DNA, 627 bp, Klebsiella pneumoniae
atggtaagtaaacgtgttgaaagtttgttgaatcaactgcgcacgcagggcatcgtcgatgaacgtgtcctcgaggcgatcgcgctggtcccgcgcgaaaagattgttgatgaagcctttgaacataaagcgtgggaaaacaccgcgctgccgattggccaggggcagaccatctcccagccgtatatggtggcgcggatgaccgagctgctgacgctgacgccggagtcgcgggtgctggagatcggcaccggttccggctaccagacggccatcctggcgcatctggtgcatcacgtatgctcggtagagcgaattaagagtttacagtggcaggcgcgtcgtcgcctgaaacaacttgatttacataatgtttcaacccgtcatggcgatgggtggcaaggttggcaggcgcgggcgccgtttgatgccattattgtgacggcggcgccgccggaaataccgaccgcgctgctggcgcagctggatgatgacggcgtgctggtgctgccggtcggcgaagagcatcagtttctcaaacggatccgtcgtcggggcaacgaatttatcattgataccgtcgaggccgttcgctttgttcccctggtgaagggggagctggcctga

SEQ ID NO: 212131 - DNA, 1137 bp, Klebsiella pneumoniae
atgagcgcgggaagcaccaaatttaccgtcagccgtattgcggctctttcactggtttcactctggctggccgggtgtaccaacaccaataatccgcctgcgccggttagctctgccggcggcgccgcctcttccagcaccaactccggcatgctgattacgccgccaccctccggcgtcaagtccgctcctcaggcgcagccgattcagccgatgcagacccagaccattcagccgcagccggcgccggtggcgcaggagccggtacagacggtaaatggccggatcgtttacaaccgcaaatatggcgatattccgaaaggtagctataccggcggcagtacctatacggtaaaacgcggcgacacgctattctatatcgcctgggtcaccggcaacgatttccgcgacctggcgcaacgcaacaatatcccggccccgtacgcgctgaacgtggggcaggtactgcaggtcggtaacgcctcaggccagccgatcaccggcgaaaacgccgtttctcaggccagcgcaagagcgagcggcggtgcgacgaccagcacaacttctgcacaaaaatcgaccgcggtggttgcttcacaaccgactattacgtattctgaatcttcaggtgaacagagtgctaccaagatgttgcctaataataaaccagcgactacaaccacaacggttgtcgcgccggtgacggcaccaacaacggtgagcacaacccagccgactgcaagcagtacgtcaaccagttcgccgatctcaacatggcgctggccgactgatggcaaggttatcgagaactttagcggcgcggaaggcggcaataaaggtatcgatattgcaggcagtaagggacaggctattgtcgcgaccgccgatgggcgcgtcgtctatgccggtaacgcactgcgcggctacggtaatcttattatcatcaaacacaacgatgattacctgagtgcctacgctcataacgataccatgctggttcgggagcaacaggaagtcaaagcggggcagaaaatcgctaccatgggtagcaccggaaccagctcaacaagattacattttgaaattcgttacaaggggaaatccgtcaacccgctgcagtacttaccgcagcgataa

SEQ ID NO: 212132 - DNA, 993 bp, Klebsiella pneumoniae
atgagtcagaatacgctgaaagttcatgatttaaatgaagacgcggaatttgatgagaacggaattgaggttttcgacgagaaagccttagtagaagaggaacccagtgatagcgatctggctgaggaagagctgctgtcgcaaggcgcaacccagcgcgtacttgacgccactcagctttatcttggagagattggttattccccactgctgaccgcggaagaggaagtctatttcgcgcgtcgcgcactgcgtggtgatgtcgcttcacgccgtcgcatgattgaaagtaacttgcgtctggtggtgaagattgcccgtcgttacagcaatcgtggtctggcgttgctggatctgattgaagaaggtaacctcggcctgatccgcgccgttgagaagtttgacccggaacgtgggttccgtttttcgacctacgcgacctggtggatccgccagactattgaacgggcgatcatgaaccaaacccgtacgatccgtttgccgatccatattgttaaagagctgaacgtctatctgcgtaccgcgcgcgagttgtcccataagctggaccacgagcctagcgcggaagagatcgccgaacagctggacaaaccggtcgatgacgtcagccgtatgctgcgtctgaacgagcgcatcacctccgtggatactccgctgggtggcgattcagaaaaagcgctgctggatattctggccgatgagaaagagaacggcccggaagacaccacgcaggacgatgatatgaagcaaagtatcgtcaaatggctgttcgaactgaacgccaagcagcgtgaagttctggcacgtcgttttggtctgctgggttatgaagctgccacgctggaggatgtgggccgtgaaattggcctgacccgcgaacgcgtgcggcagatccaggtggaaggtctgcgtcgcctgcgggaaattctgcagggacaggggctgaatatcgaagcgctcttccgcgaataa

SEQ ID NO: 212133 - DNA, 378 bp, Klebsiella pneumoniae
atgaatccttatctgcaggaagtcctcgatgcccatgtccttatcgaacgctggttaagccatggcgaaggaagcgctgaggcgctgatgaagcgttttgccgccgattttaccatgatccccttgagcggtgagaagatggactacccaacggtgagccgttttttccaccacgccggcggcagccgtccggggttagatatcgtagtggatcagatggaaatcatcagcgagtggcacgacggcgccgcagtgctatatcgtgaaagccaaacgctggcggatagcagtcagaacgttcgctggtcgacggcgatttttcaacaagcggaagggaaaattgtctggcgccatctgcaggaaacccgcctcggctag

SEQ ID NO: 212134 - DNA, 1203 bp, Klebsiella pneumoniae
atgacctaccgccaccgcgttgccaccgtttttctgttcggcttttttctcgatttgatcaatatgtttatcgccagcatcgcctttccggcaatcagccgcgcgctggcggtttccgtctcgcaactggcgtgggtcagtaatgcctatattctcggtctgacggtcgttgtgccgttcagcgcctggctcagcgagcgctggggggcgaaacggctgtttttactctcgctggggctgttcagcctcggcgcgctggcggcaggacttgccaacagcctgagcgaactaattttatggcggacgctgcaggggatgggcggcgggctgttaatccccctcggccaggcgctgacgtggccgctgtttcagccgcatgagcgggcgaagctgtcggcggcggtgatgctggtcggcctgctggcccccgcctgctcgccggcgatcggcggcctgttagtcgaggcgttcagctggcgctgggtctttttcgccagcctgcctgtggctctgctaacctttgtgctggcggtgcgatggctgaacgacacccccggtccggttcgcccgactcgctttcttccactgtcgctgctggccgatcccctgctgcgcttcgcgatgctgatctacctctgcgtgccggggatgtttattggcgtcaacgtggtggggatgtactacctgcaacgcgtcaccgggatggcgccgggggcaatcggtgccctgatggtgccctggtcgctggcctcgtttgccgccatcacctttaccggcagatatttcaaccgcttcgggccccggccgctggtcatcatcggctgcctgcttcaggcgatggggatcatgctgctgctgaagatcgatgcggacagcccgctggcgctgttgattctggcctttacgctgatgggcggcggaggcagcttatgcagcagcaccgcgcaaagcagcgctttcctgcatacgcctgccgaagagatgcctgacgccagcgcgatatggaatcttaaccgccagctcagcttctttgccggcagcgccctgctcgccctgctgctgagggtattcccgccggcctacgcctggcagggggtatttatcagcgccgccgtcattaccctgttgccgctgctgttttgcctgcggctgaataatcgggcgattatccatcgcctgcacaccactctggagaagtcatga

SEQ ID NO: 212135 - DNA, 888 bp, Klebsiella pneumoniae
atgcttaatcttcagcgcgtgaccatgtttatcgccgtggtagatgccggcagtttcaccctggccgcagcggcgctggggcagaccaaggcagtggtcagctttaacgtacggcagctggaaaatgagctgggggtgacgctgctgctgcgttcgacgcggcgtttgcggctcactgacgccggggtgctgttctatcagcgcggggtggcgctcctgaacgcggcggaaaatctccaggatgaagtgcgggccagccatagcggcttaagcggggagctacggatcaccaccacgccggagtatggcgcgcaggttatcattccagcgctggccgcgttcgcccgtcgtcatccggcgctgcgggtgcgccacgtctcctcctcccatcatgccgacctcatttcagaacgatttgatgtggcgatacgcctcggtacgctggccgattcccgctatcgggcgacgcggatagccagtttcgcgatcctgcccgtcgcctctccggcctggctggcaagccatccggtgcagacgctgtcagatctggcgcaagctgagtggattattcacgagcgcctgccgacgccgctgcgctggcagctgcgcacggatcaccagacagaggtggatttctcgatagccagcgcgccgcggttttctgctgatagcgctacggcgctgatgagctttgctctggcgggatgcggcgtcgccttgctgcccgcatggctggtagccaaaaaggtggcgcagcgggagctggtgccgctcctgccggaataccatttcccacagcagggcgtgtatgccctttatcccgactcgcagcatttgccgacccgggtgcgggcatttattgacttcctgcgcgagaaggtcggttaa

SEQ ID NO: 212136 - DNA, 408 bp, Klebsiella pneumoniae
atggagttacgaaacgaagcattccacctgctgcgccagctttttcaacagcataccgcccgctggcagcaggcgttgccggacctgactaaacctcagtatgcggtgatgcgctcggtagcggagcaccccgggatcgaacaggtggcgctgattgaagcggcggtcagcaccaaggctacgctggcggagatgctcagccgaatggaagcgcgcggcctggtgcgccgggagcacgatccggccgataaacgccgccgttttgtctatctgaccgacgaaggcgaggcgttgcttaaccgttccattccgcagggcaatgaggtcgatgacgagtttctcggccgcctgagcgatgacgagcgcgagcagttctcccggctggtgcacaaaatgatggcgccctga

SEQ ID NO: 212137 - DNA, 594 bp, Klebsiella pneumoniae
atgaaactgattattgggatgacgggggccaccggggcaccgcttggggtggcattgctgcaggcgctgcgcgatatgccggaggtggaaacccatctggtgatgtcgaaatgggccaaaaccaccatcgagctggaaacgccctggacggcgcgcgaagtggccgcgctggcggacttttcccacagcccggcagaccaggccgccaccatctcatccggttcatttcgtaccgacggcatgatcgttattccctgcagtatgaaaacgcttgcaggcattcgcgcgggttatgccgaagggctggtgggccgcgcggcggacgtggtgctcaaagaggggcgcaagctggtgttggtcccgcgggaaatgccgctcagcacgatccatctggagaacatgctggcgctgtcccgcatgggcgtggcgatggtcccgcccatgccagcttactacaaccacccggagacggttgacgatatcaccaatcatatcgtcacccgggtgctggatcagtttggcctcgactatcacaaagcgcgccgctggaacggcttacgcacggcagaacaatttgcacaggagatcgaataa

SEQ ID NO: 212138 - DNA, 1428 bp, Klebsiella pneumoniae
atggcttttgatgatttgcgcagctttttgcaggcgctggatgaccagggacaactgctgaaaatcagtgaagaggtgaacgctgagcccgatctggcggcggccgccaatgcgaccggacgcatcggcgacggtgccccggcgctgtggttcgataatattcgcggctttaacgacgctcgcgtgacgatgaacaccatcggctcgtggcagaaccatgccatctcgctgggcctgccgcctaacacgccggtgaaaaagcagattgatgagttcattcgccgctgggataacttcccggtgacgccagagcgccgcgccaacccggcgtgggcagaaaatactgttgatggcgatgatatcaacctgttcgatattctgccgctgttccgcctcaatgatggtgacggcggtttctacctcgataaagcctgtgtcgtttcacgcgatccgctggataaagataacttcggtaagcaaaacgtcggtatctaccgcatggaagtgaaaggcaagcgcaagctcggcctgcagccggtaccgatgcacgatatcgcgctgcatctgcacaaagcggaagagcgtggggaagatctgccgatcgccattaccctcggtaacgacccgattattaccctgatgggcgccacgccgctgaaatacgatcagtctgaatatgagatggctggcgcgctgcgcgagagcccgtatcccatcgctaccgcgccgctgaccggctttgacgtgccctggggttcggaagtgatcctcgaaggggtcattgaagggcgtaagcgtgagatcgaggggccgttcggtgaatttaccggtcactactccggcggtcgtaacatgacggtagtgcgtatcgacaaagtctcttatcgcagcaaaccgatttttgaatcgctctacctcggtatgccgtggaccgagattgactatctgatgggcccggcgacctgcgtaccgctgtatcagcagctgaaggccgaatttccggaagtgcaggcggtcaacgccatgtacacccatggtctgctggcgatcatctccaccaaaaaacgctacggcggttttgcccgcgcggtgggcctgcgggcgatgaccactccccacggcctcggctatgtgaagatggtgatcatggttgatgaagacgtcgacccgttcaacctgccgcaggtgatgtgggcgctctcctcgaaggttaacccggcgggagacctggtgcagttgccgaacatgtcggtccttgaacttgacccaggctccagcccggcaggcattaccgacaaactgattatcgacgccaccaccccggttgcgccggaccttcgcggtcactacagccagccggtgcaggatctgccggaaaccaaagcctgggctgaaaaactgaccgctatgctggccaaccgtaaataa

SEQ ID NO: 212139 - DNA, 237 bp, Klebsiella pneumoniae
atgatttgtccacgttgcgccgatgaaaagattgaagtcatggcgacctcgccggtgaaaggggtctggaccgtgtatcagtgccagcactgtctttacacctggcgagataccgagccgctgcgccgcaccagccgcgaacactatccggaagcgttccgcatgacgcagaaagatatcgatgaggcgccgcaggtgccgcacgtaccgccgctattgccggaagataagcgttaa

SEQ ID NO: 212140 - DNA, 153 bp, Klebsiella pneumoniae; identical to SEQ ID NO: 136010

SEQ ID NO: 212141 - DNA, 2562 bp, Klebsiella pneumoniae
atgagcacaattgacaatctcgacgcccacacgccgatgatgcagcagtatctcaagctaaaggcgcaacatcctgacattctgctgttttaccggatgggggatttttacgagctattttatgacgatgcgaaacgcgcctcgcagctgctcgatatctcgctgaccaagcgcggcgcctccgcgggcgaaccgatacccatggccggcatcccccaccacgccgtagagaactacctcgccaaactggtcaatcagggcgagtcggtggccatttgcgagcagattggcgacccggccaccaccaaggggccggtcgagcgtaaagtggtgcgtatcgtcaccccaggcaccattagcgatgaagcgctgctgcaggagcgccaggacaacctgctggccgccatctggcaggacagcaagggcttcggctacgcgacgctggatatcagctccgggcgctttcgcctgagcgaaccggccgaccgcgaaaccatggcggcagagctgcaacgcaccaacccggcggaactgctgtatgcggaagattttgccgaatcgtcgctgatcgagggccgccgcggtctgcgccgtcgcccgctgtgggaatttgaaatcgacaccgcgcgccagcagctaaacctgcagttcggcacccgcgatctggtcggcttcggcgtcgaaaacgccccgcgcggcctgtgcgccgccggctgcctgctgcagtatgtcaaagacacccagcgtacctcgctgccgcacatccgctccatcaccatggaacgccagcaggacagcatcattatggatgccgccacccgccgtaacctcgagatcacccagaatctggccggcggcaccgacaacaccctggcctcggtactcgactgtacggtgacgccgatgggcagccggatgctcaagcgctggctgcatatgccggtccgcgataccgccgtgctggtggagcgccagcagaccatcggcgcgctgcaggagcgctataccgagctgcagccggtgctgcgccaggtcggcgatctggagcgtattctggcgcgtctggcgctgcgtaccgcccggccgcgcgatcttgcccgcatgcgtcatgccctgcagcaactgcctctgctgcgtgagctgctggccgacgttgacagtcagccggtgcaaaaattgcgcgagaaaatgggcgagttcaccgaactgcgcgaactgctggagcgcgcggtgatcgacgccccgccggtgttggtccgcgacggcggggtcatcgccccgggctatagcgaagagctggacgagtggcgggcgctggccgatggcgccaccgattatctcgataagctggagatccgcgagcgcgagcggctgggcctcgataccctgaaagtcggctacaacgccgtccacggctactacatccagatcagccgcggccagagccacctcgcgccgatccactacgtgcgccgccagacgctgaaaaacgccgaacgctacattattcctgagctgaaggaatacgaagataaggtgctgacctccaagggcaaagcgctggcgctggaaaaacagctttatgacgaactgttcgacctgctgctgccgcatctcgccgatctgcaaaccagcgccagcgcgctggccgagctggacgtgctggtcaacctggcggaacgcgcggaaaccctgaactactgctgcccgacctttagcgataagccaggcattcgcatcagcgaaggccgccatccggtggtcgagcaggtgctgaaagagccgtttatcgctaacccgctgcagctggcgccgcagcggcggatgctgatcattaccgggccgaacatgggcggtaaaagtacctatatgcgccagaccgcgctgattgcgctgctggcctatatcggcagttacgtcccggcgcagaaggtggagatcgggcccatcgatcgcatctttacccgcgtcggcgcggcggatgacctggccagcggccgctcgacctttatggtggagatgactgaaaccgccaatatcctgcacaacgctaccgaacacagcctggtgctgatggatgagattggccgcggcacgtccacctacgacgggctatcgctggcgtgggcctgtgcggaaaatctggccaacaaaatcaaggcgctgaccctgttcgccacccactacttcgagctcacccagctgccggagaaaatggaaggcgtcgccaacgtccacctcgacgcgctggagcacggcgataccatcgcctttatgcacagcgtgcaggacggcgcggccagcaagagctatggcctggcggtcgccgcgctggcgggggtgccgaaagaggtgatcaagcgcgcgcggcagaaactgcgcgagctggagagtatctcgcccaacgcggcggcgacccaggtcgacggcacgcagatgtcgctactcgccgccccggaagagacctcgcctgcggttgaggcgctggagaatcttgatccggactccctgaccccgcgtcaggcgctggagtggatctaccgtctgaaaagcctggtctag

SEQ ID NO: 212142 - DNA, 333 bp, Klebsiella pneumoniae
atgaaaagcattcaagatcaggttttagacttgtttaaagatgagatctcaacccgtttagataaaaattggaaagaaatcccattggaacttgattatgacttatttgatgctcccggcgacgatctgcttgacgctttaaataaatttgaacaaaaatttaatgttgatctttccagtgttaaatggtcgtgttatttcccttgggagaatactccaatgctaactcggtggtttaaagtaaaacgagaagatgtagaaaaaacgcgtaaacctttaactatcaaaatgtttgccgaatcagcaaaagcaggtaaatggctttacgactag

SEQ ID NO: 212143 - DNA, 483 bp, Klebsiella pneumoniae
atggctattccaggtaatatgtggatatacgacgacggtggggcactaatcaaaggtggttgtgatgttgcagacagggagttcagcatcgaatttaaagggtttcatcacaatctctccattcccactgataatgccactggcaagcctaccggcactcgtcagcactcaccaatgatcatcgttaaagaattcgactattccagtccatacctctacaaagcagtagctactggtcagaacctgaaatctgctgaaatcaaatggtataaaatcagcgatgctggtcaagaagtggaatacttcaatatgctacttgaaggcgtccgaatcgtatcaatatctcctacaatggcttccccagaagacaagaacaacaaccatcttgaatctgtcgaacttagatatgagaagatcacctggaaacattgtgacggaaatataattttcaccgatgcctggaatgaaagacaaacagcataa

SEQ ID NO: 212144 - DNA, 780 bp, Klebsiella pneumoniae
atggttaatgaatacagcgcccaggggctgtcacttcaccttggtaaacgacagattatcgacaacgtctccgtcgcgctgcgcggcggcgagatgacggcgcttatcgggccgaacggcgccgggaaatccactctgctgcgcctgttgaccggctatctgactccggacagcggcacccgccatcttgcaggcaagccgctggaagcctggtcgcccgaggcgctgtcgcgccggcgggcggtcatgctgcagcgaacggccctgcaggccgactggacggtggaaacggtcattgccatgggacgctcaccgtggggcgcgacggcggatccggcggtgctggcggcggtgatggccgtcaccggctgcgatggccttgccggtcgccgctatcccggcctctccggcggcgagcagcagcgggtacagctggcccgctgtctggcacagctatggcgcgacggcgcgccgcagggctggctgtttctcgatgagcctacctcggcgctggacctttactatcagcagcacctgctgcgtttgctcaaacggctcaccgccggcgggcaactgcacgtctgcgtggtgctgcatgaccttaacctcgccgccctgtgggccgaccgcatcctgctgcttcaccagggacatctggtcgcccagggcacgccgcaggaggtgatccagcagccggttatccatcgctggtacggggcggatgtccgcctcgtccagcacccggacaacgcggtcccccaggtttatctggcgccataa

SEQ ID NO: 212145 - DNA, 996 bp, Klebsiella pneumoniae
atgcgccctgccctcactcgccgtttgctgctgatgacgctgctgctggtctccctggcgttgtttgccaccaccctcggcgccatgcgcttgccgctggtcaacctgctgccttccggggatgacatgctgcgccacatctggctgaccatccgtctgccgcgggtgctgctggccctgctggtgggcgcggcgctggccctctccggctgcgtgatgcaggggctgtttcgcaacccgcttgccgacccgggcctgctgggcatcagcagcggcgccgcgctggcggtggccagctggctggtgctcccgttctccgctgcggggctgatcgctctgtatatgccgatgctggcggcgtttattggcagcctggcggtgatggtggtgattttcatcctcagtcgggcggaggagggttcgctgtcgcgcctgctgctggtggggatcgccatcaacgcgctgtgcggcgcgctggtcggcgtcctgtcctggctgagcaatgacgcccagctgcgccagctgtcgctgtggggaatgggcagtctgggccaggccgaatggccgacgctgctggtggccgcgaccttgattatcccggcggcgctggcggtgtggtggatggcgtcccgcctcaatctgctgcagcttggcgatgaagaggcgcactatctcggggttaatgtgcaggcgctgcagcgctggctgctgctgtgcagcgcggtgctggtggccgtcgcggtggccatcagcggagtcatcggctttatcggcctggtggtgccgcacctgatgcgcctgtggctgggacctgaccatcgcggactgatccccggctcgctgctggccggcgcgatcctgcttctgctggccgacaccctggcccgcaccgtggcggcgccggcggagataccggtcggtctgctcaccagcctgctgggcgccccctggtttctgtggctggtctttcgtcgggagaactccagacatggttaa

SEQ ID NO: 212146 - DNA, 819 bp, Klebsiella pneumoniae
atgatgcgctggttactgctcttgatcgctttcccgctgctgagtcacgccgccgttgagcggctcgtcacactcggcggagatgtcactgagatcgtttatgcccttcacgcggaggagagcctggtggcgcgggacagcaccagcagctggcccccggcggcgcaaaagctgccggacgtcggctacctgcgacagctgaacgccgaggggatcctcgcgttacgcccgcagctggtgttagcgagcgcccaggcgcagccctcgctggtcttacacaaggtacaggcgagcggggtgaaggtggttaacgtgccgggcggcgaaagtctgtccgcgatcgataacaaagttgctgtcattgccgaagcgttaggcaaaacggcggcaggcgacgcgctgcgccagcagcttcagcagcagatcgccgccattccaacgcagccggttgctaagcgggtgctgtttattctcagccacggcggaatgaataccctggtggccggacagcataccgcggccgatagcgccattcgcgccgccggattgcagaacgcgatgcagggcttcgaccactatcgcgccatgtcgcaggaaggggtcgccgccagccaggcggatctggtggtgatctccgccgatggtctcaaagggatgggcggcgaagccgggctgtggaaactgcccggtctggcgcagaccccggcggggcgtcataaacagctgctgacgatcgacgatatggccctgctgggcttcgggccgcgcacaccgcaggcgataatcgcgctgcgaaacaaagcggagcagttgccctga

SEQ ID NO: 212147 - DNA, 1032 bp, Klebsiella pneumoniae
atgccaaatgcacaccctgacctgtggcagcgctaccaggccaccaaagcggccagtaccgcgaaatatgcccgcgatatcgccgcggaaatggggatcagcgaagccgagctgaccgccgcccgcctcggccatgatgccgtgcgcctgagcgatgacgcccgggcgctgattgccgccctggagcgcgtcggcgaaaccaaatgcatctgccgcaacgagtatgccgtgcatgagcaggtgggccagttcacgcaccatcacctcagcggccacgccgggctggtgctgaacccgcgtgcgctcgacctgcgtctgttcctcagccagtgggccagcgccttccatctgaacgataatggccgtcagagcatccagtttttcgaccaccacggcgacgccctgctgaaagtctatgcgaccacgcagaccgacatggcggcctgggagaccctgatcgcggaatatcgggtggcggcgccggcaccgctgaccctgcgcccgctggagccggtgaaatatgccgataccgccgacggcgccgccctggagaacgactggcgcgcgatgaccgacgttcaccagttcttcggtctgctgcgtaaatatcagctttcccgccagcaggccttccgtctggtgagcgacgacctcgcctgccgcgtggatcgccatgcgctgccgtcgctgctggagacggtgcgccaggagggcaatgaaatcatgattttcgtcggcaatcgcggctgcgtgcagatctttaccggcgccctggaaaagctggcccccatgcgcggctggctgaatatcttcaatactacttttaccctgcatctgcgcgaagagagcgtcgatgaagtgtgggtgacccgcaagccgacttcggacggacacgtcaccagcgtcgaactgttcgctaaagacggcacccagattgcccagctctacggccagcgcagcgaggggcaccccgagcagacgcaatggcgccagcaggtagaccgcctgacccgtgaagggcagcccgcatga

SEQ ID NO: 212148 - DNA, 2364 bp, Klebsiella pneumoniae
atgtacaaatcgactccgtcagcagcatggtgtaaaaaacgcctgctggtgacctctttgtttgcagcaatttatcagacttctgccatcgcagcagatacttccgccgttagcggcgaggcggtggatgacacctcggaacaaatgaccgtcaccgcccccgcgccggtgcagaaagccggtagcgaacacagcatcagcgcccgggagctggagaataaaggcgctaacgatttcggctcaatcatgcgctatgagccgctcatcagcgccaccgggggcagcggcggctccggcaacggcaaaagcggcttcgaccgcggaggttacaccggctacaacattcgcggtatggagagcaaccgcgtcggtatcgacgtggacggtatcgcgcaacccaacgccaccggccgcggctacgtcggccgcgccgggctcaacaccttcggcatcggccgcgattatatcgacccgtatatgtacggcagcgtggatatccagtccggcgccacctcgacggaaacggccaacagcgctatcggggggaatgtctccttccgcccgaaatcagcggatgattacctgcgcccgggcaagaccagcgccttcggctaccgcagcggttacgactctgcggatcgcagctggcacaacggggtgaccgtcgccggcggcgatgagttcctgcgcgggattttggtctatagccgccgtgacggccaggaaaccgaaaacaacagcggcaccgtcgacgcctacccggcgaactggcactccgatgcttttctggcctccgggatctggcagcctaacgatgagcacaagctgaccagcaccttcgactattaccataaaaccaaccacacccactacgatacctgggactccagcggcaacagcaccatcggcaccgccaaccaaaccagccagacccggcgctggggcctgagcctgaaggatgactggacgccgatgaacgactacctcgacagcgtctccacaaaaatctactaccagcataccgaagcccatgactggacttatatgccggacagcgtcacccgcagaatgcagacggtgaactctaactacgataccgacacctggggcctgcaggccgcgctggcgaaaaccctgggccgccacgatctgagcgccggtttcaacgccagcaccagcaaaacccagcggccgttcagccagtcgccgatccccagcgtttacagcgagatcatgcagccggaggcagacagccgcagctacaccctcggcggctttgtccaggataagatcaacttcgatctcgacagccacaacttcgccgttattcccggcgtgcgcgtggtgcatcaatcgactaagccggaaaatctgtccgatctcgccgccaacagcagcgtgctgagcgaatcgtcggtggcgaatctgtacggcaaaaacagcgatacccaggttctgccgtcgttgaccttccagtacgacctcaccccgcgcctgatgacctacctgcagtaccagcgcggggcgcagttccccaacgccagccagctgtatggctcctggaacctcggctccagctacgccggcagccagcagtatgccctgatcggcaataccgatctgaagacggaaaccagcgataatctcgagtgggggctgaaaggggaagttaccgaaggcatcaccctgcgcacggcgctgttctacaacagctataagaactttatcgcctatacccgctatacccgcgccaacaatccgggccagttcacgaatgtgccgtcgaacatctacaccatttatcaggcggaaaaccgcgataaagcctatatctacggcggtgagattagcaccaaatttaactttggcacctggtttgagcaggtggacggcctgagcgccaccctcgccctcggctatagcgaagggaaatcgaaatccagctacagcggcgataaatacgtcgacctcgacagcgtggcgccgatgaaagccatcgtcggcgtggcgtgggacgatccggcgaaacgctacggcaccgccctgacggcgacctttgtcaaagggaaacaggcgaccgccaccaaccgcgaaagctacagcaacagcggatccgccatcaccgatgccagcagcgactatatgcgcgtgccgggctacggcatgctggactggaccgcgtactggcaggtggcgaaaaacgtgcgcctcaatggcggggtctacaacctcaccgatcgtaaatactgggattacctgagcagccgcaatatcgagaccggcaccaaccaggacgccaacgataaagcgctggcggtgatgccgggccgcacctggcagctgggcgtcaacgtcgacttctga

SEQ ID NO: 212149 - DNA, 294 bp, Klebsiella pneumoniae
atgaactcaaaagcggccatcaccatcacctactgttcccagtgcaactggatgctgcgcgccagctggatggcgcaggagctgttacataccttcagcaccgacatcgcctcggtgacgctggtgccggggaccggcgggatcttcacgatcgatgtcgacggtcagcagatctgggagcgcaagcaggatggcggttttccggatgcggccgagctgaaacgccgggtgcgcgatgtctgcttcccggagaagccgctgggccatgtggataaaggtgaccagaaggggtga

SEQ ID NO: 212150 - DNA, 1710 bp, Klebsiella pneumoniae
atggcctctatcacattatcggctgctgaattgttactgcatcggctgcaggcgctggacgtggcgtatatttttatcaactcgggcaccgattatcctccagtcattgaagcctgggcaaaggcccgggcgaccgggcaaaaggtaccggagttagtgatctgcccgcatgaaaacgccgccatcggcatggcccatggctattacctcggcaccggcaaggtgcaggcggtgatggttcacaccaacgtcgggctagccaacgccgcctgcggcgtcatcaatctggcgaacagcaatatcccggtgctgatttttggcggccgcacgccgataagcgaacattcccacttcggctgccgcaatacgccgattggctacggccaggagatgcgcgaccaggcggcgctgatccgtgaatccgtgaagtgggattttgaactgcggctggccgatcagatcggcgagcatgttgaccgggcctgggcgattgccagctccctgccgaaagggccggtctacctgagcttaccgcgtgagccactgtgcgaaacctttgccgtcgatgaggccgcgctgcaggctggcccttcgcagcagccggtccgctatgcgccagtccgggaagatatcgcccgcgcagccgaggcaatcgcctgcgccagacacccggtcatcttcgcccagcgcggcgcccgaacggcggaaggctttgcgcgcctcgatagtctggtgcgcgaatgggcgatccctctggtggaatactggggcaccgaggttaccctgagcgccgataatcccctgctcgccggggctgatcccagcgtctggctcgctgacgccgatgtgattctggtggtcgactcgcaggcaccatggatgatcgccgagggcgactgtcgccaggactgcaccgtgatccagatggggcccgatccgctcttctcccgctacccggtgcgcggctatcgcgcggacatcaacctggcgggcgagaccgatgaagtcttcagcctgctggaagaggcgctgcgcccgctgcaggccgcccgccagcagcatgtggcggagcgggcggcatatacgcagagccgcatccagcaacagaaaaaccagcgcgacgcgcttctccatgccagccagaccggggccattaccaaaccctggctcagctactgcctcggccatctggctaatcaacaccgcggccggatcgtttctgaactgaccacgctgccgcagtttgccggactgacccaagccgagagctattaccaggaagcgctggccggcggcctgggcgaagccctgcccatcgcgctggggctgcagcttgcgcgccgggaagaactgattattgccgccgtcggcgacgggtcgtacctgttcgccaaccctgcggtctgccaccatattgcggaggtaatgaagctccctgtcctcgtcgtggtcggaaataacggcgggtggggcgccgtcgcgggcggcaccaaagcgctctacccggatggctacgcggcccgcgcggaaaccattccagccaccgcctttaccacctcgccggatttcgccgcgatcgccgcctccagccgcgcggcggccctgtcggtttcccgggccgaagatctccccggcgtgctggaagaagcggtatccctcatacgcacccgccgacaaagcgtgctggttgacgtgcagttagcccgctaa

SEQ ID NO: 212151 - DNA, 942 bp, Klebsiella pneumoniae
atgacacagaacaatattctattaatttcaggcgctatattaccggtcatcattaccgtcatcatcggctatattagcggtaaacgaaaagactttaactggcagcaggcgggagacatcaataaaattgtgatgctctacgcattgccgctaagtattttcagcaatatggtgatgacgccgcgacacatcgtcatgaccatgggcccggtcgccgtggctatcatcctggcgctgattctcagcttcgtcattcccttactggtcgcccgctatctgtttcgacgcgacctcgccctcagtacgctgcaggcgttggccatcggctcgccggcagtcccgtttatcggcacctcagtgctggcctttttatttggcaccgtcagcgcgtcgctgatcaccgtgtccagcatcacgcaaaacgtcttccagctgccgctggtgatgatactgatgtcggtcgccaccggcgataagagccagcatatttcctttggcgcacgggtggtgaacgccattaaacaacccgtggtctggtcgccggtaatcgccctgatcatcgtgctggcggatatccatattccgcagactatctcgatgtcgctgggtctgctgggcaaagcctctggcgggctggcgctgtttgccgccgggatcgtgctctatacgcgcagcattgttatcaccaccgctaccattatcaccgttatcgcccgcaatattctggtccccggcgcctgctatctcattttattaaaaatgggcttcagcatggagcaaataaaggaagtcgtattgacgatggctatcccggtaggctccatcgcgataattattgctatgcagtataaaaccggcgagcaggaaatggcctcgacgatggcgctgagtattattgcctccatcattacgatgggcggatttattttcttaaccttttaa

SEQ ID NO: 212152 - DNA, 888 bp, Klebsiella pneumoniae
atgccaatgaaatttaagcagattcaggcatttattaccgtcgcccgcgaaggcaatatgaccctggccgcagagaaaatggggatcacccagtcgggactgagccgactgctattgagcctggaagcggacctgagcgcatccttattcgaacgacataagcacggcatggcgttgagcgaatatggcagcgcctttttaccctacgcgctgacgatgctgaataccgaacaaaaggcgcgcgaggaaattgagctcatccgtggcgccgggaaaggcattctgcggattggctgcgtttccagtctgctgaccagccatttcatcgataagctggcggctttccatcagcgccatccccagatccatctgcggatcgtcgaccgcattgactccgagctgtataagctgttgctgatgcacgacatcgatatcgccctctgcggtcccttaccgcatgatgagaaaatcgtggtgcggggcaaaattaactggcaggaccggatctgcatcgtcgccaggcagcaccacccgctgcatcaggcggcggacgtcaccctggaggcgatgttggactatccgtggatcatgccgccgccgtctagtacgccaatgaacatcctggctgatatctttcgcgcccggcagttgccctgtccgcagccggttattgagtgcgcctcatcctcggccattaaggcctttctgtgcgagagcgatctgttaacgtcgatgccggccccggtttaccgacacgaagaagcgcttggcctgctgcgcccgtttgagctcgagggcagcgtttttatccgggatttctatgcctacagccatttcggggttctgtccggggcagccctgcagttgattcagcatctgaagcagtga

SEQ ID NO: 212153 - DNA, 342 bp, Klebsiella pneumoniae
atggggaagcgtatcgaacgggaaaaaatgacgattcagcggatgattgccctctaccagcggcgcagtcccgaggcgcaggccgatgatgcgcactatcaggcgctgaacgcctacgctgacaagcgccttgataagtgcgtgtttggcgagaataaaccggcctgcaagcagtgtccggtgcactgctaccagccggcgaagcgcgaggagatgaagcagattatgcgctgggccgggccgcggatgctctggcgccacccgatcctcactattcgccatctgctggacgacaggcgcccggtgccgccgctgccggaaaaatatcgaccgaaaaaatag

SEQ ID NO: 212154 - DNA, 855 bp, Klebsiella pneumoniae
atgctgaacctgttcctggccccgttccagtttccttttatggtcaatgcgatagcgatatcgatcgtcgtcgccattccctgcgcgctgctgtcggtgtttctggtgctcaaaggctgggcgctgatgggcgacgccatgagccacgcggtctttccgggcgtggtgctggcctacattatcggcatccccttcgccatcggcgcgtttatcgccggtctgctgtgcgccgtgacgaccggttttctcgacgataacagccgactcaagcgcgataccatcatggggattgtcttctccggcatgtttggcgccggactggtgctgtacgtagcgatccagtccgatgttcatctcgaccatattctgttcggcgatatgctgggaatatccctccgcgatattgggcaaacgacggcgatcgcgctggtgattgcgttgattatcggtctcaaatggcgggattttttgctgcacgccttcgatccaacgcaggctaaagccagcggcctgcgcggcggactgctgcactacggcctgctgtgcatgatcgccctgaccatcgtcgcgacgctgcagtcggtggggattattctgtcgatttcgctgctgattgcccccggggcgatcgcgcttctgctggtgagacgctttatccacgccctgctgctggcggtagcggtggccatcggctgctcggcgggaggggtgtggctggcgttttatctcgacagcgcgccagcgccgactatcgtggtgctgtttaccgcgctgtttgtggtcgcctttgtcgcaagcacgatccgcgatagtcagaaacagaaaacttcagcaattatccccggtggcggctaa

SEQ ID NO: 212155 - DNA, 849 bp, Klebsiella pneumoniae
atgagctggctgctggagccgtttggctattactatatgctcaatgcgatgtgggtgtcggcgctggtgggcggcgtctgcgcctttctctcctgctacctgatgctcaaaggctggtcgctgattggcgacgccctctcccactcgattgtacccggcgtcgccggggcctatatgctcggcctgcccttcgcgctcggcgcgtttctctccggcggcctggcggcgggcagcatgctgtttttgcaacagcgctcgcggctaaaagaggatgccattatcgggctgatcttctcctccttcttcgggatcgggctgtttatggtgtcgctgaatccgacgtcggtgaatatccagaccatcatcctcggcaatattctggccatcgccccggaggatattatccagctggcggcgatcggctttatctcaatggcgattctgctgctgaagtggaaagacctgatggtgaccttctttgatgaacaccacgcccgctcgattggcctgaacacccgcggcctgaagctgctgttctttaccctgctggccgcctgcaccgtggcggcgctgcagaccgtcggcgcctttctggtcatctgcctggtggtcactcccggggccaccgcgtggctgttaaccgatcgcttcccgcgcctgctggccatcgccgtggctatcggcagcctgaccagtttcttcggcgcctggctcagctactatctcgacggcgccaccggcggcattatcgtggtcgcgcaaacgctgctgttcctcatcacctttatcttcgcgccgaagcacggcctgctggccagccgccgccgcgccagggaggccgcatgctga

SEQ ID NO: 212156 - DNA, 822 bp, Klebsiella pneumoniae
atgaatgcagcgcaagcgggactgtatgtcgaccagctcaccgtcacctggcgcaacggccacactgccctgcgcgacgcctcgttcagcgtgccgcgcggctccattgccgcgctggtgggggttaacggctcgggtaaatccacgctgtttaaagcgctgatgggctttgtccgcgttggtcacggcgagatcgccatactcggccagccggtcaaccgcgcactgcgccaaaacctggtcgcctatgtcccgcagtcggaagaggtggactggtccttcccggtgctggtggaggatgtggtgatgatgggccgctacggccatatgggctggctgcggcgggcaaagccgcgcgatcgcgagattgtcgatgccgcgctggcccgcgtgggcatgagcgagttccgccatcggcagattggcgagctctccggcgggcagaaaaagcgcgtctttctggcccgcgccatcgctcagcagggtcaggtgatcctgctggatgaacctttcaccggcgtcgatgtgcagaccgaagcgcggatcatcagcctgctgcgcgagctccgcgatgagggctgtaccatgctggtctccacccataacctcgggtcagtgagtgaattttgtgattatacggtgatggtgaaaggcaccgtgctggccagcggcccgacagaaaccaccttcactgccgagaatctggagcgggctttcagcggcgtgctgcgccacgtcgcgctgaccggcgcggaagcgcaaattatcaccgatgacgagcggccgtttatcagccggcgcgcggcgggaggcccacgatga

SEQ ID NO: 212157 - DNA, 918 bp, Klebsiella pneumoniae
atgctacacctgacaccgctgaaatcattgctgctggccagcgcgctggctctgctggccgcgacgccggcctcggcgcaggagaaattcagggttatcaccaccttcacggttatcgccgatatggcgcagaacgtggccggcgacgccgccgtcgtcagctccattactaaaccgggcgcggagatccatgattaccagcccacgcccggcgatatcaaacgcgcgcagggggcgcagctgatcctcagcaatgggcttaatctcgaacggtggtttgcccgtttttatcagcacttacagggcgttccggaggtggtggtcagcgaggggatccagccgatgggcatcagcgcgggcccctatagcgggaagcccaatccccatgcctggatgtcggcagataacgccctgatctatgtcgataacattcgcgatgcgctggtgaagtacgatccgcctcacgccgacacctatcgccgtaacgccgaggcctacaaagagaagatccgtcagacgatggcgccgctgcaggccagactggcgcagctgccggcggataagcgctggctggtcaccagcgagggagccttctcctatctggcccgcgactatggcctgcgcgaactgtatctgtggccgatcaatgccgaccagcagggcaccccgcaacaggtgcgcaaggttatcgacaccatgaagaaagaacgcatcccgaccatcttcagcgaaagcaccatctccgataaaccggcgcgtcaggtggcgcgggaagccggggcccactacggcggcgtgctgtatgtcgattcgctgagcgccgccgacggcccggtgccgacctggctcgacctgctgcgcgtcaccaccgaaaccatcgtcaacggtatccaggacgggatgaggaagcagccatga

SEQ ID NO: 212158 - DNA, 963 bp, Klebsiella pneumoniae
atgccaacgattgatgatgtttcaagattagcgaatgtctcaagagcgacggtatcccgcgtgctgaccggcacccggggcgtgcgcgaagagagccgggaagctgtgctgcgggccgttgaagaactcaactatcgcccgagctttgccgcgcaaaacctcgccagtcagacatccagccacgttggtctggtgatttccgcgcaggacgaaagccacggcgcacgtctgctgccgctgctctctcaggcgctgaaagggctgaataaaagcctgctggtccagtacgtcagcgacccggtagagcaggcggcggtaatcgacgatctgcagcgccagtgcgtggcggtggtggtgctgggcgccgttgccgccgacgcgccgcgcaacgttatcgcctttgaccgcttcggcgtcgccgggagcaacagccagggctatgacttcgcctttgccaccgaaagcgcctgccgctatgtgattggcaagggacaccgcaacatcgccctgctggtggacagcgatagcgacgatgccagccgtcagatgctggaaggctaccgcaacgtcctgcagaactactccattccttttaaccgtcagctggtgctgacggccaacgatgacgtcgagcaggcgctgctgaccttaattaacagcttcagtaaatactcagtcattatcgttaaacgcgaccgctacgcggctgaggcgatgcgtctgctgcgcgaattcaccatcgccgtcccgcaggaggtctccctgctgagccttgaggattccccgctcgcctcgctgctctacccgccgctgacctgcatctcctggccactggaggcgctgctggataactgtattcagcgtattcgcagcctgattgacgaccggccaaccttcaccgccgagggccgctcgctggctggccgcctgatcccgcgccagtcggtcgccgatatctcttga

SEQ ID NO: 212159 - DNA, 915 bp, Klebsiella pneumoniae
atgttacatcttggaatagatattggcggcaccaaaatggaagccgtactgctggacccggcgggcgaatgcgtccagcgcctgcgccggccgacccacaaagagagctatgacgcctttatgcgtcagctgctgaccctgattgccgatattcgcgcggtcagcccgcagccgttcaccctggggatcggcctgccaggggctatcgatccgcaaagcggacgcattaaaaactgcaactgcctggtgctcaacggtcacgatctgcgccgggatatcatgcagcagcttggccagccggtgtggatggcaaacgatgccgactgcttcaccctttcggaggcggtggatggcgccggcgccggagctaccaccgtcttcggggtgattatcggtaccggctgcggcggcgggatcgccgttcatcaacagctgctcagcggccccaacgctatcgccggggagtgggggcataatccgctgccgggctatactcctgagcgcgatggcccgccgcagccctgctactgcggcaaaacgaactgcatcgaaagctttctctccggtaccggcttcgcccgccgctatggggaacaagcccgtgcggaagccattgtcgccgcggcgcaaaacggcgatccgcgcgcgctggcccactggcgacactttatcgatgcctttgcccgcagcctggcgtcggtgatcaatattctcgacccgcaggtgattgtgctgggcggcggtctgtccaacgtcagccagatctatcgcgatctgcctgccgccatcgtgccgtggatcttctccgacacctgccgcacgcagatcaaaccggcccgtttcggcgacgccagcggcgtgcgcggcgcggcctggctgccccggcttcccggcgccgcgcaagggccgcggtag

SEQ ID NO: 212160 - DNA, 315 bp, Klebsiella pneumoniae
atggaattagaagaacaggtgatggggattatcatcaatgccggccagtcacgtagcctgtgctacgaagcgctgcacgccgctaaagcgggtgatttcgccaccgccgacgccaaaatgcaggaagcggcgcactattcccgcgaagctcaccttgtacagacccagcttatcgaagctgacgaaggcgagggaaaaaccaaaatgacgctggtaatggtccatgctcaggatcacctgatgacatccattctggcgaaagagctgattgccgaactgattgcgatttaccgcgcgcagccgcttcacgcctag

SEQ ID NO: 212161 - DNA, 1323 bp, Klebsiella pneumoniae
atgagctctctgtacgctaaactgatcgacgtgatcgaacggcagatcacgcctatggccggcgcgatcggccagcaaaaatatgtcacctcgatccgcgatggctttatcactgccctgccctttatgatcgtcggctcgttcctgttggtgtttatcttcccgccgttttctccggatacgacgtgggggtttgcccgcgcctggctgcaattttcgctcgatcatcgcgatgcgctgatgctgccgttcaacttcagcatgggggtgatgaccctgtttatcgccgtcgggatcgccgccagcctcgccaaacaccatcatctggactcgctgaccgccgggatgctgtcgctgatgtcgtttctgctggtagccgcgccgctgaaagatggccagatctctactgcctacttctccggtcaggggatctttaccgccattctggtggccatctattccaccgagctgtacgccttcctcaaacggcataacatcaccattcgcctgccgccggaagtgcctgccggggtggcgcgctcgtttgaaatcctgatcccggtgctggcgatcattctgacgctgcatccgctgaacctgtttatcgaagcccagctggggatgatcattccggaagcgatcatgtcgctggtgaagccgctggtcgcggcttccgatacgctgccggcgatcctgctgtcggtgctggtctgtcaggtgctgtggttcgccgggatccacggcgcgctgatcgtcaccgggatcatgaacccgttctggatggccaacctgtcggtcaatcaggcggccatggccgctggcaccgctatcccgcacatctatgtccagggcttctgggatcactatctgctgatcggcggcgtcggctccaccctgccgctggcgctgatgctgctgcgcagcaaggccgtgcatctgcggacgatcggccggatgggggtcgtgccgggcgtatttaacatcaacgaaccgatcctcttcggcgcgccaatcatcatgaacccgctatttttcctgccgttcgtgctggtgccgatggtgaacgcgaccctggcgtacttcgcgctgaagctggacctggtcagccgcgtagtgtcgatgacgccatggacaacgccggcgcctatcggcgcctcgtgggcggcgaactggagctttagcccggtgatcctgtgcctcatttgtatggccaccgccatggtgatgtacctgccatttctcaaagcttacgaaaaacagctgctggcccaggagcgtgaaaacgccgtcggccaggctgacaacgcggcgcagaccgcttaa

SEQ ID NO: 212162 - DNA, 315 bp, Klebsiella pneumoniae
atgaaaaaaattatgttgtgttgttcagcaggcatgtccaccagcctgctgatgaaaaaaatgattgcggaagccgaacagcggggcctgccggtagagatcaacgcctatggcgtagcggagttcgccgaacaggttggccattatcaggtggtgctgctggggccgcaggtgaaatacatgcagcaggacctgcaaaaacaggcggataaatacggtatccgcgtcgaacccatcaatatgatggactacggcatgcaaaaaggcgccgcggtccttgatttcgccctttcccttatcgaaaacaagaactaa

SEQ ID NO: 212163 - DNA, 1401 bp, Klebsiella pneumoniae
atgcattacggaaagcgctttccgtttgtggatttattaattgtgaccatgatcacctatggcaggctttcactttccggtgttgtgggcgatcatcccggcgagacaaccattcgcaaaggtaggagtatgaacattcagttaatgaatgtggccgtggacatcatcgagcagcggctggcgccgctggcgaacgttctgacgcgcaacaaccacattacggcgatgcgcgatagctttgcgctggctatgccctttgtgattgttggcagcctgttagttcccattttgtttccgcccgtttccatcgacggcgcctcgcgtttcggccaggtctatttgctgctgcggcctatcctgctgccgacctttcagctaaccattggcctggtggcgctgattgttgccttcggcgccagcgccagtctcgccaagcagtaccgtctgccggaacggctctgcggtttaaccgggtgtctggcttttctgctgtttatcggctttcgcgagactgcggtgagcaatgtttatctcggcggtatggggatatttaccgccctgatatccagcacctattccattgagataattcgctttttttacaaaaaaggctggtgtattcgcttgcctgatgaagtgccgctgatgacccgcaatggctttcaactgctgatcccgctgctggtggtgatgctgtcgataagcgtgatgaatgccatactgctgcagaccaccggacgcatcgtaccggagttgatcagcgaagcggtgcggccgctggtgctggcgtccgacacgctgatggcggtacttatctctttatttatctgtaacttactctggtttatcggtatccacggcgcgctgatcatcaccgggatcatgaaccccttctggatgacctatctgtttgaaaatcagcaggcgctggcggcgggttcgccaacgctgccgcatatttatctgcaggggttctgggatttttacctgctgatcggcggtattggctccactttgcctctggtgctgatggcgatgcgcagccgctcgcggcagctgaaaagcgtggccaagattggcctgctgccgtcgctgtttaatatcaacgagccgatactgtttggttttccggtgatcatgaacccggtttttttactgccgtttctctttgttccgctgataaatgcctgtatcgcatggtatttaactcagctgggtatcctcgaccgcgcggtggcgatgctgccatggtcgatgccttccccgctgggggcggcatggtcggcgaacggcagctggaaaaatttgtgcatgagcctgttcgcgatgtttaacgcctggatgctctatcgccccttcttcaaagtgtacgaacgtcagctcgcggaaaccgaacgctga

SEQ ID NO: 212164 - DNA, 1338 bp, Klebsiella pneumoniae
atgataaagctgaaacactcaatacctctggctctcctctcgctggcaggggccagcagcccggcctgcgccgatccgaagtatgattttgcgctgcatggctatatccgctccgggatcctggcgaactccgatggcaaccgcgcggactccgtcggcctgatgccggacggtaagtggcgactgggcaacgaagaagacaccaagatcgaactgatccccaccgtgacgctgacggcggacagcggcgtggtggcgaaagtgcaggccaacctcactcaccagtcgaaatgcacctccgactggaactgtcaggatgacgatggccatgacgtacagtttcgtgaagggttcgccgagctgagcaatctggattttgcgccggagatgaccttctgggccggtaagcgctacagcagctccaacacctccagccatcagttcgactgggagtacattcagtacaacggcaccggcggcggcttcgacaacatggatctcggcttcgcccgcttcgacgccggggtgtacgccttttcacccaccgatgaaaccaaagcctacccggtggataagggagatcagggctacccggatgactattctctcaacctgtggctgaaaaagatcgcggggacaggcttcgatctggagctgatcggccaccacatgaaccgtaacgaaaaccatccaacttccgccgagaagggctatggcgtgaccggtatttataactttgacggcttctatggtctgaccggaggatactcccgcctcgcattgcagtacgggaaagggctggcggcgggtgactcgctgggtaaaaacggctggggctgggccaacctggaaaacacccagtcctggcgagtggtgctggatagcgtggcctcgatgggcgacctggagatctcgaccttcgctttctggcagaaagataaaaactaccgctggtggacagaagatgaaaatggctggggacgctcgatgtgggtcgctggtatccgcccttatcatcagatcacccgcaactttgccatgcagtacgagctgggctacgaatacctggatgacaaaaactacaaaggagtaaacggcaaaggcaaaggcggcctgaccaaagtcaccgttgcgccaacgctgacctttgactccggtttctgggcgcgtccgcagctgcgcttcttcgtcacctacgcgaagtgggataaaggtgtctccgatgcattagacggtaactacaactgggataccaataccatcaccgccggcgggtattcccgcagtggctctaccgacaccgttaacttcggcgtacaggccgaggtctggttctaa

SEQ ID NO: 212165 - DNA, 2193 bp, Klebsiella pneumoniae
atgaagccgatgaaaaacctgctgctgatggggctgctgtccgcgctggcggccggcggggcgctggccgccgagcgctcgcactttacgcactttatcactcgcgacggcgccaccctcaaggacggcgacaaggtgtttcgtttcgccgggatccacgcgccggagctgcaccgcattgaagacgacgcccgcggcccctgcagggcagacccgcgcggctgggggcaatactttaaatggccaacggcccaggagcagcaaaactggatccaggcgatggtgcaaaccggggcgaaagcccagcgcgtctacgtgctgtcggtgcagcaggaatttgataaggcctgcgggcgcgagacccatattctggcgccggaaacggcggacggcatgccgcggctgaatgagaaagccatgcgggtgtatgacaacatgattgccgaagcggataaacagggattgcgtctgatcctgccgtttatcgaccactggtggtggtggggcgggcgcgagcagctggcggcgttctatcatgaaaaagcggaagacttttatcggaccgatagcaagaccttcaaagcctatctggatgtgatccgccaggtcatcacccggacaaataccgtcaccggccgcgcctattatgatgaaaaggcgatcatggcctgggaaaccggtaacgagctggaggataccaacgccgatttcctgcatcagaccgcggcgtggattaaaaagtgggcccctcatcagctggtggtggatggcacctataagaaaattaatccgtttgcgttgaccgaccccaatgtggatatcgtcagcaatcactattacaccaatgccgataataaccatcccgggcaggtgacgcaggatctgcgcgccgtcggcggacaaaaagtctatctcgtcggcgagtttggcctgctgccggcggatcaactgaacgccattatgcagtcgattgttcacagcgaggtcaacggggcgcaagccgccggcgggcttatctggggcttccgcggccatcgtcacgacggcggcttctactggcataaggagtcgaccgagcactatagctaccacctgccggggtttgccaaagaaggcgaagcgaaccaggagcaggcggtggtcgatctggtgcgcaccgccgcggcgcagatggccgggcagcagacgatggcgccgctaccgaagccggaggcgcctttgctgcgcgaaaccacctcgcccttcgcgatcaactggatgggcgctgcggtgggacgcagctacgatgtcgaacgcgccgcctcaccgaccgggccgtggacggtggtgggccgggatatctccgatggcgttaacgaatggaatccggaaaccatggttctgttccgcgacgattatcgtcagcttcagctcgggcacacgtattactaccgggtgacggcgaaaaacgagagcggtcgttcggccccttccaatgtgattagcgtgcagcatagcgaggagaatcagccgccggttgtcacgctggaaccggccctaaccaccacgcaggaccagggcgtcgagcttacggccaactggcaggacgatggcctgccgtcgcgagaggttaaggtgggctggcagcacgccggcgatggccaggtgcatttctgccatgccgatcgggctcaaacccgggcctggtttacggcgccaggcacctatgcgctgacgttcacggcggacgatgggctgttgaaaagcagcaaaaccgtgaccgtgacggtgggcgaggcgacggggaaagcgccagcggatttttgtcgttatcacggcgaagtttatggcgtggctgaggggcggctgacggtgatgaagagtgataaagacgcgctgacagttggtgaggacggcttcctcggcccatttgccaacgagggggataaggtcagctggcaggtgcaggcgccgtggagcggtcagttcctgctcaatgtaaccttcaacggcaaatggggcggtaagcagaactcgtttgtcgtcaacggggtcgctccgcaggcggtggccttcccgcagacggatgagcagggccagcagttgcggataccggtgacgcttaaagccgggagcaatcagattgacttcggccgcttcgccggcgactggggctatatgttcattaaatcgatcgaagtggtcgctgagtag

SEQ ID NO: 212166 - DNA, 1401 bp, Klebsiella pneumoniae
atgcagcagtatcagtttccgcaagggttcctgtggggggcggcggcgtccggcccgcaaacggaaggggtcaccaataagcgccatcgttccatttgggacagttggtttgccgaacagccggagcgattttatcagcaggtagggccgcagaccgtgtgtgatacttatcatcagtatccgcaggacgtagcgctgatgaaacagaccggcttcaactcatttcgtacctcgatacagtggtcacgactgatcgctgatttggaaaccggcgcgccggacccggacgcggtgcgtttttatcacgcctatctggatgagatgatcgctaacggcattgagccgatgatcaatctctaccactttgatatgccggaagcgctgcagaaacagtacggcggctttgaatcggcgcacgtagccgagctgtttgcccgctttgcccgcaccgcctttagcctgtttggccataaggttaaatactggataaccttcaacgagccgattgtgccggttgagggaggctacctgtacgacttccactatccatgtaagaaagatggccggctggcggcgcaggtggcgtttaacattatgctggcgcacgccaaagcggtaacggcttatcgtgaactggcgctggcgggcgagatcggcgtggtgctcaacctgaccccgagctataccctcaccgacagcgacgcggataaaaaagccgccgggtatgccgacctgttttttaaccgcagcttccttgacccgctggtaaaacatgaattccccaaagcgctgtgcgagatccttgccgcccacgactgcctgccgacgaccagcaaagacgacgcggcgttgatcctcagcgcggatatcgattttcttggggtaaactattacgtgccgcggcgggtaaaagcgcgtgagagcgaatatgacctcgattatttcaccccggaatactatttcgaaaacgcggtgaacccgcagggccgctttaatccttatcgtgataacaacgagatcctgccgcaggcgatctatgacattgccgccaatattcgcgataactacggcaatattaagtggtatctcgcggaaatcggcatcgcgatggatcgacaatcagagggcgagcccggggcggacggggtgatagacgatactttccgcatccagctgatggaggagcatctggtgcagttgcatcgggcgatagccgacggcgcgaactgctttggcgtgcaccagtggacgtttatcgacaactggtcgtggatcaatgccttcaaacggcgctacggcttctggcgactggatctggagaccggcgagcgacagataaaacgcaatgcgctgtggtttgccgaactggcgaccagcaacggttttaccagcgataaatag

SEQ ID NO: 212167 - DNA, 2073 bp, Klebsiella pneumoniae
atgtcgtatacaccgatgagcgatctcggccagcaggggctgttcgatatcacccggcttttattacagcagcccgacctggccgcgctaagcgaaaccctgacccgtctggtgcaacagtccgcgctggccgatgaggcggccatcatcctgtggaacgcgggtaatcaccgcgcggccaggtacgcctgcgatgaggccggccatccggtaagctacgaggatgaaaccgtcctggcccacggtccggtgcgtcgcttactctcccggccggatgccctgcattgcgatcatgaaacctttgccgatacctggccgcagcttatccgcagcggactgtatcatccgttcggttactactcgctgctgccgctggcggcggacgggcggatcttcggcggttgcgaattcctccgccgtgacaaccggccgtggagcgagaaagagttccagcggctgcataccttcgcgcagatcgtcgccgtcgtcaccgaacagattcagaaccgggtcagcaataacgtcgattacgatctgctgtgccacgagcgcgacaactttcgcatcctggtggcgatcaccaacgcggtgctctcgcgactggatatcgacgagctggtcagcgaggtggcgaaagagatccatcgctacttccggatcgacgccatcagcgtggtgctgcgcagcgaccgcaaggggaagctcaacatctattccacgcattatcttgacgccagccacccggttcacgaccagagcgaggtggatgaagccggcaccctcaccgagcgcgtgttcaaaagcaaagagatgctgctgcttaatctgcacgaacatgacactctcgcgccgtatgagaaaatgctcttcgagatgtggggcaataagatccagaccctgtgcctgctgccgctgatgtccggcaataccctgctcggggtgcttaagctggcgcagtgcgacgaacaggtcttcaccaccaccaatctcaagctgctgcggcagatcgccgagcgggtgtcgatcgctatcgataacgccctcgcctaccgcgaaattcagcgcctgaaagagcggctggtggatgagaacctcgccctcaccgagcagctcaataatgtcgagagcgaattcggggagattatcggccgcagcgaggcgatgaacaatgtgctcaagcaggtagagatggtggcgcagagcgacagcaccgtgctgatcctcggcgaaaccggcaccggcaaagagcttatcgcccgcgctatccacaacctcagcggacgcaacggtcggcggatggtgaagatgaactgcgcggcgatgcccgccgggctgctggagagcgatctgttcggccacgaacgcggcgcgttcaccggggccagcgcccagcgtatcggcctcttcgaactggcggacaaaagctccctgttcctcgatgaagtgggcgatatgccgctggaactgcagcccaaactgctgcgcgtcctccaggagcaggagttcgaacgtctggggagcaataagctgattcagaccgacgttcgattgatcgccgccaccaaccgcgatctcaagcagatggttatcgacagggaattccgtagcgatctctactaccggctcaacgtgttcccgatccatctgccgccgctgcgtgaacgtcccgacgatatcccgctgctggtgaaggcgtttacctttaaaatcgcccgccgcatggggcgcaatatcgacagcattccggcggaaaccctgcgcactctgacgcgtatggagtggccgggcaacgtgcgcgagctggaaaacgttatcgaacgggcggtattgctcacccgcggcaacgtactgcagctctccctgccggagcgggatatcgtggaagccccgcggacgccggcggtcctgcctgaggaaggtgaggatgaatatcagctgatcgtccgggtgctgaaggagagcaacggcgtggtggccgggccgaaaggcgccgcccagcggctggggctcaagcgcaccacgctcctgtcacgcatgaagcggctgggtattaataaagacgaactggtgtaa

SEQ ID NO: 212168 - DNA, 1011 bp, Klebsiella pneumoniae
atgaaaagcgtccagttagcccacggtagcgggggacaggcaatgcagcagctgatcggcgacctgtttatgcaggccttcgccaacccctggctggcggagcaggaggatcaggcgcgcctcgatctggcggcgctcgccgcccagggggaccgcctcgccttctccaccgacagctacgtgattgacccgctgttctttcccggcggcaatatcggcaagctggccgtctgcggtaccgccaacgatgtggcggtcagcggcgccatcccgcgctatctttcctgcggctttattctcgaagaggggctggagatggccaccctggaagcggtggtcgccagcatggccgacaccgcccgggcggcagggatcgccatcgtcaccggcgacactaaagtggtgccgcgcggcgcggcggataagctgtttattaacaccgccggcatcggcgccatcccggcggacgttcactgggggacgcagcagattagcgccggtgatgtgctgctggtcagcggcacgctgggggatcatggcgccaccatccttaacctgcgcgagcagatggggctggacggcgcgctgtccagcgactgcgcggtgctgacgccgcttatccagaccctgcgcccgctgagcggagtgaaagccctgcgcgacgccacccgcggcggggttaacgcggtcgcccatgagttcgccgccgccagcggctgcggcatcgaactgcaggaggcaacgctgccggtcaacgacacggtgcgcggcgtctgcgagctgcttggtctggacgccctgaacttcgccaatgaaggcaagctggtgctcgccgtcgcccgcgacgaggcggaaaacgtgctggcgcatttgcggtctcacgcgttaggacgcgatgcggcgataatcggcgaagtggtcgcccgcccgggcgtacgttccgttgggctgtacggcgtgaagcggacgctcgatcttccccacgccgaaccgctgccgagaatttgttaa

SEQ ID NO: 212169 - DNA, 1122 bp, Klebsiella pneumoniae
atgcgttacgtagatgaataccgcgcccccgaacaggtgatgcagctggtggcccatcttcagcagcgtgctcgtctgctgccgcacaccgccgcgcgaccgctgcgcatcatggaggtctgcggcggccatacccatgccatttttaaattcgggctcgaccaactgttgccggagaacatcgaatttattcatggtcccggctgcccggtgtgcgtcctgccgatggggcgcatcgatgcctgcattgagattgccagccgcccgggagtgatcttctgcaccttcggcgacgccatgcgcgtgccgggtaaaaacggctcgcttctgcaggcgaaagcccgcggcgccgatgtccgcatcgtttactcgccgatggacgctctgcggctggcgcagcaaaatccgcagcgcgaggtggtcttttttggtctcggtttcgaaaccaccatgcccgctaccgccctgaccctgcgtcaggcgcgagagcgcaacgtcgataacttctactttttctgccagcacatcaccctgctgccgaccctgcgcagcctgctggaccagccggagaacggaatcgacgcctttctcgccccgggccacgtcagtatggtgatcggcaccgaggcctacggctttatcgccagcgactatcaccgtcctttagtggtcgccggtttcgaaccgcttgatctactgcaaggcgcggtgatgctggttgagcagacaatagcgcagcgcagcgatgtggaaaatcagtaccgtcgcgtggtgccggatgagggcaacccgctggcgcaggcggcgatggccgacgtcttccgcctggatggcgacagcgaatggcgcggcctgggggtcatcagcgactccggcgtgcagcttacgccagcctatcagcgcttcgatgccgaggcgcattttcgcccggcgccgcagcgcgtgtgcgacgacccgcgcgcccgctgcggcgaggtgctgaccggccgctgtaaaccgcaccagtgcccgctcttcgccagcacctgcaatccgcaaagcgcctttggcgcgctaatggtctcctctgaaggggcctgcgccgcctggtatcaatatcgcagtcaggaaaatgaagtatga

SEQ ID NO: 212170 - DNA, 273 bp, Klebsiella pneumoniae
atgtgcataggcattccgggacaaatttgcgccatcgacggcgtgctggcgaaggtggaagtttgcggtattcagcgcgacgtcgacctgacgctggtcggcgccgttgatgagcagggccagccgcggctcggccagtgggtgctggtgcatgtcggcttcgccatgagcgtcattaatgaagccgaagcccgcgacaccctcgaggcgctgcaaaatatgtttgacgtggagccggacgtcggcgcgctgctgtacggcgaggagcgataa

SEQ ID NO: 212171 - DNA, 873 bp, Klebsiella pneumoniae
atgtgtacaacatgcggctgtggcgaaggcaacctctatattgaaggagacgaacgaaacccgcattccgcgttccgcagcgcccccttcgcgcccgccccacgccagacgatgaccatcaccggtgtcaaaatcgaccacttcacccccacccgcacgccagagggcgacctgcattacggccacggcgaagcgggtacccacgccccggggcagagccagcggcggatgctggaagtggagatcgacgtgctggataaaaacaaccgcctggcggcacgcaaccgcgcacgcttcgcagcaaaacagcagctggtgctgaatctggtttccagccccggctccggcaaaaccaccctgctcaccgaaaccctcacccggctgaaaggacgcgccgactgcgcggtgattgaaggcgatcagcaaacggtcaatgacgccgcccgcattcgcgccaccggcaccccggcgattcaggtcaataccgggaaaggctgccatctcgacgcccagatgatcgccgacgccgccccgcgcctgccgctggctgaccgcggcattctgtttatcgaaaacgtcggcaacctggtctgcccggccagctttgatctcggcgagcgccataaggtggcggtgctgtcggtcaccgaaggcgaagacaaaccgctgaagtatccgcatatgttcgccgccgccagcctgatgctgctcaacaaagtcgacctgctgccgtatctcaatttcgacgttgagcggtgcctggcctgcgcccgcgaggtcaatccgcatattgaaattattcttgtctccgccaccagcggcgaaggcatggagcagtggcttacctggctggagacgcagcgatgtgcatag

SEQ ID NO: 212172 - DNA, 345 bp, Klebsiella pneumoniae
atgcacgaaatcaccctcagccagcgggcgctggaaattattgaacaacaggcgcagcaggccggcgcgcggcgggttaccggcgtgtggctcaaggtcggcgcattttcctgcgtggaagccagcgccctgaccttctgctttgagctggtctgccgcggcacgctggcggaggggtgcgaactgcatatcgccgaacaacaggctgaatgctggtgcgatcgctgtcagcagtacgtccatcttgtctcgcagcacgttcgccgctgcccgcactgcaataacgaccagctgcagatcgtggcggatgatggcttacagattcagcgtttagaattggagtaa

SEQ ID NO: 212173 - DNA, 450 bp, Klebsiella pneumoniae; identical to SEQ ID NO: 137934

SEQ ID NO: 212174 - DNA, 609 bp, Klebsiella pneumoniae
gtgaaccgttttgtaattgctgactccactgtctgtatcggctgccgcacctgcgaagccgcctgctctgagacgcatcgccagcacggcctgcaggctatgccgcggctgcaggtgatgcgtaatgaaaaagaatcggcaccgcaaatgtgccaccactgtgaagatgctccctgcgccaccgtctgcccggttaacgccatccagcgcgtcgatggcgcggtccagctcaacgagagcctgtgcgtaagctgcaaactgtgcggcattgcctgcccgttcggcgccattgaattttccggcagccgcccgctggatatcccggcgaatgccaatacccggctggcgccccccgcgccgccggcgccggcgcgcgtcagctcgctgctcgactgggtaccgggcgtgcgcgctattgccgtgaaatgcgacctctgccacttcgatgaccagggcccggcctgcgtgcggacctgtccgaccaacgcgctgatgctggtggatagccgtgatatcgcccaggccagcaagcgtaaacgccagctgacctttaataccgaccttggcgacttgtcgctgttccaggcgcaacagggggagagggaatga

SEQ ID NO: 212175 - DNA, 1827 bp, Klebsiella pneumoniae
atgagtgtaattggattagtgaatcaggcggtggcgtggtatgccgccagcgccgtactggcctttctgtttgccatgcgcaaaccgctcagcggcgccattgccgggatcggcggcgcggtggccagcgccatgctggtggtcgccggcggcgccgcgctgctgatgccggagcggatccacggcggcatgctgcagtttctccacctgacgatacgggtggggggcgtcaacgcgctgtggctgctggccatcggcctgtcggcgctgccggtgtcattgttcaatattagctggcatcgccacccgcaggtgaaggccaacggcccgctggtcaacctgctgctggccgccgcgacctgcgcggtggtggtgaccaatatcggttcactggtggtgatggcggagatcatggcgctctgcgcggcgtttctcaccggctgcgccgcctccggtaagctgtggtttgccctggggcgtctcggtactctgctgatggcctggacctgctggctggtgtggtcaacctacggcaccctcgagctggcgcagatcaaccttcaggcggtggatatgatgcagaacccgctgctctggctgccgggtctggtggggttcgccctgctggccggggcgatcccgctgcacggctgggcgccgcaggctcacgccggggccagcgcgccggccgccgcgctgttttccacggtggtaatgaaggttggtctgtacggcatgctgaccgtttcgctggccggcggcgtgccgccgctgtggtggggcgtgatgctgctggcgctggggatgatcaccgcctttatcggcggactgtatgcgctgatggagcataacattcagcgcctgctggcctatcacaccctggagaatatcggcattatcctgctggggctgggcgccttcgtcaccggcgtggcgacccgcaacagcacgctgatggtgctgggctttatcggcggcatgtatcacctgattaaccacagcctgttcaaaaccacgctgttcctcggtgccggagcggtgtggttccgcaccggtcatcgcgatatcgagaagctgggcggcatcggtaaaaaaatgccgctgatctccctcgccatgctggtggggctgatggcaatggctgccctgccgccgctgaacggcttcgccggcgagtgggttatctatcaatccttcttcaaaatgagcactggcgacctgtttatcggccgtttgctggggccgctactggccgttggcctggcgatcactggcgcactggcggtgatgtgtatggcgaaagtctacggcgtgaccttcctcggcgcgccgcggacgaaagaggcggaatacgccacctgcgccccctggctgatgaccctgagcgtggtgctggcggctgtgttctgcctcgttggcggcatcgccgcgccgtggctgctgccgctggtgagcggcgccttcccggtgcaggctcaggtatcgagcgtggtgtcgcagccgatgatcgcgctgctgcttatcgcctgcccgctgctgccgttcctgctgatgatcttctttaaaggcgatcgcctggcggcgcgctcgcgcggcgcggcgtgggtctgcggttacgaccacgagcagtcgatggtggtaacggcccacggctttgccatgccggtgaaagaggcctttgcgccgttgctgaagctgcgtcactggctgaacccggtgcgtctggtgccgggctggcaatcggcctcggcgccggcgctgctgcgcgggatcgcgctggttgagctggcggtgctggtggtgattgtcatttcgcgaggagcctga

SEQ ID NO: 212176 - DNA, 924 bp, Klebsiella pneumoniae
atgagtctgttaattgcattgctacaggcgctggtgctgtttgccgtcgcgccgctgttgtccggaatcgttcgcgtcgcccgcgcgcggctgcataaccgccgtggaccgggggtactgcaggagtatcgcgatatcctgaaactgctgggccgccagatcgtcggtcctgacgcctcgggctgggtgtttcgcctgacgccgtacgtcatggtgggcgtgatgctgaccatcgccaccgcgctgccggtggtgacggtagactccccgctgccggtgctgggggatctcatcaccctgatctacctgttcgccatcgcccgtttcttctttgccatttccggtctggacaccggcagcccgtttaccgcgctgggcagcagtcgcgaagcgatgctcggcgtgctggtggagccgatcctgctgttgggcctgtgggtggcggcgcaggtcgccggctcgacccatatcagcgccatcaccgataccctttaccactggccggcggcgcgcagcattccactgattctggcgttatgcgcctgcgccttcgccacctttatcgagatgggcaaactgccgttcgatctggcggaagcggagcaggagctgcaggaagggccgctgtcggaatacagcggcagcggctttggcatcctgaagtggggcatcagcctcaaacagctggtggtgctgcagatgtttgtcggggtcttctttccgtggggccagatgaccagcttcagcgtcggcggcctgctgctggcgctggtggtcgccatcgttaagctggtggttggggtgctaattatcgcgctgtttgaaaacagcatggcgcgtctgcgtttttgtgccacctcccgcgtcacctgggccgggtttggtttcgcctttttagctttcgtctccttgctggtggcgtga

SEQ ID NO: 212177 - DNA, 1710 bp, Klebsiella pneumoniae
atgtctgaagaaaaaataggtcaacactaccttgcggcgctgcaccaggcctttcccggcgtggtgctggacgaagcctggcagaccaaagaccagttaaccatcaccgtgaaggtcaactacctgccggaagtggtggagtttctctactaccagcagggcggctggctgtcggtgctgttcggcaacgatgaacgtaagctcaacggccactacgcggtctattacgtgctgtcgatggagcagggcaccaaatgctggatcaccgtgcgcgtggaagtggacgccaacaaaccggaatacccgtcggtgacgccgcgcgtcccggcggcggtatggggcgagcgcgaagtgcgtgatatgtacggcctggtgccggtcggcctgccggacgaacgccggctggtgctgccggacgactggccggacgaactctatccgctgcgcaaagacagcatggattatcgccagcgtccggcgccgaccaccgacgccgaaacctacgagtttattaacgagctcggcagcaagaaaaacaacgtggtgccgattggcccgctgcacgtcacctctgatgaacctggccacttccgcctgttcgttgacggcgagaacattatcgacgccgactaccgcctgttctacgtccatcgcgggatggaaaagctggcggaaacccgcatgggttataacgaagtgaccttcctgtcggaccgggtgtgcggcatctgcggcttcgcccacagcaccgcttacaccacctcggtggagaacgcgatgggcatcgtggtgccggagcgggcgcagatgatccgcgccattctgctggaggtggaacgcctgcactcgcacctgctgaacctcggtctggcctgccactttaccggctttgactccggctttatgcagttcttccgcgtgcgcgaaacctcgatgaagatggcagagatccttaccggcgcgcgtaaaacctacggcctgaacctgatcggcgggatccgccgcgacctgctgaaagaggacatgatccagacccgtcagctggcgcagcagatgcgtcgcgacgtgcaggagctggtggatatgctgctcagcacgccgaatatggaacagcgtaccgtcggtattggccgtctggacccggaaatcgcccgcgacttcagcaacgtaggcccgatggtgcgcgccagcggccacgcccgcgacacccgcgccgaccacccgtttgtcggttacggcctgctgccgatggaagtccacagcgagcagggctgcgacgtgatatctcgcctcaaggtgcggatcaacgaggtttacaccgcgctgaatatgattgatttcggtctcgataacctgccgggcggcccgctgatggtggaggggttcacctatattccgcaccgcttcgcgctgggcttctccgaggcgccgcgcggcgacgatatccactggagcatgaccggcgacaaccagaaactgtaccgctggcgctgccgggcggcgacttacgccaactggccgaccctgcgctatatgctgcgcggcaacaccgtttccgatgcgccgctgatcatcggcagcctcgacccgtgctactcctgtactgaccgcatgaccgtggtcgatgtacgcaagaagaagagcaaagtggtgccatacaaagagctggagcgctacagcatcgagcgtaaaaactcgccgctgaaataa

SEQ ID NO: 212178 - DNA, 543 bp, Klebsiella pneumoniae
atgtttacctttattaaaaaagttattaagaccggcaccgcgacgcacgcctacccgctggagccgatgccggtagacaaaaactttcgcggcaagccggagcatacgccacagcagtgtatcggctgcgcggcctgcgtgaacgcctgcccgtcgaacgccctgacggtcgagatcgatctggccactaaccagctggcgtggcagttcaatctcgggcgctgcatcttctgcggtcgctgtgaagaggtgtgcccgacggcggcgattaagctgtcgccggagtatgagctggcggtgtggaagaaagaggatttcctccagcagtcgcgcttcgctatctgccactgccgggagtgccagcgtccgttcgcggtgcagaaggagatcgactacgccatcgcgctgctcaagcataacggcgatacccgcgccgagctgcaccgcgaaagcttcgaaacctgcccggaatgcaagcgccagaaatgcctggtgccgtccgatcgtattgaactgacccgccacatgagggaggccagctga

SEQ ID NO: 212179 - DNA, 768 bp, Klebsiella pneumoniae
atgagcactttacttggcccgcgcgatgaaaacggcattcccgtgccgatgacggtggatgaatccatcgccagcatgaaggcctcgctactgaagaagattaaacgttcggcctacgtctaccgcgtcgactgtggcggctgcaacggctgcgaaatcgaaattttcgccaccctttcgccgctgttcgacgctgaacgcttcgggattaaggtggtgccttcgccgcgccatgccgatattctgttgtttaccggggcagtgactcgcgcgatgcgctccccggcgctgcgcgcctggcagtcggcgccggatccgaagatctgtatctcctacggcgcctgcggcaacagcggcggcatcttccacgacctgtactgcgtctggggcggtaccgataaaatcgtaccggtcgacgtctatattccgggctgcccgccgacgccagccgccacgctgtacggcttcgccatggcgcttggcctgctggagcagaaaattcatgcccgtctgccgggtgagctcgacgaacagccgaccgagctgctgcatgccgatatggtgcagcctctgcgggtgcgcatcgatcgcgaagcgcggcgtctggcgggctatcgctatggacggcagattgccgatgactatatgcgtctgcttggccagggcgacagccaggtgctgcgctggctggaggcggagaaagatccgcgtctgaccgagatcgtcacccatctcaaccaggtggtcgagggggcgcgtatccgatga

SEQ ID NO: 212180 - DNA, 411 bp, Klebsiella pneumoniae; identical to SEQ ID NO: 139558

SEQ ID NO: 212181 - DNA, 471 bp, Klebsiella pneumoniae
gtgactgacgttttactctgtgtcggcaacagcatgatgggcgacgacggcgccggcccgctgctggcggagatgtgcgcggcgaacccggccggccagtgggtggtcatcgacggcggcagcgcgccggaaaacgacatcgtggcgatccgcgaattacgccccgaacgcctgctgattgtcgatgccaccgatatgggcctaaaccccggcgacattcgcatcatcgatcccgacgacatcgccgagatgtttatgatgaccacccataacatgccgctcaactatctggtcgatcagctgaaagaagacgtcggcgaggtgattttcctcggcattcagccggatatcgtcggtttttattatccgatgacccagccggtgaaagaggccgttgcccgggtgtatcagcagttggcaggctggaagggcaagggcggctttactcagctggaggccgcggacgactag

SEQ ID NO: 212182 - DNA, 309 bp, Klebsiella pneumoniae; identical to SEQ ID NO: 138899

SEQ ID NO: 212183 - DNA, 1425 bp, Klebsiella pneumoniae
atggcgagtttcccacagggatttttatggggcggcgcactggccgccaaccagtctgaaggcgcttatcttgaaggcggtaaggggctgaccaccgtggatacccttccccacggcgcccatcgcctgccggtaaaattaggcctggagaagcgctttacgctgcgtggagacgaattttaccccagccaccaggcgatcgatttttaccatcgctataaagaagatatcgccctgatggccgagatggggttcagcgtctttcgcacctccatcgcctggagccgcctgttcccacgcggcgacgaacagcagccgaatccgcagggcatcgccttctatcgctcactgttcgaggagtgcaaaaagcacggtatcgagccgctggtcaccctgtgccattttgacgtgccgatgcatctggtgatggagtacggctcctggcgcaaccgcaaaatggtggattttttcagccactacgcccgcacctgctttgaagcttttgacggcctggtgaaatactggctcaccttcaatgaaatcaacatcatgctgcacagcccctactccggcgccggtctggtgtttgaagagggtgaaaaccaggagcaggtgaagtatcaggccgcgcatcacgagctggtggccagcgcgctggcgacgaaaatcgcccatgagattaacccgcaaaatcaggtcggctgtatgctggccggcggtaatttctacccttactcctgcaagccggaagatgtatggatggcgctggagaaggaccgcgaaaacctgttctttatcgatgtccaggcccgcggcgcctatccggtgtgggccgcgcgggtgttccgggaaaaaggggtcacgattgcgaaacagccgggcgatgacgagatcctcaaaaacaccgtcgatttcgtctcctttagctactacgcgtcgcgctgcgcctcggcggagatgaacgccagcaacaccaatgccgccaacatcgtcaagtcgctgaagaacccgcacattccggccagcgaatggggctggggcatcgacccgctgggcctgcgcatcaccatgaacatgatgtacgaccgctatcagaaaccgctgttcctggtggaaaacgggcttggcgcccgcgatgagatcgatgccaatggggacatcaatgacgactatcgcatcagctacctgcgcgagcacatcagggcaatgcgtgacgctatcggcgacggcattccggtgctgggctacaccagctggggctgcatcgatctggtctcggcgtccaccggcgagatgagcaagcgctacggctttgtctatgtcgatcgcgacgatgccggcaacggcaccctggcgcgtaagcgtaaaaagtcattcttctggtaccagaaggtgatagccagtaacggcgccgatctcgactaa

SEQ ID NO: 212184 - DNA, 1443 bp, Klebsiella pneumoniae
atgtcgaaaaattatgcagccctggcgcaacagatagtcgcggcaatcggcggggtcgacaacgtcgccgccgttacccactgcatgacccgtctgcgcttcgtggttaaagacgacgaacaggtcgatagctctaccctgaaagggctggccggggtgctcggcgttgtgcgcagcgataaccagtgccaggtgatcatcggcaacactgtctcccaggcctaccgcgaggtggtgaatctgctgcctggcgacctgcgcccggctgagccgcagggcaaagcgccgctaaccctgaaacgcatcggcgccgggatccttgacgcgctgatcggcaccatgtcgccgctgatcccggcgattatcggcggatcgatggtcaagctgctggcgatgatcctcgagatgagcggcgcgttgccgaaaggctcgccgacgctgaccctgctggcgcttatcggcgacggcgcatttttcttcctgccgctgatggtggccgcctccgcggcggtgaaattcaaaactaatatgtcgctggctatcgccatcgccggggtgctggtgcatcctgggtttatcgaattgatggccaaagccgcccagggagaacacgttgaattcgcctttattccggttaccgcggtgaaatacacctacacggtgatcccggcgctggtgatgacctggtgcctgtcgtatatcgagcgctgggtggatcgcattaccccggcggtgacgaaaaactttctgaagccgatgctgatcgtgttgatcgccgccccgctggcgatcctgctgattggcccgctgggcatctggatcggcagcgccatttccgcgctggtgtatacgatccacagctatctcggctggctgtcggtggcgatcatgggcgggctgtggccgctgttggtgatgaccggtatgcaccgcgtctttacgccgaccatcattcagaccatcgccgaaaccggcaaagagggtatggtgatgccatcggagatcggcgccaacctgtcgctcggcggctcttcgctggcggtagcgtggaaaaccaaaaacccggagctgcgccagacggcgctggccgccgcggcatcggcgattctggccgggatttccgaaccggcgctgtacggcgtggcggtgcgcctgaagcgcccgctgatcgccagcttaatcagcggctttatctgcggcgcggtggcaggtattgccggactggccagccattcgatggcggcgccggggctgtttaccagcgtgcagtttttcgatccggccaatccaatgaccatcgtctgggtgtttggcgtgatggcgctgtcggtggtgctgtcgtttgccctgacgctgatccttggctttgaggacattcccgttgagcaggccgctgccgacgccagagcgcgccaggccagggcccaggcatcccacgcctga

SEQ ID NO: 212185 - DNA, 1014 bp, Klebsiella pneumoniae
atggcaacgatgctggaggtcgcaaagcgcgcgggggtatcgaaggcgaccgtttcgcgggtgctgtcgggcaacggctatgtcagccaggagaccaaagaccgggtgtttaaggcggtggcggagagcggctaccggcctaatctgctggcgcgcaacctggcgaccaaaaccacgcaaaccctcggcctggtggtgaccaataccctgtaccacggcgtctattttagcgaactgctgtatcacgtggcgcggatgacggaggataaagggcggcagctgatcctggccgacggcaagcacagcgcgcaagaggagcgggaggcgatccagtacctgctggatctgcgctgcgatgcgatcatcatctacccgcgctttctcaccgtcgatgagatggacgagatcgttgagaaccactcgcagccgatcatggtgcttaatcgccgcctgcgccgccacgccagccactgcgtctggtccgatcaaaaagcctcggcgatgcgggtagtggagcggctgattgcgcttggccatcgcaatatcgcctttattaccggctcccttgactctcccaccggcgtcgaacgcctcgccggctacaaagacgcgctggctggccacggcatcgccctgaacgaggcgcttatcgccgaagggcgctggacgccggaaaccggggcggcgggggtggagagcctgcgtaagcgcggggttacctacagcgcgctggtggcgagcaatgacgatatggccatcggggcgatgaagcagcttcaccagctgggcgttaaggtgccagaacaggtctcggtggtggggtttgacgatattgctcttgcgccgtatatggtgccgtcgctcgccagcgtccgggtgccggtgacggagatgattaaagagagcatcaatcggctgatctttatgctggatggcggggaattcaactttcagcaaagctttcccggagcgctgattgaacgcgagtcgctggtggcgggcccctgtgcctga

SEQ ID NO: 212186 - DNA, 528 bp, Klebsiella pneumoniae
atgaaccgtttcattatcgccgatgcgagcaaatgtatcggctgtcgcacttgcgaagtggcctgcgtggtatcccatcaggaacatcaggactgcgcctccctgacgcctcacacctttcagccgcgtattcacgtgatcaaaggggtcaatgtttccacggcgaccgcctgccgtcagtgtgaagacgccccctgcgccaacgtctgcccgaacggcgccatcagccgtgataaaggctttgtccatgtgatgcaggagcgttgcatcggctgcaaaacctgcgtcgtcgcctgcccgtacggggcgatggaggtggtggtgcgcccggtgatccgccatagcggcgccggactgaacgtcgtggcggaaaaagccgaagccaacaagtgcgatctctgcttccaccgcgagagcggtccggcctgcatggaagtgtgcccgacgcacgccctggtgtgcgttgaccgcaacaaacttgagcagatgaatatcgagaaacgtcgccgtacggcgctggcctggtaa

SEQ ID NO: 212187 - DNA, 2235 bp, Klebsiella pneumoniae
atgaacggggtgcaaatccgcattcgcggtaaagtgcagggggtggggttccgcccctttgtctggcagctggcccgggcgcaggcccgctgcggcgatgtctgtaacgacggcgacggcgtactggtgcggctggtcgggggcgacgacggttttactgccgctctggctgaccactgcccgccgctggcgcggatcgacagtaccgcctgcattccctatcgctgggcggccacgccgcaggatttcaccatccgcgagagcggggcgggacggatgcggactcagattgtgcccgatgccgcgacctgcccggcgtgcctcgcggagatgaacgatccccgggcacgccgctaccgctacccctttatcaactgcacccactgcggcccgcggttgaccattattcgcgccatgccctacgaccggcccttcaccgcaatggcgccgttcccgctctgttccccttgtgaggcggaattccgcgatcctgccgatcgccgttttcacgcccagccggtggcctgccccgactgcgggccgcgactggaatggcgggcagagggggaaacgctggacggcgaggcggcgctgcaggcggctatcgcccggctggcggcgggcaaaatcgtggcgataaaaggcatcggcggctttcatctggcctgcgatgccggtaaccccgctgccgttgccacgctgcgggcgcgaaaacaccgcccggcaaaaccgctggcggtaatgctgccgacggcaacgggcttacccgccgccgctgcggcgctgatgggctccccggcggcgcccatcgtactgattgccaaagcgcaggtctccggcctgtgcgacgaaatagcgccagggcttgcggaagttggggtgatgctgccgtctaatccgctgcagcatttgcttctgcagggcctggcgcgccccatcgtaatgacctccggcaaccttagcggccgtccgccgacgttaagtaatgctcaggcgctcaatgagttagccgacattgccgacggctttctcttgcataatcgcgacatcgtacagcggatggatgattcactggtgcgctcaagcggtgaaatgctgcgccgcgcccggggctacgtcccggacgcgctgccgctgccgccagggctaggagacatcccgccgctgctggctctcggcgcggatatgaaaaataccttctgcctggcgcgcggcagcgaagcggtgctgagccagcactttggcgatcttggcgaggaaggtgttgaacagcagtggcgcagcgccctgcagctgatgcagagcatttacgcgtttgtgccgcagcgggtggtggttgatgcccatcccggctatcgctcaacgcagtgggcggcctccctgcccctgccgctggagacagtgctgcatcaccatgcccacgccgcggcatgcctggcggagcaccgctggccgcttgacggcggggacgttatcgccctgacactcgacggtattggtatgggggagaacggcgcgctgtggggcggggagtgcctgcgggtcaactatcgcgaatgcgaacatcttggcgggctgccggccgtcgcgctgccagggggggacctggcggcacgccagccgtggcgaaatttgctggcccactgtctggcctttgtccctgactggcaggattatccgcaggccgccaccctgcgccagcgcaactggccgctgctggcgcaggccatcgagcgcgggattaacgcgccgcgcgcctcatcctgcggacggctgtttgatgccgttgcctgcgccctggattgcgcgccggagagtctgagctatgaaggcgaagcggcctgtcggctggaggcgctggccgccagctgccccggcgtcagccacccggttacgctgccgtggcgcgacgacgcgctggatttagcgaccttctggcggcaatggctgagctggcaggcgactccggcgcagaaagcctgggcattccacgacgccctggcctgtgggctggcggcgatggcccgcgactgcgccaccgtccgcggcatcgacacgatggtctgcagcggcggggggctgcataaccgcctgctggcggcgcgattgaccttttatctggcggattttactctgctgtttgcacagcagttgccggccggcgacggcgcaatcgcctatggtcaggcggtgatcgccgccgcccgctggcaggctcaaggaatacaaccatga

SEQ ID NO: 212188 - DNA, 1014 bp, Klebsiella pneumoniae
atgataatgacagttttacgccagcagccgcgcgccgcgggtctggtgctggggttgatcgcggcgaatttactggcctggtgctgggcgctgcaggcctttggcgacagcggcgcgctgatggccgccagcctgctggcctggggctacggcctgcgccacgcggtggacgccgaccatattgcggcgattgataacgtgacccgcaagatgatgcagcaggggcggcggcctttcgccgtcggggcgtggttttcgctgggccactcatcgattgtggtgctggcctcggcggcgattgccgcgaccgccaccgccttcagcacgcagatgagctggctgcatgataccggcagcgttatcggcaccgccgtgtcggccctgtttttactggcgatggcctttatcaacctggtgattttacgcagcgtgtggcgcagcttccaggcatggaagcgcggtgaaaaggtcagcgacgaaatcgtcagcggcggcggcatgatgagctggctgtttggcaagaccttccgtctgataagccgcagctggcagatgtacctggtcggtttcctgtttggcctcggttttgataccgccaccgaaatcggcgtactgggtatctccgccgccggcgcgtcgagcgggatttccgtctggtcgattatggtcttcccggcgctgttcgccagtggtatggcgctggtggataccctcgataacgtgctgatggtcggcgcctacggctgggcgttcagcaaaccgcagcgcaagctctattacaacatgaccatcaccggcacctcggtggtggtggcgctgtttatcggcggcctggaagcgctgggcctgctgatggataagtttgcgctcagcggcggaatatggcgctgggtaggggcgttaaacgacaacctcggcgacgccggatttgtggtggtcgggttgtttgtcgcctgttgggcgctatcggtgcttaactatcgctggcgcggctacgacaatctggcgcgctag

SEQ ID NO: 212189 - DNA, 1134 bp, Klebsiella pneumoniae
atgagtgatggcatcgtcatcatcggctcgggcttcgcggcccgccagctggtgaaaaatattcgtaagcaggatgcgcaaatcccgctgaccctcatcgccgccgatagcatggatgaatacaacaaaccggacctcagccatgtcatcagccgcggacagaaggccgacgatctgaccctgcaaagcgccggcgagttcgccgagcagtacactctgcgtctgtttccccatacctgggtaagcgatatcgacgccgaaaaccggttagtgaagagccacgataaccagtggcgctacgacaaactggtactggccaccggcgcgacgccgtttatcccgtcggtaccggggcgcgagctgatgctaacgctcaatagccagcgcgaatatggcgcggcgcagagccggctgcacgacgcgaagcgcgtgctgatcgtcggcggcggcctgattggctgcgaactggcgatggatttctgccgcgccggtaaagcggtaacggtagtcgataactccgccagcgtgctggcggcgctgatgccgccggaggccagcagccgcctgcagcatcggctcaccgagatgggcgtacatctgatgctgaaaacgcagctggaggggctggagcaaaccgccgacggcattcgcgtcagtctcgatcgccagcgcgcgataaccgtcgatgcggtggtggccgccgccggcctgcgcccggaaacgtcgctggcgcgccacgccggactgcagattaaccgcggtattgtggtcaatagccagctgcaaaccagcgacccggcgatttatgcgctcggcgactgtgcggaaatcaacggcgtggtactgccgttcctgcagccgattttactcagcgccatgtgcctgagtaaaaatctgctggcgcaggcgggagaactcaagctgccgccaatgctggtgaaggtgaaaaccccggatctgccgctgcatctggccggcgacacccgccgcgacgatctgacgtggaacatcgtggccgccaaagaggggctggtggcgaaaggcgtggatgccgaaaaccagctgcgcgcctttgtggtcagcgaagacaaaatgaaggaagcctttgcgctgctcaaacaactggtaagttga

SEQ ID NO: 212190 - DNA, 1449 bp, Klebsiella pneumoniae
atgtctattgtggtgaaaaataacattctttgggttggccaacgtgactgggaagtgcgtgatttccacggcaccgaatataaaacgctgcgcggcagcagctacaacagctatctcatccgcgaagagaaaaacgtgctgatcgataccgtcgatcataaattcagccgcgagttcgtacagaacctgcgccgcgaaatcgacctcgccgacctcgactatatcgtcattaaccacgccgaagaggaccatgccggcgcgctgaccgaactgatgatgcagatcccggatacgccgatctactgcaccgccaacgccatcgactcgatcaacggccaccatcatcatccggagtggaacttccacgtggtgaaaaccggcgatactctcgacatcggtaacggtaaacagctgatcttcgtggaaacgccgatgctgcactggccggacagcatgatgacctacctgaccggcgacgcggtgctgttcagcaacgacgccttcggccagcactattgcgacgaacatctgttcaacgatgaagtggaccagactgaactgtacgaacagtgccagcgctactacgccaacatcctgacgcccttcagccgcctggtgacgccgaaaattactgaaatcctcggcttcaacctgccggtggagatgattgccacctcccacggcgtggtctggcgcgataacccgacgcaaatcgtcgagaaatacctcgagtgggcggcggattatcaggaagatcgcatcaccatcttttacgacaccatgtccaataatacccgcatgatggcggacgccattgcccaggggatcaccgaggttgacccacgggtagcggtgaaaatctttaacgtcgcccgcagcgacaaaaacgacatcctcaccaatgttttccgctcgaaaggcgtacttgtcggcacgtccaccatgaacaacgtgatgatgccgaaaatcgccgggctggtggaagagatgaccgggctgcgttttcgcaataaacgcgccagcgcctttggctcgcacggctggagcggcggcgcggtagaccgcctgtccacccgcctgcaggatgccggctttgagatgtcgctgagcctgaaagccaaatggcgcccggatatcgacgcgctggagctgtgccgccaacacggtcgcgacatcgctcgccaatgggccctctcgccgctgccggttgctgaagcagcgacaacgccggaaccacaggactgcgcctgtgccgcggccgcggccgccgatctcggtcccatgatgcagtgcagcgtgtgccagtgggtctatgacccggcgaaaggcgaacctaatcaggatgtacagccgggtacgccgtggagcgaagtgccggacaatttcctctgccctgagtgttctcttggcaaagatgtctttgacgtactggcgacggaggcaaaatga

SEQ ID NO: 212191 - DNA, 1551 bp, Klebsiella pneumoniae
atgagtttttccgtcgacgagctggcgagaatcgccatagatttacaaagcgatattggtcacaccgaccgcttttcgcgcctgattactaccctgcggcaaattcttggctgcgatgcctcggcgctgctgcgctatgaggcgcatcagtttgtgccgctggcgatcgatggcctggcgcaggatgtgctcggtcggcgctttgccctggaaggacacccgcggctggaggcgattgcgcgcgccggggatgtggtgcgcttcccggcggatagcgacctgcccgacccctatgacgggctgatccccggtcatgagagcctcaaagtccatgcctgcgtgggactgccgctgtttgccgggcagacgctgattggcgcgctgaccctggacggcatggatgccgatcgtttcgatagcttcagcgatgaagagctgcggctgattgccgcgctggtggccggggcgctgaataatgcgctgcttatcgcccgccttgaagcgcaaaacgtcctgccggcgcaggcggtgaattacccgctgccggagcgccaggagatcatcggcctgtcggggcccatgctgcagctgaaaaaagagatcgatatcgtcgccgcctcggatttaaacgtgctgatcagcggcgaaaccggcaccggcaaagagctggtggcgaaggcagtgcaccagggatcgccgcgagccgccaaccctctggtgtacctcaactgcgcggcgctgccggaaagcgtagcggagagcgagctgttcggccatgtgaaaggggcatttaccggggctatcagcaaccgcagcggtaaatttgagatggcggataacggcaccctgtttcttgacgaaatcggcgaactgtcgctggcgctgcaggccaaactgctgcgcgtgctgcagtatggcgatattcagcgcgtcggcgatgaccgcagcctgcgggtcgatgtgcgggtgctggcggcgacgaaccgcgatctgcgccaggaggtggtggaagggcgctttcgcgccgatctgtaccatcggctgagcgtcttcccgctgtcggttccgccgctacgcgagcgggaaagtgacgtggtgctgctggcgggctatttctgcgagcagtgccgcctgcggatggggctggcgcgggtcattttggctgaggcggcgcgaaaccggctgcagaagtggtcctggccgggcaacgtgcgcgaactggagcatgctatccatcgggcggtggtgctggcgcgggccacccaggccggtgatgaagtggtcctggagccgcagcatttccagtttgcggtggcggcgccgatgttgccgactgagacggcggcagcggcgcccgcgacgggaaacatcaatctgcgcgaggcgaccgactcttttcagcgagaagccattagccgcgcgctggaggctaaccagggcaactgggcggcgaccgcccgagcgctggaactggacgtcgccaacctgcatcggctggcgaaacgtctgggtcttaaaggatccccgcctggtaaaagttctgcaggttaa

SEQ ID NO: 212192 - DNA, 966 bp, Klebsiella pneumoniae
atgagtaactttttgttagaggccggacgccagaccctgatgcttgagctgcaggaggcgagccgcctgccggagcgcctgggcgacgacttcatccgcgcggcggaaaccattatccactgcgagggcaaactgattgtctccggtatcggtaaatccggccacatcggtaaaaagctggcggcaaccttcgccagcaccggcaccccggcctttttcgtccatccggcggaagccctgcacggcgatctcggcatgctcgatagccgcgacgtgatgctgtttatctcctactccggtagcgcgaaagagctggatctcatcgtgccgcggctggaagaaaaaggcattccgctgctggcgatgaccggcaaatccacctcgccgctggcgctggcggcgaaagcggtgctggatatcgccgtggagcgcgaggcctgcccgatgcatctggcgccaacctccagcaccgtcaacacgctgatgctgggcgacgcgttggcgatggcggtgatgcaggcgcgcggtttcaatgaagaggatttcgcccgttcccacccggcgggcgccctcggcgcgcggctgctgaacaaagtgcatcacctgatgcgccgcgacgaagaagtgccgcgggtcaatgccgaggccaacgtcatggacgccatgcttgaactaagccgaaccgggctcggcctggtggcggtctgcgatgaagccaaccgcgtgcagggcgttttcaccgacggcgacctgcgccgctggctggttgctggcggtacgctcaacgatggcgtcactcgggcgatgacccgcaatggcgtaacgctgcaggcggatagccgcgcggtggaagccaaagagcgactgatgaaacacaaaatcagcgccgcgccggtagtggatgagaacggccaactggtcggcgccattaacctgcagaacttttaccaggcggggatcctttaa

SEQ ID NO: 212193 - DNA, 774 bp, Klebsiella pneumoniae
atgaaaccacgtcagcgccaggcagccattctcgagttcctgcagtcgcagggaaaatgctcggtcgaagagctggcgcaacacttcgataccactggcaccaccatccgcaaggatctggtcacgctggaaaacgccggcaccgtcattcgcacctacggtggcgtggtactcaacaaggatgaagccgatccgccgattgaccataaaacgctgatcaacacccataaaaaagcgcagattgccgaggctgccgtgcgatacatccacgatggcgattcaattatcctcgacgccggcagcaccgtgctgcagatggtgccattgctgagtcacttcaataacatcacggtgatgaccaacagcctgcatatcgtcaacgcgctatcagagttcgataacgagcagaccatcctgatgccgggcggcaccttccgtaaaaaatcggcctcttttcacggccagctggcggaaaacgccttcgaacagttcagcttcgacaagctgtttatgggcaccgacggtatcgatctgaacgccggagtcactacctttaatgaggtctataccgtcagcaaagcgatgtgcaacgccgcccgcgaagtgatcctgatggccgactcatccaagtttggtcgtaaaagccccaatattgtctgcggccttgaacgcgtggataaattgattaccgatgccgatattgacccggaattccagcgggcgctggaagccaaaggcattgaagtcattattactggagaacatcatgagtaa

SEQ ID NO: 212194 - DNA, 360 bp, Klebsiella pneumoniae
atggttactgcattaatcatcgtcgccgccatcgcctggcttacccagctggcctttggcggctggcagatccgccgcttcaatcgcgcctttgatagcctgtgccagcaggggcgggtgggcgtcggccgctccgccggacgctttcaaccgcgcgccatcgtcgccatcgccgtcgatgataacgaccgcattagcgacacgctgctgatgaaaggcttcaccattttcgccagtccgcaaaagatcccggctctggcaggcaaacatattgcggaattgcagcctgatgtgatctttccccatgatccgcgctgtcagaatgcactatcattagcgcttaatccgaaacatggataa

SEQ ID NO: 212195 - DNA, 780 bp, Klebsiella pneumoniae
atgaatcaggttgctgttgtcattggcggtggacaaaccttaggagagtttctgtgccgcgggctggccgccgagggctaccgcgtggcggtggtcgatattcagagcgaaaaagccagccgcgtcgcccaggagattaacgctgagtatggcgaaggtatggcgtacggcttcggcgccgacgccaccagcgaggccagcgtcaccgccctggcccacggggtggatgagattttttcgcgcgtcgacctgctggtgtacagcgccgggatcgccaaggcggcgtttattagcgacttcgcgctgggggatttcgaccgctcgctgcaggtcaatctggtgggctattttctctgcgcccgcgagttctcgcggttgatgatccgcgacggcattaaggggcggatcattcagatcaactcgaaatccggcaaagtcggcagtaagcacaactccggctacagcgcggcgaagttcggcggcgtcgggctgacccagtcgctggcgctggatctggcggaatatggcattaccgtgcattcgctgatgctcggcaatctgctgaagtcgccgatgttccagtcgctgctgccgcagtatgccaccaagctcggtatcgatgagagcgaagtcgagcagtactacatcgacaaggtgccgctgaagcgcggctgcgaatatcaggatgtgctgaacgtattgatgttttacgctagcccacaggcgtcgtactgcaccgggcagtcgatcaacgtcaccggcggccaggtgatgttttaa

SEQ ID NO: 212196 - DNA, 363 bp, Klebsiella pneumoniae
atgactgtgatttaccagaccaccattacgcacatcggcgcctgcgcgacgatggcgctggaagagcaaatgctgatcaccttccgcgagggcgccccggcggatatcgaagagtactgctttattcacaaccacggcaagcttgctggcacgctgcagccgggggcagagctgcagcttggcgaacagcgctacccggtgaccgccgtcggcgaggtcgctgaacaaaacctgcgcgagctgggccacatcaccctgcgctttgacggccatcgtgaagcggagttcccaggtaccgtccatgtggcgggcccggtgccggacgccatcgcgcccggctgcgtactgaagtttgttgcttaa

SEQ ID NO: 212197 - DNA, 981 bp, Klebsiella pneumoniae
atgacccgtattcgtatagagaaaggcaccggcggctggggcggcccgcttgagctcgacgccgtcgaaggcaaaaagatcgtctatatcaccgccggcacccgcccggcgatcgttgaccgcatcgccagcctgaccggctggcagccggtggacgggtttaaagagggggaaccagcggaaagcgacatcggcgtggcgattatcgactgcgggggcaccctgcgctgcgggctctatcctaagcgccgcatcccgacggtgaatatccatgccaccggcaaatcagggccgctggcccagtacatcacggaagatatttatgtctccggcgtcaaagaggacaacatccagtgcatcgctcccgacagcgcaggggtttccgagccgccggcggaaaacaagagcgcgggtcgcgattacgacaccagcaagaagattactgaacagagcgatggcctgctggcgaaggtcgggatgggcatgggttcggtggtggcggtgctgttccaggccgggcgcgacaccattgatacggtgctgaaaaccattctgccgtttatggctttcgtctcggcgctgatcggcatcatcatggcctccggcatcggcgactggatcgcccacggcctggcgccgctcgccagccatccgctggggctggtaaccctggcgctgatttgctctttcccgctgctgtcgccgtttctcggccccggcgcggttattgcccaggtgatcggcgtgctgatcggcgttcaaatcggcctcggcaacattccgccgcacctcgccctgcccgccctattcgccattaacgcccaggccgcctgcgattttattccggtaggcctgtcgctagccgaagcccgccaggataccgtgcgcgtcggcgtgccgtcggtgctggtcagccgctttctgaccggcgcaccaacggtgctgatcgcgtggttcgtttccggatttatttaccagtaa

SEQ ID NO: 212198 - DNA, 564 bp, Klebsiella pneumoniae
atgattgacgtcgtgacccacggcgcggagtggtttatcggcctgtttcagaaaggcggcgaggtatttaccggcatggtgaccgggatcctccccttgctgatcagcctgctggtgatcatgaacgcgctgatcaactttatcggccagcagcggatcgagaagctggcgcagcgctgcgccggaaacccaatctcccgttacctgctgctaccctgcatcggcaccttcgtgttttgtaacccaatgacgttaagcctcggtcggtttatgccagagaagtacaagcccagctattacgcggcggcgtcgtatagctgccactcaatgaacggactgtttccacatatcaaccccggcgagctgttcgtctatctcggcatcgccaacggcctcactaccctcggcctaccgctcggtccgctggcggtgagctacctgctggtcgggctggtgactaacttcttccgcggctgggtcaccgacctgaccacctcgattttcgagagaaaaatggcgattcagctttcccagaaagtgcatctgtcaggagcgacatcatga

SEQ ID NO: 212199 - DNA, 1080 bp, Klebsiella pneumoniae
atgttgaagcgtcgctatctggctttacttcccctttgtgtgctcctcgctgcctgcagcagcaaacccaagacccccgcggaaacggagatggcgagtggaaccggcggctttttgctggaaccgcagcataacgtgatgcagatgggcggcgacttcgccaacaacccggcggcggcgcagtttatcgataagatggtggcgaagcacggcttcgacaggcagcagctgcaggagatcctgtcgcaggcaaagcgcctggattacgtcctgcggctgatggatcgtcaggcgccgaccggcctgccgccaaccgggccgaccggcgcctggctgcgctacaagaaacagttcattaccccggataatgtgcagaacggcgtggtgttctggaatcagtatcaggacgcgcttaaccgcgcttatcaggtttacggcgtgccgccggaaatcatcgtcggcattatcggcgtggagactcgctggggccgggtgatgggcaaaacccggatcctcgacgcgctggcgacgctgtcgtttagctacccgcgccgcgccgaatacttctcgtcggagctggaaactttcctgctaatggcgcgcagcgaaagcgacgacccgctggatctgaaaggctctttcgccggggcgatgggctacggtcagtttatgccgtcctcctataagcagtatgcggtcgattttaacggtgacggacatatcaacctgtgggacccggtggatgctatcggcagcgtggccaactacttcaaacagcatggctgggtgagcggcgatctggtggcggtgcaggcgctggggcaggccccggggctggagaatggtttcaagactaaatacagcgtttcgcagctggcggccgcagggctgaccccgacccagccgctgggtaaccatcagcaggccagcctgctgcggctggacgtcggcaccggctatgagtactggtacgggctgccgaacttctacaccatcacccgctacaaccacagcacccactacgcgatggctgtctggcagctgggcctggcggttgcgcaggcccgcggcggttattaa

SEQ ID NO: 212200 - DNA, 711 bp, Klebsiella pneumoniae
atggttagcaacctggtgggcggtgacgctgccatgattgaactggagcagctggtcgccggctatgacggggtagcgatcacccctccgctgagcgggatgatatgccccggcagcctgacggcaattgttggcctcaatggctgcggaaaatcaacgctgctgaaaaccctcgccgggtttcttccgccggtcagtggccgcctgcgctggcagggaacacggccggtgatcggctggctggcgcagcgccatgccctcgagtcgcagtttcctctcaacgtgcaggatgtggtaagccagggcgcatggcccggcgtgtcgctgctgcgcggtctggggggcggcacccggcgacgcatcggcgcggtgctggagcgggtcgggctggcgggcctggcgaaaacgccgatcgaagcgctctccggcggccagtttcagcgcatgctatttgcccgggtgatggtgcagcaggcgccgctggtgatgctcgacgagcccttcaccggtatcgacgaagcgaccagtcgcgaactaatggatttgatcctcgagatgcaccggcagggacagaccatcctggcggtgctgcatgataaccagcgggtggccgactttttccccgagacgctgctgctgactccccagcgcgcctgctggggcgctacccgggcggtgctcccggccttcagtcatgtgaggtcggcatga

SEQ ID NO: 212201 - DNA, 864 bp, Klebsiella pneumoniae
atgatctggcacaccttctttcagcctttcattgaattcggctttatgcgtcgggccctcgtggtgtgtctggcgctgtcgctgagcaccaccatgctgggcgtcttcctgctgctgcggcgcatgagcctgatgggcgatgcgctgtcgcacgccattctccccggcgtggcggtggggtatctgctgagcggcatgtcgctgctggccatgaccctcggcggcttcatcgccggcatcgtggttgccctggtggccgggtgggtgagccggcggacaccgttaaaagaggacgccagttttgccggattttatctgggctcgctggccctgggcgtcaccctggtgtcgctgcgcggctccagcgtggacctcctgcatctgctgtttggctccattctggcggtcgaccgcgatgcggcgctgtttgtcagcggcgtcgccagcctgacgctattgtgcattgcgctgtgctaccgcggtctggtctgcgaggcgttcgacagcgcctggctgcaggtgaatcaccggcggctgcctgcgctgctgcatgggctttttctggcgctgctggtgcttaatctggtggccgggtttcaggtgctcggcacgctgatggcggtaggggtaatgatgctcccggcggtcgccgcacgctgctgggcgcgcacgctgccgggcattctgctgctggcggcgggaatgggcgcgctctgcgcctggctgggattaagcctctcctgggcgattagtcttcccgccgggcccgctattgtgctgaccgccagcgcactgttttttgtttcgctattttttggcacgcgcagccggctgctggtcggttggcgcacattgatggggtaa

SEQ ID NO: 212202 - DNA, 879 bp, Klebsiella pneumoniae
atgaaacgtagtgcaatagtggtcgcgctggccctcggcctgatggcgcagggggccatggcgaaaacgctgaatgtggtaagcagtttttcggtgttgggtgatatagcgcagcaggtcggcggggagcatgtccatgtggataccctggtcggcccggacggcgatccgcacaccttcgaaccgtcgccgaaggatagcgcgctgctcagcaaggccgacgtggtggtggttaacggcctggggctggaagggtggctggatcgcctgattaaggcctctggttttaagggcgagctggtggtggcatcgaaaggcgtcaagacccatacccttgatgaagagggtaaaacggtgaccgatccccacgcctggaacagcgcagcgaacggcgcattgtatgcgcagaatatcctcgatggtctggtgaaagccgacccggaagataaagcggcgttgaccagcagcggcaagcgctatatcgaccagctgacgtctctcgacggctgggcgaaagcgcagttcagcgccattccgctggccaagcgcaaggtcctgaccagccatgacgctttcggctattttggccgggcttaccacgtgaccttcctcgcgccacaggggctctcttcagagagcgaggccagcacggcgcaggtggcggcgctgattaagcaaatcaaagcggatggcgtccatacctggtttatggagaaccagcttgacccgcggctggtgaagcagattgccagcgccaccggcgcgcagccggggggcgaactctatccggaagcgctgtctaagccgggcggcgtcgccgatagttacgtcaaaatgatgcgtcacaacgttgagcttatcgctaaaagcatgaagtaa

SEQ ID NO: 212203 - DNA, 498 bp, Klebsiella pneumoniae; identical to SEQ ID NO: 137314

SEQ ID NO: 212204 - DNA, 1059 bp, Klebsiella pneumoniae
atggcgatcgacgaaaacaaacagaaagcgttggcggctgcactgggccagatcgaaaagcaattcggtaaaggctccatcatgcgcctgggtgaagaccgcaccatggatgtggaaaccatctccaccggctcgctttctctggatatcgcgctgggcgccggcggtctgccaatgggccgtatcgtcgagatctacggtccggaatcctccggtaaaaccaccctgacgctgcaggttatcgccgcagcgcagcgcgaaggtaaaacctgtgcgttcatcgatgctgaacatgcgctggatccggtctatgcacgcaaactgggcgtcgatatcgacaacctgctgtgttctcagccggacaccggcgagcaggcgctggagatctgtgacgcgctggcgcgctccggcgcggttgatgttatcgtcgtcgactccgtcgcggcgttgacgccgaaagcggaaatcgaaggcgaaatcggcgactctcacatgggccttgcggcgcgtatgatgagccaggcgatgcgtaagctggcgggtaacctgaagcagtccaacacgctgctgatctttatcaaccagatccgtatgaaaattggcgtgatgttcggtaacccggaaaccactaccggtggtaacgcgctgaagttctacgcctctgtgcgtctggacattcgccgcatcggcgcggtgaaagagggcgacaacgtcgtcggcagcgaaacccgcgtcaaagtggtgaaaaacaagattgccgcgccgtttaaacaggccgaattccagatcctctacggcgaaggcatcaacttctacggcgagctggtagacctcggcgtaaaagagaagctgattgagaaagcgggtgcctggtatagctacaacggcgacaaaatcggtcagggtaaagcgaacgcgatcacctggctgaaagagaacccggcggcggcgaaagagattgagaagaaagtgcgcgaactgctgctcaacaatcaggatgcgaagccagacttcgttgttgacggcaacgacgcagaagaaaccgaacaggatttctga

SEQ ID NO: 212205 - DNA, 501 bp, Klebsiella pneumoniae
gtgactgaaccttcatcacgccgctccggctacgcccgcctgctggaccgtgctatccgcattctggcgatgcgcgaccacagcgagcaggagctgcgacgcaagctggtcgctccggtgatgagcaaaaacggtcctgaggcgctggacgccacccccgacgagctggagcaggttgtcgcctggtgtatcgaaaaccgctaccttgacgacaaccgcttcgtcggccagttcatcgccagccggagtcgcaagggctatggtccggcgcgcattcgccaggagctcagccagaaaggcattgcgcgccaggtcgttgaccaggcgatgcgcgaatgcgatatcgactgggtgagccttgccagggagcaggcacagcgtaaatacggcgaaccgttaccttccgcctttactgaaaaagtgaaagttcagcgattcctgctttaccgcggctacctgatggaagatatccaggaaatctggcgaaattttgcagattga

SEQ ID NO: 212206 - DNA, 2628 bp, Klebsiella pneumoniae
atgagcaagagcaccgctgagatccgtcaggcgtttctcgactttttccatagcaagggacatcaggtagttgccagcagctccctggtgccgcacaacgatccgaccctgctgtttaccaatgcagggatgaaccagttcaaggatgtcttccttggtctcgacaaacgtaattattcgcgtgcgaccaccgcacagcgttgcgtgcgtgcgggtggtaaacacaacgatctggaaaacgtcggttacaccgcgcgtcaccacaccttttttgaaatgctgggcaacttcagctttggcgattacttcaagcaggatgccatcaaatacgcgtgggaactgctgaccggtgagaactggttcgcgctgccgaaagaaaaactgtgggttaccgtttacgagaccgatgacgaagctttcgacatctgggccaatgaagtaggcgttccgcgcgagcgtattatccgcatcggcgacaacaaaggcgcgccgtttgcttctgacaacttctggcagatgggcgacaccggtccgtgcggcccgtgcaccgaaatcttctttgaccacggcgatcacatctggggcggccctccgggaagcccggaagaagatggcgaccgttacattgagatttggaacatcgtcttcatgcagttcaaccgtcaggctgacggtaccatggagccgctgccgaagccgtccgtcgacaccggtatgggtctggagcgtattgccgcggtgctgcagcacgttaactccaactatgacatcgacctgttccgcgatctgatcgccagcgtggcgaaagtcaccggcgcgaccgatctgacgaacaagtcgctgcgcgttatcgccgaccacattcgctcctgcgccttcctggttgccgacggcgtgatcccgtcgaatgaaaaccgcggctacgtgctgcgtcgtatcattcgccgcgcgatccgtcacggcaacatgctgggcgcgaaggacaccttcttctggaaactggttgccccgctgatcgatgtgatgggctccgccggcgacgagctgaagcagcagcaggctcaggttgagcaggtgctgaaaaccgaagaagagcagtttgcccgcaccctcgagcgcggcctggcgctgctggatgaggagctgtcgaagctgaaaggcgacaccctggacggcgaaaccgccttccgtctgtacgacacctacggcttcccggtcgacctgaccgccgatgtgtgccgcgagcgcaacatcaaggttgatgaagctggttttgaagccgcgatggaagagcagcgccgccgcgcgcgcgagtccagtggtttcggcgccgactataatgcgatgatccgcgttgacggcgcctctgaatttaaaggctacgatcatctggagctgaacggcaaggttaccgccctgtttatcgacggcaaagcggtggatagcgttagcgctggccaggaagcggtggtgatccttgatcagaccccgttctatgcggagtccggcggccaggtgggcgataaaggcgaattaaaaggcgcgggcttctccttcgcagtcagcgacacgcagaagtacggccaggctattggtcatatcggtaaagtcgccagcggcacactgaaagtgggtgacgcggtgcaggccgacgtagatgaggctcgccgtcagcgtatccgtctcaaccactccgcgacgcacctgatgcacgcggcgctgcgccaggtgctcggcacccatgtggcgcagaaaggttcgctggtcaatgataaagcgctgcgctttgacttctcgcattttgaagcgatgaagccggaagaaattcgtgcggtggaagacctggtcaacgcgcagatccgtcgtaacctggctatcgaaaccaacattatggatatcgatgccgcgcgcgcatccggcgccatggcgctgtttggcgagaaatacgacgatcgcgtgcgcgttctgcggatgggcgacttctccacggagctgtgcggcgggactcacgcggcgcgtaccggcgatatcggcctgttccgcatcacgtcagagtccggcaccgctgctggcgtgcgccgtatcgaagcggtgactggcgaaggcgcgatggccatcctgcatgcgcagagcgatcagctcaatgatatcgctcagctgctgaagggtgacagccacaatctcggcgagaaggttcgcgccgcgctggagcgtacccgtcagctggaaaaagagctgcagcagctgaaagagcaggctgcggcgcaggagagcgcaaacctctccagcaaagcggaagagattaacggcgttaagctgctggtcagcgaactgaccggcgttgagccgaaaatgctgcgtaccatggttgacgatctgaagaaccagctcggttcgacgatcgttgtattagctacggtagcggatggtaaggtttctctgattgcaggtgtgtctaaggatgtgacagaccgcgtgaaagcaggggagctggttggtatggtcgctcagcaggtgggcggtaaagggggcggtcgtccggatatggcgcaggccggtggtaccgatgcgtctgctctccctgcagcgttagccagtgtgaaaggctgggtcagcgcaaaactgtaa

SEQ ID NO: 212207 - DNA, 186 bp, Klebsiella pneumoniae; identical to SEQ ID NO: 137318

SEQ ID NO: 212208 - DNA, 261 bp, Klebsiella pneumoniae
gtgcacccgataattaaggtcatgctggtgggcggtaaggcggacgggctgttggtcagcgtcgccgatgacgcgaccgaggtctcggtgacgcctgcgcagtacggtgcgctatccgggcaaccgttgagctaccgaattgttagccaaaccattgacgatgaacgctatttttttggcgttttcagcgacgcccatcaggatagcgataagctgacgcgggtcgccctgacccgtggaatgaaaaaaaagttctgttaa

SEQ ID NO: 212209 - DNA, 1089 bp, Klebsiella pneumoniae
atgattcagtacattcgtattcaaaattttcgctcagtgaaggatatcgcgctggagctcgggccgctgaacattgtcttcggccctaacggctgcggtaaatccaatatttataacgccatccacctgctgaccgctgccgctgagggcaggctttcggggtttatcagcgaagagggcggtctggagaatatgatgtggtccggggagcgttcgcccctcgatcgtcacccccgccggctgcaaatcgcctgccggaccgacagcttcgattatgagctgcagataggcttccctgaaaaattgccctatccgacgcaattcatgctcgatcctatcgttaaagaagagaatatctggctggccggctactcccgccggccttcctcccgcgtactgcagcgcaagaatcaggcggcgtttctcgtcgatgtcaccggggagaaaagtactttcaccgagagtatttatgaaaatgagtcggtgttcggtcagcttggcgagccgcaccgtttccccgaagtatcgcgagtgcgggagaccttgcgccgttggcggttttatcatgaattcgcgattggccgtcattcgccgctgcgtcagccggccgtgggttaccgttcgccagtcctcgacagcgatggccagaatctcgccgccgcctttcagaccattgtcgagatcggcgcggaggagattttgcatgaaatccttgccgacgcctttcccggctgccagttttattgtgaaaacgagcactcgcgtttcgctctgaaaatgcgtcgcgaagggatccgccgcccgctgctggcggcggagatgtccgacggtacgctgcgctttttgtgcctcgccgtcgcgctgctcagtccacgcccgccggcgtttctggcgatcaatgaaccggagaacagcctgcatcgcgacatgttgcccgcgctggcccggctgattatcgaggcctcgcgctacagccagatctggctgaccagccactcggcggagctggcggagcttatcgccgccggggcgccttgtcagcgctatgcgctggagaatcgcggcggggagacgcggattgtcgagtga

SEQ ID NO: 212210 - DNA, 1266 bp, Klebsiella pneumoniae
atgaaattctcagaactggcgccacgagaacggcataatttcgtctatttcctgctgttctttttcttttactatttcattatgtcggcctacttcccgttttttccggtgtggctggcggacgttaaccatttaactaaaacggaaaccgggatcgttttctcgtctatctcgttattcgccattatttttcagccggtgttcggcctgatgtcggataagctcggcctgcgcaaacatctgctgtggaccattacggtattgttaattctgttcgcgccattctttattttcgttttctctccgctgctgcagatgaatattatcgctggttcgctggtaggcgggatctacctggggattgttttctccagcggctccggggcggtggaagcttatatcgaacgcgtcagccgggccaaccgctttgaatatggcaaagtgcgggtcgcaggctgcgtcggctgggcgctatgcgcctcgataaccggcgtgctgttcagcatcgatcccaatatcaccttctggatcgcctccggctttgcgctggtgctcggtctgctgctctggctgtcgcggccggaaagcagcaacagcgcccaggttatcgaggcgctgggcgccaatcgccaggccttttcgctgcgtacggcggcagagctgctgcgtatgccgcgcttctggggctttatcgtctatgtggtgggtgtcgccagcgtctacgacgtgtttgaccagcagttcgccaactttttcaaaagctttttcgccagtccgcagcgcggtaccgaagtgtttggcttcgtcaccaccggcggcgagttgctcaacgcgctgatcatgttctgcgcgccggccatcgttaaccgcatcggcgccaaaaacgccctgctgaccgcggggatgatcatgtcggtgcgtattctcgggtcgtccttcgcctcatcggcagtcgaggtggtgatcctcaagatgctgcatatgtttgagatccccttcctgctggtgggaacttttaaatatatctcttccgcctttaacccgcgcctctcggccaccctgttcctgatcggttttaatctgtcaaaacagttgtccggggtggtgctttccgcctgggtgggccggatgtacgacaccgtcggcttccatcaggcctatctgatcctcggctgcataaccctgagcttcaccctgctctcgttcgtcaccctacgcggcggcaaccgtctgctgccgaccgcagagacgcagagccccgcctga

SEQ ID NO: 212211 - DNA, 3108 bp, Klebsiella pneumoniae
atgcaaattagcgataccggccgcagccacactcctgactttcacgccgtcctcgcccgtgaagactggcagaaccagaccattacccaccttaaccgcctgccagcgcatcccgttttcgccagctggcgcgatgagcttgccgcccgcgataacctaccttcatcccgccgccgtcaactggacggcgagtggcagttctcttacgcccgcagcccgtttgccgtcgatgcgcagtggttgacgcaggatctaccggactgccgcggcacgcctgtgccttccaactggcagatggagggctatgacgcgccgatctacaccaacgtccgctatcccatcgacaccaccccaccgcgggtgccggaggataacccgaccggctgctactccctgcactttacggttgaggacacatggcgcgagaacgggcaaacgcagattattttcgatggcgtcaactcggcgtttcatctgtggtgcaatggcgtgtgggtcggctattcgcaggacagtcgcctgccggcggcgttcgatctcagcccctttctgcgtccgggcgacaaccgcctgtgcgtgatggtcatgcgctggagcgccggcagctggctggaagaccaggatatgtggcggatgagcggtattttccgctcggtatggctgctgaataagccgcagcaacggctatgcgacgtgcagttgacgccagcccttgacgccctctatcgcgacggcactctgcaggtccaggcgaccgtcgaagcgactgaggcggcgcttgccgggcttagcgtcggggttagcctgtggcgcggcgaggagcagatcgccgccgggcggcagccgttaggtaccccgacggtggatgagcgcggccactacgcggaacgggtcgatttctccctggcggtggcgacgccggcgcactggagcgcggaaaccccgaactgttatcgcgccgtggtcaccctgtggcgcggcgacgaactgctggaggccgaagcgtgggacatcggttttcgccgcatcgagattgccgatggcctgctgcgtctcaacggtaaaccgctgctgatccgcggcgttaaccgccatgagcatcatcatttgcgcgggcaggtggtcaccgaggcggatatggtgcaggacattctgttgatgaagcagaacaactttaacgccgtgcgctgctcgcactatcccaacgcgccgcgctggtatgaactctgcaaccgctacggtctgtacgtggtcgatgaagccaatattgaaacccacgggatggtgccgatgaatcggctgtccgacgatccggcgtggctaccagccttcagcgcccgcgtcacccggatggtacagagcaaccgcaaccatccgtgcattatcatctggtcgctgggcaacgagtccggcggcggcggcaaccacgaagcgctgtaccactggctgaaacgcaacgatccgagccgtccggtgcagtacgagggcggcggcgcggataccaccgccaccgatattatctgtccgatgtacgcccgcgtcgaacgcgaccagccgatcccggcggtacccaaatgggggatcaaaaaatggatcagcctgcccggtgagcagaggccgctgatcctttgcgagtacgcccacgcgatgggcaacagcctcggcaacttcgccgattactggcaggcctttcgcgagtatccccggctgcagggcgggtttatctgggactgggccgaccaggcgatccgcaaaacctttgccgacggcagcgtcggctgggcctatggcggcgactttggtgataagcctaacgatcgccagttctgtatgaacggtctggtgtttcccgatcgcacgccgcatccgtcgctggtggaggcgaagcacgcccagcagtattttcagttcacgctgctgtcgacctcgccgctgcgggtgcgcatcatcagcgaatacctgttccgcccaaccgataacgaagtgctgcgctggcaggtgcaggcggccggtgaacccctgtatcacggcgacctgaccctggcgctgccccctgagggcagcgacgagataacgctgctcgatagcctgatcctgcctgaaggcgcccgcgcggtgtggctgacgctggaggtgacccagccccaggcgaccgcctggtcagaagcggagcaccgcgtcgcctggcaacagtttcccctgcccgccccgctggcgctgccggcgcccaccgtgtctgccggcgctccggatcttatcgtcagcgatgaggtctggcagatccgcgccggttcgcaatgctggaccatcgatcgccggacgggtctgctgagccgctggtcggttggcggtcaggagcagctgttgacccccctgcgtgaccagtttattcgcgcgccgctcgacaacgacatcggggtcagcgaagtagagcgtatcgaccccaacgcctgggtggagcgctggaaaagcgccggcctgtacgatcttgaggcgcactgcgtccagtgcgatgcgcagcgcctggcaaatgaaaccctcgtcgactgccgctggcactacctgcgcggcgaagaggtagtgattgtcagccactggcgcatgcacttcactgctgacggaaccctgcggttggcagtggacggcgaacaggcggaaaccctgccgccgctgccgcgggtcgggctgcacttccaggtggcggatcagcaggcgccggtgagctggctgggtctggggccgcatgagaactaccccgaccggcggagcagcgcctgcttcgcccgctgggagcagccgctggcggcgatgaccaccccctacatcttcccgacggaaaacggcctgcgctgtgatacccaggcgctggactgggggcgctggcacatcagcggtcatttccacttctccgttcagccatggagcacccgtcagctgatggagaccgaccactggcacaagatgcaggccgaagacggcgtgtggatcaccctcgacggcctgcatatgggggtgggaggcgatgactcctggacccccagcgtgctgccgcagtggctcctgagccaaacgcgctggcagtacgaggtctcattgcgttgcttttaa

SEQ ID NO: 212212 - DNA, 1065 bp, Klebsiella pneumoniae
atgccgcgtcgtaccgcaaccctggaggatgtcgcccgcgccgcgggcgtgtcccagcagacggtctcccgggtgctgaaccgtcctgaggtggtgtcagcccgcacccgcgagcaggtgatccgcgcgatgcaggcgctgcactatgtgcctaaccgctcggcgcagctgcttgccggcaaagcggcgccctccatcgggctgattaccgcctcgctgacgctgcacgccccctcgcagatcgccgccgcgataaagagccatgccagcctgcatcagctggaagtggcgatagcgatgccggcgcaggccgattttgtcgcgctgcaggcccggctggacgagctgcgcgcccagcatattcgcggggtgatcgtcagtctgccgctggagagcgccactgccgagcggctggtgcaagacaatccggatatggcctgcctgtttctcgatgtctccccggaggccgatgtctgctgcgtgcgcttcgaccaccgcgatggctgcggggcctgcgtgcgccacctgtgggagctggggcatcgcgaatttggtctgctggcgggaccggaaagttcggtttccgcccgtctgcgtctcgccagctggcgcgaggcgttgcactgtctgaatattgcccgctctactacggtgtttggcgactggagcgccgccagcggttggcagaaaactttcgagctcctccacctgcagccgcggatcagcgccatagtggtggcaaacgatcagatggcgctcggcgtgctcagcgcgctggcccagctcaatcgcagcggcagccaggcggtatcggtgaccggctacgatgacaccgccgacagcctttacttccagccgccgctcaccacggtggcgcaggacttcgatctgttgggcaaaagggcggtggagcggctgattgccctgatggcggccccgcagctgcggatccgcgagctgctgccgacccggctcatcgtgcgccagtcggcctggcctgtcgccgccgcggaggaccggcagcagaccctggcgcagctgaaagcgctggtggagaagctttag

SEQ ID NO: 212213 - DNA, 441 bp, Klebsiella pneumoniae
atgatggtgattgagggtaaagaggcgatcgtgcgggtggactggcagcgagtgcgaacgatcatcgccgaggccgggctgaatgagcgtgatgttcagcaactggagcaggcgttccgccagagcaccttctgctggtttggctatgagaacggtcagctgattgccgtggcgcgagccatcagcgactgcacctggagcagctatctggcggatgtggcgatcgtccccgctcgtcagggacagggctacgggcaacagctgatgctggccatccgggagcaactcctgccctttggcaaaatatttatctatgcggtggccgataaaattacgttttatcagcgctttggctttgccatgttgactaccggcatggtctgcgccagcgaggaaggcatgcagaaaatgcaggagcagggctatatccgtcagccctga

SEQ ID NO: 212214 - DNA, 219 bp, Klebsiella pneumoniae
atgatgaagaaagagtgtcgggtagtgatctataaagaggggctgctgggcagtctgttttttggcgaagccaaggccgaccctgacaaaatgagccagtttctcagcagctatacccgtgagggatgggaagtgaaaaccatgtcggtggagcgccgccgtaccgccctgttctggtcgcgggaagcgtatcttttcgtgctcgaacgccccctctga

SEQ ID NO: 212215 - DNA, 1098 bp, Klebsiella pneumoniae
atgacagaaaacgctaacattctgacaaccccttctgtgacaccgtcacgtcatcaggtgatcgccctcgcctacgatggcctgtgcacctttgagtttggcgtagccgtggagatcttcggcctgccgcgcccggaaatgggcgacaactggtaccagttcgccgtcgccgccgtcgatgaagggccgctgtgcgctaccggcggcatccgcctgatgaccgacggcggtcctgaacttctcgcccaggcggatacgatcgtggtccccggctggcgcggcgtcgacgccccggtccccgaggcgctgtgcgccgcgctggcttccgcccacgcccgcggatgtcggattatttctatctgttccggggtgttcgttctcgccgccgccgggctgctcaatggccgccaggcgacaacccactggcgctacaccgcggcgctgcagtcccgttttccgcagatccaggtggtggaggacgtcctttacgtgggcgatgctttgctgatgacttccgccggcagcgcggcggggatcgacctttgtctgcatctggtgcgtgaagatttcggcagcgaagccgccaacgtcgtcgcccgccgcctggtcgtctctccccatcgcgacggcggtcaggcgcagcaggtcctgcgcccggtagcccgcagccgggagagcctgcgcctcggtcagctgtttgactatctgcaccagcatcttgccgccagccataccgtcgcttccctcgcccagcgcgccggcatggggacgcgcacctttttgcgccgctttgaggaggccaccggtaaaacgcccgcccgctggctgctggaggaacgactgctgcgcgcccgccagcacctgacggagagcacgatgggcatcgatcagatcgctgagcgctgcgggtttgccagcgccggcaccctgcgccaccattttcgccagcacttcgcgctcagcccgctgcagtaccgtaaacagtttacgccttctccgattgcaaaatcgtcgcagccacggacaatagacggccacagtaaaccggtcgccaggagggtcgatgatgaagaaagagtgtcgggtagtgatctataa

SEQ ID NO: 212216 - DNA, 399 bp, Klebsiella pneumoniae
atgagtgtagtaacccaatttccccctgccacctccgctgaggctatccgctggttcagccataagctgcatcttgagaccgactgcgccgatgtgcacagcgcccagcgtgccggcgaggtcgacttcgtcctgctgcacgtggtcggcagcgaggaagctttcgccagacgtcacctgccaggcgcgcagcatctcccgcacagccagatcaccgccgagcgaatggcggcctggccggcggagaccctctttgtggtctactgcgccgggccgcactgcaacggtgctgacgttgccgcgctgaagctggccgagctggggcggccggtgaaaatgatgctcggcggactcaccggctgggaagatgagggctatgcgtttgtttccggtaaatga

SEQ ID NO: 212217 - DNA, 1104 bp, Klebsiella pneumoniae
atgcaacgtcaacaggccccgttccgcgcagacatcgtcggcagttttttgcgcccggacagcattaaacaggcgcgtcagcagctggctgaggggattatcgacgccgctcagctacgcgagattgagaataacgcgatccgtcatctggttcagcagcaatgcgactgcggcctgcatgtggtcaccgacggtgagtttcgtcgcgcatggtggcatttcgatttcttcgatggcctgcagggcgttgaacgttacgatgccgagcaggggatccagttcaacggcgtgcagaccaaagcgcacggcgttcgcgtcaccggcaagctggcatttggcgaccacccgatgctggaggatttccgctatctgaaaagcatcagcggcgacgcgcagccgaagatgaccattcccagcccgagcgtgctgcacttccgcggcgggcggaaagatatcgatgccacggtctacccggatcttagcgactacttcgacgatttggccaccacctggcgcgacgccatccgcgcgttttatgacgccggctgccgctatctgcagctggacgataccgtgtgggcctatctgtgctccgatgcccagcgccagcaggtacgcgagcgcggcgaggatccggatgcgctggcgcgcatttatgcccgggtgctgaaccaggcgctggaaggtaagccggccgatctgacggtgggcctgcacgtctgtcggggtaacttccgttcaacctggatctcggaaggcggttacgagccggtggccgaggtgctgtttggcggcgtcaatgtcgatgctttcttcctggagtacgacaacgaccgctccggggatttcgcgccgctgcgctttattcgtcccggccatcagcaggtggtcctcgggctgatcaccaccaaaaacggcgagctggagaatccgcagggggtaaaagcgcgactcgccgaggccgcgcagtacgtgccgctcgagcagatctgcctcagcccgcagtgcggtttcgcctccactgaagaggggaatgccctcagcgaagaccagcaatggcaaaaggtccgtctggtgacctccatcgccgccgacgtctggtaa

SEQ ID NO: 212218 - DNA, 1272 bp, Klebsiella pneumoniae
atgcaacgtagaacgttattaaaagcttttgcactctccgcctctgttatggctataggtctctcctttcaggcctatgccgccgacaccatcaaagtcgggatcatgcattcgctctccgggacgatggcgatttccgaaacgccgctgaaagacgtcgcgctgatggccatcgacgacatcaacgccaaaggcggggtgctgggcaagaaactggagccggtggtggtcgacccggcctccaactggccgctgtttgccgagaaggcgcgccagctgctggcccaggataaagtggcggtggtgtttggctgctggacgtcggtctcgcgtaaatcggtcctgccggtgtttgaggaactgaacggcctgctgttctacccggtgcagtacgaaggggaagagatgtcccccaacgtcttctataccggcgcggcgcctaaccagcaggctatcccggcggtggaatacctgctgagcgaggacggcggcggcgctaaacgtttctttctgctggggacggactacgtctatccgcgcaccaccaacaagatcctccgcgccttcctgcatgccaaagggatccaggacaaagatatcgaggaggtctacaccccgttcggctacagcgattaccagaccatcgtcgccaatatcaaaaaattcgccgccggtggcaaaacggcagtggtctccaccatcaatggcgattccaacgtaccgttctacaaagagctggctaaccagggtctgaaagcgaccgatgtaccggtggtggccttctcggtgggggaagaggagctgcgcggcatcgataccaaaccgctggtcggcaacctcgcggcatggaactactttgaatccgtcgataatccgaccaacaaagcctttgtcgccgattatcgcgcgtatgccaaagcgcacaagctgccgaatgccgatacggtggtaaccaacgatccgatggaagcgacctgggtgggtctgcatatgtgggcgcaggcggtgaccaaagcgggcaccaccgatgtcgataaagtgcgcgaggcgatggccgggcagaccttcaacgcgccgtccggttttaccctgaccatggatgccactaaccatcatctgcataagccggtgatgatcggtgaaattgaaggcaacggccagttcaacgtggtctggcagaccgataaacccgttcgcgcgcagccgtggagtccgtggatccccggtaacgataagaaacctgaccatccggtgaaaaccgtcagccagtaa

SEQ ID NO: 212219 - DNA, 1575 bp, Klebsiella pneumoniae
atgaacgcattgcgtctcatgaatgtgttggcgctactgctgatcctgctgccatggcgggcgcaggccgcggaggcggacgacttcgttgccgccagtcgcagccagcaggcgcagctgttgagccagtgggcggcagcgccgcaggcggatcgtctgccgctgctgcgggcgttgaccaccgagagcctggtgatggacgacggaaaacatgctttccgcacccgacagggcggattacagccattgggcgctgtcgccgcaccgcagggcgaaacccgaccggtccgtctgaccaacaggctgcgcaatctggctgccggcgcgctggccagccaccttattttaagtgacaacgtcacagagcgagcttccgccgcacgaacgctacagcgggaagcgaccccggccatggccgcgctgctgcaacagcggctgcaggcggaaaccgatgatactgtgcggggtctgctggaggtggcgctggcgcgcctgcagctcgctcagcctgaggccagcgcgcggctggccgccgtgacgctgctcggccattccgcggacccggaaacccaggcgctgctgatcccctttaccgatgcccagcatgagccggatgcggcggtgcgcgaggcggccagcgatagcctgcaaaagatcaaacatcgtctgctgctcggcgatctgctgggccaggcctttatgggactgtcgctgggatcggtgctgttgctggccgcgctggggctggcgatcacctatggcctgctgggggtgattaacatggcccacggcgagatgttaatgatcggcgcctacagctgctggctggtacagcaggcgctggcgcagctcgcgccgcaatggctggccttttatccgctggtcgcgctgccggtggcgtttctggtgaccgccgggatcggcatggcgctggagcgcaccattattcgtcatctgtatggtcggccgctggaaacgctgctcgccacctgggggatcagcctgatgcttatccagctggtgaggatgctgtttggcgcgcagaacgtggaggtggcaaacccggcctggctctccggcggcgtgcaggtcctgccgaacctgatcctgccgtggaaccgactggcggtgctggcgttcgtcctgctggtgctgtcctttacctggctcatcctgaaccgcacccgtctggggatgaacgtccgcgccgtgacgcagaaccgggcgatggccgcctgctgcggcgtgcctaccgggcgggtggatatgctggcctttggcctcggctccggtattgccgggctgggcggcgtggcgctgtcgcagcttggcaacgtcgggcctgaactgggtcagggatacatcatcgactcgtttctggtggtggtgctgggcggcgtcggccagctggccggcagcgtggcggcggcctttgggctgggcattttcaacaaaattctcgaaccgcaaatgggcgcggtgctgggcaaaatcctgatcctggtgatgattattctgtttattcagaaacgcccgcagggtctgttcgcgctgaaagggagggttattgactaa

SEQ ID NO: 212220 - DNA, 1074 bp, Klebsiella pneumoniae
atgagccaaccaatcaccttaacgctggcgcagcgcgcgccgcggcctctgcgctggctggggatcctgctggtgctggggctgctgtgtatgccattcctggcgctgctgccggcctcccatccgctggcggtgccgagctggctgctgacgctgagcggcaaaatcctctgctacgccattgtggcggtggcgctggatctggtctggggctatgcgggcatgctgtcgctggggcacgggatcttctttgccctcggcgggtacgccatggggatgtacctgatgcgccaggcggcgggcgacggtctgccggcgtttatgtcttttctctcctggagcgagctgccctggttctggtggggcacgcagcatttcgcctgggcgatggcgctggtggtgctggttcccggtctgctggccctggttttcggctggtttgcctttcgctcgaagatcaaaggggtctatttctcgatcatgacccaggccctgacctatgccggtatgctgctgttctttcgcaacgagaccgggtttggcggcaacaacggcttcaccggttttactacgctgctgggttttccggtcaccgccaccggcacccgcgccagcctgtttatggccacggttttgctgctgttgctgacgctgtggctgggcgcggcgctggcgcagagtaagtttggccggatcctcaccgcggtgcgtgacgccgaaaaccggctgatgttctgcgggtacgacccgcgcggcttcaagctgctggtgtggacgctgtcggcggtgctctgcggtctggcgggggcgttatatgtcccgcaggtggggatcatcaaccccagcgaaatgtcgccgaccaactccatcgaggccgccatctgggtggcgctcggcgggcgcggcaccctgattggcccggtgcttggcgccgggttggtcaacggtgcgaaaagcattttcaccgtggcgatgccagagtactggcagctgtttctcggcctcatcttcatcattgtgaccctgtttttaccccgcggggtgatgggcctgctgcgtcgaggagaccgctaa

SEQ ID NO: 212221 - DNA, 798 bp, Klebsiella pneumoniae
atgcaaccggatgaaggactatttacccgccagctgcccggcgatcgctttcgcgaacaaaccgatccggtgctgcagctggagaacatcaacgtcagctttgacggtttccgggcgctgacggatctgtcgctggcgataggcgtcggcgaactgcgctgtgtgatcggccccaacggggcgggcaagaccaccctgatggacgtgatcaccggcaagacccggccgcaaagcggcaaagcgctctatgaccagtcggtggatctgaccactcttgacccggtggccatcgcccgccagggcatcgggcgcaagtttcagaagccgacggtcttcgaagcgctgacggtggcggaaaatctcgccctggcgatgaagggggataaatcggtgtgggccagcctgcgcgcccggctgagcagcgaacaggacgatcggctgaatgaggtgctgcgcctgttgcgtcttgacggcgagcgctaccgccaggccggtctgctgtcccatggtcagaaacagtttcttgagatcggcatgctgctggtgcaggagccgcatctgctgctgcttgatgagccggcggccggcatgaccgatgcggaaacggagtatacggcggagctgtttcgcacgctggccggacagcactccctgatggtggtggagcacgacatgggatttgtcgagaccatcgccgaccgggtgacggtcctgcatcagggccaggtgctggcggagggatcgctgcgggaggtgcaggccaatgagcaggtcattgaagtttatctgggacgttaa

SEQ ID NO: 212222 - DNA, 699 bp, Klebsiella pneumoniae
atgttacaggtgagtcagctacatcaatactacggcggcagccatattttacgcggggtggatttttccgcccgccagggcgaagtcacctgcctgctggggcgcaatggcgtcggtaagaccacactgctgaaatgcctgatggggctgatcccggcgcgcagcggtgaggtacgctggcaggatcagaacatcacccatcgcaaaccgcaccagcgggtgcaggccggggtcgcctacgtcccccaggggcgcgagatatttccgcgcctgacggtggaagaaaacctgctgatggggctgtcgcgctttcccgcccgcgaagcgcagcaggtgccggaggagatctaccagcttttcccggtgctcaggaccatgaagcagcggcgaggcggtgacttatccggcggccagcagcagcagctggcgatcggccgcgcgctggccagccgcccacagctgctgatccttgatgaacccaccgaggggatccagccctcggtcatcaaagagattggcgaggtgatccgccagctggcgagccgcggagacatggcgatcctgctggtggagcagttctatgactttgccgccggactggcggaccactacctggtgatgtcgcgcggcgccatcgtccagcaaggcaagggtgatgatatggagagcgacggcgtgcgcgcgatggtgaccatctga

SEQ ID NO: 212223 - DNA, 483 bp, Klebsiella pneumoniae
atgaacagcaacaatcaggtcaaacaattacggctgcagcgcgcctggtcccaggagcagctggccgaaatggcgggtctcagcgtccgcacgatccagcgcattgagaatggcgaacgcccggggctggagaccctcagcgccctcgccgcggtctttgaagtgacggtggccgagatcggcggcgaagcccggcgggaagacgcgccgggccaggaagcctcactggatctgcgcatagaggaagccaaagcgcgggtgcatcaggagagccgctttttccgttcgctgtcggtggcgctggtggtttgcgtgctgctggcggtgcttaaccgcttcactaatccacagtactactggtccggctgggtcgccctgatctggggcgccctgctggtggtgagaggattacgcctgttcgtgttcggcgaatggattaaaaactggcgccaggcgcgcctgcagcggctgctgcgcaaatag

SEQ ID NO: 212224 - DNA, 1197 bp, Klebsiella pneumoniae
atgatcaccactctccggcgctccaccatcgcgctgctggcatcgtcgttactgttgactatcggccgcggggccacactgccgtttatgaccatctatctcacccgacgctttcagctggaagtggatgtgattggctatgccctgtcgctggcgctggtggttggggtgttgttcagcatgggttttggcatcctcgctgacaggttcgataaaaagcgctatatggtgtggtcagtgctggtgtttattctcggcttcagcgcaataccgctggtcaataacgcccccctggtggtgatcttctttgcgctgatcaactgcgcctactcggtcttttccaccgtcctgaaagcctggttcgccgaccggctgacggcagagaaaaaagcgcgcatcttctcgctgaactacaccatcctcaacatcggctggaccgttgggccgcccatcggcaccctgctggtaatgcacagtatcaatttgccgttctggctggcggccgcctgcgccgcctttccgctggtgtttattcagctgtttcttcagcgggatggcgccgccgcggcccagccgggcgccgctccctggtcgccttcggtgttgctgcgcgaccgggcgctgctgtggtttacctgctccgggctgctggcctccttcgtcggcggcgccttcgcctcctgtctctcgcagtatgtgctggtggtcgccagcagcgatttcgccgagaaagtggtggccgtggtgctgccggtcaacgccgcggtggtggttgctctgcagtacgcggttggccggcggctgagcgcgagaaatatccgcccgctgatgaccttcggcaccgtctgctttgtgatcggccttgtgggctttatgttctctggcgccagcctgtgggcgtgggggatctcggcggcgatcttcaccctcggggaagtgatttatgcccccggggagtatatgctgattgaccatattgccccgccggggatgaaggcaagctacttctccgcccagtcgctggggtggctgggggcggcattcaacccgatgctgacggggttgatcctcacccatctgccgcactggtcgctttttgtcattcttatcgtggcgattgtcgccgcctggctgatgattttccgcgggatcaatgcccgcccctggcaaccggattctccgctggccaacgcctga

SEQ ID NO: 212225 - DNA, 900 bp, Klebsiella pneumoniae
atgacgaggaaagatggactactggcgctgctggtagtggtggtgtgggggcttaactttgtggtgattaagctggggttgcacaatatgccgccgctgatgctggcggggctgcgctttatgctggtcgccttcccggcgctgctgtttgtcgcccggccagctattccgctgcgcctgctgctgggctatggcctgaccataagtttcggtcagttcgcctttctgttctgcgctatcggcctgggtatgccggccgggctggcctcccttgtgctgcaggcgcaagccttcttcaccatcatccttggcgccttcgtctttggcgaacgtctgcagggcaagcagctggcggggatcgccctggcgatctttggcgtgctggtgctggtggagggcagccttggcggggaacatgtgccgctggtgggctttatgctgaccctcgcggcggcgctcagctgggcctgcggcaatattttcaacaagaaaatcatgtcccagacgagccggccgccaatcatgtcgctggtggtctggagcgcgctgatcccggtgctgccgtttatgctggcctcattgttgatcgatggtccgcagaccatgctggcgagtctgcaacacatcgatctgctgacgatactgtcgctgctttatctggcgtttatcgccactatcgtcggctatggcatctggggatcgctgctggggcggtatgaaacctggcgggtggcgccgctgtcgctgctggtgccggtggtgggaatggccagcgctgcgctgctgctcggggagacgctgagcggactgcagctcaccggggcggtgctgattatggccgggctctacattaatgtctttggcttacgtttggtgcggcctggcatggcgcgcggataa

SEQ ID NO: 212226 - DNA, 219 bp, Klebsiella pneumoniae
atgaaactattcgctgccgcagctatcgtactcttgtcgctggcctccagcctcagctatgcggagcaaaacaccacgccggtgcgtcaaaaccagcgtgatacaatgattatcccttccgaacataatgattcgccgtttgatttcaatcatatggcggctggtaatgataaatctgacgaacttggcgtgccgtactaccagcagcacgacctgtga

SEQ ID NO: 212227 - DNA, 375 bp, Klebsiella pneumoniae
atgtccagacgtaataatgacgccatcactatccatagtattttgtcgtggatcgaggataacctggaatcgcccctgtcgctggaaaaagtgtctgagcgctccggttactctaagtggcacctgcaacgtatgtttaagaaagagaccggccattccctcggccagtacatccgcagccgcaagctgacggagattgcgcagaagctcaagcagagtaatgagccaatcctgtacctggcggaacgctatggtttcgagtcgcagcagaccctgacgcgaacgttcaagaactatttcgatgttccgccccacaagtatcgcataacgaatgtacctggcgaatcccgctatctacatccgctaaataactga

SEQ ID NO: 212228 - DNA, 435 bp, Klebsiella pneumoniae
atgaaaagtaccagcgacctgtttaatgaaatgatcccgctgggtcgcttgatccagatggttaaccagaaaaaagatcgcctgctcaatgactacctctcacctatggatattaccgcgacccagtttcgcgtgctctgctccattcgttgcgaagtatgtattacccccgttgagctgaaaaccgtgctttccgtcgacccgggcgcaatgacgcgcatgctcgaccgcctggcgtgcaaaggctggattaaacggttacccaaccccgctgacaagcgcggcgtgctggtgcagttgacgccggacggcgcagccctttgcgagcagtgtcatcaggttgtgggtcagaagttacaccaggagttaacgaaaaatctgtcggcggacgaagtcgccatgcttgagcaactgctcaagaaggtcctgccgtaa

SEQ ID NO: 212229 - DNA, 669 bp, Klebsiella pneumoniae
atgttcgatttgtttaaagcaatagggctcggcctggcggtgcttttaccgctggcgaatccactcacaaccgtggcgctgttccttggcctggccggtaatatgaacaacgccgagcgtaataaacaggcgttaatggcatcggtgtatgtcttcgccatcctgatggtgtcgtggtatgccggtcaggtggtgatgaatacattcggcatatcaatacctgggctgcgtatcgccggcggattgattgtggcctttatcggtttccgcatgctgtttccccagcaaaaagcccacgattcgatggaagcgaagatcaaatcggaagaactgcaggatgaaccgaccgccaatatcgcctttgtgccgctggcgatgccaagcaccgccggtccgggcaccatcgcgatgattattagctccgcctcgaccgttaagcacggcgtggacttcccggagtgggtggtgctggcggcgccgccgatcatctttttgctgttaggggtgattctgtgggcttgtctgcgcagttccggcgcgattatgcgtctggttggcaaaggcggcatcgaggccatctcgcgactgatgggctttctgctggtctgcatgggcgtgcagtttattattaacggcgtgctggagatcatttcgacctggcatccctga

SEQ ID NO: 212230 - DNA, 1200 bp, Klebsiella pneumoniae
atgactacgaatacggtctcacgcaaggtagcgtggctacgtgtcgtgacgttggccatcgccgcgtttatttttaacaccacagagtttgccccggtcggtctgttgtcggatattgccgacagcttcggcatggaaaccgcccaggtgggcatgatgctgaccatctacgcatgggtggtggcgttaatgtcgctgccgtttatgctgctgaccagcaaagtggagcgccggcgcctgcttatcggcctgtttattctgtttatcgccagccacgtcctgtcgttttttgcctggaattttgacgtgctggtgatcagccgcattggtatcgcctttgcgcatgcagtgttctggtcgataacgtcggcactggccatccgcatggccccgccgggcaaacgggcgcaggcgctgagcctgatcgccaccggtacagcgctggcgatggtgtttggtattccgatcgggcgcattatcggccagtactttggctggcggatgaccttcctggcgatcggcctcggcgcgttagccaccctggcctgcctcgtaaaactgctgccgaccctgccgagcgaacattctggctcgctgaaaagcctgccggtgctgttccgccgcccggcgctggtcagcgtgtacattctgaccgtggtggtggtgaccgcccattataccgcctacagctatatcgagccctttgtccagacggtagcgggcctgagcggcaactttgccaccgtactgctgctgatccttggcggggccggtattatcggcagcattctgttcggtaaactcggtaaccagcacgcgtcggggctgataagcctggcgattgccctgctgctcgcctgcctgctgctgctgctgccggcctcgcataacccgcagcacctgatgctgctcagcatcttctggggggtggcgatcatgattatcggtctcggcatgcaggtgaaagtgctggcctccgctccggatgccaccgacgtcgccatgtctctgttctcgggcatctttaatatcggcataggcgccggggcgctggtcggcagccaggtgagtctgcatctttccatggcctccgtcggctacgtcggcgccattccggcgctggtcgcgctggtctggtcgctgatgatattccgtcgctggccggtatcgctggaagaccatcagccgcaccactcctga

SEQ ID NO: 212231 - DNA, 792 bp, Klebsiella pneumoniae
atgcaggaaattcaattttatctggtcgatgctttcagcgataaaaactttggcggcaatgccgcggctgtctgcccgctcagcgagtggttagccgacgatgtgctcctgaaaatggcccagcagcataatcaatccgaaacggctttctttgtccgtaccgacgagggctatgagctgcgctggtttaccacactcgctgagatcaatctctgcggccacgcgaccctcgccgctgcgcacgttattttcgaatatctcgaccatccttcggcgacgattctctttagcacccgttttgttggtgagctgcgggtcacccgtaatggcgactggctgacgctcgatttcccggcgtggtcgacctccccggtgcaaaacccgccggcggatctgctgaccgggttgggactcgaggccgccgttgaagttcgggaagggcgcgattatctggtggtgctggcggatcgccagcaggttgaagcggtgcgaacggatatggcgcggctgcgaacgcttggcaaaatgatctgcgtcagcgcgccggatgaagagtatgactttgtcagccgcttcttctgcccgggagaaggggtgccggaagatccggtcaccggctccgcccatagcatgctgatcccctggtggggcgaaaagctggggaaaaccaccatgatggcgcgccaggtctccgctcgcggcggcgacctgcgctgccagtggcagggcgaccgtgtgctgattagcggccaggccaccacctatatgcgcggaacggtttacctgcgttaa

SEQ ID NO: 212232 - DNA, 678 bp, Klebsiella pneumoniae
atgaagcgggcaatggtaaccggggccagctccgggatcggcgccgcagtggtgaggcagttgctggcggacagctggcaggtgatcggcatgagccgttcgctgccgcccttctcacagccgaactttcgccatctgatggtcgacgtcagccaacgcagcgcgctgctggcggcgctggagcagattgagccccctcaggccatcattcacgccgcgggttcaatggcggccgccaccctgggtaatctggaccctcagcgcagcgagtcgttgtggcgtttacatgtcgatgctgctcagacattggtcaatcacttcgccccgaccatggggccaggcgggaggatcgttctgctgggaagccgtacgtcacgaggcgccgctggtcgctcgcagtatgcggccaccaaagccgcgctggtcgctctcgccaggagctgggcggcagagctggcgcctgccggggtgacggtcaacgtcgtggctcccggggcaaccgatacgccgatgcttcatcagccaggcagagaaagttccccgccgcggcttccgccgcttgggcgactcattactccgcaggaagtggtctctctggtgagctggttgctgagcgagggcgcatcggcgatgaccggacaggagctggtgatgtgtggcggcgcatcgctgggctga

SEQ ID NO: 212233 - DNA, 474 bp, Klebsiella pneumoniae
atgattatcggtaatcttcaggcgctgcagcaggctggtctgccgccggcgttaaagcagctattgagcagcgaggcctgttcgctggccgccctcagtgccagagagaatggccgcttccagcccgacgatgcgccgtggttctgcaccctcagcgtggtgcaaacccagcctgcggccgagcggcatacggaatatcatcgccagtgggcggatattcaggtcatcctggccggcgaggagcgcatccaggcgggcatggctcccgcgatgcgcccggaagatcatgagcttaagcccgacctctatatatgtcagccggccccggagagtgtctctattctgctgcgtcccggcgacttcgcggtcttttaccccggcgaaccgcaccaggcgctgtgtgcggtttcgacgccagcaccggtcagaaaggcagtattcaaaatccccgctgagatgctggaggcgcgatga

SEQ ID NO: 212234 - DNA, 1167 bp, Klebsiella pneumoniae
atgaccgtaattccgccttttgacggcgtcattcgccaacaccagcaagatgaacacatcgcatgggcaatgcttccctgcgcctgcccgcagaaccatgccgccaatctgctgccgctggatgacggcagcctgatgtgcgtctggtttggcggctcccaggagggaaaagccgatatttctatctggggatcgcggttagcccccggcagtgaccgctggagtgaggcggtcaagctatgtgatgacccagaccgctcagaacaaaacccggtgctgtttcaggcgcccgataacgtgctgtggctgttgtggacagcgcaatttgccggaaaccaggataccgccattgtgcgctaccgcctctcccacgatggcggacgaagctggggggccatcgatacgctgctggatcagccgggtacctttattcgccagccaataagcgttatgtctgacggcaactggctgctgccggtcttttactgccgtaccgaacccggcgagaaatgggtgggtaacaatgacgtcagcgcggtgaagatctcttcagactgcggaaaaagctggcgtgacgtggcggtcccggagagcctgggttgtgtccatatgagtatcactccgcttccggacggcagactggcagccttcttccgcagccgctgggcggatcatatctggttcagccagtccagcgaccagggagagagctggtctgcgccggtaccgacgacgcttccgaacaacaactcgtccattcaggcgacccccctggacaatggtgaactggcgctggtgttcaataatatgagcgccgccggcgccacggaacgccgcgcctcgctgtatgatgaaattgctgacgacgatggccgtagggagccggaagcgaccgggaaaagcgccttctggggcgcaccacgcgcgccgatgaccgtcgctatttcagccgatggtggtgaaagctggccgtggctgcgcaatctcgatgagggtgacggctactgcatgaccaataattcggagcagaagctgaaccgggagttctcctaccccagcatcaaacagggagcagacggtaatttgcatatcgcctacacctggtatcgccaggcgatcaagtatgttcgtgtctcgccacagtgggtaaaaggagaaagcgcatga

SEQ ID NO: 212235 - DNA, 1410 bp, Klebsiella pneumoniae
atgaatcattttaccgctgaagatacctttattattgtcggcattgttattgcctatattctgtttaccacctggctgacattccgtattcgtagtaaaaattccggggattttatggaaggctcgcgcgccatgccggcctttattgtcggtatattactgatgtcagaatatattggcgccaaatcgaccatcggtactgcccaggccgcctttgagagcggaattgccgcctcgtggtccgtgctgggggcagccatcggctttccgctgttcggtttaatcctggtgaaacgcatctataacaccggaaaaatcaccatttccggcgccatcgctgaaaaatatggcaacagtaccaaaaatattatctccctgattatgatttatgcgctgctgctggttaacgtgggcaattacgtcagcggtgccgcagccatctccaccgtattaaaagtgaatttaccggtagccgcctttattaccgccattgtgagtaccttttatttcgcgttcggcggcatgaagggcgtcgcctgggtcaccatgttacacagcgcgttgaaatacgccggtctgctgatcattctgggttttgccctgtccaaaaccggcggcttctcgccgatgatggagaagatgccggattattactggacatgggatggcaacattggtgctggcacgatcttcgcctggctcatcggcactatcggctccattttttgcacccagtttgtcattcaggccattagctcaaccaaagacgttcggtcagcgaaacgctccacctggatcgccttctttttctgcctgcctatcgcctttgccatcgccattatcggcgtcgcggcgaaatacctgcatcccgagatcaacagcctgtatgccctcccggtctttctgcaggacatgaacccgtggctggcaggtctggtgacaacgtcacttgtggcatcgattttcgtcagcgtaagtaccgtagccctggccattgcctcgctggtggtgaaggatttttacgtaccatggcgcaacccaacgccggaccaggaattcagagccacacgctgggcgtcgctaattatcggcttcctgccgctgatctttgtgctgctggtaccggaggtgctgaaactctccttctttacccgcgccattcgcctctccattaccgtggtggcggtcatcgccttctatgcccccttcttcagaagcactcggggcgcgaatgccggcctgatcggcgcctgtgtggtgacgtccgtctggtatttactcggcgacccgttcggcatcaataacatgtatgtcgccctggcgaccccggccatcatcatggtgattgaccgcctgatcccaaataaatcacaaccatcccccgccccagttgagcaacgtggagtataa

SEQ ID NO: 212236 - DNA, 885 bp, Klebsiella pneumoniae
atgaggaaagctattagcggcgtactcaccgccattgtcactccctttaccgctgagggagcgcttaacctgccggcgctacgccagcaggtgcagcgccagctcgccgcaggcaacggtattttctgcggcggcaccaacggcgagttttttgtcctcaatgaggaagagaagatcgccgtcgccagaacctgcgtggaagaggcggccggtcgcgcgccggtggtggcccatattggggaggtttccacccgggagacgcgccggctgggccagcagatcgcccgcctcggagttgacgcggtatcggccattaccccgtggttcgtgcccttgaagcaggaagagctgattaaccactatacggcgatcgccgacgcgctgagcgtcccgctctttctttacaacattcccgcccgcaccgggaacactattgccccggagaccgcgcgccagctggcccgccacgagaatatcgtcggcattaaggatagcgccggcagctacgacagcctgaaaggctttctcgacgcggtgcgcgatatcgacggtttcgacgttctgaacgggccggactcgcttatccatcagggatttgtcgacggctgctcggcctgcatctcggggcttgccaacgtcgcccccgctgaaattaacgccatctggtcgcgctttcacgccggggatatcgccggatcgcgccaggcccaggagcaggtaacgggcctgcgcaccgatctgtataaagtggcgttctcgcctgcggcggtgaagaaagccctgcagctaatgggtcacgaggtgggcgacagccgctacgcggtgcagtttagtgaccaccagctgcagcagatacgcgacatcatcgctcgttatttagcgtaa

SEQ ID NO: 212237 - DNA, 1149 bp, Klebsiella pneumoniae
gtggcgacgatacacagcacaatcatcagcggggctggcgcctcatcggccctgctcccgctgctggccggtaaatcctcaatcctgctggtgaccgacaagaacgtcggggcgctggaggcaacccaggcgattcatcgcctgctggcggctgaagggcgtgaagttgaggtcattgacagcgtgccagcggagcccaaccatcacgatgttacgcagatcgtcagccagctgggcgccagccagccgcagatggtcgttggtatcggcggggggagcgtactggatgtagcaaaactgctgtcagtacttctgcaccctgaggcgccctcgctgacgtccctgctggcaggcgagcagccgcaacgacgaatttgctcattgttaatcccggccaccgcgggcaccggatccgaagcgacgccgaacgccattctggcgatccccgagcagcagacgaaggtggggatcatctccccggtgctgcttccggactatgtcgccctgctgccggagctgaccaccagcatgccgcccagcatcgcggcgtcgaccggaatcgatgctctgtgtcatctgctggagtgctttacctccaccgtcgccaacccggtgagcgataacgccgcgttaatcggtttacacaagctggtacgccatatcgagcgttcggtaaatcagccgcaggatctgacggcgaagctggagatgctctgggcctcgtggtacggcggcgcagcaatcaactattccggcactcacctggtgcatgcgctctcctatccgcttggcggtacctggcacctgccgcacggggtggccaacgccattctgctggcgccctgcatgcgggtggtccgccctcacgcggtggcgaagttcgctcaagtctgggacctgatccccgatgcagatcgcacgctcagcgcggaagagaaatcccatgcgctggtcgcatggctggcggcgctggtcaaacgactgccgctgccggacaacctggccgcgctaggcgtgcctcaggagagtatttccgccctcagcgcagcggcgcaaaacgtcaaacgcctgatgaacaatgccccatgcagcgtcagccgcgaagagatcgcggccatctaccaaacgctgtatccagaacatgcctaa

SEQ ID NO: 212238 - DNA, 1236 bp, Klebsiella pneumoniae
atgaacgaccgcaataacagagtgctggtgctggcggatgactttaccggggccaatgacgccggggtcagcctggcggaggcgggtatgtcggtggaagtggccttcaccgccggacagccatcaaccgcccgggcattaattctcaacagcgacagccgggcgatgaccgccgcggcggcggcggacaaggtcgccgctctgctgcgcggcgcggcgacattcgtcccgcactggcaggtaaagaagattgactccacgctgcgcggtaaccccggcggcgaactggaggcaatgatggcggcgcaaggctgccggatggcggtggtggccccggcttatccggcagccgggcggcatacccgggacgggcgctgctatgtgcatggtgtgcccctcgatcagaccgaatttgccagcgatccgaaaacgccggtgagccgggcggagattagcgaaattatcgccatgcagagccgtcttccctgtctgaccctgaacgctggccagcttccggcggcattagcgacggcgggcgaggagaagcgagtgttgattgtcgacgcctgggaagacagccatctggaccaggtgatcgacgccgttgcgccccatgcgcgggagaccctgctggtcggctcggcgggtctctgcgaggcgctggctcgccgcctgcgccgcagcgagcagggcccgctgatggcggtggtcggttcgatgagcgagatggcgcagcgtcaggttgctgcgctgcaggtccattcccgagtacgggtgattgaaattgatgtcgaacagacctttagcggatcgccgaaggaggaagcttcacggatcgccggggcgctgcgcgagggccagcactgcgtggtgaccacccgcccgaatcacgccgcccggcacgggattgaagcccggtgccgtgaacgcggtctcagccgcgccgcctacggggagcacatctgcgcctggcttgccgacgtcacggcgcaggcggtggcgcagtcttcccctggcgcgctgtatctttccggcggcgatgtggccatcgccgtcgcacacgcgctcggcgccacagggtttcagatccgcggccgggtggcggagtgcgttccatacgggcattttctcggcggccgctggtcgcggccggtgatgaccaaagccggaggattcggcaccgacaccacgctattacatgttgtgaattttattgaggagaaactgagtgtctaa

SEQ ID NO: 212239 - DNA, 987 bp, Klebsiella pneumoniae
gtgtctaagatgattgcagtgacaatgggcgacccggcagggattggtccggagattattatcaaatccctcgccgagggggcgctgagcggcgcgccggtggtggtggtgggctgcgcgcagacgctgcggcggatcctggcgctaaatatcacgccgcgggcggagctgcgcattattgaccatcccgccgaggcgagtttctccccagcgaccatcaacgtcattgatgaaccactcagcgacccgcaggggctgcgccctggcgaagtccaggcccaggcaggggatctcgcgtttcgctgcatcaggcgggcgaccgcgctggcgctggagggcgcggtcgcggccatcgctaccgcgccgctgaataaagaggcgctgcatctcgccgggcacgcttatcccggccataccgaactgctggcccacctgacgcagactaccgattacgccatggtgctctataccgagaagcttaaggttatccatatcactacccatatttccttgcgccagttcctcgataccctcaaccagccgcggattgagacggtgattggcgtggcggatcgctttctgcgccgcgtcggctatccacgtccgcgcatcgcggtcgccggcgttaacccgcacgccggggagaacggcctgtttggcgatgaagagatccgtatcgtcgccccggcggtcgccgccatgcgggcgaagggagtggaggtgaccggcccctgtccgccggacacggtgtttatgcagtgtcacgaaggcatgtacgacatggtggtggcgatgtatcacgaccaggggcatattccgctgaagctgctgggattctatgacggggtgaatattaccgccgggctgccgtttatccgtacctccgcggatcatggcactgcgtttgatattgcctggacaggtaaagcgaagtctgagagcatggcaacctccattgagctcgccatgcacatcgcgcaggaataa

SEQ ID NO: 212240 - DNA, 762 bp, Klebsiella pneumoniae
atgaagggatataaccggttagagcagattatggacttcctgaaaagccataatctggtgacagtcgaccagctggtggcggcgaccaacgcctcgccggccaccattcgccgcgacctgatcaaactcgatcaagaaggggtgatcagccgaacgcacggcggggtgacgctgaaccggtttattccttcccagccgacgacgctggagaaagcccagcgcagtccgcttgagaagcaggctatcgccagtgcggcggcagcgctggtgaaagccggcgacgccattgtgcttgacgcaggcaccaccatgattgagctggcgcggcagatcacccatctgccgctgcgggtgatcaccagcgatttacatatcgcgctgttcctatcggaatttaagcagatcgaagtgacgattatcggcgggcgcatcgatgacagcagccagtcgtgcatcggcgatcacggccgccgcctgctgcagaccatctggcccgatctcgccttcgtcagctgcaacggctgggaccttgagaaggggatcaccgccccgacggaggaaaaggccgccctgaagcgcgatctgatggccaatgcccggcggcgtatcctgctggcggacagctccaaatacggcgcctggtcactgttcaacatcgctccgctggcgtcgttgaccgatatcgtgaccgacgcccacctgccggataaaacccgcgaggcgctggagaccctttccccgcagctgatcattgccgactga

SEQ ID NO: 212241 - DNA, 945 bp, Klebsiella pneumoniae
atgcacaccaaagcccgtaaagtgatgattattggcgccggcaatgtcggcgcgtcggcggcctacgccctgctcaaccagagcatttgcgaggagctgatcctcgtcgaccttaaccaacagcgcgctgaggcccacgctcaggacctgagcgacgccgcggcctacctgccggggatgatgaccatctccacccgcgaggccagcgactgcgccgatgtcgatatcgcggtgatcaccgtctccggcggcgcgctgcgccccggccagagccggctggatgaactgacctccaccgcgaagattgtgaagagcattgtgccgacgatgatggccaacggatttaacggcatctttctggtggccaccaacccctgcgacatcatcacctggcaggtatggcagctttccggcctgccgcgcagccaggtgctgggcaccggcgtctggctggataccacccgcctgcgtcgcctgctggcgcaggaactggagattggcgcccagagcatcgacgcctttatcctcggcgagcatggcgatacccagtttccggtgtggtcgcactcctcggtatatggcacgccaatcgccgacctctaccagcagcgcaccggcctgccgctcgatcgcgaggcgatggctgacaaagtgcgcaagctgggatttgagatctacgcgggtaaaggctgcaccgaatatggcgtggcagggaccatcgccgagatctgccgcaatatcttcaccggcagccaccgcgcgctggcggtctcctgcattcttgacggcgagtacggggtcagcggcgcggcggctggggtgccggcggtgctggcccagggtggcgtgaagcagatcattgaactgcagctggccggcgaagagcaggcgaagttcagccagtcgatcgcggtgatcaaggccaatatcgcccgtctgccctga

SEQ ID NO: 212242 - DNA, 483 bp, Klebsiella pneumoniae
atgtacaccatcaccgacatcgcccctaccgacgccgaatttatcgccctgattgccgccctcgacgcctggcaggagaccctctacccggcggagagcaaccacctgctggaccttagccagctgccgccgcagacggtcatcgccctggcgatccgcagcccgcagggcgaggccgttggctgcggggctattgttctcagtgaggaaggctttggcgagatgaagcgggtctatatcgatccccagcaccgcggccagcagctgggagaaaagctgctggcggcgctggaagcgaaagcgcgtcagcgcgactgccataccctgcgcctggagaccggtatccatcagcatgcggccatcgccctctacacgcgcaacggctaccagacccgctgcgcgtttgcgccgtatcaacccgatccgctcagcgtgtttatggagaaaccactgtttgccgatcttcgttcagcagcgctataa

SEQ ID NO: 212243 - DNA, 879 bp, Klebsiella pneumoniae
atggacctgactcagctagagatgtttaacgctgtcgccagcaccggcagcattacccaggcggcgcagaaagtgcatcgcgtgccgtccaacctcaccacccgcatccgccagctggaggccgacctcggcgttgagctgtttatccgcgagaaccagcgcctgcgcctgtcgcctgcgggacacagctttttgcgctatagccagcagatcctcgccctggtggacgaggcgcgaatggtggtggcgggcgacgaaccccaggggctgttttctcttggttcactggagagcaccgcggcggtacggatccccagcactctggcccactttaatcagcgctacccgaaaattcatctggcgctctcaaccggcccttccgggacgatgatcgacggcgtactggagggcgccctgagcgccgcgtttgtcgacggcccgctggtgcatccgggcctggaggggctgccggtgttccctgaagagatgatgatcgtcgccccctacggccacgcacccatcacccgcgccagcgaagtgaacggggccaacgtctacgcctttcgcgccaactgttcctatcgccggcattttgagagctggtttcatgccgacagagcgaccccgggcaggatccacgagatggagtcttaccacgggatgctggcctgcgtcatcgccggcgccggcctggcgttgatcccgcgcagcatgctggagagtatgcccggccatcagcaggtttccgcctggccgctggccgaagagtggcgctggctcaccacctggctggtgtggcgccggggcgccaaaacccgccagctggaggcgtttatagcgctgctgaacgaagatcggcaaacagtggtttctccataa

SEQ ID NO: 212244 - DNA, 1389 bp, Klebsiella pneumoniae
atgatgaatttatctgcaacgcacgccgtctccgtcaatccgactaccggtgaggtggtctcctcgctgccgtgggccagcgaacgcgaggtcgacgcggcgatcgcgctcgccgcggcgggctatcgccagtggcgtcagacgccgcttgccgaccgcgccgacgccctgcgccgcatcggggccgcgctgcgcgcccgcggtgaagaggtggcccagatgatcacccttgagatgggcaagccgatcgctcaggcgcgtggcgaggtggcgaaatcggccaacctctgcgactggtacgctgaacacggcccggcgatgctggcgacggaagctaccctggtggaaaataaccaggctgtaattgagtatcgtccactgggcgccatactggcggtgatgccgtggaacttcccggtctggcaggtgatgcgcggcgcggtgccgatcctgctggccggcaacagctatctgctgaagcatgccccgaacgtgatgggcagcgcccgtctgctgggcgaaatttttgccgccgccggcctgccggatggtgtatttggttgggtgaacgccaccaatgacggcgtttcgcagattatcaatgacgaccgcatcgcggcggtgaccgtcaccggcagcgtccgcgccgggaaggcgattggcgcccaggcgggcgcggcgctgaagaaatgcgtgcttgagctggggggatccgatccctttatcgtgctcaacgatgccgatctcgatgaagcggtgaaagccgccgtcaccggccgctatcagaacagcggccaggtgtgtgcggcgtcgaaacgctttattctcgaagccggcattgccgaggccttcacccgcaaatttgtcgacgccgtggcagcgctgaagatgggcgacccgcgcgacgagcaaaactacgtcggaccgatggcgcggttcgatttacgcgatgaactgcaccaacaggtaacggcgacccttgatgaaggagcgactctgctgctgggcgcggaaaaaatcgaaggggcgggcaactactatgcgccaacggtgctgggcaacgtcaccgccgggatgaccggctttcgtcaggagctgtttggtccggtagcaaccctgaccaccgctcgcgacgctgaccatgcactggccctcgccaacgacagcgagtttggcctgtccgccacggtctataccaccgacgaggcgcaggcccagcgctttgcccgcgagctggagtgcggcggcgtcttcctcaatggctactgcgccagcgacgcccgcgtggccttcggcggcgtaaagaagagcggttttggccgggagctgtcgcattttggcctgcacgagttctgtaatgtgcagaccgtctggaaagaccgtcgctaa

SEQ ID NO: 212245 - DNA, 927 bp, Klebsiella pneumoniae
gtggcgacggttatcaataatgcaatgctggaagccattctggcagaaatcaggccgctgattggccgcggaaaagtggcggattatattccggcgctggccagcgtcagcggcgacaagcttggtatcgcgatcagtacggtggacggtcagcactttgccgctggcgatgcccatgaacgtttttccatccagtcaatctccaaggtattgagcctggtggttgccatgaaccactatcaggaggaggagatctggcagcgggtggggaaagatccttccggccagccctttaactcgcttctgcagctggagatcgagcagggcaaaccgcgcaacccgtttatcaacgccggggcactggtggtctgcgacatgctgcagagccggctcagcgccccgcgtcagcggatgctggagattgtccgccgtctgagcggcgtggccgatatcgcctacgatccggtggtggctcgctcagagtttgagcattcggcgcgcaacgccgccatcggctggctgatgaaatcctttggtaacttccataacgacgtcgccaccgtgctgcagaactatttccactactgttcgctggagatgagctgcgttgagctggcgcgaacctttctgtttctcgccgaccgcggcattgccccgcatctcgacgcgccggttattgcgcccatccagtcccgccaggttaatgccctgatgatgaccagcggcatgtaccagaacgccggtgaattcgcctggcgcgttggcctgccggcgaaatcgggcgtcggcggcgggatcgtggcgattgtcccgcaggagatggcgatcgccgtgtggagcccggagcttgacgacgccgggaactcgctggccggcgtggcgatactggaaaaactgactcagcggatggggaggtcggtgttctga

SEQ ID NO: 212246 - DNA, 369 bp, Klebsiella pneumoniae
atggtcgatcaggatcgcttgtttgcgcgcctggcgcgctcgacgtttcgctcacgcttccgtctgggggggaaagagcggcaatactgtctcgataagggaccggaggttatcgatcggcatgccgcagactttattcgccagcggctggcgcccgctgcgccgatcaatgatggcaagcagacgccgatgcgcggtcacccggtgtttatcgcccagcacgcgaccgctacctgctgtcgcggctgcctggaaaaatggcatgccattccccacggccgcgcgctgagcgagccggagcaggactatatcgtgcaggtcatccaccgctggctggtgctacaaatgaatgcgccgtctgtgcgctaa

SEQ ID NO: 212247 - DNA, 1425 bp, Klebsiella pneumoniae
atgtcttcactgtcgattcggtcatttacgctgtttcgtgaagaacaacccgtgcgcgatgcattggtcttatttacgttaacgctactgctgcattttcttggcgctatgctgcgtctggtgcaggagctctctttcttctggccgctcaatgcagtgatggccgggatttttgcacgctatgtatggcttaaccgcagctatttttatgccgtctgttttgcggcaatgctggtctatgacggattaacctcgcgctggggtatgggctttgcctcattgctgattaacttttccaatattgtctttattgtgacgctggcgcagctggtgctgtgggataaacgtcgcgccgactccatgccgggcccgataaacgcgcttaatttattctgtttctgcctgttagccgccttactgtgcgcagcggtcggcgcgctggggtcggtggatgttgaacgcgccaccttcgttccccagctggcggactggtttagcgaacagttctcaacggcggtattaatcctgccctttattctgaccctgacgctgccttcggcattaagcggttttcgctttcgccagctgctgccggtgctggcgctggtcctgtcaattgcgcttggcttggcggtaggcggcgcgggcagcattaccttcccgttaccggctttgatctggtgcgctgtacgctatccgctgccgctgacctgtctgctgacttttctcactggcatcggcgaaatactgctggtcgctaattcgttaattcacttttcgccagatgcgcgaatgcagccgtggcagctgttctccacccgcctcggaattgccgccatgctgattagcccggtgattgtcgcatccagtgtcgaagcgattaacacgctggtgaagcagctggccctgcgcgccgattttgactttcagacccgcgtctattcccgttccggactgagcgaagcgttgaagcgtcagacgctgccggcggataagctgctgacggtgatggtgctggatatcgatggcttcaaacgggtgaatgatgctctgggccatgaaggcggcgattgcgtgctgacccagtttgcccagcaggttcgacagctggtgggtgagcaggggatggtggcccgtatcggcggagaagagtttgcggtggccgccgtcgtcgacagcgcccagcagggctatttgctggcggaaaagatccgtcacggggtggagtcgcagcctttcggcctgggccagaacccgatccacctgaccatcagtctgggactggagacgcgcgaggtaggccacgcccgcatcaccgagctgtttaaccagctgctgttggcggcggacgatgagatggtgaaagccaaacagagcggtcgtaaccaaatttgtatgccgacgctgaccgaaagcgcgccataa

SEQ ID NO: 212248 - DNA, 531 bp, Klebsiella pneumoniae
atgaccacatccttttcactgcgcacgctctcgcgtgacgatattctccatcacctcccggcattaagcgagatcctggcaagctgcgtcaacggcggcgcctcggtgagctttatgctgcctttcgcgccgcaaacggcgataacgttctggcaacgcactgccgacagcgtggcggccggggagcgcattgtgctggccgccttcgacgcggaggaacgtcccgttggcaccgtgcaacttatcaccagtcaaccggaaaaccagccccatcgagcggatgtcgccaaattattggttcaccaaaatgtccgccgccaggggatcgcccaggcattgatgagcgagctggagcgcattgcccggcgggaaaggaagacggtgctggtgctggacacggcgaccggcagcggggcggaacagttctatgcccgctgcggctgggaaaaagtgggggaaattccgcgctatgcgctgatgcccgacggcgaaatgactgccacctcactattctataagtttctgccctga

SEQ ID NO: 212249 - DNA, 1452 bp, Klebsiella pneumoniae
gtgaaaactttaaaccgtcgtgatttccccggcgcgcagtaccctgaccgtatcatccagtttggggaaggtaacttcctgcgcgcattcgttgactggcagatcgacctgctcaacgagcataccgacctgaatgcgggcatcgtggtcgtgcggcctatcgccacagattttccgccttcgctgaacacccaggatggcctgtacacgactattattcgcggcctgaacgagcagggcgaagcggtcagcgatgcgcgtcttatccgctcggtcaaccgggagatcagcgcttacgcagacttcgacgcttttttacgcctggcgcataacccggagatgcggtttgtcttctccaacaccaccgaggcgggcatcagctaccatgccggggatcggtttgacgacgcgccgccggtcagttatccggcgaaactgacccgtctgttgtttgagcgttaccagcatttcgccggtgcggccgacaagggatgggtgattattccctgcgagctgatcgattataacggcgaggcgctgcaggcgctggtgctgcgctatgctagcgaatgggaactgccgcaggcatttatcacctggctgacctcagcgaataccttctgttcgacgctggtggatcgcattgtgaccggctatccgcgtgatgaagtggcggctctcgaggcgcagaccggctataaagatgctttccttgataccgctgagcatttctacctgttcgttatccagggacctgcctcgctggaggccgagctgcgtctcgataaactgccgctgaatgtgcgcattgtggacgatattaagccgtataaagagcgcaaagtggcgatcctcaacggggcgcacaccgcgctggtgccggtggccttccaggccgggatcgacaccgtgggtgaggcgatgaacgacgcggagatttgcgcgtttgtcgaaaaggcgatttatgacgagattattccggtgctggatctgccgcgcgatgagctggtgtcattcgccagcgccgtgacagggcgcttccgtaatccctatattaaacatcagctgctctcgattgcgctcaacggcatgaccaagtaccgcacccgtattctgccgcagctgctggcggggcagaaagcgcatggcgccctgccgccgcgtctgacctttgccctggcggcgctgatcgccttttaccggggagagcgggatggtgagagctatccagtacaggatgacgccgactggatatcgcgctatcaaacgctgtgggcccgccatcgcgatggccagatgagcactcgcgagctggtcaccgccgtgctcagcgtggcggatcactggcagcaggatctgagccagatcccggggctggtggagctggtgactgccgaccttgacgctatcctgacctgcggtatgcgcaacgccgtcaaacctctttgctga

SEQ ID NO: 212250 - DNA, 447 bp, Klebsiella pneumoniae
atggtcatcgatatccgggaagtacggccccacgacaaagccgaatggcttcagctttggcaaggctacactcgtttttacggtagcccgcagccggaagaggtgaccgaatgcacctggcagcggatgctggatgtaaactcgtctgtattgggtagagtcgcggtggtggatgatgcggtggtcggcttcgctatctgtgttcttcatgagggaacctgggttaccacgccgatctgctatctggaggatctgtttgtcgatcccgccttccgtggacagggtattgccagaaccatgattaagtcgctgcaaagcgaaggggcggacaaaggctggtcgcggctgtactggcatacgcgccgtgataatcccgcccgtcatctgtatgatgagtttaccccggctgacgattacgtacgctacaggatcacgcttgagtcctga

SEQ ID NO: 212251 - DNA, 717 bp, Klebsiella pneumoniae
atgtattataggaatttcatcattacctcaatcgaggcggagcgtattcttgccatgaaatttgatgaagcatttgctggagtaaaaaagaatgttattgatacactgaatcaaatgggaaatggtataacccgtgcttcgtattatacttcctgcttaatggataattatcaggatgtttgttctaagttaaagcaagaggacacaagatttattgcagggctggcgcagttagttaaaagccgtgatatcattttccaaatgattaaaatatatatagaaacctactttcaaaataaaaaagaagaaaaagctcaatatattctcaagaagcttgtcggcgcgggagtttacatatcatcttcaggattaactaatcgtattttaatcatggcagtagcaaccatgatttgccagacttccaggtttaatactgttgtatatgggcgtatcaacagggcaaggtcattagtccttaaagggagtgtaactgctaccgcagtggtattaaacgtgtatggattgattcaggatgccgctaatagcgctgacaatttgaaaatgcataattcattttattacaatgcgttatacgctaaccatctggagatgatgtactttctcatcgaacctgtcatcacaggcgttccttatttaaatccgatgattatttctgatgatgaacttgctgaattacttattaaattaatgaggtga

SEQ ID NO: 212252 - DNA, 195 bp, Klebsiella pneumoniae
atggatttcttgaaaagatggttaaaagaagaattcattctttttttatggggatggggtattgtattattaatcattatatttagcatgattgcagtctctctttttcctgacattgccattaacttaataggactttttgttttattaatcattgggtttcacgttgtcgtttggtttaaagttaaaaactga

SEQ ID NO: 212253 - DNA, 483 bp, Klebsiella pneumoniae
atgtcaaatccagcatatttatggttaactgatgagaatgattcgcctattataggttcttgcctgatgcccacacgcacgggttccatcgaattgcgcgcagtgaatcatcatgtttggttacctaccgataataatacaggaaagctgacgggaacccgtcttcatacaccggttaaaattcaaaaagagtttgacagaacaacacctttgctatttagggctctttgtgaaggtcgaacattaagatcggcaacgctaaaaatgtacagaataaatgaggcgggactggaagttgaatattttaacatagcgatggcgaatattaagattacggcaatcacaccaaatttacatccggccggaatgacaagtactcaccttgaagacattgatttccgttatgagacgatcacctggatatacacagaagggaacatcatgtatcgtgattcatggaacgatcgctgttgtgcatggtag

SEQ ID NO: 212254 - DNA, 381 bp, Klebsiella pneumoniae
atgcccttgacccgaatttcgcttggcaccgcctggcgtcccgcggagtttgctcaattgtcggcgctctttcatgagtgtctggtggcggagttcgacgttccgtcagcagatagatttcagtttatcgaacgggccgccgatgagcagcgcatttacgacccgcactacctcagcgaaggacgcagcgcccgcttcgtgctgtttcatattttcgccggaaaaccgcgcagccgggcgcagaaacagggactctatcgtcggctctgcgcgcggttagacgatgagatggcggtcagcccgcaggacgtgatggtggttatccagtttaaccaactggaggactggagttttagcgcagggaagatggcggatgaatga

SEQ ID NO: 212255 - DNA, 321 bp, Klebsiella pneumoniae
atgagtactcctcctgtcgatcgccgaacgctggctgctatcgcgccaaagctagccgagctgaccgaaacggtgctgtttggcgatatctgggcgcgtagcgagctgtcgccccgcgaacgcagcctgatcaccctttccgccctgacggcgcagggcaaaactgaacagctgccgtggcacatcgcgttcggctatcagaatggcctgagccgggaagaaattgtcgaattgtttacccatctggcgttctatgccggttggccggcggcggccagcgccctgacctgcctgaacgcgcaggaggcgtcatgcccttga

SEQ ID NO: 212256 - DNA, 762 bp, Klebsiella pneumoniae
atggccgactggaatccttcgttgtatctgcaatttgacgctgaacgtacccgccccgcggccgacctgctctcgcgtattgcccatctgcaggtcgagcacgccgtcgacctcggctgcgggccgggaaacagcacccgcctgctacgcgccgcctggccgttggcgacgatcgtcggtatcgataactccccggccatgctggtccaggcggcgcaggccttgcccgactgcgaattcattgatgccgatattgcccgctggcggcctgcgcaaccgccagatgtgatctatgccaacgcctctctgcagtggctgacggatcatgagacgcttttcccccatctggtaaaccagctggcggacaacggaacgctggcagtgcagatgccggataactggcaggaaccttcccataccctgatgcgtcaggttgccagcgagatggggttgccggaccgtggacgccagccgttactcccgcccgccgcctggtacgatctgctcagccgccagagttgcgaagttgatatctggcgcaccacctattttcatccccttgcttctcatcaggcgattgtcgactggctgcagggcaccgggttacgcccctatctggcaggcctggacgagcaggccggaagcgcgtttctcacacgctatctcgcattgctggccgcatactatccgttacagtgtaacgggaaggtgctcctgcgtttcccacggctgtttatcgtggcgcgaaagatcgccgcctga

SEQ ID NO: 212257 - DNA, 291 bp, Klebsiella pneumoniae; identical to SEQ ID NO: 135299

SEQ ID NO: 212258 - DNA, 1188 bp, Klebsiella pneumoniae
atgagcacttccgtcagcactacacaactcaatttgcgcattatttcgatcgttgtttttacctgtatctgctatctctccattggtctgccgctggccgtactgccgggctatattcactatcagctgggctacagcacctttgtggccggaattgtgatcagtctgcagtacatatcgacgctgataagccggccgcacgccgggcgctataccgatatctgggggccgaaaaaagtggtcagccttgggatcgtctgctgcctgctcagtggcgccttcacgctactggcggtagccctgcaggcaacgccgatgctggccattgccgcgctgctggcgggccgggtgtttctcggcgtcggcgagagctttaccgccaccggcgccaccctgtgggggatcaaaaccgtcggcgcgatccacacgtcacgggttatctcctggaacggcgtggcgacctatgtggcgatggcggtcggggcgccgctgggagttaccctcaatcactattttggcatcagcggctttgctacggtggtagtgctggtcgcggccatcggtctgctgttcgctcgtacccgccaggacgtcaaggtgaccgccggcgccagagcgccctttcactcggtggtgcgaaaaatctggccttacggcctggggctggcctttggcaccgtcggtttcggcgttatcgccacctttatcaccctctacttcgccgcgcacagctggcagggcgccgcgtttaccctttcgctgttcagcgtcggctttatctgcgttcgcctggtgctgggaaataccattacccgctttggcggagtcccggtctccctggcctgcttcatcatcgaaagtctcggcctgctgcttatctggctggcgccatcagcatggatggccggcgtcggcgcctttctcaccggttcgggtttctcgctggtctttccggccttaggggttgaggcggtaaagcaggtggaagagcaaaatcagggaaccgccctcggcacctactcggcgtttcttgatctggcgctgggcctgaccgggccgctggccggctgggtcgccgggttctacgatctcgccacgctgtatctgctggcggcgatcgtggtggcgctcgcattcctgctgattttccgcgtacatcggcaacagcggcttgtcgccagagagtag

SEQ ID NO: 212259 - DNA, 423 bp, Klebsiella pneumoniae
atgtcgttctgtcatatgcgcattgccaggccggtcagcgaactggacaccaccgccagcatgtattgcgccgggctgggactcgagctgctcggcagctttaccgatcatgaaggattcagcgggataatgctcggcgcgcccgaagcgggctggcatctggaattcacccactgtcgccaccatcccgtcaccccctcgccaggcgatgaagatctgctggtgctgtactatccgcagcaggcggcatgggaggcacagtgcgcagccatggacgccgccggatttctgcgcgttacggcgtttaacccttactgggaggtcaatggcgtcactttcgtcgaccgggacggttaccgcacggtattgcaaaaccgcgcctggggcatggtgtgtgattcgtcgggtatggcggcgagctga

SEQ ID NO: 212260 - DNA, 1158 bp, Klebsiella pneumoniae
atgaataaccaatcgcgccaggccttatggctggcactggctggatcgatagtactgatgatcggcatgggctacgggcgctttgccttcaccggcgtgctgccgcttatgcttaatgaaggtctgttaaccctgcacgagggcaatctcgccgcgtcggccaattacgctggctatctggtcggtgcgttgctgctggcgcgggtgcagcctggggccgccacccgactgagcattatctccgccgggttgaccatcgccagcctggcgctgctggcctgggtgagctcgccgtggaccattattacgctgcgcgccgtcgccggcgcgctgagcgcgataacgctgattgcaggttcgctgtggctgctggaacatatggggcatcatcacggggcgccgttgctgtatgccggggtggggctggggatatttatctccgcggaggggatcgcccttggacatgccctgagcctcaccagccagcagatctggctgctctgcgcattatgcgccggtctgctgctggcgctggcgatccgttggctactgactccgccggctgcactggtgagggcttcccatgttgagacctccctgcctgcgtccgggagcgatacccgtcgcgcggcgtggcgactcttgatggtttacggtctggcgggcttcggctatatcatcaccgccacttatctgccgttgtttctgtccggttcgctgcagagcgttgacccggtccatctgtgggcgctgtttggtctggcggccgcgccgtcctgcctcatctggcataagctggtgctaaagtggggataccggcaagcgctgacccgcaacctgctcttccaggcgcttggcgtgatccttccagcctgcagcgcttcattgctgttttgcgtgctaagcgcgcttttggtgggttttacctttatgggcaccgtaaccattgcgctaccgaaggcgaaaagtctcagccatcaggtgagcttcaatatgattgccgcgatgactgcactgtacggtgtgggacagattgccgggccgcttatcaccggcgcgctgtatcagatcgcggcttcatttaacccggcgctctatgccgcggcgctggcgctgctgattgccgcagggctggtctttaccgaacgccaggcttag

SEQ ID NO: 212261 - DNA, 846 bp, Klebsiella pneumoniae
atgaaccacagcacactcgagatcttcattcaggtggcagaaacgcagagcgtcacccaggcagcaaaacggctgggccgcgcacagtccaatatcacgacccgcattcagcagttggaagaggagcttgccgttgagctcttcgttcgcggcaacaaaaaaatggtgttgtccccggcaggcgtgcagtttctcagctatgcccggcggatcctgagcctggcggaagaggcaaagcaggctctgcatccgacaaccccaggcggcagtctgcgtctgggcgcgatggaggcgaccgccgccagccggctgccgctgctgcttacccgcttccaacagcagtgcccgcaggtggatatcaccctcatcacccaaccgacccgccagttaaccgagggggtgttaaccgccgcccttgatgccgcgctggtctgcctgccgccaggggccgatgggcaaccggcctgtcccgccgagctggcattcaccccggtgttttatgaaaccctgatgctggtccgtccgcagaccccgggtccgctgcggttcgcggcatttgccagcggctgcagctaccgcgcgctgggagaacgctggctggcggaacagcaggcggccgtcgaggtgcatgaggtcaattcctatcacagcatgcttgcctgcgtggcgtccgggcgctacgcctgcctgctgccgcagagcgtgctgtcgctgatgacgcttcccgaaaactgccttagcgaaccgctgtgcgaggcgaccacccagcttatctggcgcagcggcttgagcgcccccgccctgagcgagtggcgcaagctgctgcaaagcgtggcgattggctaa

SEQ ID NO: 212262 - DNA, 1059 bp, Klebsiella pneumoniae
atgagcaacccgctgctttcgcttcttgatattgattatcccctgattcaggccccgatggcgggcgtctccacccccgcgctggctgccgcggtaagtaatgccggtgcgctgggctcgctggggctgggcgcttcaaccgttgcccaggcggaagcgatgatagtcgccacccgccagctgacggaccgcccgttcaatgtcaatctgttctgccatgcgccgccccggcgcgacgcccggcgggaagccgactgggcaacaacattacgtccccattttgcccgctatggcagtacgccaccggattcgttaagcgagatctaccagacatttgtcggtcatgcgccgatgctggagctgcttctcgacatctcgccggcggtggtgagctttcatttcggccttcctgaaggtgagacgatcctgcgtctgcggcggcaggggatcgttaccctggcgacggcaacctcgctgcaggaggcgctgctgattgaacagcaggggatcgacgtggtggtcgctcagggctatgaggcgggcgggcaccgggggatctttgctccgcaggcgcctgacgcgcagctgagcaccttcaccctggtgcaacttctgcggcgtcgactaaccatcccggtggtggccgccgggggcatcatggacggagcggggatcgccagcgtgatgcagttgggggcgcagggcgtacagctcggtacggcgtttttactgtgttcggaatcggccgccgacgccggctatcgcgcggcgatccacaacagccttgacgggcgtacggtgctgacctccgcgatatccgggcgtccggcacgctgtctggcgaatgccttctgtgcgctgggggaaggctatccggcgagcgccgtgccggattatccgctggcgtatgatatcggcaaagcactggccgccgccgcgaaagcccagggcgtccatgagtatggtgcccactgggccgggcagggggtggggttgatccgcgagtgtgacgccgccactctgatccgccagctggcggcagagagcggctggaactaa

SEQ ID NO: 212263 - DNA, 672 bp, Klebsiella pneumoniae
atgcggagtagcatgagttgggaagatttgtggccgttattactcgacggcacgctggatacgctttatatggtgggcctggcggccctgtttaccgtgctgatcgggctgcccaccggcgtgctgttgtttatttcccgcgccaacgggctggcgccgatgccgaaactgaacgcgctgttaggcgcggtgatcaatatcggcaggtcgctgccgtttatcgtactgctgatcgccctgatcccctttacccgcctgatcgtcggcaccacgctgggcagcaccgccgccatcgtgccggtaaccatcggcgcctttccgttctttgcccgtctgacggaaaacgcgctcgacgaggtggactacgggagaattgaagccattctgtcgatgggcggcaacgtgtggcacgtgatttttaaatccctgctgccggaagccctgccaacgctgctggccgggatcacgctgaccatcgtgatgctgattggtttctcctccatggccggtgtgatcggcggcggtggactcggcgacctcgccatccgctacggctatcagcggtttaataatgaagtcatgtttggcacggtgctgatcctggtggcgatggtgcagggggtgcaaatggccggcgatcggctggtgcgcagcctggcccaccgccgctag

SEQ ID NO: 212264 - DNA, 792 bp, Klebsiella pneumoniae
atgataaccatcgaagggctgagcaaaacctacgccggaaccggccgaccggcgctgaacgatatcgcgttgcagataccgaaaggggcaatatacggcattctcgggcgcagtggcgccggcaaaagtacgctcatccgctgtctcaatttactggagcggcccacctcgggccgcattctggtgaacggacaggatattacccagttgaacaaggcggcgctgcgggattatcgcctgcgcaccgggatgattttccagcacttcaatctgctgcatgcccgcaccgtcgctgacaacgtcgcggtgccgctggagattgccggagtgccgagggccgctcgcgaggcccgggtgcgcgaactgctggagctggtggatctcagcgaaaaggccgctgctttcccgtcacagctttccggcgggcaaaagcagcgcgtcggcatcgcccgggcgctggccgcccggccggaagtgctgctgtgcgatgaggcgaccagtgcgctggatcccgagaccaccgcctcggtgctggccctgctggcggatattaaccagcgcctcaatctgaccattgtgctgattacgcaccagctggaggtggtgaaaaccatctgtgaccacgcggcgctgctggaacagggcgagattgtcgaaagcggtaaacttgccgacctgctggtgaccccatggtcgcggctgcgccagtcgctgctgcacgacccgcaggctgaacaggaatttcttacccgccacggcgttcaggggaggccattatgcggagtagcatga

SEQ ID NO: 212265 - DNA, 807 bp, Klebsiella pneumoniae
atgaaatatgccgcttttaaactggcaggggtcgcactgtctctttctctggcatggacgtctgcccaggctgccgcgctgcgcgtcgccgcggacccggttccccacgcggagatcctcaactacatcaaaaaaatcgatcccagcctcgatctgaaggtggtggagctgaccagcggggtcaacgccaatgaactgctggccagtggcgatgtggatgccaactacttccagcatgttccctatctgaaggatcaggagaaagcgttgggtaaaacctttgccgtcgcggccaccgtgcatattgagccgctgggaatttactcgcataagcataaagatttctcatcactgccggaaaacgccaccgtggcggtgccgaataacaccaccaacctgagccgggcgctgttcctgctgcaggcgcagaagcttattaagctggaccctaaatttaccgacccggccaccaccctggcgacgccgaaggatattgtcgagaacccgaaacacctgaagattctggagattgaatcgccgcagatcccgcgctccctcgacgatgtcgacctggcggtgattaacggtaactacgcgctggaagccggcctggtgccagcgaaggatgccctggggctggaaagcgccgagcataacccgtacgccaatattctggtgaccaccccagccctggcgaatgacccgcgcattaaggcgctggcgaaagatctgacctcgccgcaggtggcggagtttatccgtaaaacctacaacggctcggtgatcccggtggcccctcagtcatga

SEQ ID NO: 212266 - DNA, 1029 bp, Klebsiella pneumoniae
atgaacgcgaccaccctgccgattctcgacctggcccgctacgcggaccccgcggataaagcggccttcctggccgacctgcgtcatgccgcccgcgacatcggcttcttctatttgatcaaccacggtgtcgacgacgcgcttcaatatgaagttcagcgccagtcccagcgcttttttgctctcgatgaggcgcaaaaacagcaggtggcgatgatccactccccccattttcgcggctataaccgcgcggcctcagagctgacgcgcggccagcctgactggcgagagcagtttgatatcggcgccgaacgtccggcgctgaccctcagcgacgacgccccgcgctggcagcgcctgcagggtccgaatctgtggcctgcctccctgccgtcgcttaaaccggtattacttcactggcaacagcaaatgacccaggtgggcatccgcctgctgcgcgcctttgccgaagccctgcagctcccggaaaatgctttcgatcagctctacggcgacaaacccaacgagcatatcaaactgatccgctaccccggccagcaggagacccaaagcagccagggcgtcggcgcccataaagattcggggtttctcagcttcctgctgcaggacgagcagaaaggactgcaggttgaggtcgcgcctggagaatggatcgacgccgtgccgctggccggcagctttgtggtcaatattggcgaactgctggagctggcgaccaatgggtatttgcgcgctaccgtccatcgcgtggtgtcgccgccggcgcagcagcagcgcctctccatcgccttcttcctcggcgcccagcttgacgcggtggtgccggtttacaccctgccgcccgagctggcgcgtgaagcgcgagggccggacagcgacccgcacaatccgctgctgcgcgatgtcggctggaattatctcaagggccgtctgcgttcccatccggacgtggcggaacgctactatcaggacgtgtttcgcgaacgcgccgagcaattgatcgtttaa

SEQ ID NO: 212267 - DNA, 264 bp, Klebsiella pneumoniae
atgcacagctcgaaagatcccctgcacggcgtgacgctggaagcgctgctcaatgccctggtggcgcgctatggttgggcggaaatggcccgccaggtcaacattaactgctttaaaagcgatcccagcattaagtccagcctcaaatttctccgccggacgccgtgggcgcgcaaagaggtagaggctatgtatctcgcctcccttgatgatgacgcgccggtggagaaagcggatccctgggcaaactggcagaaaaaataa

SEQ ID NO: 212268 - DNA, 312 bp, Klebsiella pneumoniae
atgcagagctggagcagtaaagatttcaccgccgaccgcgcgtggggcgcgctggatattgccaatttttccggcaccaccgtgcgtctgcactggaccgaccaaccctatatctggcacatcaatgatggtcaggaggtgtttgccgtgatggatggtcaggtggcgatgcatgtgaaagtcgacggcgaggagcagatcatcatgctaaacgccggcgatatcttctacgccggggtgggatgcgagcatgtcgcccacccgcagggggcggcgcgtattctggtgattgagaaagaagggtcggtctga

SEQ ID NO: 212269 - DNA, 756 bp, Klebsiella pneumoniae
atggcaaccttgcagtgggaccacgcagtacagtttgtgaatcagccggaagcggcgattgaaatctttgccgggcagcagctgcgggcggtggccggagggcggcatccggggtggggaacccgtaatgcgctgagctattttggcctgacgtatatcgaattcctcgccattgccgacccggacgaactgcgcgccgcgacggacaaattcctcctttcgcgcgacgccgcacggctgctgccggagaatgaggcgctgtttcgggtggcgctgcgcagcgacgacatcgacgccacccatgaccagttgcgtcgcacaggggtgacagtgtcaccgattgtcgatggccagcgcaacgatccgcagggcaatatcatccgctggcggatcttcaccatcgatggcgacactgccgggctggtctatccctttgtgctgcagtgggaagaagacgacgccacccggctgacgcggctgcgcgcccagaggctggacgcgccgcatccgctgggcgacattacgcttgagcaggcggtgttcgaggtggtcaatccgcaggcggtgcgcgatcgctggcaggcgctgctgggctttccgccactgggggagcagggactggacgtgggcggccagcaatttatcttccgtgaaggggctgccaaccagctgaccgaactggtgttccgcgtcgccaacccggcgcttaaggggcagcgctttcgtgtcggcaacggcgtgtatcgctttacataa

SEQ ID NO: 212270 - DNA, 945 bp, Klebsiella pneumoniae
atgagccagcctgccatcgacctgaccagcgaactgttgcgcggtatgcgcctctccggcgttaactaccggcgcatcgaaaccgcacgcccgttcggcgtcggctttagcgccgtggcgggtaaagcccagttccatttcatcagccgcgggccggtgctgctgcgcatggcccgcggggaacagttcaccctcgagagcggcgatgcgctgtttattcccaacggcgacgggcacgccctgctctcggatccgcaggccacggtggtcaatgtggcgcagctgcccagcgaaacggtgtgcagcacggtaagttgtatcaacgctggcgaccagcctgactgcccggagcgcgccgtcattttcagcggttgtatggactttgagctcggcggcatgcagccgctggtgaaggccatgcccgaggtgatgcgggtcagcagcctgcttaatacctggccggagatccagccgctgctggcggcgatggagcgggaatccctcacccgccaggcaggctatgccgggatcctcgcccggctggcggacgtggtggccgcgctgattgtccgcggctgggtagcgtgcgggtgcggcaacgccaccggctgggtacaggtcctgcgcgatccccggctggcgaaagcgatctacgccatgcatcagcgcccggggggcaactggaaagtggaagatctggcgcgggaggcgggtctttcacgctcgctgttcgcggaacgttttctcgccgccaccggcaccactcccgcccgctatctcaccgagctgcgtatgcggctggcggtgcagtacatcacccatgaaggccaggcgctggaaaaagtcgccttcagcctcgggtatcagtcgctggcggccttcagccgggctttcaaacgcatcaccggccagccgccgggggccctgcgcgccacggcacgctag

SEQ ID NO: 212271 - DNA, 1239 bp, Klebsiella pneumoniae
atgagttcctgcatagctgctgacgcgagcctgtctcccgccaaacctgcctggcgcgccgtctatgccctggccctcggggtgttcggcctgatcgtggccgagtttctgcccgccagcctgttaacgccgatggccagcagcctcggcgtcagtgaagggatggccggacaggcggtcaccgcgacggcgctggtggcgttagttaccggcctgctgatcgccaccgccacccgcaatatcgatcgccgctgggtgctgatgttcttttccgtactgcagatagtctccagcctgatggtcgcttttgccgattcgctggcgtttctcctgctgggccgtctgctgttggggatcgccatcggcggcttctgggcgatgtccaccgccacggcgatgcgtctggtgccggcggcccatgtgccaaaggcgctggcgatcattttttccgcggtgtctgtcgccacggtggtggccgcgccgctcggcagctacctcggggagctgatcggctggcgcaacgtgtttattctctgtgcgatacccagcctgctggcgctgctctggcagctgtgggtgctgccctccatgcgcccggagagcgtcgggaccttctccacgctgttcagggtgctgcgccgtcccggtatgctgggcggcatgctggcgacgatcctgattttcagcggccatttcgccttctttacctacctgcggccgttccttgagaccgtcgcgcaggccagtgtcgaaggggtttcgctgatattgctcggcttcggtatcgctaactttatcggcacttcggtggcgagctatctgctgagccgtagcctgcgtctcaccctggcgctggtgccgttgatgatgagcgttctggcgctgctgatggtgacgtttggccatctgaccgtgctggccgggctgctggtcgccctgtggggatttgccttcggcctggtgccggtggcctggtccacctggcttgccaccaccgtgccggatgaagcagaaagcgcgggcggtctgctggtcgcctctattcagctggccatcagcgccggggccgccggcggcggggcggtgtttgatttgcacggcgccagcggcgtcttcaccggcagcggtctgctgctgttgagcgcgatggtgattgtcttcgccgccgtacgggtgaaaccggtcgcccgcgccgaccagccggtgacgggccgcttatcccgcgagatcgataactaa

SEQ ID NO: 212272 - DNA, 975 bp, Klebsiella pneumoniae
atgcgcgacatactcccggtggtggtcgatggcctgtggcgccagggcgctaaaaatctggccgttagtctggtgagcgccgaggggcaaccgctgccggcgtggacgcccggcgcccatatcgatctccatcttccctgcgggctgatccgtcagtactccctgaccggcagcccggccgaacgggatcgctatctgctctgcatcgcccgcgagtcgcagtctcgcggtggctcccgttatattcatgacaccctgcgcccgggacagccattgatgatctctgccccgcgcaaccactttccgctgcacgagggcggccatgtggtgcttctcgccgccgggatcgggattacgccgctgctggcgatggcccacgcccgggcggcgtccggcgccagctttacgctgcactattacgttagccgtgcgcaggaggccgccttcgccaccgagatcgcccgccagctagcgggtggaatctgccagatccactgctcagacgaggggcagagtccgcgccagcggctggcgcaggatctgggggctccggacgccgacacccgggtctacttttgcggtccgcccggatttatggcccgggttcgcgataccgcgcgggcggtcggatggggagaggaacaattgcacagcgaagcgttccagccgcccgccccgacggcggcgtcggcggcggacggaaccttcaccatcaccctcgcctccaccggggagcgctggccggtgccgggggacaaaaccatcgcccaggtgctgcaggagcatggcgtcgcggtgccgctctcctgcgagatggggatctgcggcgcctgcctgacgccggtacgcgagggaaccgtcgaccaccgggataccgtgcagtcggaggcggaaaaacaggccgcagaacagcatattgcgctgtgctgctcccgcagcctgtcggccaatttagttatcgatctcgcgggataa

SEQ ID NO: 212273 - DNA, 1038 bp, Klebsiella pneumoniae
atgaagacaaccacccccacgccccccgcccattgcacctttgacccggaagactggctgcggctggcccgctgctggcacccggtggcccgcgcctgcgatattgccggcgccccggtgaaagccaccttgctggacgaacagctggttatctatcgtattaaaggccaggtggtagtcgcccgcgacgtctgcccgcaccgcggggtgccgctgaccctgggatttcatgaagaggaaggtatcgtctgcccctatcatggcctgcgctttggcgaggatggccgctgcaaccgtatcccctccagtccggggcaacccattccggccaaactgcatctcaccagcttcgccgtggaggagcgctacgggctgatctggacctgcctggcctgcgatccggacaatccgccgccgttaccgaccatgccgcactgggacgacgccggctttcagcaaatcaactgcccggccttcgaggtaaagggatttgccggccgccaggtcgaaggctttctcgatgtcgcccacttcgcgtggatccacaccgacaccttcgccgatccggacaaccagcaggtgccggactataccccgcaggagacgccgttcggctttgttgccgactactggagctcggtgggcaattacccggccagctctgatttccgcgcgccggaagggttccagtggctgcgtcactttgaaatgcatctgccgttcaccgctacgctgaccatccattttcccgccgacgccaggctggtgatcatgaacgccgcctcgccggtgtcgtcccgggtgacgcggatgtttgcccctattgcccgcaacttcgatctgcacgtgccggtggaagacgtacatgcgttcaacctgcgggtatttgaagaggaccgcctgatggtcgagacccagcgtccggaacggttgccgctggatctgaccctggaggcgcatattccggcggaccgcagctctatcgcctaccggcgcgggctgaagaagatgggctttggcgatttctttctggtatga

SEQ ID NO: 212274 - DNA, 924 bp, Klebsiella pneumoniae
atgagtccattttcccgtttcgcgcactatttcatcgccgtggcccgctgcggcagtctgcgccgggccgccgagcagctgcatatctccgcctcggcaattaaccgccagatcctgcaggccgaggaggccttcggtaccccgctgttcgagcgcctgccggagggactgcggatgaccaccgccggtgaactgctgtatgacaatctgctgcgctggcagaaggaatttcgtcagacccgacagaaatttgatgagctgcaggggatgaagcgcggaagcgttagcgttggcatggtgcaggcgctggcggaagggggcttcgccgccgcgctggcggagatcatcgccagctggccgtggctggagctggatctgcaggtggctgacagccacaccgtcagccagaaagtgcgtcaggcggacctggacgtcggcctgatcctcgatccgcaggggcaggctggactcagcgtgctggcctttgccgaactggaggtggggattgtgatgcgtccggaccatcccctggcgggggcgaaggcgctgtctttgggcgagctcagcctggagcggcatattgtgcccggcgcgccgctgatcgtccatgagcgggtggcgctcctctatcgccaccatgactttgcgccggagaataccatcagctgcaatgatatccggcttatcaagtcgttggtgctgcgcggcagcggcgtgacgctccttagcctgctcgacgtgctggacgaggtccagcgtggacagctggcctttgtcccgctgcgcagtacgctgctgcgaccgctgaccctggcgctgtgtactgcgccctcgcgtcagctttcgcggcccgcgcaaatggccattcagacgctgagtgcggtgatcgaatccatggcgacggtcagcccagcggcccgctga

SEQ ID NO: 212275 - DNA, 1155 bp, Klebsiella pneumoniae
atgaaagcaatcgtgattggcgccggcatcggcggtttaagcgcggcagtggcgctcaaacagtcggggatcgactgcgacgtctatgaagcggtgaaagagatcaaaccggtcggcgcagcgatttccgtgtggcccaacggcgtgaagtgcatggcccacctcggcatgggcgacatcatggagaccttcggcgggccgctgcgccggatggcgtatcgtgatttccgcagcggcgagaacatgacccagttcagtctcgccccgctgatcgaacgcaccggcagccgcccctgcccggtctcccgggcagaactgcagcgggaaatgctggattactggggacgggacagcgtgcagttcggcaaacgcgtcacccgctgtgaagaagacgccgacggcgtgacggtatggtttaccgacggcagcagcgccagcggcgatctgctgattgccgccgacggcagccattccgcactgcgtccgtgggtgctgggctttaccccgcagcggcgctacgccggctacgtcaactggaacggtctggtggagatagatgaagcgctggcgcccggcgatcagtggaccacctttgtcggcgaaggcaagcgcgtctcgctgatgccggtctccgccggccggttctactttttctttgatgtgccgctgccggcgggtctggcggaggatcgtgacaccctgcgcgctgacctcagccgctactttgccggctgggcgccgccggtgcagaagctgatcgccgccctcgacccgcagactaccaaccgcattgaaatccatgatatcgaacctttcagccgcctggtgcgcggccgcgtcgcgctgctcggcgatgccggacacagcaccaccccggatattggccagggaggctgcgcggcgatggaagatgcagtggtgctgggcgccgttttccgccagacccgagatattgcggccgccctgcgcgagtatgaagcccagcgctgcgaccgggttcgtgacctggtgctgaaggcgcgcaaacggtgcgatattacccacgggaaggatatgcagctcaccgaagcctggtaccaggagctgcgtgaggagaccggggagcgcattatcaacggcatgtgcgacaccatcctcagcgggccgctgggctga

SEQ ID NO: 212276 - DNA, 1380 bp, Klebsiella pneumoniae
atgtctgacgaacatcacagtggcctgctttacggccttgaacagcggatcccaccgcttccggcctttttcagcgctctccagcatgtgctggcgggcctggtggggatcatcacgccgccgctgattatcggcgctaccctcgggcttggcgactggctgccgtatctcatcagtatgtcgctgctggcctcgggcattggcacttttctgcagtccaatcgggtatggggcatcggcgccgggatgatctgcatgcagggcaccagttttgccttcctcggcgtgacggtggccggagggatgtgggtaaaagcccagggcggcgggccgcaggatatgatggcgatgctgtttggcgttaactttgtcgccgctctggtgccggtgattgtcagccgctttatcgaaccgctgaagaaaatctttactcccatcattaccggcagcgtgattgcgctgatcggcatcagcctgatcaaggtcagcgtcatcaactggtgcggtggggaaaaggccgaggatttcgccagcatgagcaatatcgcgctcggggcgggcaccctcggggttatcgtcctgctgagctgcgccaaaaaccgctggctgcggctctcctcggtggtggtgggcattgccgtgggctgcatcgcagcggggctgagcggtcagttccatcttcacagcctgggcgacactctgtttcgcctgccgacgctgtttccgttcggctttcagtttaacagcgcgatatttctgccggtcgccctggtgtcgctggtctgtattctggaggcggtgggcgatctgacggccaactcgctgatttcgcaacagtctgttgacgatcgcgctttccgtaaccggctgaagggcggtatcctggcggatggcgtcagctgtatggtggcggccatgctctgtgcttttccgaacaccaccttcgcgcagaacaacggcgtgatccagatgaccggggtggccagccgctatgtcggacgctacattggcgtgattctgatcctgctcgggctgttccccccggtgggcgaactgctgcggcagatcccggcgccggtgctggggggcgccacgatggtgatgtttggctgcgtagtggcggccgggatccggattattacccagactccgctgactcgtcgcgatgtgctgatcgtggggctggcgtttggcgcgggtcttggcgtggagtcggtgccggcgtttctcagccattttccgccgatggtcggcgatctgttcggttcggcggccaccagcggtgggctggtagcgatagcgctgaaccttattctgccgcaggagcaggcggcgacgaaatcgttaaggagtcaggatgatcgcgctgagtcagtttaa

SEQ ID NO: 212277 - DNA, 501 bp, Klebsiella pneumoniae
atgatcgcgctgagtcagtttaacagcctgagcaaagatgaggcggcggggctgctggccccttgcgtggcgatcccggcctggggcgagatgctggtgagcttacgacctttcgccagccgccatgcgctgctgcaggccgcccgtaaggcgatggctaactggggagaggatgagctgaacgcggcgctcagcgcccatccgcggatcggtgaaaagccgaccggcggccaggcgcatgcggcgctgtcgcgccaggagcagtcggcggtggacagcgagaatgagcggctcgcgcaggccctgcgggaggggaatgcccgctacgaagcccgctttggccgggtgtttttaatccgcgccaaagggcgcagcggcgatgagatgttgcaggcgctgacgcgccggctgcagcataccgccgacgaagaagtggccgaggcgcttgcccagctgcgagagattacgatgttaagactggaaggagtgattggcgaatga

SEQ ID NO: 212278 - DNA, 327 bp, Klebsiella pneumoniae
atgagtaccctgagcacccatattctggatatttccaccggtacgccggcagaaggcgtaacggtcagcctgagccgggagggcgagacgctggcgaacctggtgaccaacgcccaggggcgtatcgccacctttagcgccgcgccgctgccggcggggcgctattgcttaacagcggaaaccggggcgtggtttgcccgcgccgggcgcgagagcgtctttacccgggcgcagattgattttgtcatcggcgaggcggcagaggaccatttccatctgccgtttctcatcgccccgggcgggtggtctacctaccgcggcagctaa

SEQ ID NO: 212279 - DNA, 288 bp, Klebsiella pneumoniae
atgatggtgaggaacaaggcgatgaattccccgcagatatacagtcccgtgcagctggccaattacctgaagctgctgcgccagcagaaccactggacccaggatgcgctggccaggcggatcggcattaagcaggccacgctgtccaattttgaaaatcaccccgacaaaaccaccttaaccacgctgtttaagatcctccagtcgctgggggtggtgatgacgctgaacgccaaagctgctgagacggcgccggctcccgataacaacacggaccttgactggtaa

SEQ ID NO: 212280 - DNA, 1323 bp, Klebsiella pneumoniae
atggcgacgcttaccacctggatgaacaatgtgcgcgtgggaaccttaacccgccaggctaacggggcgcacagttttcgctatgacgaagagtggctgcgcagcccgcgcgccagaccgctctccctctcactgccgctgcagtatggcaatatcactgccgacgcggtgtatcactattttgataacctgctgcccgacagcccgcaggtccgcgaccggatcgtcaggcgctatcaggcgcgctcgaagcagccgttcgatctgctggccgaagtcgggcgggatagcgtaggggcggtgaccctcctgccgccgggggaagaggcgcacctggaaggattacgctggcagacgctggacgaggcgcagctcaccgctttgctgaccgcttaccagtcggatatccccctcgggatgattaccagccaggacgatttccgtatctcggtggccggcgcccaggagaaaacggcgctgctgcggatgggcgagcagtggtgtattccgcagggcgccacgccgaccacgcatatcattaagctgcccatcggcgagatcaagcagcccaatgcgacgctggatctgcgtgaaagcgtggataatgagtatctgtgcctggcgctggccagagaactgggcctggcggtgccggaagcggagatcatcaccaccccgcggatccgcgccctggcggtaacccgcttcgaccggcgctgggcgcaggagggacgggtgctgctgcgtctgccgcaggaggatctgtgtcaggcttttggtcttccttcagcgatgaaatatgagtctgacggcgggccgggtatcgccgcgatcatgacctttctgctgggctcgagtgaagcgctgaaagatcgctatgactttatgaagttcatggtcttccagtggctgacgggggcgacggacggtcacgcaaaaaacttctcaatttacctgttgcccggcggcagctaccgcttaacaccgttctacgacattatttcggcgtttccggtgctgggcggcacgggactgcatctgcgcgatctgaagctgtcgatggggctcaatgccacaaaagggcgtaaaacagagattaacgccatctatccgcgtcattttctggcgacggccaaagcggtgaactttccccgggagcagatgctggcgatcctccaggagtttgccgggcatgtgccgcaggcaatcgaaagcgctcgccggacgctgccggcggacttttccagccacgtctggcaggccattacagagaacatgctgaagctgcacgcccgcctgcagcaagggctgcaggcgctatag

SEQ ID NO: 212281 - DNA, 1293 bp, Klebsiella pneumoniae
gtggcgctggcaggcgcggcgctcatcgccgctggcatgctgttcagctgcaccagtaaagcccctaaatcccttgtcacgccgccgaacgctgccgccgtcaaagccgggcaggcgcaccgggagccggtgcgcggcgtgtggctcaccaccgtttcgcgccttgactggccgccggtcgggtcgattatcgccagcacgccggagagccgcatcacgcagcagaagctggcgctgatcgctaaactcgataacctgcagcgcctggggatcaacaccgtctttttccaggtgaaaccggacggtacggcgctctggcggtcggatattctgccgtggtccgatatgctgaccggcaaaatcggcgaataccctggctacgatccgctgcagtttatgctggatgaagcgcacaagcgcggcatgaaggttcacgcgtggtttaacccctatcgcgtctcggtcaacaccaaaccgtcgacgattgccgagctgaacaacaccctcacccaggtaccggccagcgtgttcgtcctgcaccgtaactggatccgcaccgccagcgatcgctttgttctcgacccgggcattcccgaagcgcgtgactggatcaccagcatcgtcgctgaagtggtgcagaactacccgattgacggcgtgcagttcgatgactatttctataccgaaaccgcctcttccccgcttaacgacaacgagactttccgccgttacgggcagggctatgcctcgaagggcgactggcggcggcataacacccagcagctcatagcccaggtttccaccaccatcaaaaagctcaatccgaacgtcgagtttggcgtgagcccggccggggtgtggcgcaaccgctcccacgatccggcggggtccgatacccggggcgcggccgcctatgatgagtcctatgccgatacccgcagctgggtgcagcagggactgctcgactacatcgcgccgcagatctactggccgtttgcccgcgatgccgcgcgctatgatgtgctggccaactggtgggccgaggtggttaaaccgacgcatacccggctgtatatcggcgtggcgctgtacaaggtgggtgaaccgtccaaaaatgagcctgactggacggtggatggcggcgtgccggagctgaaaaagcagctcgatctcaatgagactctgccgcagatccagggcaccatcctgttccgcgaaaacaacctcaatcagccgcaaacccggcaggcggttaactatttgcgcagccgctggggtcagccgcagagctag

SEQ ID NO: 212282 - DNA, 1005 bp, Klebsiella pneumoniae
atgtcctttttaactctcctgcgtcgggtcgccatgacgctgttatttattctgttaccggccgccagcggatgggcctgtacgccagtgtttgtccgcggccaggcctccacccttcggctgaacgtggggcagctcacggttccggctgacgccagacccggcaccccgctgtatcataaaagtttcgcctggaaccgccttagcgacggcggcgaacagtggatccgctgcgcggacgatccgcacgggttgtcgccgctgctgctggacagtctgctgtccgggggagtgacgcgaccgacggtttatcaaactaacctcgccggcattggcgttcgcgtatcgctgcgcgctatcggcggctatggcggctttcctgaccggccgacgccctcgccgtttagccaacgggtggacaatcccgccgccttgcccgatgcggtgtggaaactgggctatttccgcctgacgattgagctcattaaaaccggtcccgcggcgacgccgggcgagcttgaatatcgcagcgagcgctttttaatggcggagcataccccgctggccgcgttagacttaaccggcaggatcagcaccgcgggatgttcagtgaatgacgccacgccagccctgatcaagctccctgcggcgatgcttgaccacttcggcggcgtcggcaaaaccaccggcgacacccctttcgcgctgcagctggattgcaacagcgcggtcacgatttccctgcgagttgacggcgcggagcccctctccgcccgggggcatggcgttctgcgcaatgacgccaccgacgatcgggcgcagggtattggcgtgcagttgctttaccatcgtcagccggtcgtactgaatcatgagatgacgctgggcagcgcgagcgcgggccggtttaccctgccgctcactgcccgctactaccagacacgttcccggatcaccgccggtcaggtgtcggccgtcgcgacctataccttgcattatgactag

SEQ ID NO: 212283 - DNA, 2502 bp, Klebsiella pneumoniae
atgcgccacggcccggctcataccgttaccgtcgtcagcctctccatcctgctgggcggacagagcgcgctcttgcacgcccaggcgacctttaatatggatctgctggagaaaaacgaccatttgccggcagtggatctgcaacgcttcaatcagcaggcgggccagccgccaggcgcctatccggtgagctggcaggtcaacggcgtcacgctggacgcccgtaagaccgtcacgtttcgccagaacgatcgcggacagctcacgccctgccttaagccggaagatctgctgcaggccggagttaacccggccgtgctgtcccaggcgcccggcgcaacgtcccgctcatgtcccgaactcaacgcactgctgccgggcagcacggtcaatttcgattttgctcatcagcggctggtaatgaccattcctcaggcgctgatgacgcaccgggcgagggataatgttccctctgcgctgtgggacgaaggtattagcgcctttcagagtaactatcgttattcaggcgccagccagcgtacccgcgagggcagcaccgagcgcgataactatctgatgttgaaaagcggcgtgaacgtcggcgcctggcgcctgcgcgccagcaatagcctgaccgccaacagcgatgataagccccagtggacgaccagcggcgcctggcttgagcgcgacctgacgcgctggcagagtgaactgaccctcggggataccttcacgtcgggcgatgtgtttgacgcggtacagtttcagggaatatccctcgcctccagcgatgcgatgctcccggactcgcagaaaggttttgccccgaccatccgcgggattgccagaaccaacgcccaggtcacggttcggcaaaatggctacgtgctgtatcaaacctacgtcacccccggcgcgttcgtgattgacgatctttatcccaccgccagcagcggcaatcttgaggttgccgtcaaagagtcggatggcgaaatccgccgcttcacccagccgtatgcttcggtgaccagcatgcagcgcgaaggcagcctgaaatacaacctggtcgccgggcgctaccatagcgacgatgccagccagcgaccgttgatgatgcagctgtcgctgatgcgcgggttcgcccacaacctgacgctgtttggcggactgcagagcgcggcgcaataccataacctctcggtcggcgcaggacaggggttgggagaagccggggcgctctcgctgcagctgttaaacgcccgcgaccggcaccagcaggatccgatcgatggccgggcctggcagctccagtacagcaaaggttttgatcgtcttggcacgcagttcaccttcaccggctggcgttattcgcatcagcgctatgccacgctgagcgaggcgttttccagcccgggtagcgaagacgacctgcaggatagcgacaacaaaaaagcaaccctgcaaatcaccgccagccagagcctgccgtacgatatcaccctctatctgagcctcgaccaggacagctactggtcagggggcgcctcacagcgtaccgccaatatggggatcagcagccaggttcacggtatcgcgtggtcgctcagctacagcgactcccgcagcagccacggtgacgaggaggatgacgagccgcattccgacaaagtggtgacattgtcactttccgtgccgttgagccacctgctgccggggagctatgccggctataccctgacctcctcccgccacagcgttggcagtcagatggtcagcctcaacggcacattgctggacaatcacgcgcttagctacgccgtcagccaaacccgcgaccggcaaaacgggtccagcggcagcctgacggccgggtacagcagtggaagaggcgatctgaatctcggctacagccacgattcgcaggccgctcgtctgaactacggcgccagcgggggcattctgattcaccgccacggggtagtctttacaccggaaatgaatggcgctgtcgtcctgattgacgccggtggcgccgggggtgtgaccctcgccaaccagaaaaccatcgccaccaatggtgacgggtacgccgtgctgcccttcgccaccgcctatcaccgcaacgacgtctctctcgacagccattcgctgccggagaatgtggatctggccaacagcaccgtgacgctggtccctaccaaagacgcggtggttctggcgcgctttcacacccacgttggctataaggcgctgtttacgctgcagtcgcggggacaaccgctgccctttggcagcgaagtacgcgccaaagacaccaacagcatcgttgccagcgagggtcaggtgtacctggccggcctggcgccaaaaggcaccctttatgcgcaatgggggccgggccctcagcagcgctgtagcgcccgctacgatctcaccccgacgctggcgcagaccccccatccactcattttacagcagacgttatcatgtcctttttaa

SEQ ID NO: 212284 - DNA, 696 bp, Klebsiella pneumoniae
atgcagtgttataaagcggcttttatcctgagccttctcttttgcccgttcctggcgtctgccgccggggttgccattgccggcacacgtgtcatttataatgaacaaagccatgaggcagacatcacggtaaaaaacaccaatcctcacgatccggtgcttattcagagctgggtagacgatctggctgataataataaatcaccgtttatcgtcaccccgccattgttccgtctggatgccggagacagcaacgatctgcgcgtgttattaacctcggcgcaactgccaaacgatcgggaaagtttgttcaccctgaatatcaaagtgattcctgccaataccgcgccggctggcgagaacattctgcagtttgcaattaagaatcaactgaagctcatttatcgcccggcagggctccctggctcggcgctcgacgcggcgcagcacctgcgctggcggatcagcggcaaccacctgcaggcggagaatgcctccccctattatgtgactatcaccacgctcacctgcgcgggccagaaccagaaaacgccgcttgagcgcagcgtgattgctcctcacagccgtgaagattattccctccccggcgaggcctgcgcccgcgaggtgagctggcgcattctggatgactttggcgctgtgcagacgtttagcgcccccgtttcggcgcactaa

SEQ ID NO: 212285 - DNA, 564 bp, Klebsiella pneumoniae
atgaaagaaaaaggcaccctgctggttgttggttcactgctggccttaagtctggctactgtgaccaccgcccgcgcggcgggtacactgaatttcaccggtaaaattattaacgagtcctgccagatcgccaataacggtggcgatgttaatgtcgattttggcaacgtcgatatgtcggcgctgaaatcccatgaagcgaaaaccgcagaaacgccgttcaccatcaacctcaccggctgcccactggcgcagaacatcagtatcagcctggaaggtactccggacaccaacgctaacggcaccagcgccgccgtgctggcgctctccgactccgcggataccgccaaaggggtgggcattgaagtcttctcttcccctgacggctcaacggaaggcactcagctgacctttgacaagcagagcaaaacggcggtttcgcaagccgacgaaaacggtgatattgcatttaactttattgccgatctgaagagcgattcctcacaggatgtcaccgccggcaatattaatgccacggccaatattgatattgtgtacgaatag

SEQ ID NO: 212286 - DNA, 288 bp, Klebsiella pneumoniae
atgtctccatttcgtctcgctctgctatgtctgtgcctggcgccgctggcgtcgtctgctgcgctttccggccaggttcatttttcaggacgggtcatcaatccggcctgtgttatcgccccccggcacgatcgtatcgatgtctcgtgccagcaccattcaccggaacaggtcgccttgacaaacaaccgtcctcgctacgccatgctggacaatcgtggtgaggtcagtattcactggcgaaatgcgcagcatagcgaagcggatgtcattattcgctatcgctaa

SEQ ID NO: 212287 - DNA, 783 bp, Klebsiella pneumoniae
atgccatcaataatcattaaaaccgccgacgaactcgcccggcagcgccatgccggccagctgctggcgtcagtgtttgatatgctggatacttttatcgttcccggcgtaacgacgatggcgattaacgatcgagtggaagattttatcgtcaaccagctgcacgcccgcccggccagcaaggggcaatacgattttccctatgtgttgaacacttccattaacgatgtggtgtgccacgggatccccaaagcgaccgaacatctgcgctccgggatgattgttaacgtcgatatcaccctcgagaaagcgggcatgattgccgactccagtaagatgtacctgataggcgatgtctccccgctggcccgccggctggtaaagactacctatgaagcgatgtggaaaggcattgaggtggtgaagcctggcgcgacgctgggcgatattggccacgctattcagcgctgggtggaggaacatggctatagcgtggtcagagaatattgcggtcacggcatcggtcaggaaatgcatgaggaaccgcaggtgctgcattacggccgccccggagaaggcgccgtgctgcaggaaggcatggtgttcaccattgagccgatggtcaaccagggcgacagccgtatcaaaaccaaaaaagatggctggacggtggttacccgcgataaaaaactctccgcgcaatgggagcacaccgtggccgtcaccgccaacggttttgaggtgctgacgttacgcgacgatgaacagtcgcggatccgctga

SEQ ID NO: 212288 - DNA, 219 bp, Klebsiella pneumoniae; identical to SEQ ID NO: 134601

SEQ ID NO: 212289 - DNA, 249 bp, Klebsiella pneumoniae; identical to SEQ ID NO: 134602

SEQ ID NO: 212290 - DNA, 1656 bp, Klebsiella pneumoniae
atgagtaacgatcacctgacggatattgcctatcgccactttattgaaagcgttaaagattatgccatctatatgctgagcgccgacggcacggtcattagctggaatgagggcgcccgccgggcaaaagggtacctgagcgacgagatcatcggtcgctacttcggtctcttctatagcgaagctgagcaactctccggtgtacccgcaaaaaacctggaaatcgccctgcgtagcgggcagtttgaaggggaaggctggcggtatcgcaaagacgggtcccgattctgggcgcatgtcatgatcgataccatccgcgatgagcagaacaccctgctgggttttgccaaaattacccgcgacattagtgaacagaaggcgattaacgaccgcatcgcctggatggcgcgctacgatgcgttaaccggtttacccaatcgggtggagttttttgaacgggtggagaagctgatcactggaaatgatgcccgccgctttgccattttcacgatcgatttagacaaatttaaagagattaacgatctgcagggccatctgattggtgaccagctgctgcagcgcgtggcgggcgccgtgctcaaaacgctgcagaaggaggagatggtcgcccgcttcggcggcgatgagtttgtggccgttaaacctttttccgatgagggtgaagtggatgcctttgctgcgcgcctgtggcactgcttcagcggtaagcagacgtttgccgcgacggaagtggttctctccgccagcattggcatctcagtctacccggaggacggcacggatattaatacgatactgagcaattccgatctggctatgtatcgggcaaaaagcagcctcgaccataagatttgctggtatgaacgtgaaatggatgacaagacgcggcagcgcaatatgatggccgccgatatccggcgcggtattcacgccggggagttttcgctccactatcaggctatccgcaacatcaaagatcgtagcatcaccggttacgaggcgctgctgcgctggcagcatccgcagctggggacgatcccgccggacgtgtttattcccatcgccgaagagagcggcgctatcgtgcccttaggttactgggtgctcgagcaggtgtgtaacgaatcgctggaaaatggtttgaacagaaaagtttcggtcaatatctctccggtgcagttgcgccatcgtagctttatcgaaaaagtccgcgagatcctgatgcgtaccgcctacccggtcagtctgctggagtttgaggtcaccgaaacggcgtttgtgatcaataaacagctggcgttcagcgttctgcatcatctgcaaaaaatggggatcagtattgcgctggatgactttggcaccggttactcctccctgagcatgctgcgcgattttcatttcgacgtcatcaaactcgaccgcagctttatgacagatgtggagagcaaccctcaggtacgctcattcgtgcgagccattatttcgctgggcaattcgatcaatacgccgcttatcgccgagggggtggaaacggctggacaactgcagatcctcgaagaggagggatgtgacgagatgcagggatttctgttcggcgagccggtcgatatcaaacacctgcccgaccggcgctga

SEQ ID NO: 212291 - DNA, 930 bp, Klebsiella pneumoniae
ttgagttcagggagcatcacaacaggtcgtacgagcgggctgctgacgctggcgattggcgcactcttctacagcagcggcagtattgcccggccggatcttcagccgctggggccgaacgttgcggataaagggtcggcgttttaccactttacgcaacgccagtatgactctgccgatggcgaacgtcactaccgggtatggaccgcagtgccggacaaagccccgcccgccgccggctatccggtactatatatgttggatggcaacgcggtgatggataaactcgacgacgcgtttctgcagcagctcttcgccggctccccgccggtgatcgtcgctatcggctaccagaccgcgctgccctttgataccgcagcccgcgcctgggattacaccccaccgctaaagacgcatgagcctcgcgccgggaaacccgcgctaccgccgcgtaaaaccggcggcaatgatgcttttcgccagctgctgaccgaaacgatggttccccagacggaagctaacctgaaaatagatccccaccagcgcgctatctggggccactcctacggcggattgtttgtgctcgacgcgtggaggaaggcttcgccgttcgggatctactattccgccagcccgtcgctaggtcaggccctgcaatcgcctttgcaggcaagccaaagtcttgatgccgtccgctttcgcgggaaatcgctgtacctactcgagggtgacggtaaagcccgtggagagccgtccgggcacgaggcctcgcttgaggtgttgcgtcaaacccaacagcagcttgccagtaaagggttgaccgtagccttctggcgctaccccggtctgacgcacggtcagatgttcgaggtctcgctgcgttcggcgctgctgcatctttccgggcaggcagcgcttgcgcatcagtaa

SEQ ID NO: 212292 - DNA, 141 bp, Klebsiella pneumoniae
atgacgctggcgatgctgttggtgcttatcagccaccataaagggctgacgctcttgctgatcgtaattattgcgctgctgtttattgcgctcactccgctggtcaaaaaactgttgagtcaccttcacgatcgttcctga

SEQ ID NO: 212293 - DNA, 240 bp, Klebsiella pneumoniae
atgtgtaatgcgtttaacggtattgcgattgtcctctgctttcgtggcataagcagcgtcaccggtttcagcgaggcgatctggcaggtcatcatcacgctggctattatcatatcgacctggtacagcgctaactattttgctgcgctggaagctcgacgcgataaacgacgctatctgctgctggcctgggtggtcatgaccattctgttgaattttattcaccttggcggtggttaa

SEQ ID NO: 212294 - DNA, 444 bp, Klebsiella pneumoniae; identical to SEQ ID NO: 134607

SEQ ID NO: 212295 - DNA, 1446 bp, Klebsiella pneumoniae
atgtcatttataacaaacctgaaccagcaacagagaaaacgacttcatcagatcaccttagtggccaccttcggcggcctgcttttcggttacgacaccggcgttatcaacggcgccttttcctcactgaagcagtacatggcgctgaccccaaccaccgaagggctggtaatgagcgttctgctggtcggcgccgcgctgggcagcgtgtttggcggcaaatttgccgattacttcggccggcgtaaatatttactctttctctcctttgtttttctcatcggcgcgttgctttccgccgcggcccccgatatcactaccctgctgattgcccgcgccctgctgggctatgccgtcggcggcgcttcggtcaccgcccccacttttatttcagaagtggcgcctaccgagatgcgcggcaagctgaccggcctgaatgaagtcgccatcgtcattggccagctggcggcgtttgccatcaacgcgatcattggcatcatctggggccatctgccggacgtctggcgctatatgctgctggtacaagcgattccggccatctgcctgttcgttggcatgtggcgcgcgccggaaagcccgcgctggctgatcagcaaaaatcgtcatgatgaagcgctgcatatcctcaaacaaatccgcccggcggaacgcgcgcagaaggagtacgatgacatctctaccctgatcaaaattgaagctggtaataagtacagcgcccagagcacctttgcgacgattgtcaaaacaccctggatcctcaaaattttgctggtcggcattacctgggccgcactgcagcaaaccaccggcgttaacgtcattatgtattacggtacggaaatcctgagtgccgccggtttttccgaacgaacctcgctgatctgcaacgtgctgaacggtgttttctccgtgggcggtatgctgatcggggtactgttccttgtcgaccgcttcaaacgtaagacaatcatcatctacggtttcgccattatggcaaccctgcatctgattatcgccgctgtcgattacaccctggtgggtgacctgaaagctaccgccatctggctgctgggcgcgctgttcgtcggcgtgatgcagggctccatgggctttattacctgggtggtattagccgaactgttcccgctgaaattccgcggactgtcgatggggatctcggtatttttcatgtggatcatgaacgcggtggtcagctatctgttcccgctgctgcaggcaaaactgggccttgggccagtcttctttatcttcgccgccattaactatttagccattcttttcgtggtctttgccctgcccgagacctccaataaatcgcttgagcagttagaagcagagctgtcagcaaaccatgaagataaaaaatccactcgtctcaccagggaggttggttatgatcgataa

SEQ ID NO: 212296 - DNA, 1329 bp, Klebsiella pneumoniae
atgaaagataattttgtggtcaccattgccggcggcggcagtacttatacccctgggattgtgatgatgttactggaaaatatgtcgcgctttcccctgcgggagatccgtctgtacgacaaccatcaccagcgtcagaagactatcggcgacgcctgcgccatcctggtggctgaacgcttcccacaggtgaagttcagctataccaccgatccgcaggcggcctttaccgacgtcgatttcgtgatggcgcatattcgcgttggcctgtatgagatgcgggaaaaggatgaaaagatcccgctgaaatatggcgtgccgggccaggagacctgtggtccgggtgggattgcctacggtatgcgctcgattgccggggtgctggagctggtcgattatatgcagcagtacgctccaggggcctggatgctcaactactccaacccggcggctattgtcgcggaagcgacccgtcgcctgcggcccgacgcgcgcatcatcaacatctgcgatatgccggtggctatcgagggtctgttcgccgacatcctcggcctgccgtcgcgcaaagcgctgaacgttcgttactatggcctgaaccacttcggctggtggaccagcatcaccgataaagccggtaacgatttgatgccggcgctgaagcgtcacgtggcggagcagggatacagcagcccaaaagaagactttcagcataaggcgccgagttggatcgagacctttaaaaaggtgaaggatgtgtttgccctcgatccgacgacgctgcctaacacctatctgaaatactatctctacccggactatgaagtggcgcattccgacccggagtttacgcgggccaacgaggtgatggccggacgcgaaaaagaggtctttgatatggcccgggagatcacccgtcgcggcacggcggaaggcgcgcatttccatgccggggcccatgccacctttatcgtcgacctcgcctgcgccatcgcctttaacacccaggagcggatgctgttgatcgtcgagaacaacggagccatcgccaacttcgatgagacggcgatggtggaagtcccctgcctggtgggtgttaatggtccggaaccgctggcgatggggaaaatcccgtcattccagaaagggttgatggagcagcaggtggcagttgagaaactggtggttgacgcctggattgagggcagttaccagaaactgtggcaggccatcgccctgtcgaaaacggtgcccagcgcttcggtggcgaaagccatcctcgatgaactgatcgtcgccaacgaaggctactggcccgcactgcactga

SEQ ID NO: 212297 - DNA, 1533 bp, Klebsiella pneumoniae
atgattggagtgaaaaagcttcaggacttttccaaggcgatgatcgggccggtgctgtatctgccagctatcggcctgttgatcgccctgttcagcatgacgaccaaccggctgtgggtggatgaaagcagcgggctctacctgatggggaaatttgtctccagtatgctctgggcgctgatgaaccatcttgggtttctgttctgccttgggctggccagcggtctggcgaaaacccgcaaggccgaagcggccttcgtggcggccatgacctggctgatgtacctggcggcgaataatagctggctaaccctcacccatcgcctggcgaccggaaccaccaacgcgcaactgtacggcagcggacaaacttttatcttcggttttcaggttatcgatatgggcgtattccttgggattatccttggctgcgctgtcgcctttgtccataatcgcgtggttgggattgagtttcgcggcgcgctgtcgatctacggtaacagtaagctggtgctgatcgtgatgctgccgctggttggcatgttcgccatcgccaccgtctatctctggccggtagtggagctgggcatctcggcgctgaccggctttatgaaatcctttggcgccatcggggtcttcctgtacggctttctcaaccggttcctgatccccaccgggctgcatcatctgatctggtcgccgttcgtttttacctctatcggcggtcagctgctgatcgatggtcagaccgtcattggcgctaagcctattttcctggccgaaatcgcccgccaccccgttgacgcgctcagtgattccgcccgtttcctcacctatgggatggtgaagatttttggcaccgccgtcatggcgctcgccttctaccgtacggcgaaaccggagaataagcagcgattgaaagtcacgctgatccccttgattgttacctccgtcctggtggggatcaccgaaccttttgagtttctctttatcttcaccgccccattgctgtggcttatctactccctgctggacggttttttccagatgctggcctggctgcttcacgtcagggtctgcgccactaacggtctcatcgatttcgtcgtctataacctcccggcgggagtcagcgcgacgcgctggccggtgtttgtcgccctcggtctgctggaaaccgcgaccatgtacctggtcggcaccttctgtattacccgtctgcggctgctcaccccgggccgagaaaccgcagccgaagatgagcattcgcaacaggctaatagcgagcatccggataaaggcgcgctggtgattgccgggctgggagggaaagagaatgtctgtgcggtgggcaactgttttacccgtctgcggattgatgtgcgggaccccgcccttatccaacagacgctgttgaaagagagcggcgggagcagcgtgctgattaaaggaaaccatgtccaggttatctatggcctgggagttaacaaaattcgaacggcggtcaacgccagtctgggtgttactgaataa

SEQ ID NO: 212298 - DNA, 699 bp, Klebsiella pneumoniae
gtgatttataaaaagattgccactgaactgaggacccgcatcaacagcgacgactatgccgtcggcgatatgctgcccagcgaaaaagcgctcgccgcggagctgaaggtctcggtgatgacgctgcgcaaagcgctggcgctactggaggaagaaaagctgatcgcgcggcggcacggcagcggaacctgtattgtgcgtaaaagtaactatcatggcggggaactggagggctttaactaccagatgcaggtggtgggcgtcaccaactaccgtaacaaagttattgaatttacgctgcttgatgccccgccagccattgcccagcagttaaagatccagccgggggagaaagtgtattacgtcagacggctgcggctgatcgatgaggtcccaatcctggtggaaaacagctatatccccttcgccaccttcccctggctcagcgtgggtaacctcgagcagtctaagttcaactatttcaaaaaagagtgccatatcaccatcatcgagagccaccgcagctataccccggtgctggcgacccgtgagcaggcggagctgctgcaggtggcgccaaacagcctcctgctgcgggtgcagtcgatcagctacgcccagaaccgggcgatcgtcgatttctcagagatctaccagaacaccagtaagtacaatgtgaagcacattacccgccgctag

SEQ ID NO: 212299 - DNA, 744 bp, Klebsiella pneumoniae
atgttcgatttacacacgatctctttcctgttgatctttattgccgccgggctggtcaaaggggtgaccggcatgggattgcccaccgtggcgatgggcctgcttggcctgctgatgccgccgcaggccgcagcggcgctgctggtgcttccctcgctgctcaccaatctctggcagttactggcaggcccggcgctggcgcagattgtacgccgtctctggcttatgatgaccgggattattattggcacgttggccgggtcctcactgctgatcggcctcaatcctcggtggtcggcgctggcgcttggcgccgcattgatagtctatgccgggtatgcgctctgcagtccggtgtttcaggtttccggccgcgtggagaagtggctgtcgccgctcatgggcgggctgaccggcgttatcaccggggcgaccggggtatttgttattccggccgttccctggctacaggcgctgggctttcgtcgcgacgagctggtgcaggccctggggttgtcgttcaccctttccactctggcgttggcggccggcctcgccctgcacgatggctggcatgatgatgcatggctattgtctgcgctggcgctgttgccggcgctgctcggcatgtggctgggacagcggatccgctcgcgtctcagcccgcagcgctttcgtcagggctttctgttgttcctgctggcgctggggatagagctgatcgcccggggatggctggtctga

SEQ ID NO: 212300 - DNA, 885 bp, Klebsiella pneumoniae
atgcgactggatctggccgatctgcggctatttatcgccatcgtggataccggcagtatcaccggcggagcggcgaatgcccatctggccctggcgtccgccagtgagaggctgcgcaagatggaggccgagatcggcgtgccgctgttgcaccgtcatgcccgcggagtgacgatgacagaggccggggaggtactggcgcgccatgcccgcccgcttcttgcgcagcagcagcgtctgcgccaggcgatgcacgccttcgcctgcggtcagcgggggacgctgcgcctgttcgccaacacctcggcgatgtcggcttttctgccggggaagctcgccgcctggatggcagcgcacccggcggtgcagatcgaaaccgaagaacgcaccagcgcggatatcgtcagctgtatcctggcgggcgtggcgcaggccggagtggtgtccgatgcggtcgaccccgggccgctgcgcctcgatcccgtcgctgacgacccgctggtgctgatcgtgccgccagctcgccctctggccgaaaaagaggaagtggcgtttgcggcggtgctcaacgagccgttggtcgccctctatcagaccagtgcgctacagcagcatatcgaacagcacgcagctgaactcggccaggcgctaaacgttcgggtcaggatgagccattttgcagggctttgcgagatggtggcgcacggcgccggcggggcgatcctgccgcgcgttattgccgagcgttaccggcagcgctattcgtttgccgtcatcgggttacaggaccgctgggcgcagcgccgtttgtgcctgtgctaccaggatgacgccagcctgtcgccagcgatgcgccgcttactggaatggcttcgtcagccttga

SEQ ID NO: 212301 - DNA, 876 bp, Klebsiella pneumoniae
atgagtacattaccaaaggtcgcggtgctgggactcggcgccatgggacacgcttttgccagtaacctgctgaaaaacggctttaccgttgccggctggaaccgttcgccagcccgcggcgaagatttacaggcgcatgggttatctctgcacgccacgccgcagcaggcggtggccgatgccgaggtgatcatcagtatgctcgccgacggcgaggccaccctcgaggtactggcgcaaatcgcgcccgcctgtcagccgcaggcgatctattgccagatgggcaccattggcctgccggagacccggcaggccatcgcgttgttgcgggaacttcagccagcgatgacctatatcgatgccccggtgtcggggaccaaagcccccgcggagaaggcacagatcctggtgctcgccagcggagatagggaaaagggcgccgctgccgaaccggtgtttgcggctatctcccgcgggacgcagtggtttggcgaggcgggcaatagccagaaaatgaagctggtcctcaatgcctggctgatttcgatgatgcagggcatcgcggaaagcgcccagctggcgaagacgctgggcttcacccccgaccagctgtggagcgccctggaaggcggcccgctggcggcgccctatgtcaaagtgaaactagacgccatcgccagcgagcagtttaccccgcagatgcagctggcgcatgccctgaaagatgcccggctggcgctttccctggccgagccgcacaccatgccggggctggaaaacatcgccgaactgtggcagcaggcggcggacgcgggatatgccggagaggatttgtctgcggtatatcagtggctgtcgccgtcgtcaaaagcgtag

SEQ ID NO: 212302 - DNA, 1158 bp, Klebsiella pneumoniae
atgattattacaacagcgctggctaatgaaattgtcgcccgggcaatggcgataattcatcataacgtgaatgtgattgaccatcatggacagatcattgcctcaggtgaacggcatcgtatcggcgaacagcatgaagtcgcccgggaggtaatacgcaccgggaaacgcatttgtattaacaacgccgcggaagccgcgcgttttcacaacgtgcatcctggtattaatcatcccattatctatgacgatcgcgtggtgatggtggtaggcatcagcggcgatcccgcggcgataagccgctatgctgaactggcggtgctcaccgccgaactgctggtccgccaggccatagagatgcgggaaaccaactggcggcaacgtctgcgtgacaccttgttttgtcagtatctggaacaaggggctacgcccgccgggcaagaagcgcttcatcgcctgctggaacttggtttcgattttgatacaccgcgggttccgatcgtagtgaccgtgcaggtcgaacagcatcagttaagcgacatactgagtacgctgttgcgggaattctcgcagctctccggcgtaagtgacgttattttgctgggcagccatgaaatattgatcctcaacgcgctaagcgaagcccaggaaactctgctgcggggcattgagtttgtactgagtaatcagataagccattaccatatcgggattggcgtgcaggcggacagcgccccggacattcgcgaggccattcggttcgcccgctcggtgatcgaagtgggtagcaaagtgcagccgcagcggcagatctactactttcgcgaaatggcaatgctctgcctgttcagggtgctggaagacagctatatggtcaatttttttatcaataacgtacgccagctgcttgagcatgattccggcgaagtgctgctggataccctgagcagctttattgccaataatgccgaaccgggcaaaacgtcgctgctgttggggattcatcgtaatacgctcacctatcggctgcagcaaattaaaaagcatatacagctcgatccgatggtcttcaccgacctgacgcagctggcggtgtcggtacactgttatcgccggctgaatccgcgccagagtgaatggattgatagcttaagctaa

SEQ ID NO: 212303 - DNA, 1176 bp, Klebsiella pneumoniae
atgaagattgttatcgcgctggattcgtttaaaggtagctgtagcgcgcaggccgcttgcgcagcggtagcccagggattgcgccgggttgaccagacgctggagctggtcgaaatgcccgtgtccgacggcggagagggactgctgtcgactctggcggatagtccgttgcttaagggggcggtgtggcaacagcagcgctgtacctcgccttatggcctctccctgcaggcggatttcctgatcctgcccggcgagcgggccattatcgagatggcgcaaagctgtgggctcgaactcacgccgccagcgcagcgggatgtgcgtcaggccagcagctacgggctgggcgaacaggtaaaggcggcgctggacgtcgggtgtcggcatttgattatcggcctgggcggcagcgcgaccaacgatggcggcatcggttttgcccaggcgctcggcgcacgattctggcgtaaggacggcaccctgctgccggctcccgcggcaggtcaggacctggcgcatattcagcgcatcgatttgagcggtctggacccgcgtctacagcaaagcgaaatacaggcctcctgcgatgtcactaaccctctgcttggcgagcatggcgccacctgggtgtatggggcgcagaaaggcgcggacgaggcagcgctcagcgagctggaggcgggaatggcgcattatagccagctgcttacgcaaaccctcggattcgacgtcagcgagcggcccggcgccggggccgcgggcggtatgggggctgcgcttatcgcctataccggcgccacgctgcgtccgggcattgacctggtgctggaactgcttaacgccgacgaccatcttcgcgatgccgcgctgacgatcgtgggtgaaggctggctcgatcggcagagcgcctttggtaaggccccggtgggcgtggcaggcaaagccgcacgccatggcgtgccggttgtggccctttgcggcgggcgtgatgagagcagccggcaattatatcaacaccatattgacgcaatgtggtctatttgccagcgccctatggcgctggcagagtcgatgaacacatgcgaaccgctcctcgccgacgccgcggagaatgttctacgaacctttctgagcgggtggcgcggagaggcacataagcggataactgtatga

SEQ ID NO: 212304 - DNA, 1371 bp, Klebsiella pneumoniae
atgctgtcgcgacgccgcggagtaaacacgactatgacaacaatcaatcacacacctgccggcgaacaacgtggcaaaaagcggctgatacatcgcttctcctgggtttcgctactggtttgctggctaatctgggtgcttaacgcctacgatcgcgagatgatcctgcgccttggcccggtcatctctaaggagttctcgctctcgccggaacagtggggcaatatcgtcgccctgatcatggtagcccttgcggtgctggatattcccggctccatctggagcgatcgctacgggtctggctggaaacgagcccgctttcaggtaccgctggtgctgggctataccgcgctgtcttttatttccgggattaaagcgatcagccacgggctgacggcctttgtgctgctgcgcgtgggcgtcaaccttggggccggctggggcgaacccgtcggcgtcagcaacaccgcggagtggtggccgaaagagaagcgtggttttgcgctgggggtgcatcataccggctatccgattggcgcgctgctgagcggcgtggtggcaagcctggtgcttgccacgtttggcgaaggcagctggcgctactgcttcctgctggcgctgctcgtcgccatcccgctaatgatcttctgggcaaaatattctaccgccgaccgcatcaacacgctttatcagcatatcgacagccaggggttgacgcgcccggcgacgcaggaaagcagccatgtcgccaaaggcgaagggatgaagacctttttacgcaccctgcgcaaccgcaatatttcgctgacggcgggcaataccctgctgacgcaaatcgtctatatgggcattaacgttgtactgcccccgtatctttatcacgtctccggcctgtcgctggcggcgtccgccgggctgagtattatcttcacgcttaccggtaccctgggtcaggtaatctggccctggctgtcggatagctttggccgtaaacgaaccctgatcgtctgcggtctgtggatgagtatcggcattgcgctgttctatttcgccaccaatatgccgcgccttatcgccattcagctattttttggcctggtggccaacgccgtgtggcctatctactacgccatggcgtcggactccgccgaagaacgcgccacctctaccgctaacggaattatcaccacggcgatgtttatcggcggcggcatttcgccattgcttatgggctggctcattcagtttggcggcggctgggaaaatccagcgggttatatctacgccttctttaccatggcgggatgtgcgctgctggggatgttattacagctcatgaccaccgataaaacgccgcgcaaagcacattaa

SEQ ID NO: 212305 - DNA, 879 bp, Klebsiella pneumoniae
atgcgcattgaagtgttactggatttaaaaacccgactcggcgaaagcccggtctgggatgtcgaacagcagcgtctttggtgggtggacagcctcgacgggcgcctgttcgcctgcaacgcgcagggcggcgcgatcaagagctgggacgtgcgacagaaaattggctctttcgccctgcgccagaacggcgaaggcgcggtggtggcgctgcagaatggcgttcatctgctcgacttcgccagcggcgagctgacgctgttgcaccatccggaagcggaccgaccctttaaccggctcaacgacggcaaagtcgatcgtcagggacgctttctgttcgggtcaatggatatgcgcgaagaggaaccgagcggcgcgctatatcgcctggacgccgatctgtcactgcacgtgctgaagaaagacattatcgtctctaacgccccctgctggagcccctccggcgagacgttctattttgccgatacctggacgggcgaaatctgcgcctgggactacaacaccgcgaccggcgatctttccggcgaacgggtcttttgccatgtcgatcgcagcgaaggcggcgcggcggacggcgccaccgtggacagcgaaggctatctgtggaacgcgctggtctacgcgggcaagctggtgcgctataccccggagggcaaggtcgatcgcatcattgagatgccggtgaaaaaagtgaccagcgtgatgttcggcggcgaaaaccttgatgtgctgtacgtcacctccatggcgcagccgcccctgccgcgcttcccggaagataatcagctgcgcggcagcctgttcgccatttacgacctgggcgcgaccggcgtagcggaacggcgcttcgccggctaa

SEQ ID NO: 212306 - DNA, 1338 bp, Klebsiella pneumoniae
atgtccgcaataaatgaaaaggcggtaaacgggacgcagctgcaacgcacccataaaaaaatctaccgccatttgatgccgttgcttatcgtggcgtacatcatcagctttattgatcgtaccaatattggcatggcgaaagcgaccatgtcggtggatatcggcctttccgcaaccgcattcggcctcggggccgggttgttttttctcacctacgcagtgctggagatccccagtaacctgtttctcacccggattggcgcacggcgctggatagctcgcatcatgattacctggggcatcctctcctgcggtatggcgtttgtcaccgggcctacgtccttttacgtgatgcgccttctgctcggcgccgccgaagcgggactctatccgggcattatttactacctcaccctctggtttggccgcgaagagcgcgcaaaagccaccggcctgttcctgctgggggtctgtctggccaatattatcggcgcgccgctgggcggattgttattaagccttgatggcatgtccggctggcacggctggcagtggatgttctttatcgaagggctgcctgcgatagcgctggcgttcgtcgtctggcgcagactgccggataaaccagccgacgcccgctggctggacagcgacgatgtgcaagccattaacgcggtactggcgaaagaagccgaggaaacgcgccatacgccgagccgtttctccctgaaaaacgcgctgtccacccgagtctttttgttgctggtgctgatttactttacccatcagttttcggtttacggcctgagttatttcctgccggggatcatcggtagctggggccagcttactccgctgcaggttggtctgctgaccgccatcccgtggattgccgccgccgcgggtgggatcctgctgccgcgattcgcccgcacggaacagcgttcccgcagcatgctgatggccggatatctggtcatggcgaccggcatggcgattggcgccattgccggccacggtgtggcgctgcttggcttctcgctggccgctttcatgttcttcgctatgcaatccatcatctttaactggctcccgtccatcatgagcgggcatatgctggcgggcagcttcggcctgctcaactgcctcgggctgtgcgggggctttctcgggccgtttattctcggcgcgtttgaggaccgcaccggtgcggcaacgtccggcttatggttcgctgtcgcgctactgattatcggcgcgctggtgtccctgtttctcaaaagttcctcatccccaggctccgtatcggcgaaacaggcccacggcgaaaaagtgtaa

SEQ ID NO: 212307 - DNA, 1191 bp, Klebsiella pneumoniae
atgacccaggctaatgatattgtgattgtcagcggcgtccgtaccgctattggcacgtttaacggcagtcttaaacatacccatcagcatgaccttggggccgccgtcattcgcgaagcgatcgcccgcgccgggattgcgccgcaggatatcgacgaaacgatcgttggcaacgtcgggcaaatcgccgaaagcggttttatcgcccgcatctgtcagctgcgcgcggggatcccgcaggagagcaccgcctattccgttaaccgccagtgcggctccggacttcaggccctggcggacggcatgatgcagctgcaaagcggccaggccgaggtggtcgtcgcctgcggcactgaaaatatgacccagctgccctactacctgcgtaaagcgcgcgatggctatcgcatgggccacggcgagctggaagatggcctgatctccattctcacctggccggaaggcccttatcacaacggcatcaccgcggaaaacgtcgcgcaacgcttcggtattacccgcgaagcgatggacgatttcgcctggtcgagccagcagaaggcgctgaaggcgatcgcggaaggtcgctttcgcgagcagatcctggcccttgaggtgccggacggcaaaaaagcgacccgcctgtttgcgaccgatgaacacccgcgcaacaccccgcgtgaaaagctcgccacgctgcgtccggcgtttaaagccgacggcgtggtgacggcggccaactcatcgggcattaacgacggcgcggcggcgctggtgatgatgacccgccagcaggcggaaaaacgcggcttaaccccgcgcatgcgcattcgcggctgggcggtcgccggctgcggagcggagattatggggtttggtccctctcccgctacccgacgcctgatggaccgtctcaatatagatgtgcagtccattgatttaattgaactcaacgaggccttcgccgctcaggcgctggcggtgatgaacgatctgcgtcttgacccggcccgcgttaacgtcaacggcggcgcgatcgccctcggccacccggtaggcgccagcggtgcgattctgccggtcaaactgatgtatgaaatggcgcgcagcggcgcacgcactggtctggtcaccatgtgcatcggcggcggccaggggatttctatgctgttcgagcgcgaaggcgcttag

SEQ ID NO: 212308 - DNA, 735 bp, Klebsiella pneumoniae
atgaaacttgccagtaaaaccgccattgtcaccggcgccgcacgcggtatcggctttggcattgcccaggtgcttgcgcgggaaggcgcgcgagtgattatcgccgatcgtgatgcacacggcgaagccgctgccgcttccctgcgcgaatcgggcgcacaggcgctgtttatcagctgcaatatcgctgaaaaaacgcaggtcgaagccctgttttcccaggccgaagaggcgtttggcccggtagacattctggtgaataacgccggaatcaaccgcgacgccatgctgcacaaattaacggaagcggactgggacacggttatcgacgttaacctgaaaggcactttcctctgtatgcagcaggccgctatccgcatgcgcgagcgcggtgcgggccgcattatcaatatcgcttccgccagttggcttggcaacgtcgggcaaaccaactattcggcgtcaaaagccggcgtggtgggaatgaccaaaaccgcctgccgcgaactggcgaaaaaaggtgtcacagtgaatgccatctgcccgggctttatcgataccgacatgacgcgcggcgtaccggaaaacgtctggcaaatcatgatcagcaaaatccccgcgggttacgccggcgaggcgaaagacgtcggcgagtgcgtggcgtttctggcgtccgatggcgcgcgctatatcaatggtgaagtgattaacgtcggcggcggcatggtgctgtaa

SEQ ID NO: 212309 - DNA, 1593 bp, Klebsiella pneumoniae
gtgagcagcaaatttatcgacgcccatgaggcggcgcggtgggttgccagcggcgacaccgtctgcaccgtcgggatgacgcttatcggcgcggcggagtccattttaagcgccatcgaagcgcgctttctgaccgcgggcgaaccgcgtgacctgacgctactgcatgccgcggggcaaagcgatcgccagcgcggtatccagcactttgcccatccgggtatggtgacccgccttatcggttcgcactggggcctggcgccgcgctggatggcgatgatcaacaacaacgaagtggaagcctggtgcctgccgcaggggcagatcgttcatctctatagcgcgatggccgccggactgccggggcggctttctcccgtcggtctcggtacctttgtcgatccgcgcatagagggcggaaggatgaacgcccgcacccgcgaacgacccaatctgatcgagcacgtcacgtttcgcggcgacgaatatctgttttatccggctcttcctctggacgtggtcattgtgcgcggcacccatgctgatgaagacggcaacctcacgaccgatgaagaggtgatgaagctggaagtcctgcacgccgttctcgccgccagacgcttcggggcgaaggtgctggcgcaggtgaaatatcgcgtagcgaaaggctcgctgcatccgaaaagcatcaccgttcccggcaacctgatcgacgctattgtggtgtgcgaagagccgcagacggatcaccgccagacttcaagctgggccttcgacccagcgctgtgcggcgatatccagctgcccgccgcgcagaatgcgccgctgccgctggacctgcgcaagcttatcgggcggattgcctgccgctatctgacccccggctgcgtcatcaatctcggcaccggtattcccaatgacgtgattggcgccatcattcacgaggaacagctcggcgagcaggtcaccatcaccgtcgagtcagggatctacggcgggcagcaggcgggtggcgtggatttcggtatcggccgtaatctgagcgcgatgattagccaccaggatcaaatgctctactacaacggcgcaggagtcgacatcacctttatgggcgccggcgagatggacccgcacgggcacgtcaatgccacacggctcggcgcatcctgccccggcgcgggcggttttatcgatatcacccagaatgcccgccacgtcgtgttctgctcctcttttaccgccaaggggctggagatcgcctgtgaacacggggcgctgcatatccgccgcgaaggcgaagtgcgtaaattcgtcgccggggtaaaccagatttcttacaacggcgaactggcccgcgccaaaggacaaaccatgcattacgtcaccgaacgggcggttttcgaactgcgcccggaaggaccggtgctgacggaaatcgcccccggtatcgatcttgagcgcgacatcctggcgcatatggattttcatccggcgatcgccgcggatcttcaggttatggacagccgattgttcgccccgccgccctgcggtctcgcggaacatctgtcccggaattcatcctctgactcataa

SEQ ID NO: 212310 - DNA, 1557 bp, Klebsiella pneumoniae
atgaacagcacctccgccgacttccagaatctgtaccaggccctgagccacagcgccgcccgcagcccggatgccctggcgctggcgtttgaggatcggcgctatctgtaccgcgattttcatctgcgggtacagcgggcgatggcgcagcttgatcgcggctggtcgctgcgcaaaggcgaccgtattctgctggcctggggcaatcaccccgctttttgcgaagtcctttttgccgcgctgggtttgggcatcgaagtggtgcctttcagcaccaagcttaagcaggccgaaagcgaggcgctggtaggccatatcgctccccgggttgtcctgttcgatgcgaccgtacaggactggctgaaaaacacccctgacgcgcgtgcggtttcactcagcgaatggcaggcgctctgccttcccgaaccgctgacccgcccgccggtcccggttaaccgcgacgatacggcggtgatgatgttcacctccggcaccaccggagagcctaaaggggcgattatcacccacaataacctgctctgcgcaattgacgcttatacgcaaaaactgaatctcaccgccgcggatagcaccatcctggcggtgcctatctatcacatcaccggcctgtcggcgctgctggcgctgtttattagcctcggcgcgagcatctggctgcagcatcggttcaatgccccgcaggtgatcaccaccctgcgcgagcagaacattacctttctgcacggctcgcccaccatttttatccttctttgtcaggctgcgcgtgagcagagcgccagccatcccggcgattttccggcattgcgcacgattgcctgcggcgcgggccacctgagcgatggactgatcaaggagttaaaaaccctgttcccgcataccgcgattcagccaatctacggcctcaccgaaacgacctcgcctgcgacgatttttccgggcgacgtctggggcagcgataaatgcggcagttcaggtcaggcgatcccgggtctcgccattaccatccgcaacgatcgccagcagcccctccccgccgggcaaatcggccatatctggctaaaaggcgatgtggtgatccgcgaatactggcagcacagcgagcgacgcccgagctgcgatgcgcagggctggttttgtaccggcgatctgggctatctcgacgacgaaggctggctgtacatcaaagaccgcagcaaggacatgatcaatcgcggcggcgagaaaatttactcactggagctggaaaacattctctctacctatcggggagtacgggaagttgccgtcatcccgacccccagcccggtctacggcgaagagcccgtggcgtttatcgtgccggatggccagcatcacctgaccagcgaagagatcctcgactggctcaaggtcaaaatcgcccgttttaagctaccggcgcgcattattttcacccgtgctttaccgcgtacccacaacggcaaagtgagtaaacagcagctcaaaacgcgtctcgcagaatccatcatcacgctatcaacggaggataaaaagtga

SEQ ID NO: 212311 - DNA, 390 bp, Klebsiella pneumoniae
atgcgcgaacttatcaacacgattgctcatattggctatcaggtcagtgacttaacgcgttcgcttgccttctatgaaccgctgggctttcagcgccagcagcggtttagcaagccatcgccacagggcactattgaagttgcgttcctggaaatggcgggcgccgtcctcgagctgtatcagcttcccgctggaacgccctttgacgcccctcgctgcggtatcgatcatctggcgctggaagtcagcgacctggatgcggtgcagcagcggctggcggcgctcggttatccgctcgatgaagggccgatagaagaagacaacgtgcgcttcctgcttattcgcggccccgatggcgaacggctcgagttcgatgcctgtgaacgctaa
